United States Patent Application Publication US 2004/0123340 A1 - sequence listing, part 3

SEQ ID NO: 9496 - DNA, 469 bp, Gossypium hirsutum
  Clone ID: LIB3828-034-Q6-K6-B1
ctatttattggggtcgtgtgtaaattttgggggggtgcactttcgttcaattcgaagtttttcttagataccatttgttgaataatcaacagcttataggtccctgaaaagacttttttacactggggggggtgttagggtttatgaaaccaaagcacaaaggggactcaccagctgactctgacacaatgacacctgctctaaggactacttctgaaccggcaatgttggtcccagagtcaattgtagatgacaatgtggcaagaaaaaagcttatctcaacttccactatggcatcaccatcaagaaacaattgtcacaaatacaaggacgatttccgtgactccggcggactacaatatcaaaccatcaaagaccttgacgggtatgctgtatacaatgcctatgatacaacaagtactaacaacaactgattgaacattgctgaaaacatcagatcctatgctac

SEQ ID NO: 9497 - DNA, 516 bp, Gossypium hirsutum
  Clone ID: LIB3828-034-Q6-K6-B2
ggatgatgttgccttaccatttgttgtgcctgcaccgaaatacgggccaaaagacagaccagcaacagcacaggctatgagggaggcattagctgaactttcagaacgagaagcaaagagccttgcagaagtagaaattacagaaaatatgacggaagaggtatcagatgaagacaacgaggaagtaaacgaagcaactaattatgttatagaggagaaagaagaagataaaacatatgccgagaagctctggagccaggttgactcatctcagagttcttgatccggcctcagcatccattataacctgtaacattcgagatttttatggccaagacattatatatcccttgtctaattcattatgtatcatatatatactgtaaaaggaaaaagaaaaagaccacagcctagtgcttttattgtaggaatatgaattacatggatcgtgagatccattttgtaagattttgattgttcatacctgttgtacgaattgctttgatcttcactttg

SEQ ID NO: 9498 - DNA, 544 bp, Gossypium hirsutum
  Clone ID: LIB3828-034-Q6-K6-B3
ccgggtcgacctcgcgtccgctttactttccttgccatcccagggcgggtcccaggcccattaattcatattcctctccatcctcctgtacttgctcttcctcctcctgcatggaagccccccctcaaggttacaggagaaatgtgggtatttgtctcatcaattcctccaaaaagattttttcttttttttcactaggcggggcgagtgcttggcaaatgcctcagggtgggattgctgacaatgaagatccaaaaggtgcagccctcagagaattaaaggaagaaacaggtgttagctcatctgaaattctcgcagaggtaccttattggctgacatacgacttcccaccagaagtcagggcaaaactgaaacatcagtggggatcagactggaaaggtcaagctcaaaagtggtttctccttaaattcacggggaaagaagaagaaatcaatcttctgggtgatgggagtgagaaacctgagtttggtgaatggtcttggatgacaccagagcaaatagttgagcatgcagtggatttcaa

SEQ ID NO: 9499 - DNA, 547 bp, Gossypium hirsutum
  Clone ID: LIB3828-034-Q6-K6-C1
cgggtcgaccttcgcgtccggaaaaaattgcaaaagcttcacagacgggcctggtttcaatggcaatctgcttattgtcttccctcgttggcttcgcctatgccagggggctcggcaacaagttcgtcgtactcggcaaagtttattgcgacacttgccgcgtagagttcgaaaccaaactcagcgaacccataccaggggggggggtgaagttggagtgcaggaaagaaggggacgaaactgttacgtacagccacgaagcggaaacagacgcaaacggtgtgtacaagatcccggtggaaggcgaccacgaggaacagatttgcgcagtgagcacagtgagcagtccaagggcagattgtaacgagaagatggaagcatttgaaaaggcacaagtggagttaactagcgatgatggcttagctgagcctagcagaaaggctaacaatcttggcttcaagaagaaggtagctgtccctggatgtgctcaagttcttaaagaaatgggcttccctcttaccgaataaggatttttaaatcccaagat

SEQ ID NO: 9500 - DNA, 526 bp, Gossypium hirsutum
  Clone ID: LIB3828-034-Q6-K6-C2
attttctctctctacactttcactttctctctctagaaaccctctcgttaaacagtttattataaaattttcaaatccttaataaaatcaccagcaactctctgatttgaaaactgagggttttctttttttctgcaatttttttggaactgaagatttactaatggttatgggggataacgaaggaaataaaaagagagcccgggaagagacagaggctaactcggtgcccaatacaaaactcgctcgagttgacttggacgataataagggtcccgactccgactctcccgaggctactcgtgtagaacctgatcctgatgatggagaagataatttgccggaaacaaggcgtataccggaggaattgctgaacatcctcgacgattcagatccggttagtggaccagatccggcgattcagggactcgattcggtcatcaggagtttcgaagaagagatcttatttccggaacaggtggctttaccggaaacgatattggattccggagagtcgaggccggag

SEQ ID NO: 9501 - DNA, 351 bp, Gossypium hirsutum
  unsure (1)..(351): unsure at all n locations; Clone ID: LIB3828-034-Q6-K6-C3
nnnaaaaacggggaaaaatataagtctgatttattcatgccatgcatacattcatgacttaaacacaaagatcatgaaaagagaagggttacatagtagccaaataaaattgattttaaaggatcaccgacagattctcattggggggtctaatttcacagcttttaacaccaaaaaataatcccaaaaaaaagtaaaaaaaaagagagaaatcccatgtgccggtaatacacaaactcgccggaaaattcatttccggggaaacccctccccagaagtatccaaaaataatctaaactggtggtagtggtagaaatgaagaatattacatcgaaactagatcattccana

SEQ ID NO: 9502 - DNA, 436 bp, Gossypium hirsutum
  unsure (1)..(436): unsure at all n locations; Clone ID: LIB3828-034-Q6-K6-D1
ataacaatcatcggcggatccccattcaccggtaattaaacgcgggtccctctcatttccggtgcgtttaataatcactttatacgccatggacatgaagaaggtctccaccgccatcattgttgctgccgcctcaatgagcgtcgtcatggctgccggtgcaccatctcctgccccttggggcggtggttctagtcctagctcctctcctggttccgctccagcatcaggaccggattccagcgtggctgccgctaccttgcctgttcttggatcattggttggggcttccattgtttctttgttttcttacatgctgcagtaagctacatgtatgaaaaatcaacatgtcaacgaatattttattattttattatttttgaaagaaacatgtgatgaatattgaaaaaaatgaataaaatggagctttgnntna

SEQ ID NO: 9503 - DNA, 541 bp, Gossypium hirsutum
  unsure (1)..(541): unsure at all n locations; Clone ID: LIB3828-034-Q6-K6-D2
cgggtcgacctcgcgtccgcttcgatttgcttcaccaagcccatcgtgaccactaccggtattcttctttatcagggttcccaaactccgccctctttgccatggggggttgccccaacttatcacgttcactggtccatgaaacatgccaggactatcagaatgaacttgacagcaaatgcagcttggcctaatccggggggatcattccactatggggcaatcacctgntgngaggacaattttattggctaatgaattagtcgagataaatgacaaattgcggtatgccgttaacgggatatcctatgtggatccagccactccattgaagcttgcagactggtttaacatccctggtgtcttcgtcttgaacgggaccaaggatgctcctccttcagggcctccaaccttgggtgtctcggtctttggactcaccctccatgactttgttgagattgtcttccagaacactgaaaaaaccatccagtcttggcatcttgacggttataacttctttgttgccggatatggcggtggc

SEQ ID NO: 9504 - DNA, 517 bp, Gossypium hirsutum
  Clone ID: LIB3828-034-Q6-K6-D3
cccacattttctgtcgggccaaagagcgttacagaccaaaatattatttccaggaaaatccaccggtaatctacgaactctctctcgaggtgacctaagattcgcccatattcccaattttaaaaatcacccgacaacaacaaagattaagaaagaagcacaccttatctcattagcggggggggatagaatccttcatagacaaacaaactattatcttttctcaaacaatccgtaacatgcttacttctccaggtggtttcgctgatgcggagcatggggaaatcactttccccgaaattaacgctgtcattcttgataagatttttcagtcttttcattaggctcttaaatattccaaaagtaaagatactgacttccacatcgaacccgaactgactctggagctgatgatagctgcgaattatcttcatacttatccaattacttccttttcatattatagaaaatactacaagtctgttctcttgcccgaaagcaatatgtatgtcgcgtg

SEQ ID NO: 9505 - DNA, 527 bp, Gossypium hirsutum
  Clone ID: LIB3828-034-Q6-K6-E1
cgagcaactggtttgggcccaacgtgtgtgattacaaaggtgtttattgtgtccgagcaatggatgaccccaaattaaaagttgtggctggtattgatcttaaccatgctgacatcgccggttaccttccggtggagttggggttgctgaccgatgttgctttgatacatttaaactctaataggttttgtgggatcatccccgagagcttatccgagcttacacttatgcatgaatttgatgttagtaacaaccggttcgtgggggctttccctaaagttgtactgtcatggccgagcgtgaagtatattgatctccggttcaataattttgaaggttgtttaccacctgagctcttcaaaaaggatctggatgcattgtttctgaacgataatcgcttcacttgcaacatccctgaaacaatcggcaaatcgaccgtctccgttgtgacattcgccaacaacaagttcaaaggatgtattccacgtagcattggaaagatgtcgaacttggacgagatcattttc

SEQ ID NO: 9506 - DNA, 549 bp, Gossypium hirsutum
  unsure (1)..(549): unsure at all n locations; Clone ID: LIB3828-034-Q6-K6-E2
cgggtcgacctcgcgtccgntncaatctccaggggccactgtttctatcgattcagtataaattttcccaaaagttttcgattcataacaggaaaacccaaaaaaccagaaatatcaacaacaaagcaaaacgatgaagatcatccctttaattttgatgggttgtggaggtgttggacgccaactcctccaacacattggggcctgcagatcacttcacgccaagcagttttttcatttacgagttgtgggagtatctgatagtaaatcactaatcattgcatcagatgttaaacaaaaagagttggatgataacattttagctgaagtttgtagggtaaaatcagatggttcttcattgtccaaaattactagcttaggtgagtctcaagtgttctccaattcagaatcaaggacaaaagtgctagacattgcatcaattcttggaaaatcaacaggtttagcccttgtagattgctcagctagttctgagacgattggagtgctaaaggaaggggtcaacttgggttgctgtgttgttctagcaaa

SEQ ID NO: 9507 - DNA, 502 bp, Gossypium hirsutum
  unsure (1)..(502): unsure at all n locations; Clone ID: LIB3828-034-Q6-K6-E3
aagatgggggggagaggnattagcaggagattagtccccgctacactgctgagacctatagttggcgtgcgcacaattgcaacaacttcagtaatgaggttgcgcaatttttagttggttccaacattccggactatattttgcagtttcctaatgaaggggggagcagtccgatgggtgcacttttaatgcccatgatacagaatctggagacaactttgagggctggtgctgttcctcaagtaccccaattcaggccttctgtatctgctcagtcatcccagtccacaaccatcagtgtgaacgggtcctccattagtagtcagccaaaagaggtagataataaggtgaaagatggggagcaaccaaaatctgaagaagtcgagacatcagaaaagacagtaccaccttctaaaccaaccggcacaaaggaaaaatcaaaaagcaatggagctgcagcagaccctcttggagatgctcgagccaaggtccaagaggagat

SEQ ID NO: 9508 - DNA, 531 bp, Gossypium hirsutum
  Clone ID: LIB3828-034-Q6-K6-F1
acgaagttctggaatgaatatggaaagtccattaaactaggtatcattgaggatgcaaccaacagaaatcgcttggctaaactccttcggtttgagagcaccaagtcagatggtaaattgacttcactggatcagtacatctcacgaatgaaatcagggcagaaagatatcttctacattacaggaattagcaaggaacaattggaaaaatctccattcttggagaggcttaagaagaaaaattacgaggtcattttcttcacggatccagttgacgaatacctaatgcaatacctgatggattatgaaggaaagcagttccaaaatgtatccaaggatggcctaaaaattgggaaagactctaagagtagggaactcaaggattcatttaaggaactaaccaaatggtggaagggtacacttaagactgaggatgttgatgaggtgaaaataagcaaccgtttggacaacactccttgtgtggtcgtcacatcgaagtttggatggagtgctaacatggagagactcatg

SEQ ID NO: 9509 - DNA, 545 bp, Gossypium hirsutum
  unsure (1)..(545): unsure at all n locations; Clone ID: LIB3828-034-Q6-K6-F3
ccgggtcgaccttgcgtccgcatacttttcgnctttcacctgataaagggggaggtcactcactgtgctttgggcatacatctcaaagacaaacaacaatggccggggtgcagacgaatgatcgttttctgcttcatcacgctggtggtgtgttctttcttagttaaagccagcaacgccagtcaattttttcatgggggcggggatggcggtgctcatcctggcgatagccaacattgcgaagatacccccgaagatgaagacgacttcgatgacacttttaagctcgtcaacaacatcaagataaggatctagttgggcgccgcccggactccatttctttggttcttcactcaataaaaatgggtggttgcgaagctctatctctgtcttccatgctttctgagatctttcagtttggcatcctttaatttaccagttgttgcagtttctttctttttttgtttttctcgtgtttggatttggaagggtttaacattgatttggttgttgcatgcttttttataaaactgcatttctcaaaa

SEQ ID NO: 9510 - DNA, 541 bp, Gossypium hirsutum
  unsure (1)..(541): unsure at all n locations; Clone ID: LIB3828-034-Q6-K6-G1
ccgggtcgacctcgcgnccggngtttttatcagcactaatttcacggggtcgagggtcgtgttctgccagcgccaaggttaaaagtggggaatggtgaagatggggggcctaggaatgggagatggaattttaataacaagaaattggtggagccaactaagattgaaagatgggctgttgtcaatttctcagcacgaggggagacgaatagccttgtccgggatctgattagatgtggagacatgaaaggaattcgaatagaccctccatttgatgtgttccaagaatccaatcagaacagacgttgctctcctttggttagagtcgagaaaatgtttgaggatatccaatctaaactgcctggagctccacagtttcttctttgtcttttacctgataggaaaaattctgatctttatggtccatggaagaagaagaatctttctgagtttggcatagtcactcagtgcatggctccaactagggtcaatgatcagtaccttacaaacctgcttctaaaaatcaatgcaaagcttggag

SEQ ID NO: 9511 - DNA, 544 bp, Gossypium hirsutum
  Clone ID: LIB3828-034-Q6-K6-G2
cgggtcgacctcgcgtccgcacaagtctgttccaaaatgaaatgcgggtaccatatagaatgggccttgaacaccagctccaaactctttcgtggttgcctaatggagacagtagacacatagccttgtcagatgacccaaatttgattccacacagagatgtggagtgctctgcaagttcctcatttggaagctatgggggttattttggcactggtaaaagttcattaccatcgagttctggacaagagaacagcatcctgaatgatttgagcggaaacggatcattgcagctgcaacttggtggacagtgccccctcttctcttacaatcttaatatactgaatgatcccaaattcccacctgtggcggagatgaacttcaatgaaactcccgcagattatcaggttaatggtgccctacaaggtcccagaactggatttgatactgccccaggtagttgggcttccacttctggctcttgtgctgttaccatgtttgatgagccattatatacccgactccaacagcattgagcaatcca

SEQ ID NO: 9512 - DNA, 547 bp, Gossypium hirsutum
  unsure (1)..(547): unsure at all n locations; Clone ID: LIB3828-034-Q6-K6-G3
ccgggtcgacctcgcgttcggagaattttaangaancaanggatgggggtggacacttccctgaatctggtagaggaaggcgctggaaaaatccccttgaacaggggaggcactggcaacataataggaggaaattggcattctcaacagttggaacgccagattatattgcccctgaagtattgttcaataaaggatggggggtggagtgtgactggtggtcacttggtgctatcatgtatgaaatgcttgttggttatcctccattctactctgatgatccagtgactacatgcagaaagattgtgcactggagaaatcatttgaaatttccagaagaagcaaggttgacaccagaagcaaaggatttgatttgtaaattgctttgtgatgttgaccataggcttggtacacaaggagcggaccaaattaaagcccatccttggttcaaagatactcgttgggacaaactctatgaaatggaagcagcatttaaaccgcacgttgagggagagtttgatactcaaaattttatgaaatttgatga

SEQ ID NO: 9513 - DNA, 529 bp, Gossypium hirsutum
  Clone ID: LIB3828-034-Q6-K6-H1
aatgccttgtcaccagtcctgtattctatactccatttatgaggcatatatggacatggatgggtgcttcaccagccacaaggaagaacttttattccctgttggaagctggttatagttgtgttattgttcctggtggaatacaagagacattcctcatgcagtatgattgcgagactggattcctaaagtctcgaagaggatttgttcgtatagccatggaaatgggttgtccactagtccctgtttttgcctttggtcagtcatattcctataagtggtggaaaccgagtggaaatttcttcctgcagcttgcgagggctatcaaattcgtccctattttattttggggagttcttggaactcccttaccctatcaacatccaatgcatgtggtggtgggtaaacctattgagttgaagaaaaatccacatcctaccgccgaagaggtccttgaagtacaagcccaatttgttaaagccctacaagatctgtttgccaggcacaaggctcgggttggatattctga

SEQ ID NO: 9514 - DNA, 543 bp, Gossypium hirsutum
  Clone ID: LIB3828-034-Q6-K6-H2
cgggtcgacctagcgtccggttttcatttattatgactatgataccaaagcgggtgtgttttcatttgccctgattctacaggagatgattgaaggctgcccgccatttcttacaaagcaagataacgatgttaccaaggcatatgcatcaaaggagcgtccgcctttcagagccccatctaagtattacgctcatgggggggaagagttaattgaggattgttgttttgagaaggctgctaagcgaccaacatttagacagataataaaaagactggaatcgatccatgacagtttcagtcataaaaagcattggaaggtattctttctttcctcaaaactaccattcccttgcactcatcttctctgagtttgcatgcatgcttgtacattgtcgtattgccagtggaaacactgattgtcaaagaagaatgcaaacaattattcagatattgtttgagggaattagttgcttcttgataaacagacaaaaataaagtatgatctacaattgaaatttgaggaatacatcaacttttgtaa

SEQ ID NO: 9515 - DNA, 445 bp, Gossypium hirsutum
  Clone ID: LIB3828-034-Q6-K6-H3
gggatgtttaccttttcatagctagcggtatagatccagtgtctgctgatagcatgggaaggcgattttttccaatcgggtctggggggccagggaattcgtctaatagttcatcttcatgctctgaagaagtgaatccggaaactgagaaagggaaaaggtgatttctcaatggaatacggggagcattcaccggtttctcaggacgtgcaaatgcaattagtgagcactcacaaggccgataaagctgaataaataacgaccaagattgcttgaagattgaagaactgggcacaagttgtataatctgtttttattaattcttgctctatttattgcagccatatgtttgatcatcttttaagtcgcaaaaattttgaaagcacaaaataatgtgcaaactgccttttctcgaccatcatagatgaatgtatcttttcttagc

SEQ ID NO: 9516 - DNA, 549 bp, Gossypium hirsutum
  Clone ID: LIB3828-023-Q6-K6-A10
ccggaccaaaactccgggtcgacccagcgttttgcgacacttgccgtgttgaattcgaggataaggggggggaacccattagtggagcagtagtgaaattggaatgtaggaaccgtaccaacgaagcgattacattccagagcccagaaatagtggctgacagtcacggagactaccacattatagtggaaggcgattatgaggaatcagactgcgacattgctttgtgaggagtccaagggctgattgcagtgatcccaccgaagcgtggagaaaatccagggtggttctcaccacatttgatggtctcagcaataaactgcgttttgccaacaatcttgggtttaagaaggacatagctcttcctcagtgcactcgaattcttaaagagatgggctattatgagcttagtcaagaagatggagactttgagcttagtcaagaagatggagactttacccattcgtcagaactataatatgtattttcacttcaactttctttaaaagctcggcattagcccataataagaattgagtcattattatt

SEQ ID NO: 9517 - DNA, 594 bp, Gossypium hirsutum
  unsure (1)..(594): unsure at all n locations; Clone ID: LIB3828-023-Q6-K6-A11
tgaacgtggagcgtggggggggcgcattgatattagnnncttgtggaagatttgagaacgaccaaatactacgtgcagctgtgattgatgcgcctgnngacaccgtgactttatcaagaacatgattactggtacctcgtatgctgattgtgctgttttgattattgattggcggggtggtggttttgaggctggtatctccaaggatggtcagactcgtgagcatgctttgcttgcttttacccttggtgtcaagcaaatgatttgctgttgcaacaagatggatgccactacccctaaatattcgaaggctaggtatgatgaaatcgtgaaggaagtctcttcctacttgaagaaggttggatacaaccctgacaagattccatttgttcccatttctggttttgagggtgataacatgattgagaggtctaccaacttggactggtacaagggccctacacttcttgaggctcttgaccagatcaatgagcccaagaggccttcagacaagcctctccgtctaccacttcaggatgtgtacaagattggtggtattggaactgtcccagttggtcgtgttgaaactggtgt

SEQ ID NO: 9518 - DNA, 529 bp, Gossypium hirsutum
  Clone ID: LIB3828-023-Q6-K6-A12
aggtgatttgagctttttgcgtttcttgttcggtttagcaaattgcaaagatgcagaacgaagaagtcaaaattggatctttacattccccgaaatgctcggccactaacaggctcatcacctcaaaggatcacgcatccgtgcagatcaatgtcggtcatttggatgagcttggcagatacactggcacattctccacctttgctctttgcggctttgtccgtgctcagggcgatgctgatagcgctcttgacaggctttggcagaagaagaaagccgaagtcaaacagcagtagtcgggtaccgttttattacccgtctctgaacttggtagggaaaattcttggcaatgactgttaaattctagtttgtttaggtagataaagttgaaagttgtttttgtcaaattgttgatgtttagtctcttgcattcgatatatatacacacacatacataccaatgtcatgctcatgctcagtttttgatactcacatctaaatctatgatgatatttttatgctttagaat

SEQ ID NO: 9519 - DNA, 515 bp, Gossypium hirsutum
  unsure (1)..(515): unsure at all n locations; Clone ID: LIB3828-023-Q6-K6-A7
ccaggaccaaacaaaggcttatcttnntgccggaaaacaaacttnagggatgnngccgaacnntcttgccgactaccaacnnatccaaaagggagnntccacccnttccacctagtncnncttcgtctaaggggggtggcatgtcagtatatttttgtgaaaacccccttactggcaagnagcgcatcaccctcgnagnnttggaaagggttctgataccgattggggataatgtcaagggccaagaatccaagnacaaggnaagnnggatccctccagnnaccaacagaggnncttatctnnttgcaggtaaacccagcttgaagaatggccgaacctctttgcggattacanacnnatccagaaagaagtctnnaccctccacnncttgtccnnttcgtcttagnngggtgggatgnncagatctttgtaannaaacccttacnntggtaagaccattcanncccttgagnngtggagagnnctccgatacctatnnncgataatnngtcaag

SEQ ID NO: 9520 - DNA, 607 bp, Gossypium hirsutum
  unsure (1)..(607): unsure at all n locations; Clone ID: LIB3828-023-Q6-K6-A8
tgcaaatcagttttcaaaactctattgggggcgtaaaccccaaacgaaccctcagaatggcaccaaaagccgagnaaaaagccagcaggggaagaaaccagcggaggagaagaaacagtagctgagaaagctccgccggagaagaagccaaaggcaggtaaaaagctaccgaaggaaggcggggcggctgccggagacaaaaagaagaagaggaccaagaagagtaccgaaacctacaagatctacatcttcaaggtccttaaacaagttcatccagatatcggtatctcaagcaaagctatgggcattatgaacagtttcatcaatgacatctttgagaaacttgctcaagaagcttcgagactcgcgaggtacaacaagaaacctactattacttctagggaaatccagaccgctgttaggcttgtacttcccggtgagctagcgaagcatgccgtttctgaagggactaaagctgtgactaagtttacttcgtcttgaagaaggggatttgtacgtttgtctttttagttagggtttgctttaagttgatgtttggagattgtgtattggaagatggatttactcgatcctgatgtgattatat

SEQ ID NO: 9521 - DNA, 555 bp, Gossypium hirsutum
  unsure (1)..(555): unsure at all n locations; Clone ID: LIB3828-023-Q6-K6-A9
cgggtaacaaggccnncgctctcgggggggggggggggggctggaaaagttaaacttgtcattcactgttgtttctgatggtgggttaagagaactgtctggactaacgtctcttaaatcacttaatctggatgctcgtcaaattctttatgctggacttgcagctcttacaagtgggggggggctgactcatcttgatctttttggagcccgtatcacagattctgggacaagccacttacgaaatttgaagaacctgcgctccttggaaatctgtggtggaggattgaccgatgctggtgtgaagaacattaaagatctttcatccctgtcgctgctaaatctgtcacagaactgtnacctgacagataaaactttggagatgatctccgggttgacaggattgatctctttgaacgtttcaaattcccgtgtgacaagtgctggattgagacatctaaagcccctgaagaacttaagatctctgaccttggaggcttgcaaggtcccagcttttgacataaggaggcttcagtcagctggtctccctaatct

SEQ ID NO: 9522 - DNA, 595 bp, Gossypium hirsutum
  unsure (1)..(595): unsure at all n locations; Clone ID: LIB3828-023-Q6-K6-B11
gcgttcgtaaagttgcaccatgnatcttaaccgggggtgggggcgggattgataggcaattcacctcgcttattaagctcggcaatggaatgatgacttctggcaatggaatcaacacnnattttcgatgaaaaccaagatgtaccttttcacgaacggtgcccatgcaaccaatgtttctggtagggggctgacggaaatgtcagtgcatgcgataccggaacactgggcgagaacaaggtgaaaggaaagatcgtgtattgcctagggaattcaggacaagattatacgatcagaatgctggacggggcaggaaccataatggcagttgatgaaccaacagactattacttcctcactcttatacctgcaaccattgtgcttcgtaacaagaccggcgataggcttgatcgatatataaactctaccaagaaccctcaagctgtcatatataagactagaactgttcacatgaaagctccctttgtagcatctttctcatctagagggcctcaactaacaaacttcaacattctcaaggtaaaatcaatcttctcgccaccctctcccattgctctttattttcatttctaac

SEQ ID NO: 9523 - DNA, 444 bp, Gossypium hirsutum
  unsure (1)..(444): unsure at all n locations; Clone ID: LIB3828-023-Q6-K6-B12
gcttttgcttttcccttcccggttcctccggaccttncgctnttcggcttccctctcaccgcaccggggccgnntcatttttttagcggttcaacatgcggcggnntggaactttcagtttcgtgaatcgggctcncttcaacgtcatattcttttttttcagacttcanaccgnctcagggggtgttggggcnnncggggangggatgagattgnggatttagagtgatagaagacgatgaggggcggtttacctattagccgtcgatcggttttcatgttgcgtctcgttgggatcgggacgcttggatcggctntgatcaagatccttctctgcggttgcgtcgtgtttcgtctacttgcaatcgcgaaccgtaaccgcgtctgttcttcgtttttgggatggaccggtgactttgcccgctcttcttctccaagggaaga

SEQ ID NO: 9524 - DNA, 609 bp, Gossypium hirsutum
  unsure (1)..(609): unsure at all n locations; Clone ID: LIB3828-023-Q6-K6-B7
aaatcctcgactccaaaacagcggagttccgcagcgtccgtacgatttagggctttcctgagaccaacgatcacgatgtaccgtactgcagcctctcgcctccgagctctcaaaggtcgcacgagccatatagcacctgcaaggtttgcaagttcaagcactgttgctacaacatcatcctcttcaggtggcctcttaagttggctgactgggagtcaatccaagtctgtaccatcactagatttccccctaccaggtgttgctttaccaccttcattgcctgattatgttgaacctggtaaaactaagattacaactcttccaaatggcctcaaagttgcttcagaaacctcagcaagtcctgctgcttcaataggattatatgtcgattgtggttcaatctatgagtcaccagcttcttttggggtctcacacctacttgagcgtatggccttcaaaagcacgacaaaccgaagccatttgcgtattgtgagggaagtagaggcaattggtggcaatgtaaatgctgcagtttctcgggagcagattggatatacctttgatgctntgaagacttatgttcctgaaatggtagagttgcttattgat

SEQ ID NO: 9525 - DNA, 569 bp, Gossypium hirsutum
  unsure (1)..(569): unsure at all n locations; Clone ID: LIB3828-023-Q6-K6-B8
tctcaaatctcttcgacancaaaattgggccaaggatcgatttcttagattttcttgaaaacaagaaagtgaatcttgattttcttgttctctcgtgtatgcatctaaggccttgctaacaagctcttgaatggtcccatttagtttggaccgcatttgtcgtgcctttgatctcgttattgggccttgtggaatttgagcccatcacgctcttgaacttggattgggcctttatgactcgtatcaacgaccttatcaactacaagggcttagcaacgaaggccaatttaaggtcactcaacaagtgcgcatcgccttttctatcggcaagtatcaagacgaagtcatgtgcgacgtagtgcctattaaagtctgccatttgttgctaagagaaccatggtaaagggatcgaaaggtcacccacgatggtcgtaccaataggtattctttcaagcatcaagaaggaaagtcaccttagtccgctcactccggaacaagtccatgaggaccaaatcaaactgaaaatttttgtattaaaaanaanaaanaaaaaaaaaaaaatttttnac

SEQ ID NO: 9526 - DNA, 482 bp, Gossypium hirsutum
  unsure (1)..(482): unsure at all n locations; Clone ID: LIB3828-023-Q6-K6-B9
ttctcgacgcccgtgagcagnacaccgaccatacaggtatnntccccaactgcctgggtgcagcantccttatnntgacattcgnacaactggcgggnatgggtggaacctgagggtcggnagatttgggtacatggcatnntaccttgggcancagctgttagggggagggtggtatttcccctaaccgatccctcaagggatgaagtacagctgtgcccggaaggtgtatntgacttgcggncntcgtgcaaggcatgnccnnaaggcctccacctttcagcagtgtaatttaaaataatgcttactaaatctgtnctccatattctggtgctctcggggagaagagaagggtgagtaaatagcttgagttccaaatgtctcttactggaaatacaaatattcttcggaccattttgtcttgtgctcataaacaaaaaagcggggcggtccgcttctagtaggatcccaatgcttacgtt

SEQ ID NO: 9527 - DNA, 564 bp, Gossypium hirsutum
  Clone ID: LIB3828-023-Q6-K6-C10
ggtcgacccagcgttcgtaaaactgcaatcttaattctgtcggggggggtggggggacgcttcagttcgggtgttaggttgctccaggaacagcccaatgatgaccccaaaaacatggacgctattcctcccattgatgcactcaaccctaccgagttgaatggacccggtgttggcattcacgaagatcatgttggcccaaaggtgctgaaattggtactcttggttttggttttgaaggtggtcctgataaatgttgttcttctggatgttccggtaattgtaatcctggtggtttcgttctaccatttcctcaaattccagaaatcccaagaattccagaaatcccacaaatcccacagatcccacaaatcccacaaattccactatttccacagatcccacaagtcccacagatcccacaagtcccaaaaatcccactaatgccaggacagtcgggatgtgagagtggagagtgttgttcttagggttgtggtgggacttgtgctgagtgtggttagttctagtgctcattaggatgtttgtcagtctgtaaactgttaa

SEQ ID NO: 9528 - DNA, 524 bp, Gossypium hirsutum
  unsure (1)..(524): unsure at all n locations; Clone ID: LIB3828-023-Q6-K6-C11
gcgttcgcatatggaccgctggacctgcggtcacaggggggaatgtgaagcctaaattagtggcaaacaaaatccagctgcatgttctgcccctatcccagcaaaacttaccccgaccgcttaatcaatagcagaggtataattttttttgatgacgttgtaactcttataattatagggatggggcaaataaattttgttttttttatattctatgttataaagaatatttttcatgnaaaaaaaaaaaaaaaaaaaaaaaaaaaaaaaaaaaaaaaaaaaaaaaaaaaaaaaaaaaaaataaaaatttaaaaaaaataaaaaaaaaaaaaaaatggatgtctgtgtaaaagttaattaaaaaaaaaaaagggggcgccccttttgggggccccttttttccgtccccgttctggcgccttctttgttttttgctcggggccccccgtctttcctcttcccgcccccggtgttttttcccctcgcgggggttggggaaaaacccctggcgtttcccccctttt

SEQ ID NO: 9529 - DNA, 535 bp, Gossypium hirsutum
  unsure (1)..(535): unsure at all n locations; Clone ID: LIB3828-023-Q6-K6-C12
gcgttcgcggncgcgtgggtggaggcattatggggcgtggggcgcggaccctaatgtgaagagcggattagctgtttctgcactactttacgaacatggttcacctaatgatttcctatcccagctcataagcaacattacagatatgactgatgaggtccaagaaagatcaatgggggtgactggtccaaaccttatagaaattgatggcgtggagtattatagatacattggttctttgactgtccctccttgcactgaaggtgtcatttggattattaacaagaagatagcaactgtttcgaaggaacaagtacatgcaatccgagaggctgttcatgattatgcagaacaaaatgcaagaccagtgcagacacacaatgaacgagagatggaacttcatagtccccacagctgaaaatctaaaacgctgtatttactacaccattttacgtatcttatatgctatatgagtgttggtatatttgagtattaaattctaattaaataatgttttataatatttatttctacc

SEQ ID NO: 9530 - DNA, 624 bp, Gossypium hirsutum
  Clone ID: LIB3828-023-Q6-K6-C7
gcgttctttccccacagctcattcattgagtttgcgtttgcatttttggtaaatgcgcaggacccgatgatcataaaaggagtgttcaggagatatgaaagatggaacccagtgcatccgacggtgggtgcgttttggggtatgggaataggcattggttgtggtgttggatggggacctgggttcggccccgatgtcgttggttatgttggagctggctgtgggattggtttcagtgtgggtataacccttgctggtgttggcattggtctccctgcaaattccttctttcaacttccataccatggtctcttctatactctctcttttcccattgcctattgaaatcttaatttgtgttgatgtattttcgcttccaaaattccagcttttcaaagaaccagaacccgggcactggatcttgtctctaccaaaattacacctgctcttgcctcctatagaattgcacctcctcacctctccgaccttcaaagagaagccactacaagactctcaaccatgttgccttcacaaactatctctatttgggaaggtgtagaaagatttagcacccgctttttccatcctcgcaaaggtttaaaaaattaggtgctttatatacat

SEQ ID NO: 9531 - DNA, 614 bp, Gossypium hirsutum
  unsure (1)..(614): unsure at all n locations; Clone ID: LIB3828-023-Q6-K6-C8
taaccaagnaaaacccatctgtgggtntggaaataataacatctaccatcacttaaaggaaaactcnnctcccctaaaaaacaccgctgggaaaccaccgctgcggnnctggtggcgganataggnctgaaacgtgatgaatggagtgaaggagctgtttcaagcttgcttgaggcttacgaaaacaggggggtgcttagaaatagagccaaacttaagggtcatgattgggaagatgtggctcgctatgtttcagctcgagctaattgtaccaagtcgccaaagactcaaactcagtgcaaaaacaagattgagtcaatgaagaaaaggtatcgatcggagtctgccacggcggatggatcttcttggcctttgtatccacgccttgaccttttacttcgtggcagtactgcacctcctcctcctccgttactgccaccacagctgcaaccgtcagcggttcctcaagctgctactccaatttccactaaccctcctttcatgactttaccagagccctccatgatggtggtgctacagcaacagcatccaccaccaccaccaccacatttggctcctcagcttcctggaactacacaaaattcacacgattc

SEQ ID NO: 9532 - DNA, 578 bp, Gossypium hirsutum
  unsure (1)..(578): unsure at all n locations; Clone ID: LIB3828-023-Q6-K6-C9
cccggttcgacccagctttttccagtttagccgcccagctgcggggggggggtggaaaaaaacatgaanagttttcccttattgttttgtgcgtggtgactctagtggtggtgttattttcgggtgcagaggcagcgccagcgccgaaatgtgataacccctttgtttttagctcatgcttgaatgcgttctaggggggggctccatcagctggttgttgccaaaagatgaaggaacaagcaccatgctattgcgagtacatgaagatagaagatgtcaaacgtgtttttgacagagttgagattgcgaaaatggctaaattgtgtggagtttcatattcttccacctgctagaatcccgtttggtttcatttgactatctctggctgggataacctagcatctcaataaatgaaattttatttgaaaactatttttttactcataatttcgactataatgtacttgtgttctttttttttagaatgatactggtggtttgctattatttacctttaatctccctttttttttctcttttttttttctgttttgtcctttctttttttcccttttttt

SEQ ID NO: 9533 - DNA, 591 bp, Gossypium hirsutum
  Clone ID: LIB3828-023-Q6-K6-D10
ttctcggagtgaatgtcgtgtctgatttgtggggggggggaacagaaaaagcacaaggggacgtgcagagttgaaaagcagtgctgattaggtcagtggcgtcgggcgatggcggaagataaggcagagacacaagcgttcactcctggtcccggatatcggcaattcaaggggagagatgaattgccctccaacattttgcacggcacattagcttgtgccatctggattggatctatgcattttaacgtctccctcctccttttctccttcctcttccttcctttctccaaattccttttggtggttggagtgcttttgattttcgtcgttcttcctattgatcataacagtaaatttgggctgtttttggccaggtatatatgtcagcacatgtccagttattttccagccactcttcacgttgaggacatcaacgacttccatcctggccgtgcttacgttctcggttatgccccacattcagtgttgccgatcggagttgttacgttggctgaacgtacaggttttatgcctttttccaaactgaaatgccttaccttcagccctgtattttacacaccatttttg

SEQ ID NO: 9534 - DNA, 577 bp, Gossypium hirsutum
  unsure (1)..(577): unsure at all n locations; Clone ID: LIB3828-023-Q6-K6-D12
ggnttctgggnactgtatgatcccggggggtactgggtgtggttttgtgactaccagtacaatgagggagaatacagtttcatttgtcacaatgaacaaggttggaggattcctgcagagaatggatttggcccgcaagtatgcatttgggaagatgttggtgatcggtgctaaccctgcatgtcaaggtgaaaggactatggcttttccgtgggcaagagattcctcaatttgtgattgacgagtgctatgacatggaactctacgagtggaagaaggttgacctgtcagatgcagcccagaaggaacgggtgaatcagatgattgaagactgcgagccatttgagggagagcctctcttggatgccaagtgctttaagtgataatatgtcttggttttatgttgcttgctactgttctgcctgtgagggttttttatacggncacttttttgtatttttgacttatttttcttttctcccctttttgagtcttgttcagccaacattacaattaagttttaaattctcagatgttgattatggaatgtgttttttttatgttattaaggatgcat

SEQ ID NO: 9535 - DNA, 519 bp, Gossypium hirsutum
  unsure (1)..(519): unsure at all n locations; Clone ID: LIB3828-023-Q6-K6-D7
cgtctctgttaaccttttaaaaanacataaaagatggtaaaggttgccttttgttgtgttcnttattggcntttggtacttctcaatccaattagtagtggggacccaggatgaggaggctatagatgaggaagtatcccnaggaagccgatgatgtacttttgagttcaggggcaactaatctcgttgaaaactttaaaagctctgctggagataattcccagagtgtggatgggccaacttctggcttaactgatgagattgcagcttctccagaatcggaagtagaagttgctattgaatctgctggtgggatgaagcgtaaaatggcataatagacccctatgatgtttagaaagatacatcatacctaaatttttttaaagaggtggctaaaactgttaaaaataataaaaacaatgcaaaaaataataaaagcaacatccatagtttttgtaaagtatgtaatgcaataatttaattttaaaaataaaaaaagttaccttaacatttattggt

SEQ ID NO: 9536 - DNA, 587 bp, Gossypium hirsutum
  unsure (1)..(587): unsure at all n locations; Clone ID: LIB3828-023-Q6-K6-D8
tgccccgcgtccgggnagctccgcgggggggcgggggggcccntagattcattctcttctctcttctattttcgatctgcaggtgctcttccttaaaccatctcctgatctccaacgccgagcgtagaattgacttgagctcccacattgtcaaagtttacttgactttgaagggggggggggcgggtagtacgcctacttcagaggtgtttctttctttcccacccactcaagttgatcatctcgcagcggttgaagcattagtaactaaaggaaagaggaagaagactacgttagtccgtcttgatgtaaaaccaactgaactgcctgatgcacctaatgacgctaaatattttgcgatttatttggaaaatccattaaagtctggtgaaagcacaaccctagaagtattgtacctgttgacacactcccaagaaccctttccagctgagatagcccaatcagaatctcaattagtatattatcgtgatagtgcgttgatattgtcaccatatcatattaagcaacaaacgacttttattaagacaccaagtactaaagtgggaatcgttcacaagggtgggaac

SEQ ID NO: 9537 - DNA, 533 bp, Gossypium hirsutum
  unsure (1)..(533): unsure at all n locations; Clone ID: LIB3828-023-Q6-K6-D9
gcgtttgggcnnctgtggggattcttgcggcggggggggatgtgcgtancaaatttgcnccctggtgttactattgaagaattaagagacctttttggcggcnttggncangttggaagtattaagctgaagcgtggcttttttgatcattggccttggtttnttaanntntacacagatgagggggggggccagaaggtgatgcngttttgtcttatgaagatcctcgggctgcccactctgctggcggtttctttctctttcctgtcttgagaggctctncnntcggngtggctttggcagagaagactgcgcccactgtatatgatcatggcggtggtcaaggtggcttcggtggtggtggcgtctggcgcngggttcgtttctgagatggtggttctggtcctgttcggcttctccatggcgggngtcgttcgcgcccattctgtgaggcttctcgcttcctgtgttttctgcccctccgaatgtggtctttgggtttctggttgtgtttgtttgttggggtgtgttct

SEQ ID NO: 9538 - DNA, 320 bp, Gossypium hirsutum
  unsure (1)..(320): unsure at all n locations; Clone ID: LIB3828-023-Q6-K6-E11
tgtcaaggaacgnnataaatgctgggccccgatccatgnatcaatagcaaatnnaaatgagtgcattcgnnccgtgtggttcatttcggcaacccagcgtaaagccatgtntatattatatttacatcannttgtgcattttaagaggggggtggggaggcagnaagaagaactgagnnctggtaccttataanntcggttcttcttccacgtgnngccatgagnaaacctgnatnnttgatnntggatttagctttnnntttcctcnnnctatggttnnngccaagttcaaagttcatttnntgtttattatnntcgat

SEQ ID NO: 9539 - DNA, 240 bp, Gossypium hirsutum
  unsure (1)..(240): unsure at all n locations; Clone ID: LIB3828-023-Q6-K6-E12
gcgttcctttctggtgaatgcctgtcggtgggggagcttganagagagcttttgattataaaattcatggggtttctattactttgcatggtgactgtncttcctgtntcatttggaacttacagtttttgtttcggntttaaatgggtttgaattatgaataatttcattgtttgttggggggggggggggnnnnnnnnnnnnnnnnnnnntttttttttttcttttgggggtgaaaaa

SEQ ID NO: 9540 - DNA, 604 bp, Gossypium hirsutum
  Clone ID: LIB3828-023-Q6-K6-E7
ccccgcgtccgggaagttgatcggagccaagtatttcaaccgagggtacaaggcttacctcggcgaaaagctcaacgcgacgttcaagactgttagggaccacgagggtcatggttctcatactctatcaacagctggtggtaactttgttgatggggctagtgttttcggttatggaaatggtactgcgaaaggaggatcgcctaaagctcgtgttgcagcttataaagtttgttggccccctgttaatggtaaccaatgtttcgatgcggatatcatggctgcttttgatgctgcgataagtgacggtgttgatgtgctttccgtgtcgttgggtggcgaaccggctgagttttttgaagacggtattgcgattggttcctttcatgctgttaagaaagggatatctgttgttttgtctggtggaaactcgggacctgatcctggaactgtttcgaacttgtcgccgtggatgtttacggttggtgctagtacactcgatagggagttcactagttatgttgaactaggcaataaaatacgtctcaagggagccagccttgctgcagcaacattgaaatcgaaaacttcttatccattgatc

SEQ ID NO: 9541 - DNA, 620 bp, Gossypium hirsutum
  unsure (1)..(620): unsure at all n locations; Clone ID: LIB3828-023-Q6-K6-E8
gtcgacccagcgttcgttcggnttcgagctccctctctaggttgctgtgggcatggtggagaagtataatttcaacaactcattaaggtgtggaggaaagatacagtgaaaggcaaggagattttgattgcaaaatcgtgtggaaatccttcggttcgggttaactgggatggcattcatttcacagaagcggctagcaggtggatatttcaacaaatcgccagtggctccttttctgacccaccacttccattgaaaatggcttgtcatttgtcaaaggatggagcaatgaataaattcaggtgaaggaaatcaatgtttagaatgcagagcgacattgcaaatacctgaaaatccaaattatggtgggagttcgtataataatcctactctcggttctcatctacaaatacatccggaggtgataataagtacagaggcatatgttagagaaatgaccaataatggtgaagattctaatcagaacgttgaagattttagtgacctcgatgttgatgagctttcggacaatatcgatgatgaaggcccgaaggaggttgaagatgttcacggctcttcattcagtaacccgaatatttatacaaaaagattgctgatgt

SEQ ID NO: 9542 - DNA, 583 bp, Gossypium hirsutum
  unsure (1)..(583): unsure at all n locations; Clone ID: LIB3828-023-Q6-K6-E9
gcgtttctagnatttacttctctatttgtgggggggggggggggttgtaaaggaaaatgaaccaatcccatagcattagcttccaagctggccaggctcagggccnngctcaggagaagacccgtcagacggtngacanggctnngggaaactgctcattctgctntggnttcaatgcagcagggggggggggggatgctggctntttgcacatggcgcagctgatgccttgagggatacaatggggntactaacatatgaaacttctcctgcttgatcccaaattaccacacctctcgggctcctatctatctatctttttgtntntctntctctatgtctgtctgtgtgcctttttagcttttgatttttgctctggcntgtttttcttccttttgcttctctgtcttgtgcctcgaggttngattttccctcgctttttcagttttatatgaattttgggttgtcctgtgggtgcctgttgcttttctgtgtggctacgtttccgtcttcctttgctcttgtcctcttggtttctctttcccttccgttccttcgctgggctgttcggtgtttcttctgt

SEQ ID NO: 9543 - DNA, 610 bp, Gossypium hirsutum
  unsure (1)..(610): unsure at all n locations; Clone ID: LIB3828-023-Q6-K6-F10
atccagtgtgctaatcaagnataaaatttctgatttgaaagtgagttttactggttttgggagaattgcagcgagattctgtgagaatgatggaatctcaaatggtattagcagaatatggagtgaatggctagggaaagaagctcctataaatgatgataggttcaaggttccaaagcatgaatttgctgttgttacttttccttataattgtgatctaggcagaaagggattgcttgatgatgtcaaatcactattaacatctggttcaacaacagaattgggtaatggtgaagctgccattaggaaaaggaagaagtcattttctgacccagaggatataagtggatctttaagtaatcagtatgattcatctggggaagattcttcagcttcaaatggtgattcttcaagactggcattagatcgatatgatgaccagcttctgctcacaagattcatttcaagtaggactataaggagagagttgaggcggcaacagcgtatagctgctgaaagaatgtgtgatatctgtcggcaaaaaatgcttcctgataaagatgtagcgaccctcatgaacttgaataccggaaaacttgtttgcagtagt

SEQ ID NO: 9544 - DNA, 572 bp, Gossypium hirsutum
  unsure (1)..(572): unsure at all n locations; Clone ID: LIB3828-023-Q6-K6-F11
ccagnaaggtgganaatggatctgggggaaggactggagagtccacatccgagtcataattctggcatggaagcttcgccaataccatcaccgtcctcaactgcagcagcgccgactccggctttgatcctaacaaataccggcaagcgtatcgatagaatgggaagtagcctcactgggggcagttccggtattacagaccactcagcaacaccatcaccctcgtctatagcaaagacaccagctttgatcctatcgaattctgctaagcgaattgacagaatgtccagtagcctcaccagttccagttctggtactggagaaccctcggcgactccatcaccatcatcaacagcaaatgcccctgctctggtcctgtcgaattccggcaagcgcattgatcaggctgccaaaaagaaatacgtgaagcaggtaactggacgccataatgacactgagctgcacttgtcagcgcagcgtggtgatttggctgctgtaaagcagattcttgccgacattgattctcagatgatgaagactgcgagtggggaagatttcgatatggaggtttc

SEQ ID NO: 9545 - DNA, 350 bp, Gossypium hirsutum
  Clone ID: LIB3828-023-Q6-K6-F12
ttgttggtggggtgtgggttttttttttttttttttttttttttttttttttttttttttttttttttttttttttttttttttttttttttttttttttttttttttttttttttttttttttttttttttctttttcccccccccttttttttgggggggggggtttttttttttttttcccccccctttctcttctttttttttttcttttttttttgtttcttcttttttttttctctttttttttttctttctttttttcctttggctccccctttttcggtctccctttttttttctcttttcttttcctttttttgtttttttttttttctttcttttttttt

SEQ ID NO: 9546 - DNA, 617 bp, Gossypium hirsutum
  unsure (1)..(617): unsure at all n locations; Clone ID: LIB3828-023-Q6-K6-F7
ggttgctccagnacagcccatgatgaccccaaaaacatggacgctattcctcccattgatgcactcaaccctaccgagttgaatggacccggtgttggcattcacgaagatcatgttgtcccaaaggtgctgaaattggtactcttggttttggttttgaaggtggtcctgataaatgttgttcttctggatgttccggtaattgtaatcctggtggtttcgttctaccatttcctcaaattccagaaatcccaagaattccagaaatcccacaaatcccacagatcccacaaatcccacaaattccactaatcccacagatcccacaagtcccacagatcccacaagtcccaaaaatcccactaatgccaggacagtcgggatgtgagagtggagagtgttgccgtcagggttgtggtgggacttgtgctgagtgtggtcagcccaggtgcgcatcaggatgttgccaggctgaaactgtaaagagcaaagggatagaagaggttatggacagtgaacccagtccaccaaagtagagagatgataccatattaagatgaaataacgaggaagagttggttgtcgtcttattaattatacaaaataagaagtaatga

SEQ ID NO: 9547 - DNA, 609 bp, Gossypium hirsutum
  unsure (1)..(609): unsure at all n locations; Clone ID: LIB3828-023-Q6-K6-F8
ttcgcttgntctcctcttggtccgnagtcctggggggcgggatcagttcataccagtttgcagggacttgcggcccttgaaaaaaaccattcattgttaatagttttttttntctccaacagnnaatcgaataggggaaatccgaacacagnaaaggaagctaaaagaaacaatgtgccggagtggggaaatagaagttgtgggggggttttgtatttcctgtgcttgggggttataatccctagcctcgaggctcacatcgcagaatatgatgactattggagggaaagggaattgcaagctaaagaaaacctggagaaggcttacaatcctaacccagaggaagtcacccagcatttcaacgaccatgtggccagaaacttgatggggtttcgcaccaattccacaaggaggatgttgaagaagcgtaagggaggtccttgtgaagcaaccaaccctatcgaccaatgctggcgatgtgaccgcaactgggaaaagaacaggaaaaagttggctgattgcgcacttggatttggccgtggtactaccggtggaaaggatggacccatttacgttgtcactgatcctaccgatgatgttcttaaccca

SEQ ID NO: 9548 - DNA, 436 bp, Gossypium hirsutum
  unsure (1)..(436): unsure at all n locations; Clone ID: LIB3828-023-Q6-K6-F9
gcgttctgaagngnaggcgtctgtnctaagggggggagatgcttaattctgtcggtgtttttatctgtacgcttcagttcgggtgttaggttgctccaggaacagcccaatgatgaccccaaaaacatggacgcttttcctcccattgatgcactcaaccctaccgagttgaatggacccggggggggggttcacgaagatcatgttgtcccaaaaggtgctgaaattggtactcttggttttggttttgaaggtggtcctgataaatgttgttcttctggatgttccggtnattgtnatcctggtggtttcgttctaccttttcctcaaattccagaaatcccaagatttccagatttcccacggttcccactgatcccacaaatcccacatcttccactgnctccctctgatcccacgggtcccacagatccca

SEQ ID NO: 9549 - DNA, 582 bp, Gossypium hirsutum
  Clone ID: LIB3828-023-Q6-K6-G10
cccagcgtccgctttgccttaataatacctgagtaggtatattataatttccaggtatcggcaacagccacgctctccatttattcccattttgattttgcacaaatttttttttttaatttccaggatgcttttacaagtttttctttaagaaaagaaaaggatcagatttcttggatgaggcagtgatttattattattattatttttaagtgagaggggatttgggagatttaatcgtaaaataattggtaaaaattgaaagaattaaattgaagcgagtgtagtaagtaaaaaaataattagaaaatggagacacagatcgattactttttcaagctactgatgataggagattcaggcgtcggaaagagtagtcttcttttaagttttaccgccggtacctttgatgaactatctcccactattggagttgactttaaggtgaaacatgttactgttggaggcaagaagctaaagcttgcaatttgggatacagctgggcaggaacgattcagaacattgacaagttcttactacagaggcgcacaaggggtcgttatggtttatgatgtaacacga

SEQ ID NO: 9550 - DNA, 328 bp, Gossypium hirsutum
  unsure (1)..(328): unsure at all n locations; Clone ID: LIB3828-023-Q6-K6-G11
gcccgntatgcagctcatacaataccaagctgacgcgtggacgcattgctacgggctcatcagagattatngaaaacagtttgatgatggcttcctcgatgtttatttcgcacttctcagtttcctgttttagttcaatcgttaactcttatggaatgggtaaatttcactttggggcagcagagggtagctggaataaagaaacctattattccagctaccctctgtaagctaatccgctgcaacatgccagctcgctctggagccggggattgtattagtagaacacgtgaaacttgtaagaatgcagatgctatgtatttggatc

SEQ ID NO: 9551 - DNA, 560 bp, Gossypium hirsutum
  Clone ID: LIB3828-023-Q6-K6-G12
aatatgttgtgttgctgttggtgactagtggtcctcaaggaatttacatgcttaggttgcatgtcagatacatttccaactagaatgagtttatgatttatgaatgtttgaattactagtttattgtgcctgcggttaagttctcaccgacttaaatagaggtctagacaaaaattcctcctttctcttatcataaagaaattttttatagttgtctaggttaaaatagtccccttcataaactgctgtgatttatgaagtcatctggccatcttctctgatcttaaagtggtggatgaagagggcaaaacattcttgaatatttcttgtctcatgaatgcagcttatatcttaattaccaatcaacattggtggaaagagatgttcaatgaaagatttggaatatgtggcacgcctgctacaagagtaatttgcattctcttcttcatgctcttggtattaatcagttttataagtgatatgcagcaccaacttccccaagcgatctcactgtgaagaaagttgccgacaaacttgctagttttgttgccaaaaatgga

SEQ ID NO: 9552 - DNA, 587 bp, Gossypium hirsutum
  unsure (1)..(587): unsure at all n locations; Clone ID: LIB3828-023-Q6-K6-G7
gcgacaactacngacgaanaggagaacccaaacgatgtcgcaatgttccatcggagctttacaacaacaacagcagcagcaaaagtttgtcgttgtcggttatgcccttacctctaaaaaaacaagagctttttacaaccaaagttcgaaggtttagccaggaataaggggatattatttgttgcaattgatcaaaatagacctctctcagaccagggtccttttgatattgtattgcacaagttgacaggaaaagaatggcgccagattcttgaggattatagacaaacacatcctgaagtcacagttctagatcctcctgatgctatacaacatttacacaatcgccaatcgatgctacaatgtgttgcagacatgaatttatctacctcctatggaagagttggtgttcccaggcaattagtcattaaaaaggatgcatcttctattgctgatgctgtagataaagctgggttgatactaccccttgttgcaaaaccattggttgctgacggaagtgcaaagtcacatgaattgtcacttgcttatgatcagtactccctccagaaactagaacctccacttgt

SEQ ID NO: 9553 - DNA, 372 bp, Gossypium hirsutum
  unsure (1)..(372): unsure at all n locations; Clone ID: LIB3828-023-Q6-K6-G8
acacctcgcgcgcggggggggggggcgtgccaaaaccgagttggggggaatgcagatggatcttatcaggcgttgggtttgtttcgntntgcacccttttactgtgggcgagtttatacatgcatttttcttttttttttttctccgagnnncgactatttgttgtggaggtttactctctttnttttttcaatccatagtttcttggagggatggattatatctgcttcatcgaggaaggtatgttcgtcgagtcgttctctttcgtgtctcgagaaaaactcggttgtgacatgcttagtttttacaggtttgtgcgtatagtctttgtggtggggaactatggagctgtgtttcgtcgttggtttttgg

SEQ ID NO: 9554 - DNA, 553 bp, Gossypium hirsutum
  unsure (1)..(553): unsure at all n locations; Clone ID: LIB3828-023-Q6-K6-G9
accagtttcaagttctttctctttcccaggnnatctgggnaaaaagtggnagggaaagnntagagaaaaatgtaccctcttgtaaataccccgatgttntgcaagnaatggaaagtcttctttataagaatctgaaagtcaagtgcatcgctagaggtagtgngatgcaatagntatggaaattctttccagcgatgngaaatcagaaaaaaggagaagctttttactatgataccccattttctgaagaaactggaatttgggtacctgtgtctgtccctcctgtgtctgaaaattaacatgaagaatgggatagaggcctatgtctgaatggaggatactttcctgatgatggtgtgcgatcaaatcagtttattgaagaaagttaggatctgaccatgtgggatgtgctcagtgagatgttaatagccgctcgaggcaaagtgagttctatagcttcaggtgatgttcaaagatttgggatcacttggttatccagccctcttcttgaacaatcttggtaagagatggctcaaacgcttgcaaaaaacta

SEQ ID NO: 9555 - DNA, 515 bp, Gossypium hirsutum
  unsure (1)..(515): unsure at all n locations; Clone ID: LIB3828-023-Q6-K6-H10
tcccaattcagcagggtacatgagagatgggtaaccagggatgtantagatgtagtttgcattgtattttttattaccaagatttacttgattaagaaaatgcattgtattttttattaccttgcaatgtgtatagtcataggcaagttcaactagtcagtctatttctcatatgtattatggattttagttttgattctaaatttttatttttactttaatatttgcgacaacttttctaaaaaaaaaaaaaaaaaaaaaaaaaaaaaaaaaaaaaaaaaaaaaaaaaaaaaaaaaaaaaaaaaaaaaaaaaaaaaaaaaaaaaaaaaaaaaaaaaaaaaaaaaaaaggggggggcgggttttaaaggatcaattttttcttccgcgggcttgcaaggtaatagtttttttttggggcccccaaaattaaattaacgggccggggtttaaaaacgtggggacgggaaaaaccttggggttcccaaattaaatgcctttggagaaaatccccttt

SEQ ID NO: 9556 - DNA, 175 bp, Gossypium hirsutum
  Clone ID: LIB3828-023-Q6-K6-H11
cccacgcccgtccgggccgcccttttgtgtgggggggtgtgagtgtaaaatttaaattttttattaaattttttgaattgaatcgaattttgctaactccactctaaaaagcctcgtgacaagcagttatacgaaaaaataatcactaccgacaatgtagaacttgagtttgact

SEQ ID NO: 9557 - DNA, 586 bp, Gossypium hirsutum
  unsure (1)..(586): unsure at all n locations; Clone ID: LIB3828-023-Q6-K6-H12
ccggttcgaccccgcgtcctactcttntacccctttcttnactcgaatgcggcgttttcttttcactgaaaatgtcttgctgtggtggaaactgtggctgcggttctggctgcaagtgtggcantggctgtggaggatgcaagatgtacccanacctgaacgttgcccanatgaccacaactnatactctggttcttggtgtancaccccanaaagcacactttgagggatctgatatggaattcnnngcttanaaccgctgcaagtgtggaaacaactgcacctgcaacccttgcaattgtaaatgattanaaaccaaanccaaanctccctgnaagcananacccctttntctttaaaaaataatatnttttgttgtttatgtgtttttaaaataaantanccatgncttntcntannttttnccttttncccccacnnttacttnntgcttgccaatanatatatttatntactaatatttacttntttttctttccantntnaccatctcttctatctcangatatattgtgactattacataattaatntaannaaatcattcaaattcctaatgaatgag

SEQ ID NO: 9558 - DNA, 614 bp, Gossypium hirsutum
  unsure (1)..(614): unsure at all n locations; Clone ID: LIB3828-023-Q6-K6-H7
ggnagtttttcgatcgtctttagaacaagggttcttggattgatatgatgatggggcttttagctcttcttcttctcttagcttttgcgtcactgcagctcttttgcttcgccgatgatgataataatgacgatgatgtggttttttatgaatcatttgaagagtcatttgagggtcgatggatcgtctctaataaagatgattataaaggtttatggaagcattcaaagagcgagggccacgaagactatggtcttctggtgagtgagaaggcaagaaagtatgcaatagtgaaggtggttgatgaaccggtgagtctgaaagatggaaccaccgtgcttcagttcgagactcggctccagagtggaatcgaatgtggtggtgcctacattaaatttcttcgtcctcaagaggcgggttggaagcctgaggaattcgacaataaatccccttactccatcatgtttggacctgacaaatgtgggacaacaaacaaggtgcatttcatatttaagcataagaatcccaagaatggggaatatgttgaacaccatcttaaatacccaccttctgtcccatccgacaagctcactcatgtctacactgcaaccttg

SEQ ID NO: 9559 - DNA, 573 bp, Gossypium hirsutum
  Clone ID: LIB3828-023-Q6-K6-H8
ttcagaaaatatggttcgcgcctacgttgtggtcgctaaggatggtagtgggaaatatgattgcatcaccgaggccttagctgaagttccattgaatagttgcgatcgatttgttattcacattaaggctggtacttataaggaaaaaatcattgtgaccaaggagatgactaatgttatgtttctcggtgatggcccaaccgagaccatcatcaccaatggtgttaactgctttaaggataatgttaaaacattcgacactgctactgtcggtgtggatggggctggtttcatggccaagggcgttggattcgataactcagcaggacccgatggtcatcaagcagtggcttttagggcatcctgtgataaggtcgtcatgctcaattgtcatttcactgggtaccaagacaccctttacgctcacaaaggaaaacaattttatagggattgtctcatcagtgggacggtggacttcatcttcgggaatgctgcaagtgtgttccaaaactgtcagatcgtcgtgagaaagccaggggagaaccaacacaacatggttactgcacacggaaa

SEQ ID NO: 9560 - DNA, 586 bp, Gossypium hirsutum
  unsure (1)..(586): unsure at all n locations; Clone ID: LIB3828-023-Q6-K6-H9
gcgtttcgtattaatccattttccggtttcacatgggcgcaatggtgaaatcttggttttttccttgctgcggcatggtaaattgattcttcattttgaccgtnttattggacttattgcataaattggtcttggtagatattttaaataggctgattttttttgcttaagcccatttttcgggtttaacagttttgtcctaagcttcctgaatattgaatgagactttgggcttgggcaggttgtgtggtctttgcacggttctagatgaaaagcaaccctggaagctaaatatgtgcccacttatctatcaacaccaaataagaaataaagaagatntatctaaaaaatattacatactgtccaatgtggtccttatgcatgccagggattaaataanttcaaatcaaatgattaggcttactgttttggatgttgttcagtctttgaagcaagatgtgattgttgacctcgttgagcaatgccgttcttacaaaaaacgtgttgttcttctcgtgaatcatacatcatatgagcaacttttatgtctgggattagcgctcaatgatcaattgcagcatgttct

SEQ ID NO: 9561 - DNA, 615 bp, Gossypium hirsutum
  Clone ID: LIB3828-024-Q6-K6-A10
cactttctcccaatacacccccctgttgcctgagggacaccaaaatggcgaactcagcatccggaatggcagttaacgatgaatgcaagatgcgattcttggaactaaaggccaaaagaagctacaggttcatcgttttcaaaatagaagagaacattcaacaggtcatggttgaaaaactcggtggacctaaagaaaaatacgacgacttcagtgcttgtttgcctcataacgagtgtcgttacgctgtctttgatttcgacttcactaccgacgaaaatgtccagaaaagcaaaatcttcttcattgcatggtctcctgatacatcaagggtgaggagcaaaatgttatatgcgagctctaaagatagattcagaagagagttggatggtgttcaagttgaattgcaagcaaccgatgcaagtgaaatgagtattgatattgtcaaagagcgagctttctaaactcttctttttttatcatcgttctaatctttctgcactttgctttggggagcctttttttttttcctcaattgccataaaatggtaaatttaattagtaaatttgggtgtcaaatgagggggatttgaaatatatattaaaatatataat

SEQ ID NO: 9562 - DNA, 565 bp, Gossypium hirsutum
  Clone ID: LIB3828-024-Q6-K6-A11
cgggcagctttcacatccgtggggggggtcgttgggcttaagctttggcgctgctggtggcacaagatggctgacggtgaggatattcaaccacttgtatgcgataatggaactggaatggttaaggctggatttgctggtgttgtatgctccaagggctgtgttccctaggggggggggtcgtccacgtcacactggtgtgatggtcggcatgggtcagaaagatgcatatgttggggatgaggctcagtccaagcgtggtattcttactctcaagtatccaattgaacatggtattgttaacaactgggatgatatggaaaagatttggcatcacaccttttacaatgaacttcgtgtggctcctgaagaacacccggttcttctcactgaagcacctctcaacccaaaagccaatcgtgagaaaatgacccaaataatgttttgaaaccttcaatactcccgccatgtattttttcattcaggctgttctctccctctatgcaagtggttcgaacaactggtattgtttctggactctggagatggtgtgagtcatactgtc

SEQ ID NO: 9563 - DNA, 519 bp, Gossypium hirsutum
  unsure (1)..(519): unsure at all n locations; Clone ID: LIB3828-024-Q6-K6-A12
tctgtaaaatgnaanagcatttcatgnacggtctgttgggggggtggctggnaatatnnccttatggaaaagctatagctttgnttcaacccttaaatctgctattattagagatcagtngaaaaagaaccgcttgtagtccctatgattatattggcttttctagtttctgaaagttcaagcaactgtgagaaaagctgcaataatgaagggaagggtggtggtgaagccattactaatggaatcaaatactcacctcctgacggtgaanatgaggttaagagtatcaattgcggcggttgtggtggtggctgctgcattanttgtggaggaagcttctgagggcactgttcgtttggtgatgcctaccggaattgattacatctcttaaatacacaaatatgactaaaacattaatgattatttttcactataatccataaatagttggattaaatactcttctaaattaatttcttatnaataaatgcatggcatgctatttcaatgtttccacat

SEQ ID NO: 9564 - DNA, 623 bp, Gossypium hirsutum
  Clone ID: LIB3828-024-Q6-K6-A7
gcgtttgcccagcgtccgccccgcgtccggggatctgataggttacagccatcggtgcccttccccgtggtaaataaagtggctgtgccgtagtttcggggggaaatccaggggcactttcttccaaacctgttgatcacgacagccactcccctcactctacagatcgccacccttcaatctgtgcctcattcaaaggtcaggtgaaagaacgacgagaagaaaatatcatgtgccagactgagcaagaagaccggggatccgccaaggaattcgccgataaatactctataacctgttcaacggctgacgctacatcgattcccgattggatggctgattcaatcaatggtggagccttgcaacaagtcgaccttaataacggaaccaacggttggtcttctcccccgggtgatctcttctatctccgttctcaaagctacctgaccaaacgtcaaaaatgccccgccggcgattatttactctctcccattggtatggactggctcaagtccgattccaagctcgataacgtactcgcccgtcctgataatcgtgtttctaacgccctccgaaaagctcaatccgatggccaatctatgaaaagctttatttttcgccgt

SEQ ID NO: 9565 - DNA, 568 bp, Gossypium hirsutum
  Clone ID: LIB3828-024-Q6-K6-A8
ccaaggggcaaggggcgatcccttccgctcttattcttctttgccttctcagtctcctctcagaccaaggtaggaaactacaagcaaatgccaaggaaggagccgtggatcctccaaagttgaggataatatcggcgctgtgcctcacggcttacaaactgagggggatgttgttaaaagggaatcggattcgatctcttcgagatcgcttcgcaacaatgcggagaaatttgagttccaagctgaggtgtctcggcttatggatattattatcaattctctttatagcaataaggacattttcctccgagagttgatctccaatgcttctgatgcgttggacaagattaggtttctttcactcacagacaaagaggttttgggcgaaggtgacacttccaagctggagatccagattaagttggataaagagaagaaaatgctttcgcttcgcgacagaggtataggaatgacaaaagaagatttaattaagaatttgggaacaattgcaaaatctggaacttcggcatttgttgagagaatgcagagcactggagaccttaatctg

SEQ ID NO: 9566 - DNA, 577 bp, Gossypium hirsutum
  unsure (1)..(577): unsure at all n locations; Clone ID: LIB3828-024-Q6-K6-A9
ttgtgcgnttcgactggtgccagggggcagggggcagttgcgccagtgagggcatcgtcgtcgaccagaacttccactcctatgcggcctccgtccctggcggctccggatacttcaacatctacttccgtggaggcaacaatcccaatctttgtttctcttcatttggggatgactcgggggggcgtggtcagacattcaagctgttcacagagaatgccaacgccgggaacgggcagtcattctcgagttctggngtaaacggtngcggcgttcctaacgaagtctgtngttgcgggaaaggagccattgtgattgggtcaggtttttccggttctggagaagcagcctatggggcgattgacagtttctcttcgttcggattcgtctcttctgcttcccgtaatacgttcaagagttactgagacgggggatatgcgtttggttctcgcttttctcaagcttttcgcgatctatccctttggggggtggacgattgctttcccgtgcttgcgcccganttttccccttgggtatagtaaagtttgttttttttctaatcttttggccccttcct

SEQ ID NO: 9567 - DNA, 455 bp, Gossypium hirsutum
  unsure (1)..(455): unsure at all n locations; Clone ID: LIB3828-024-Q6-K6-B11
cttcggggaaccagggctagnngggggggaggggggagngacaagcaggttcccatgaaacaggagtgttactcctggtcggtccgtctcttgctccacagaggaccccttgcttccaggattggtaggcgcacggttagggaggaggaagtctgttcgaggggggggggagtcaagatctttgttctcaacttggtaattgtgaaaagggtgaaaatgatcttcctgggctcactgatactgagaaaccaagaatgaggggtcccaagagggcatcaaagattcgtaaactcttcaatctctcaaaggaggatgatgtccggaagtacgtcaacacttaccgtcgatctttcacgacaaaatcaggaaagaaagccagtaaagctcccaagatccagagattggtcactccattaactttgcngaggangagagcaagaatagccgatattttt

SEQ ID NO: 9568 - DNA, 184 bp, Gossypium hirsutum
  unsure (1)..(184): unsure at all n locations; Clone ID: LIB3828-024-Q6-K6-B12
ctcccctctccnntctgcttccgattcactcctcccttctgccgtttgtttttttgtcncntcttcnagacttaatgggggggggggggggggtttatttgggggcgtgtttcatcttgttgcgttgcttgctcatatctctgtcgctcgcctgggtcttgttgttcggccgctttgttttttt

SEQ ID NO: 9569 - DNA, 604 bp, Gossypium hirsutum
  unsure (1)..(604): unsure at all n locations; Clone ID: LIB3828-024-Q6-K6-B7
cattgctgatattcatcacaattgaacagcaaaaatgtcgtgcaattagtaatttaaaacccaaactnnactcgaaagatnnttctttctgtttgtgcgattggtgtnnttttgnnttcgtcaccaaactgttnnncctgtcannttccaagtnnnctagggnagggtnntgttatagtaggtctgtataaatggggnaccattnnngggttnnngattcgcatgtgtggcctggtggttnncttcgtnnnattatttncnnatggttntnntggcttgttntnntttgggtgcaannntaactcaggnntaggaaaatgncccggctgcttttaccaggggnngtgtgnnnatttgtnntcaagnnggcangttgnnggtttattgatcnnncatcttacnncctctnnttactcagnacnntgggctnntgtccttttcatttccaaagnagnaagttcagtnntgtcagaagaaaatggaccgcctnnggatatgcnntttactcnntcaataccgnnnatggcagcncttcttttcagtgctttccctttcacaagaatnnttgatnngcattgnannagttccttagnannaaatttca

SEQ ID NO: 9570 - DNA, 557 bp, Gossypium hirsutum
  unsure (1)..(557): unsure at all n locations; Clone ID: LIB3828-024-Q6-K6-B8
cccctcccccaacaaaaacgggggggggggcctctggtatngagtcttatgtgttatgaatttttcatgtttggcctcatgtctccggttgttagtgaaatcctccgttctgggtttatgataaattcttcacttatacaagactcatcttgtcaatcttttggtgggttttctttactggttttatgttttctcataataagttgtcctattttaccatattacatatatatatataataagtagttatttagcttacaatttagtctctctttttttcttttttaatggcttcttctagtggaaactccatgtccaattcaggatccgaagaggatttgcacattcaaaggaaacggaaaaggatggaatccaaccgagaatcagcgaggcggtctaggatgaggaaacaaaagcacttggacgagttaatggcacaagtgactcagttggttaaagataataatcaaatcttaaccaccatcaacttcaccactcaacactacatcaacatggaagctgagaactcggttttgagagctcagatgatggaactg

SEQ ID NO: 9571 - DNA, 231 bp, Gossypium hirsutum
  unsure (1)..(231): unsure at all n locations; Clone ID: LIB3828-024-Q6-K6-B9
ggggggggnnncccccgcgggggggggggggggnnnaggnngnngnngcggggggggngagnnnnngcnggcggggtgttgnccggaaatggccttttttcctnagtttttttttttccctttttctggcccttctttttttttttttgtcttcccgccccttccttttggggggggggggctttgctcgcttggttttggccttcccctctcggggggggggggcccccc

SEQ ID NO: 9572 - DNA, 594 bp, Gossypium hirsutum
  unsure (1)..(594): unsure at all n locations; Clone ID: LIB3828-024-Q6-K6-C10
ttcaacatctaccctgntcaaatcccttcctggtgaggggaatttatgccttgtaggggaggttatttgattggaaacctgcagccagctcacatggatttccgtttcttttcacttggaaacttatggtctattgttggcggccttgcaacagttgatcaatcacatgccatattggatcttgttgaagaaaaatggtcggagttggtggctgatatgccattgaaaatatgttatcctgctcttgagggccaggaatggcgaattatcacaggaagtgaccccaagaacactgcctggtcataccacaatggaggttcttggccaactttgctttggcagctcactgtggcatgcatgaagatgaacagaccagagattgctgaaaaagctgtcatgcttgctgagagacgcttatctagagacaagtggccagaatactatgacactagaagagcgaggtttatcggaaagcagtcacggttgtttcaaacatggtctattgctggataccttgtggcaaagcttctccttgctaaccctagtgcagcaaaggttcttataactgaggaggactctgaacttgtaaatgcg

SEQ ID NO: 9573 - DNA, 447 bp, Gossypium hirsutum
  Clone ID: LIB3828-024-Q6-K6-C11
aaaaaaaaaaaaaaaagaagaagaaaaaaaaaaaagaaaaagaaaacagaaaaagaaagaaaaaaaaagaaaaaagaaagaaaaaaaaaaaaaaaaaaaagagaaaagaaagaaaaaaaaaaaaaaaaaaaaagaaaaaaagaaaaaaaaaaaaaaaaaaaaaaaaaaagaaaaaaagaaagaaaaaaaaaaaaaaaaaaaaaaaaaaaagaaaaaaaagaaaaaaaaaaaaaaaaaaagaaaaaaaaaaaaaaaaaaaaaaaaaaaaaaaaaaaaaaaaaaaaaaaaaaaaaaaaaaaaaaaaaaaaaaaaagaaaaaaaaaaaaagaaagaaaaaaaaaaaacagaaaaaaaaaaaagagaaaaaaaaaagaaagaaaaaaaagaaaagagaaaaaaaaaaaaaaaaaagaaataaaaaaaaaaaaaaaaaaaaaaaaaaaaaaa

SEQ ID NO: 9574 - DNA, 452 bp, Gossypium hirsutum
  unsure (1)..(452): unsure at all n locations; Clone ID: LIB3828-024-Q6-K6-C12
tttgtttcatttaaggatccagatgcagccatgagagcatgtcgaaacccgtctcctaccattgatggcaaggagggcgaactgcaatcttgcttcattgggtgctcattaatactcgtccaccaccacancatgggggggggggggggtctttttctttctaattgtcttggttcttgttgaantgtcatttccttatctcaattccaactctttatgcttatgttaaatggtcctggcgaatattcacttcaatatttggggtgaggaaagttattgtttgttcttgttttttcaaaggatcaaaaaattcctcctttttttttcctttgttcattctgtttatgttgttttttaccatattgttaaatacattttcttttgttcttttgctatctgtttttctttttttgtgttttttattctctttagttttcattcctttttttttt

SEQ ID NO: 9575 - DNA, 518 bp, Gossypium hirsutum
  unsure (1)..(518): unsure at all n locations; Clone ID: LIB3828-024-Q6-K6-C9
cccgggtttcgcccccacgccgttctctttggctctctttcatcatgnaatatggagggagtgcaagaaggctgtgttgcttctaatgcgggtagtttggatttacatttatatgttccaaccaatttgctcaccatgnatgggtgccaagaaagattcgagcagcagtatatattctcgccttgggtcccacgcatttgccgnaganattatgctggtccatattcactttctctcttatcgcgncaatggggggcgggtgaggtatgccagcaacaatgngtgctcggtgcctcatggctcttttcttgtgagcgatcaaccaggggcattttanatcgattccctttcgcaagttgtntccttggctttgcncgattttaatccaccccgtttgngtggtgtatatggcttgnaccctggcncgtgtggattgcctccttgatattgttgctcaggtgggcctccctggaggggatgcactattggtccgtcttttccggttcttccctttttag

SEQ ID NO: 9576 - DNA, 609 bp, Gossypium hirsutum
  Clone ID: LIB3828-024-Q6-K6-D10
gcgttcgctattctcttctctgttgtatgacgtggcgactggggggcttttccaccttcatttcaagaatcaaatggaaacggtaacgatgtcaactccggatattgctgaagtggatcagttcagatgtcgtgttgatgaaatctttcaaaagatgataagcttgagaaaaaagtgaatgaaggtgaacagttctacttgaatgccaataaaaagaaaaagagcagttctaaaggtaactccattcgagaggaacaagataagggaaggcatgttccaagcattaaaaagcagcagcaagatgcatcccaacgggaatcaactgctgcaaagcgaatgcaagagcttatgcgccagtttgggacaatattgcgtcagatctcacagcacaagtgggcatggccgtttatgcaaccggtagatgtgaaaggtcttggtttacatgactattacaaggtaactggtattgaattaatgcatttttctttttagtttcctttcagtttaccagatataaagtcataactttccatttacctgttatctatcctgtttgagttgaggaatctggtgggcataatctaggaatgcataccaaatctgataact

SEQ ID NO: 9577 - DNA, 344 bp, Gossypium hirsutum
  unsure (1)..(344): unsure at all n locations; Clone ID: LIB3828-024-Q6-K6-D11
ccgggttgtacccagcgtccgccaccatgncctgcagnancaaggcgggaggggggggggggggggccaccaggctaagttttgcgcaaggagccgttgcagctatttcttcattagtcaccttgttctttttgttttaagtttgagactcaaattctacaccattccataaaatgagtttcggctcccactccgtggggggggggtagagcagttctctttctcagcctcaatattttctttttaattactagctaacctctttttttatttatataatatatactagtcattatgtcatatgtgcttttttttctaagatntctacataaatatcgtatgat

SEQ ID NO: 9578 - DNA, 682 bp, Gossypium hirsutum
  unsure (1)..(682): unsure at all n locations; Clone ID: LIB3828-024-Q6-K6-D12
cccccccnnaaaaaaaaaaannnnnnnnnnaagggagagggaaaggggggggggggngggaaaaaaaaaacaaaaaaaaaaanaaaaaaaaaccaacccacacaacaaaaaaaaacaaaaaaaannaannnntttttaaagaaaacggaaggtggtgtgtgtgccgcgcgcccgccccccccncaccctctnnaaacaaaaaaaaaaaaaaaaaaaaggaaaaaagggagaaaaacccagacacaccaacaacacaacaaaacaaccaacaacaacacaaaaaaagaaagagagaaaaaaaaaaacaaaaacacacaaccaacacaaaacacaaaaaaaaaaaacaaaacacacaacaacaacaaacacaaaaacaacaaaaaacaaaaaaaaaaaaacaaaaaaaaaaaacaaaaaaaaaacaaaaaaaaaaaaacaaaaaaaaaaaaaaaaaaaaacaaaaaaaaaaaaaaaacaaaaaaaaaaacaaaaaacacacaaacccaaaaaaaaacacaaaaaaaaaaaaaaaaaaaaaaaaaaaaaaaaaaacaaaaaaaaaacaaaaaaaaaaacaaaacaaaaaccacaaaaaaaaaaaaacaaacaaaaacccccacacaacaaaaaaaaaaaaaaaacaaaaaaaaaaaaaaaacaaaaaaaaaaaacactgaaaaca

SEQ ID NO: 9579 - DNA, 598 bp, Gossypium hirsutum
  Clone ID: LIB3828-024-Q6-K6-D7
tttttaaaaaaatcgccagttaagagagaagagaagttggaatcttttttgagcaatggaaggatcagtttttactccatcattggaaggaatgaagcatatcaaatctccacgaaggggaaatgcttaccaagccttttttggatgtctgcaagttgattttgccagtcctcgataagttcgggtctgctatgagccttgtgaagagtgatgttggtggtaacatatcgaggttggaaaagaaatatgaaactgatcccgctaaatacaatcacttgtacagtatggtgaaagaagaggttgattgtaaaacagcaacagattcatctagttgtaccaatggtcttctctggttgacacgagcaatggatttcctcgtagaattgttccgcaacttacttgcacatccagattggactatgactgaatcttgtaccgactcctatggcaaaaccctgaaaaagttccatgactggagatgttaatgctgacatggagaaattttgttcgactttccccccatttcttgaggagaatcacaaatatctggccaagtttggcttggatgatatgaaggcatgatggaataagtttaatg

SEQ ID NO: 9580 - DNA, 527 bp, Gossypium hirsutum
  unsure (1)..(527): unsure at all n locations; Clone ID: LIB3828-024-Q6-K6-D8
gccaacaaggnngcgtctcacgggcgcgcgtcgttgcncccccggtctgccggattgtggacggnagnaggggaaaaagacgaccacgttaggtaaacccttctcttcttccctcttcccctttctcgtttttgttttaagagattcgtgtggggggggtaaacaagcaaacataaagaaacgaacaagaacacgaagagaaaaaaaatgtttaaatcaaccttttttttaatttctgtttttggcttttttttcaataatctttgggttcgtgtgtgtgtgagggtaaccactttacaatattcctaatggctcttctatagctagattcatagaagaaaatagaaataaaaatcgacccctctaaaaaaaacaatccgtttctcctctttttctattttcctgctcttgtttgccctttgtttgtgtctgtcttttgttgctttgtgttttgcaggcgttcggaggccgtacggtgatgcgtgtgaggagtggctcggggcgtggttcgtggcgcgcatgctaat

SEQ ID NO: 9581 - DNA, 657 bp, Gossypium hirsutum
  unsure (1)..(657): unsure at all n locations; Clone ID: LIB3828-024-Q6-K6-E10
ccgggttcgnacccacgcgttctgntaaaaaaaaaaaaaaaaaaaaattgggggggggggggagaggggaaaaaaaaaaaaaaaaaaaaaaaaaaaaaaaaaaaaaaaaaaaaaaaaaaaaaaaaaaaaaaaaaaaaaaaaaaaaaaaaaaaattttaaaaggaaggggggtttcctttttatttttttttaattttccttcccttcctttggtggggggggggtttttttttccggcccctaattttcttttttttggcttggtttttccctgtttttccttggttaaacccttttttttccctttttttttttcttgggttccttttcttttttccggggttgggttttttgggtttgggcccgtttgcttttctctttttggctttttgcccccttttttttttttttggttccccccttttggtttttttttttccggttgttttttttttttttttcttggggtttttttttcttttttttttgcctttttcgccttttttttttttttttttccttttttttttcccccccgttttttttttttttccttttttttttttttttgtttttttttttttttggtttttctttttttgtttttttcgggtttttttccccttttttttttttttttgggttttttttttttta

SEQ ID NO: 9582 - DNA, 590 bp, Gossypium hirsutum
  unsure (1)..(590): unsure at all n locations; Clone ID: LIB3828-024-Q6-K6-E11
tccgtatagtattgtaattcaatggttttgggggggggtgggggggggggntttacgaaaatagcaacctcaagggggatgatattgatgtagtagnctggtcaatgatccttttattgatgccaagtacatgngcttatatgtntcaaatatgattcaactcatggaccctttaagggaactatcanagttgggggtgagtccacattggaaattaacggcaagcaaatacaggttgtaagcaaaagggaccctgcagagatcccttggggtgattatggggctgagtttgttgttgagtcatctggtgttttcaccacattagctaaggcttcagcacatatgaagggtggtgccaaaaaagttgtaatttcagctccttcggcagatgcacctatgtttgtggtgggaataaatgagaatacctacaatccgagcatggacatagtttctaatgctagttgcactaccaattgtctagctccactttttcatgtggtccatgaggaattccttctttttnagggtttaatgacatctgtccacgcncctacatcaactcaaaatactgttgatggccctttaatgaa

SEQ ID NO: 9583 - DNA, 519 bp, Gossypium hirsutum
  unsure (1)..(519): unsure at all n locations; Clone ID: LIB3828-024-Q6-K6-E12
ccgcccccatttatttattggggggggggattgccggggcttttcgttaatttcctcggaacagaacttgcagaagtgcgtttcagttcacatcggtcaggccggtcttcacgtcggtaatgcttgctgggaactttactgtctcttgcntggcnttcagcctgatggccgggggcgcggggtggtctgactgttggtggaggagacgatgctttcagcacctttttcagcgaaactggtgccgggaagcacgtccctcgcgccttcttttttgatctggagcctactgttttcgatgatgtgaggcctggttcgttccgccgtttttccaccctgtgcttctcatcagtggcttttatgatgctgctctcattttttgcttcgtggctctttttctttcgcctcttgagattgtttgatctctgcttggtttcgtttccgtttgcttgcttttttctgtttctgggtctccttggcttttcttggtttttcaatgtctgtctgtgtggttggttctct

SEQ ID NO: 9584 - DNA, 573 bp, Gossypium hirsutum
  Clone ID: LIB3828-024-Q6-K6-E7
gcagccccaactgaatcgaagaaaaaaagaaagatggcgttgaaattgaatcacatcccacaaaactcccagttttggtcttccggcaatggctaccttctcatctcccaagcttttcatggtctccactctcccttctgcctccaaggaaagtgaaaatctgataaatcatatatgcctcgtccagataagcatgttcaagtcacacattcgatgcccccgcaaaagatcgaggtgtttaaatctttggagaactgggtagaggaaaaccttttcagtctcctaaaaccaattgacaacaattggcaaccccacgattttcttcccgatcctacgtctgatgggttctatgatcaaatccaagatatacaggaaagaaccaatgagatcccagatgattactttgttgttttggctggtgatatgatcacagaggaagcccttccaacttaccagacgttgcttaacaccatggatggaactagtgatgaaacaggtgctagcctttctccttgtgccatttggacgagggcatgcaccgctgaagtacacaggcatggcgacctacttaat

SEQ ID NO: 9585 - DNA, 422 bp, Gossypium hirsutum
  unsure (1)..(422): unsure at all n locations; Clone ID: LIB3828-024-Q6-K6-E8
gggcncaaggagancacaggggctgccctctttgncgnggggatatatgcgaacctgatttgatgcctggggagaagtagagcttctggtttttataagagaggagcattggtaactgactttggttcaaaaggaagagggggagaagagaagtgataattatatactattattattgaggatgaatgtgaaagagtttgtttaatatgccatctgtgatcagggtgatcaccttttggctgcacaataaaataatacaggaatgggttgggagtagtaaggggctattgaactttgtgatttgcagtgtaaggctgtgtgtaagccttcttgccttggagccacaactcagctcgaagaaaggaaggagaagaaatttgattgttcatcttcaatgttgttaccaaagaaatattattacc

SEQ ID NO: 9586 - DNA, 553 bp, Gossypium hirsutum
  Clone ID: LIB3828-024-Q6-K6-F10
tgcagcacgacaactactctcaggggggggggggggctgatatgccattgatgatcccctcaagaaggtcctggggacaactcagaggtgattgggaatgctctgggacttgggatcttgtccggcaaaaattcaacgaccgtggtgatgtacttagattttggatttactgcgggagggggtaagggcagctctattagcatattttcaaggaatccgttaataaagatggaacgtgagctttcggtggtgggaggaagaggagaattcaggatggcagaagggtatgcacgactcaagaattactttttcgatggcaccactgttattattgaatataacgtgaccgtaattcattactaagaggacattctcttggactgtgcaaaattcacatggttttgcagcacttgattagaataaatgtatgagaaatttagtaaatttcatcatacttttaaatgaatcaacttaaaataatattcccttgccttgccaaaataaaatatttatatttctatttaataaagtatttatatttctatttttgaat

SEQ ID NO: 9587 - DNA, 553 bp, Gossypium hirsutum
  unsure (1)..(553): unsure at all n locations; Clone ID: LIB3828-024-Q6-K6-F11
gcagntnctcttaaacactatcatggggggggaggggggggctggtttctagggtttttcaatctatacttcttctcactaatcatgagtcgtcatccagaggtaaagtgggctgaaagagctgacaaggtttacattacggtgctattaccggattcgaagaatgccaaggtcaatgtgggacccgagggagtgtttactctttcggctaatgccggagctgacaataacctttatgaattgaagttggatctttatgataaggtcaatgtggaggaaagcaaaattagtataggagtccggaacatagtttgtgtgttggagaaagccgagaaagtgtggtggaaaaaactattgcgcagcgaaggaaaggccccccattatattaaagtggattgggacaaatgggtcgatgaagacgaagacaatggtcctggtgatattgacttgggaggaatggacttctcgagctttggcaatatgggaggcatggatggcggtggcatggatgagtttgaggacagcagtgacgatgaagagcaagaagtgacga

SEQ ID NO: 9588 - DNA, 560 bp, Gossypium hirsutum
  unsure (1)..(560): unsure at all n locations; Clone ID: LIB3828-024-Q6-K6-F12
aaaaaaaaaaaacntttttttttttttttttttttgtcgtgggggggttggggaaagggggcgggcggggggaacccaacaaccacaaaaanaacaaaaaaaaaaaaaaaaaaaagagaaaagggggggggaaaaagaggaaaaaaagnanaanaaannanaancaaaaaacaaaaaaaaacaaaaaaaaaaaaaaaaacaaaaacacacaaacaaacaaaaaaacaaaaaaaaaaaaaaaaacaaaaaacacaaaaacaaaaaaaaacaacaaaaaaaacacacacaccaaaacaaaacaacaaaaaacacaaaaaaaaacaacaccaaaacaacaacaaaacaacaaacaaaacaaaaaaaaacacacacaccacaaacacacaacaacacaaaaaaaaaaaaacaaaaaaaccacaaaaaaaaaaacaaacaacaaacaaaaacaaaacacaaaaaaaaacaaaaaaaaaacacaacacaacaacacaaacaaaccaacaacaccaacaacaaacacaaaaaacaaaaaaaaaaaccacaaacaacaaacacaacac

SEQ ID NO: 9589 - DNA, 525 bp, Gossypium hirsutum
  unsure (1)..(525): unsure at all n locations; Clone ID: LIB3828-024-Q6-K6-F8
catccttgtgctacttacatttagttcggaaattgcagatgccgcacctccgtgccaggaggttatcgtgtcgattaccccttgcttgagcttcataaaaggccatccctatccggcaccaggatgttgttggggggcgggggggcttgctaagcaagctaacaccaaactagataggcaaggaatatgcgagtgccttaaaggtgtattgccaaaaataggaccatatgaccctaaaagattccctcttattgcccagaaatgtggtatcaatacttanattcctccaatttctgccactactgattgcaccaaggtgtgaagagtgaagtggggggaatgtgaaaatgaagagcatgccaaatgaataaaaaaatgggcagaacttttcataaattgatctgtgatcaaccccttgtattgcacttaagttatgattaattaaataataattacaattaaatttaatctaactgaaattttttctgttctgttctgtccgttagaaaaaaaaaaaaagggcgg

SEQ ID NO: 9590 - DNA, 607 bp, Gossypium hirsutum
  unsure (1)..(607): unsure at all n locations; Clone ID: LIB3828-024-Q6-K6-G10
gtatatccatacaagnacatcatggagaggcctgggggggcaacaaagctacttctttcgatcccacccatcctgaagttggcgggtagcctttctcttaccgtaaaatctgttcggtacactcgtgggagttttatcttccctgctgctcagccatatcctcatcgttacttcactgaagagaggggttattcttgatagctattttggcaagcttggcgctggtagcaaagcttacgaaatgggtgggctggataaagagcaatggcatgtttactctgcttctgctgaatctgttaacaccaaagcccctacttacactttagagatgtgcatgactggtttggacactgaaaaggctacggttttttacaaagacgaatcgacctcggcagcttcgatgaccatgaagtctggcataaggaacatacttccaaactctgagatatgcgattttgagttcgaaccttgtggttattctatgaattcaatcgaaaccgatgctatttcgaccattcatgttacacccgaagacggttttagttatgcaagcttcgaagctgtgggctatgatctgaaagagttgaatctggagcagttggtgcaa

SEQ ID NO: 9591 - DNA, 182 bp, Gossypium hirsutum
  Clone ID: LIB3828-024-Q6-K6-G11
aaaaaaacaaaaaaaaaaaaaaaaaagagaaaggaaagacacaaaaaaaaaaaaaagaaaaaaaaaacaaaaaaaaacaaacaaaaagaaagaaaaataagagaaaaggagaaaaaaaaaaaaaaaaaaaaaaaaaaaaaaaaaaaaaaaaaaagaaaaaaaaaacaaaagaaggaagacag

SEQ ID NO: 9592 - DNA, 100 bp, Gossypium hirsutum
  unsure (1)..(100): unsure at all n locations; Clone ID: LIB3828-024-Q6-K6-G12
tgcgacgtcccctctctttttgtgcgcctacttcattcactggccgggtcttacacttttttcttgggaaaccctgcgttccgcgggggggggcgttgcn

SEQ ID NO: 9593 - DNA, 607 bp, Gossypium hirsutum
  unsure (1)..(607): unsure at all n locations; Clone ID: LIB3828-024-Q6-K6-G7
ctcctaaccagttagnaacaccttgtggtgaatgggtgcactaaaatcaatttagaaatggaagcagaagaggaagaagacaatgaccttcagttgagccttaaaactctctcactcgagagtttatctgtcttaactgctttgccacgattgcttcttcaaggatcttcttccactgtgcagcaattacgaattagggggtgtccaaacttgtccattctaccggcatggctaccgaatctcacttctcttcaaaaacttgagattgttaattgtagaaatttgtcagctctaccggagggaatagaccgcctcaccaaccttagagaattgagaattctcggatgtccgaagttgagcaaaagatatagtgaaaatgggggtgaagattggcacaaaattgctcacatccaaaaggttgatatttactaatgaagaatgaagtatgtggtaaaattttaatttctctatcagatttgatttcattttatctttcccttttatatgcttaatgttcgttaagtactcattgtgtttggaaacattgcatgtatgaactgtgaagatggagatggatgaatgaagcaaggccacccaagacttttac

SEQ ID NO: 9594 - DNA, 571 bp, Gossypium hirsutum
  unsure (1)..(571): unsure at all n locations; Clone ID: LIB3828-024-Q6-K6-G9
cgtccgaataaaccccttnnctngggggggggggggggggccccttgttttcttatggcatttgtgcctctttttttttcattacaagaaatggcttttactgggacgacagagaantgcaggtcttgtgataagactgttcatttcattgaaatggtatctgttgatggtgtaccttgtgataggacttgttttagatgcagtcattgcaaaggccttcttgtgatgggaagccattgtcaaagggaaggaaacctttattgcaagcctcactttgagcaattctttaggggaaccgggagttaccacttccaaagacaagcccaatggactgcaaagggcaccaagcaaagttgcatcccttttctctggcccacaatacaaatgtggagtctgtaagaaaacttgtttatcctttagaaaaggtgactgtgggagggtcaaatataccatcacaaactgctttaggcgtgcacatgggaggttgtttttcttacaacttcgttcatatgcccgcatttgngacgttttcctgtttttgcaggcccctttttccgttcacttgttttaa

SEQ ID NO: 9595 - DNA, 594 bp, Gossypium hirsutum
  Clone ID: LIB3828-024-Q6-K6-H10
tcgatttctctctgcaaccagcggcacggagggggggcggtgtgtcgtcaaaaccctaacgggggaagaccataaccctagaggttgagtcttccgacaccatcgacaatgtcaaagccaagatccaagacaaggaaggcatcccacccgaccaacagcgcctcatctttgccggcaagcagggggggggcggccgcaccttagccgactacaacatccagaaggaatccaccctccatctcgtgctccgtcttaggggaggtgctaagaagagaaagaagaagacctacaccaagcccaagaagatcaagcacaagaagaagaaggtcaagctcgctgtgctacagttctacaaggtggatgaatcgggtaaggttcagaggctgaggaaagagtgccctaatgctgagtgtggtgctggaactttcatggctaaccatttcgataggcactattgcggtaagtgtggactcacttatgtttaccagaaggctggtggagattaagtagggctcgtgcaaaagatggatcttttagggtttttccaatatgggttttaggttttaaattttcagtaatcgtcggattttgttt

SEQ ID NO: 9596 - DNA, 300 bp, Gossypium hirsutum
  unsure (1)..(300): unsure at all n locations; Clone ID: LIB3828-024-Q6-K6-H11
aaaaaaaaaaaaaaangaagaaaaaaaagagaaaaaaaaagaaaaaaaagaaagaaaagggggaaggaaggaaaaaagaaaagaaaaaaaaaaaaaaaaaaaaaaaaaaaaaaaaaaaaaaaaaaaaaggaaaaagaaaagagaagaaaaaaaaataacataaaaaaaaaataaaaaaataaaagaaaaaaaaaaaaaaaagagaagaaagaaaaaaaggaaggaaggaggaaaaaaaagaaacaaaaaaaaaaaaaaaaaaagagacgggagaaaaaagaaaaaaaaaagaaggaagag

SEQ ID NO: 9597 - DNA, 313 bp, Gossypium hirsutum
  unsure (1)..(313): unsure at all n locations; Clone ID: LIB3828-024-Q6-K6-H12
ggaaaaaaaaaaaaaaaaaaaaanaaaaaaaaaaaanagaaaaaaaagaggaaggggggggggaaaaaaaaaagaaaaaaaaaaaaaaaaaaaaaaaaaaaaaaaaaaaaaaaaaaaaaaaaaaaaaaaaaaaaaagaaaaaaagagaaaaaaaaaaaaaaaaaaaaaaaaaaaaaaaaaaaagaaagaaaaggggagggagaaaagaaaaaaagaaaaaaaaaaagaaaaataagaaggaagaagaaagaaaaagaaaaaaaagaaagaagagggaggaggaagaagagaaaaaaaaaaaaaagagagaaaa

SEQ ID NO: 9598 - DNA, 560 bp, Gossypium hirsutum
  Clone ID: LIB3828-024-Q6-K6-H7
ccccgcgtccgctgactttaggggttcaaagaggagggtttttttttgctgttttgggtgtgattttggggtattcaagttatgggagaaattttgagaaaagagtgaaaatttataatataaagctatgtttgagttttgccgttttggtgaatgtattggcgtttgcctgtgtgtttttcctcttcttcttgatgttagatctgcaattctaaatcatcaaaagccaacatccctctcttgtgtatatatatattcccactctaatttcttctcttccttctttgatctctttggttttatcacccctttcctttcccctctttcatccttatatatatatatatattgcctacaagttagtttttaaaatctccgatctaacgtctttcatgtttaacataagaagctgaaagatctcttgcagattagatttggatactttttttctttctttaatttctctcgttcaagctttgattagatcctgtttttttcctcttaaatcattatagatcatgtatattaatttctcatataaacaaacaaaagcttattta

SEQ ID NO: 9599 - DNA, 577 bp, Gossypium hirsutum
  unsure (1)..(577): unsure at all n locations; Clone ID: LIB3828-024-Q6-K6-H8
ggggggggggggggggggggagggggggggggggggggaaaaaaaaaaaaaaaaanaanannnnnnnnnnaaaaanaaaaaaaannnaaannnnnnnnanaggggggggggccggggggggcggggggggggggggggggagggggaggggaagnaggggaaanaagaaagggcgaaggagggagagggagcgacgggagggggggggcgggggggggaggagaggggaggaggaggggcgagggagggggagccggagggcgggggggggaggaggggcggggggggcgggaggaggtgagaagacgagggggggaaggaaaacaggggagaagaaagaggagagggggggggagggggggggggggggcgggggcgaggggaaggaggagggggggaggagaggggcgagggggagagggggagggggaggaggggggaggaggggggggggagaggggggggcggggggggggggagggggagggaggggaggagggaggggagggggaggggaagggggggggggggggggggggggagggagagggagggagggagaggaggggcgaggggg

SEQ ID NO: 9600 - DNA, 98 bp, Gossypium hirsutum
  unsure (1)..(98): unsure at all n locations; Clone ID: LIB3828-024-Q6-K6-H9
aaaaaaaaannaaaaaaaaaaaaannacccccccccaccaaanaaaacccnnnngtgttttttttttttctttttttttttgtccccccccccccccc

SEQ ID NO: 9601 - DNA, 615 bp, Gossypium hirsutum
  Clone ID: LIB3828-025-Q6-K6-A10
ttcttagatctcccttcccctctctttctgtgcggggggggtctcaaatcaccggtaaatcgcaccgtaacgcccgattactcgtcacctctgtgatctccgctgacacctcgtggtttcagtttattctaactcttcgccatcatgaattctgaatatgattatctctttaagcttttgcttattggtgattctggtgttgggaaatcatgtctacttttgaggtttgctgatgattcatatctggatagctacatcagtaccattggtgttgactttaaaatccgtactgtggaacaggatggaaaaaccatcaaactccaaatttgggacactgctggccaagaacgctttaggacaatcactagtagctattatcgtggggctcacggtatcatagttgtttatgacgtgacagaccaagagagtttcaacaatgtcaagcaatggctaaacgaaattgaccgctatgccagtgacaatgtgaacaaacttttggttgggaacaagtgtgatctaacagcaaacaaagttgtgtcatatgagacagctaaagcttttgctgatgaaattgggattcccttcttgggaacaagtgcaaaggatgccactaat

SEQ ID NO: 9602 - DNA, 435 bp, Gossypium hirsutum
  unsure (1)..(435): unsure at all n locations; Clone ID: LIB3828-025-Q6-K6-A11
aaaaaaaaaaaaaacagccccacaacatactaaaaaataggaggggcttttatttttatctttctttacctcttttattctcttcctttcctttacaaaaaaatttttcttttttttttnnggcccccccctttccttttggggggggggggcccccncctttttttttnncccccccttttttctttcctctgccccttttttccccccttggttcttggaaacccctttccttccccccctttttcccctttcctccccccccctttttcccctttttgctttttccccttttccccccccctttcccccttccccccctttttccccccctttttggctttgtcccccccccttttcccctccttttttccccccccgtttttgtttttcccccccctcttccccttttcttttccctccccctcccccccc

SEQ ID NO: 9603 - DNA, 496 bp, Gossypium hirsutum
  unsure (1)..(496): unsure at all n locations; Clone ID: LIB3828-025-Q6-K6-A12
ccgggtcgacccagcgttcggnaaaactcctcgngaacaatggcattggggaggctaagatactcaatacggagatcggttgttgngaaaccattgaagctaccatcaagnaacactacaaaacagacaaaatcaatagtggcagcagcaatgacagtaatgattctgcaaagaggagaagaaacacaaacgcaaacatagacaacaatgacgacttcagtagaagcactggtcggtccaagagaaggacagtggaaaggcaggacaaagatggtaacagtgataataatcatcaataccctgctgatgagaatgacctggattttgatgaccttgattatgtatatgacgttgaatcgaaagagaaccgcccgcaggtagaggtcaatataaatggaaggatgctaccttcttggcctagaacatgaaacatgtgtaacatctcaaccaactttggtttaattttgctaatagaatgtaaactttttaccactaa

SEQ ID NO: 9604 - DNA, 400 bp, Gossypium hirsutum
  unsure (1)..(400): unsure at all n locations; Clone ID: LIB3828-025-Q6-K6-A7
ggnacgttcagttttagttgctcttcttcttttatcatttcttctagccacaggnatggggcctatgtcagcggaggctaaaacatgcgtggctgaaagcggtaaattcaaggggatgtgcatgagttctaccaactgtgctagtgtttgcaaatcagagcctgattttgatggtggacattgccaaggctttcgtcgccgatgcttgtgcactaagccttgttaaaccactaagctttgttagatcagtaatctattatatttcattgtcaccaagatggcccttttttttgcttatcatgcattatatgcttgagagttgagagaaataagatatctccaacttgttttgtaaaccagtaatttttttattagaattaaattaatcttttatgatgtt

SEQ ID NO: 9605 - DNA, 517 bp, Gossypium hirsutum
  unsure (1)..(517): unsure at all n locations; Clone ID: LIB3828-025-Q6-K6-A8
ctgtnntaaaatctgcaatctcgagaggggggggggtttttatctgtacgcttcagttcgggtgttaggttgctccaggaacagcccaatgatgaccccaaaaacatggacgcttttcctcccattgatgcactcaaccctacctttttttttggncccggtgttggcattgaggggggggaggttgtcccanaggtgctgaaattggtactcttggttttggttttgaaggtggtcctgataaatgttgttcttctggntgttccggtcattgtaatcctggtggtttcgttctaccatttcctcaaattcccgaaatcccatgatttccagacgtcccacatgtcccacagatcccccttatcccacaaattccactagtcccacaggtcccacgtgtcctcccgatcccacaagtcccaaaactcccacttattgccggtctgtcgggatgtgagagtggagagtgttgcctgtcgggttgtggtgggacttgtgctgngtgtggtccgccccg

SEQ ID NO: 9606 - DNA, 604 bp, Gossypium hirsutum
  Clone ID: LIB3828-025-Q6-K6-B10
gttgttgccaatttggcgcaaaagctgacggggaaacggatctgagtaagccatttttggatgcttggaaagaacatgtgcctctgtaaccccatcaacagttgtgattcctaaagggacatatttattatcaaaagtaaacttagaaggtccatgcaaggctcctattgagattaatgttcagggcactataaaggctccggctgatcctggtgctttcaaggaccctaattgggttagattctatagtattgaaaatttcaaaatgtccggcggaggaattttcgatggtcagggaagcattgcttatgagaagaataaagatccccacaatcgtgcatttcgtgtcaaactccccgttaatataaggtttgactttgtgaccaacgcattgatacaagatataactagcaaagacagtaaactattccacgttaatgtttttgcatgcaaaaacattaccctcgaacgtttcacggtagaggcaccggcagatagcccaaacacagatgggattcacatgggcaaatcagacggcgtaaatattattggatgtgagattaaaactggtgatgattgtatttctatcggagatggcactaaa

SEQ ID NO: 9607 - DNA, 571 bp, Gossypium hirsutum
  unsure (1)..(571): unsure at all n locations; Clone ID: LIB3828-025-Q6-K6-B11
acaccanaggacctgaacaaggggggcgggcggggacgcgatattctctgcccaacgctcttcggttcctatagattcttgttacctaggttctcaaaattcagccttcctgcagcaggcttcttacataactggtggtgtacatcataaaccgcaaaatttggatgggctgtggcagtgtctcatgactatttttgctactgacttgcattctcgcagtttcatacatcttccaaagcctgttggtgttgattttcgcgcctcatgtttttgccataaaaacactattgacatgggctacatatgttctgtatgtttgtcaattttctgcaagcatcacaagaaatgttccacctgcgggtctgtatttggtcaagctcaatctgaggcggcttcagcatctgacaaaaagagaaagactcctgagacataaagttaattaaggaggttagagaagttttataatctactaaatttgggcaagtctttcttgcttaacaatttttgtttcttgagagaacaaaaactttctccttgcgcaaccatttgatatgcggaatctgtacatcat

SEQ ID NO: 9608 - DNA, 128 bp, Gossypium hirsutum
  unsure (1)..(128): unsure at all n locations; Clone ID: LIB3828-025-Q6-K6-B12
gggacccccctgnccttacggggggggggggggttgctncacatggccctttcgcgcgctgggcgtttggcgtggtggcccgctccggtcgcccttcccctctgttgcgccgcctgtttggcgtttgg

SEQ ID NO: 9609 - DNA, 368 bp, Gossypium hirsutum
  unsure (1)..(368): unsure at all n locations; Clone ID: LIB3828-025-Q6-K6-B7
gtcgacccagcgttcttggnaaacgggnacgatcggnagcatgctcacactatccgtataccatcttggcataatggcttgcatattttgagtatggcatgtatagcattataatcattttgtatatatggtcttatgatatggttattgagtggtatgaaaatgcttggtaatgattagccattggaatggctaatcatgatcatatttggtgttatgtatgctaaattgctagctaattcatggaaaccatgaaataggtaaaatttaccataaaatagattcagacagcagcagtgatgtgagtttgaaaaatcattaaaaatagtagagatacaattaaatgatgaataaatatggaattgang

SEQ ID NO: 9610 - DNA, 459 bp, Gossypium hirsutum
  unsure (1)..(459): unsure at all n locations; Clone ID: LIB3828-025-Q6-K6-B9
ggggggcccggtttgcttattgcatttgtgcctctttttttttcattacaggaaatggcttttagtgggacgacagagaaatgcaggtcttgtgataagactgttcatttcattgtaatggtctctgttgatggtgtaccttgtgatgggacttgttttagatgcagncattgcaaaggccttcttgtgatgggaagccattgtcaatgggaaggaatcctttcttgcaagcctcactttgagcanttctttaggggaaccgggagtttctcttccaaggacatgccctatggactgcttagggcacctagcttagttgctttccttttctctggcnctcattacatatgtgtagtcttgtttgaatcttgttctcctttgtgaaaagctgacttgttgaagggttaattttgccatagtttcttgcttttgtgtgtgctcatggggggttgttttttt

SEQ ID NO: 9611 - DNA, 590 bp, Gossypium hirsutum
  Clone ID: LIB3828-025-Q6-K6-C10
tcggttagcttctcttagctgcctttcgattcttggattgagttgttaaggcactagaaatcatcgtttctgaatctaattcaaacccatatttgttgaggattcgatcgttctaagtttgggatttttcccaggtaaaggaaacaatttgtggttcgaaaagccagaatagaatatgagtacaagtacggcctctttcggtacatgtttgatcatatgctccaatggaaaatcatctctcgaaaccaaaacctccacgatgattacgttgaaatcgtcgtcgtttccttcccgtttaaccgccgtttctataaaggtgaggacgagagttgtttcctgccaagctgtctccaccgcttccgtcgacaaggacgagaaagacgcgtcgatttcgggatcggaggaagacccagaggcggctaaagttggggcaaaggttagggtaaaagtgcctctcaaagtttaccacgtgcctcgcgtccctgaggtggatctgaacggcatggaaggagtgattaaacaattcgtgggggtgtggaaagggaaaaggatttcagctaatctacctttcaaggtggagttcgtcactg

SEQ ID NO: 9612 - DNA, 559 bp, Gossypium hirsutum
  Clone ID: LIB3828-025-Q6-K6-C11
ccgggtcgacccttcgttttgtgtttttgtttttcatactcatttagcgcggggggggggggcgaaatcactccagttttctttatcactgaaaaagtcttgctgtggtggaaactgtggctgcggttctggctgcaagtgtggcagtggctgtggaggatgcatgtatgttcccagacctgaacgttgccgagatgaccgcggctgagactctggttcttggtgtagcaccccagaaagcacactttgagggagctgagatggaattcggggctgagaacggctgcaagtgtggagacaactgcacctgcaacccttgcaattgtaaatgattagagaccaaagcctaagctccctggaagcagagacgcctttgtctttaagaaataatatgttttgttgtttctgtgtttttagaataaagtagccatggcttgtcgttggttttgcctgttgccgccacggtttcttggtgcttggccttggcttgcgtgtttttttaatattcacttgtttctctgtcctgtgtgagcctctctgctttctcggggtatattgt

SEQ ID NO: 9613 - DNA, 437 bp, Gossypium hirsutum
  unsure (1)..(437): unsure at all n locations; Clone ID: LIB3828-025-Q6-K6-C12
cgccccttcccttgtgggctgggggggggggggcaattccttgtggggctccttcgctatcggtccctgctggtgctgtctcctgttctgtgcctgggtcttgtttcgttggctggttgcgcccttggtttttttctttttttctccggtggtttggttggtcggggtgggggggggtgctgntccttcttctgtttttttttttccctggttgcgggttctttgctgttttgctgttgttccttgtctcgtctcttttttggttctttttgtgtttggtcggttgtttttttttgttgtttgtggttctttcttttttctcttcttcttttctctttttggtgtgtgttgtctctcttctttttttgtttttgttctttttttttctattctttttgtctgttttttttttttttttttttttttctttttttttt

SEQ ID NO: 9614 - DNA, 650 bp, Gossypium hirsutum
  unsure (1)..(650): unsure at all n locations; Clone ID: LIB3828-025-Q6-K6-C7
cccgggtcgnacccacgccgtcctgtacttcccttacggnagnatgtcgagagcctacgactccacgcgccgtcatcaaacgccgccgcgtgttccttactattttgacaactgcagcgcccgagtcattacctttttctgactcggttttntctcaacaacagtgcttcncgagctttccactgtaactctttgttccgtatgaagatattggtcagttggaatggatgtcaaaatttgttgaagatactcagtgtggagcaagcttgacaaaaaagaaagaagattcctcttcagtcagtgagggatccaataatcaattccagacttgcagtccggtttcggttcttgaaagtagcagctcaagttcaggagtgaaaccattgccgcacagtcctgaaacgtctgcccccgggaaatgcggacgtccacgaagcaaacgtcctcgtctggccactttcaatcatcttccaggagttcagatgacctccccagcttcatctgtcaatgagaacgacattccccagccgtttgctgtcccgaaggtgctgtcggattctgagaactatgctgagtcccggcttctgatcaaattaccgaaacaagtcaatccagaacataagaagaagaagatcaagttatcggtttca

SEQ ID NO: 9615 - DNA, 599 bp, Gossypium hirsutum
  unsure (1)..(599): unsure at all n locations; Clone ID: LIB3828-025-Q6-K6-C8
ccgggtttgttctttgttttttttttttttttctgggcaantatcaatggggtggggggggtcttctcaaccatgttctcgaggaaaatccgtgcctacagaaaagctttggttcaagcaagaaatgggatggtggtccaggaggacctggaagtggaccatatggtggtggtggtggcccacgacgaccaccacgggggagggacaatgttcggggaattgaccatagttcccttcctgcctgtggctcctgctgcggtggctaattgctgcaagcatacatcttgtgcatgtacaatgttatatagctaaagtcctctaattataagtaaggatgttccacatgtttttaatgccaatagattgcctgtgaaacaggcaactttgaacctctataaaaccagagatgcttttatgtactttcaaacttttgctaaatggtgggctgatactgctctgtttctacaacatgtcgatttgattcgagaaacatgttccattagtttctctgtgtgtaaactctgttttgaagagattatttagggatgtcaagattgtatttcaggttacagttaggaacttatgcatgcccacaaaaa

SEQ ID NO: 9616 - DNA, 286 bp, Gossypium hirsutum
  unsure (1)..(286): unsure at all n locations; Clone ID: LIB3828-025-Q6-K6-C9
ggtttcgttcattgtctggtgcggtttggtggtgcggtgtattcgccntggggcctgtaagaaggtctaccatccgccttcgtttgttgctgcacgcctcattttgtctttttcgtggggtgccgatgcacttgggtgcgtggccgttccgccggtggttctgttcctagctcctctgccggttccgccccagcgtctggaccagcattccagcgtggctgccgcagccttgccggtccttggctcgttggttggggcttgcattgtttctttgtcttcttacgtg

SEQ ID NO: 9617 - DNA, 563 bp, Gossypium hirsutum
  Clone ID: LIB3828-025-Q6-K6-D10
gtcgacccagcgttttataatttgcgttctattagggcggtgggggggggggggataaacacatcagtcagggaaaaccaacagactaataacagttgaagaagggtttccccagcacggtgtcggtgctgaaatctgtgcatctgttgtggaggagagtttttcatatcttgatgcaccagttgagagaatgggtggagctgatgttcccatgccatatgcagcaaatcttgagagaatggctgtgccgcaggttgaagatattgtccgtgctgcaaagagagcatgctaccgatctgtaccattggctgctactgcctaattgaaccaatccaggaattagagggatactgatttttgcctttgtcgacacttgggtgcaggaagaagtgctttaacttaataacacagaaattgttagaaatggctggaaattttgacttatttgtcattggaacataacctttcccacattttaagtagttttctctactgtttctgagcttgtatttcaaatattatggcgctgaacacaccttgcaaccatccttcggattttaact

SEQ ID NO: 9618 - DNA, 489 bp, Gossypium hirsutum
  unsure (1)..(489): unsure at all n locations; Clone ID: LIB3828-025-Q6-K6-D11
aaaaaaatttttttttttttttttttttttttttttccccccccccacaaaaaccaaaaaaaaaaaaaaaannaaaaaaaaaaaannnaaaaagnngangcagaaaaaggggagaaagagaaaaaaaaaaagaaaaaaaaaaaaaaaaaaaaaaaaaaaaaaaaaaaaaaaaaaaaaaaaaaaaacaaaaaaaacaaaaaaaaaagaaaaaaaagaaaaaaaagaaaaaaaaagaaacaaaagaaaaaaagaagaaagcaaaaaaaaaaacaaaaaaaacaaaaccacaaaaaaaaaagaaaaaagaagaaaaaagaaaaaagaacagcaaaaaaaaaaaaaaaaaaaaaaaagaagaaaaaaagcaaaaaaacaaagaaaaaaaaaaaaaaaaaaaaaaaaaaaaaaaaaaaaaaaaaaaaaaaaaaaaaaaaaaaaaaaaaaaaaaaaaaaaacagaaaacaaaaaaaaaaaaaaagaaccagaagg

SEQ ID NO: 9619 - DNA, 138 bp, Gossypium hirsutum
  Clone ID: LIB3828-025-Q6-K6-D12
aaaaaaaaaaaaagagggggggggggggggggagagaaaaaaaaaaaaaaacccccaaacaaaaaaaacacaaaaaaaaaaaaaaaaaaaaaaaaaaaaaaaaaaacaaaattttaaaattaaaaaacgtgcaacaac

SEQ ID NO: 9620 - DNA, 595 bp, Gossypium hirsutum
  unsure (1)..(595): unsure at all n locations; Clone ID: LIB3828-025-Q6-K6-D7
tttccaaatgacttgttccagctccaggatcactgagctgcaaaatgaatgacagaagtcattgcagagagcacttgatacaagattgtatcttcttctatatggtatcagtaatgcagctcctagcgggaaacctgtgtggcattnttccagnaaaaagtttatgattcagaggagacgttgcgcaagtgtgcagagtctgccttagcattcgtactcggagacctctctcacacttattttgtcggaaatgctcccatggggcacatggttatacagcagatggagaatgtgcctgaaccatttaagcgattttttttcaagtctcaagtgattgataccaacaagttcaatatccagaagtgcgaggatttcgtttgggtgaccaaagatgaactcttggagtattttcctgaacaagctgaattttttaagaagttgattatcagctgatggcaaactgcttcattcagtttccaagccatacaggtctttcatataacccaaatttgtggtttacttgtaactttgcagtagtgtccaagactagaaaaccaaacatccgaacgtgactcaattaggcaaaaataacgaa

SEQ ID NO: 9621 - DNA, 193 bp, Gossypium hirsutum
  unsure (1)..(193): unsure at all n locations; Clone ID: LIB3828-025-Q6-K6-D8
aaaaaaaaaaaaaaaannnaaaaaaangaaagagggaaggaagaaaaaaaaacaaaaaaaaaaaaaaaaaaaaaaaacaaaaaaaaaaaaaaaaaaaacgaaacaacaccacaacaacaaaccacaaaaacaaaaaaaaacaaaacacaaaaaaagacaanaaacaacaaagagcgcgcgaaaagangcacng

SEQ ID NO: 9622 - DNA, 591 bp, Gossypium hirsutum
  unsure (1)..(591): unsure at all n locations; Clone ID: LIB3828-025-Q6-K6-E10
ggnacattgacgttgacttggnttctgatggtttgcatctcccagtagcggtgcagagccaatactactcagagagcttaccatatgatcccaggccggttaaggtcactaatcttcacttctttttgcacgaaactctccgcggtaagaacccaacagtagtcatggtagcccaagctaacaacacaagcaacgacaactactcatcagtgccatttggcaccctatatgccattgatgatcccctcaagataggtcctggggacaactcagaggtgattgggaatgctctgggacttgggatcttggccggcaaaaattcaacgaccgtggtgatgtacttagattttggatttactaccggaaagtttaagggcagctctattagcatattttcaaggaatccgttaatagagacggaacgtgaactttcggtggtgggaggaagaggagaattcaggatggcagaagggcatgcacgactcaagaattactttttcgatggcaccactgttattattgaatataacgtgaccataattcattactaagaggacattctcttggactgtgcaaaattcacatggtttt

SEQ ID NO: 9623 - DNA, 357 bp, Gossypium hirsutum
  unsure (1)..(357): unsure at all n locations; Clone ID: LIB3828-025-Q6-K6-E12
atactgggggggggganncgttngcttggtttcatttgaggatccagatgcngccctgagagcgtgtgcggacccgtctcctacccttgttggaaggagggcgaactgccttcttgcttcattgggtgctctttatagtactcgtgccccaccacaacatggtgggggggggtgtgtgtttctttttncttgttttggttcttgttgaagtgtcgtttccttatcttactgccggctctttatgcgtgtgttgaagtggtgctggtggaatattcactggcgtatttggggtgcggtatgttcttgtttgttcttgatttttggccggatcgtcttgttcctcctttttgttttcct

SEQ ID NO: 9624 - DNA, 595 bp, Gossypium hirsutum
  Clone ID: LIB3828-025-Q6-K6-E7
cttctcctgccgtaaaaaaaaaatacgcgattcaggaaaatttaattccgaggtccttatttgacactgaaggaaatttcggatccttaatggcgaagcgagagctatccagtactttgaggggcttgaagttcatgcaaagggcagctcagagagaggagacagtgaaaaaggaagaagaggttaaacctgaagggattagtactattactagaaaatgtgtggtgattatagaaggggatcctcatcctggagcaactgttgggcggatgtcatttcgaagtttcaatccttctattgataaactgaatgaagaagcatcaaatgtgtctcggccggatgcctctggtggaagaactttgtctagtgaaaatggatctgcatctgaagcaactcactcaaaagttggcactgataaacatgaaggtaatggagaccttaagagaaaacaatctgacattcaatctacccctagcagcggtaaagcctcatccaaaaagcagtcaaagcgtgagaaactggactggaatgttctcaggccaccaaagccgaataggtgatcttaattaagaaattgtcttcaacatagtgtggc

SEQ ID NO: 9625 - DNA, 581 bp, Gossypium hirsutum
  unsure (1)..(581): unsure at all n locations; Clone ID: LIB3828-025-Q6-K6-E8
ccggttttgtacccattttttttttttgttttttcgtaggctcatgggggagcgggggagggaacncgaaaagaantcaggggcaaggatgtgattcttattgcaactcgaaggatattgaggcctccaaagaaggctcagctgttcagaggccacgcagccgtacactgactgccgtacacgaggcaatgctcgaagatgttgggttacctgctgagattgtcgggaagcgtactagatatagaatcgatggatcgaagataatgaaggtctttttggaccccaaagaacgaaacaacacagaatacaagctcgaaaccttttcagcagtttaccggaagctcgcagggaaggatgttgtgtttgagttcccagttacagaggcataaagaaggcctttttaaaagatatgacaccttctgtctggtccttttacccttgaaacttctttttgtgagggtatttaaaattttgacatcgacatttattttctttgtgtcatggtgaatttattttctttgttatgaacgtatatttcactattgggtaatggcatttaattatgtaggtttgtgagtttg

SEQ ID NO: 9626 - DNA, 419 bp, Gossypium hirsutum
  unsure (1)..(419): unsure at all n locations; Clone ID: LIB3828-025-Q6-K6-E9
accttctttgcgtctgcttctcatggatctgagggagggaaacttttgctcatggggagttgattaccttaagtgcgacaattgcgtaccatggatggtntcatgtatatcgcagaaagatttatttgccatggngccaccgcattggctggaaattgtaaacggtccaattcacttctctttatgcgattggggagggggaggaccagggncatgggctggtgcctgtggtncttcttggcggacagcaggggttgttaatgattcctttgtgagtgtcacttgggttgctgcttctttcattcattggggtagatttgctgggcctgctgtgtgggttgctcctggtataggtaagtgggcgccggttggttctgtgtcttctactgcctgtctcctcttctttttatgtatcttgt

SEQ ID NO: 9627 - DNA, 408 bp, Gossypium hirsutum
  unsure (1)..(408): unsure at all n locations; Clone ID: LIB3828-025-Q6-K6-F10
tcgtagctgctgnagcctcttaagcttgcggggggcgggggatggggtgaatcaagtgcagacaagggaaagcacagataaagaatctcttagaaagaaagcctcaacagtcacaactgtcagaccaagagcacgaggagaaggctcgaaggtgtgaattcgtccgagggctgctgatgtccactatgcggggggagaatttataagttaaatgagggtatttgtagaatctattggtaaaatatatataatattaggtctgagagtaaagcataaagaggaaggtcttcactctacctcagaaatggcaatcggctgagctaaaaatcaaacaaaactctgtattcctattgtatttagagcttttgtgcataatggaaagatggaagaacttctatcctcctaaaa

SEQ ID NO: 9628 - DNA, 576 bp, Gossypium hirsutum
  unsure (1)..(576): unsure at all n locations; Clone ID: LIB3828-025-Q6-K6-F11
cgttcggcccctctggcctgnccactgnagggaagggggggggggagcaccatgaagccctctctgaggctctccctggtgacaatgttggattcaatgtcaagaacgttgctgttaaggatctcaagcgtggtttcgttgcttcaaactctaaggatgatcctgcaaaggaggctgccagcttcacctctcaggtcatcatcatgaaccaccctgggcagattggaaacggatatgccccagtccttgactgccatacctcccacattgctgtgaaattttccgaattgctgaccaagatcgacaggcgatctggaaaggagcttgagaaggagcccaagttcttgaagaatggtgatgcagggatgataaagatggttcccaccaagcctatggttgtggagactttctctgagtacccaccacttggacggtttgctgtcagggacatgcgtcagactgtgtctgttggtgtcatcaagagcgttgagaagaaggacccaacgggtgctaaggtcaccaaatctgctgccaagaagaaatgagattgcatttgatagtatcaggagccttttg

SEQ ID NO: 9629 - DNA, 595 bp, Gossypium hirsutum
  unsure (1)..(595): unsure at all n locations; Clone ID: LIB3828-025-Q6-K6-F7
ttcttagnatataaatttagtatcgattggggtgtttgaatagtttaaattacaagaatggcaggggaactagtattgttggatttctggccaagtccatttgggatgagatccaggattgctttggctgagaaagggataccatacgagtacagagaagaagatttgaggaacaagagtgatgggctgctgcagatgaaccctgttcacaagaaaatccctgttcttatccataatggtaaaccggtttgtgagtcggtcattcaggttcagtatattgatgaggtctggcatgataaagctcctttgatcccttctgatccttatcaaagagctgttgccagattctgggttgatttcattgacaagaagatatatgagctggggagcaaaatatggaagacaaagggagaagaacaagcaaatgcaaagaaagaatttattgagtgcctgaagctgttggaaggagagcttggagacaagacttactttggaggaaagtcttggatatgtggatgttgcattagttccattttatagctggttttatgcttatgagaagtgtggggacttcagcattgaagcagagtgtccc

SEQ ID NO: 9630 - DNA, 520 bp, Gossypium hirsutum
  unsure (1)..(520): unsure at all n locations; Clone ID: LIB3828-025-Q6-K6-F8
ggtttttttttgtcgtttcgcgcaccccccagaaaggncctgggggcgggggaggggggattgggaatgctctgggacttgggatcttgtccggcaaaattcaacgactgtggtgatgtacttagattttggatttactggccggnaaagtttaagggcagctctattagcatattttcaaggaatccgttaatggggaggggacgtgagctttcggtggtgggaggaagaggagaattcaggatggcagaagggtatgcacgactcaagaattactttttcgatggcaccactgttattattgaatataacgtgaccgtaattcattactaagaggacattctcttggactgtgcaagattcacatggttttgcagcacttgattagaataaatgtatgagaaatttagtaaatttcatcatacttttaaatgaatcaacttaaaataatattcccttgccttgccaaaataaaatatttatatttctatttaataaaatatttatatttctatttttt

SEQ ID NO: 9631 - DNA, 587 bp, Gossypium hirsutum
  Clone ID: LIB3828-025-Q6-K6-G10
gcgttcgcttgcaactcaaaccttaatgagggggggggggggaatcaaggctacagaagctgcaaagagtcaggcaaagcagattgaagaagcaaattctgatattctcccgggacctgatgatgctcggagccaggacttggaaacttctatggagcaatacatggctgtgattgctgagactgggtgctgcgaaacaaggattgaggaagcttcatcaagactgtgatgcatccttggaagcgaaaattacagccatcaacttgatgttagaagctaaacattcagctaaggctaatatcgagaagattggggaactctctaagcaaatttcatctttacaaggatcaattggacaagtgaagcttgcatctcttgaagcacagcaagaacaagctaaattttttgccgaaaaggacacacagagagaactatataaagctaccattgaagattcgagaaagaagttgcttgctttaaagaatgaatttgacccagaacttacgcgaaatcttgaagcacaactgttggaaacagttaatcagattggggatttgcagaagcagatggaaaatgcaaaggcttct

SEQ ID NO: 9632 - DNA, 620 bp, Gossypium hirsutum
  unsure (1)..(620): unsure at all n locations; Clone ID: LIB3828-025-Q6-K6-G11
gnattatncaaatctnntctcagccactgggggtaagggggcatgggcgaaatatatttatttttttcaagttaccttacgagggggctgnnaagtannccttcactncnnggcaaatattccccttcaccnagnactnntgaagcctgggnaacccctccttgtcaacnngctaactgtgactctaaanatatnngtgattttgggccttgcgcgcgggcgcgagcggnnaggtaatggaacaannttcatgacagnagtatnngttgtcacccccgttggtacccgtgccacctgagnnctcctactatgctgtgacaanttatgggacatccattgatgtttggtcggtaggatgcatctttgcggagattcttggtcggaaaccaatctttcctggaacattgcctcagccagcttaagctaataatcgatgtccttggaagccagcaagaggctgatcttcagtttatcgataatcccaaagcccgaaggtatatcaagtcacttccttattctaggggctcccatctttcccatttatatcctcaagccgatccattagccatagatttgttgcaaaggatgcttggttttgacccctctaagagaattaccgt

SEQ ID NO: 9633 - DNA, 587 bp, Gossypium hirsutum
  unsure (1)..(587): unsure at all n locations; Clone ID: LIB3828-025-Q6-K6-G7
gttctngagtagttaaacttgtcccgctgcaatgggatttgcatttgctgcgggaacaactgatggacctggagcttttgattttcagcaaggagatgaccagggaaatcctttttggaggcttgtccgcgacgtacttaaaactccagataagaaacaagttgattgtcagcatccaaagcccatcttgctagatactggtgaaatgaagcaaccatatgattgggcgccttcagtacttccaatccagatccttcggatagggcagtttgtcattctcagtgtaccaggagaatttacaacaatgtctgggaggcgtctccggaatgctgtgaagacagtgcttacaaggagtggtaatggggaatttggtagtaacactcatgttgttatagctggcttgactaatacgtattcgcagtatgttgctaccttagaagagtaccaagtgcagagatacgagggtgcctccacactctatggtccacacacactcagtgcctacattcaggagttccagaagcttgccactgctcttatcaaaggtcaacctgttgaagccgggatgccgcctccagatcttctac

SEQ ID NO: 9634 - DNA, 221 bp, Gossypium hirsutum
  unsure (1)..(221): unsure at all n locations; Clone ID: LIB3828-025-Q6-K6-G9
tagtatactcttttggaggggggagaagggcgactcagggtttaattcagataatataatatttatgtaggataggagtagtgtgcggctgccatgactgtccatatttncttacttattgtttaaacccccaaccaattattccttttttggcttgtccaattgggggggggggacaacaataaaataaataantantggacaaaaaacaaagagagaac

SEQ ID NO: 9635 - DNA, 586 bp, Gossypium hirsutum
  unsure (1)..(586): unsure at all n locations; Clone ID: LIB3828-025-Q6-K6-H10
gttgatttgaaccttganaatatgagagagctctggggggtaactctcaatcattcagaagaactgctagagatggtggaattgatagcttatttgggacgaaggacatggctgctgctgattccaactgccagggtgcagtggctgctgagggatcatctgttggactgatcaatgcagtccagccagcttgcagcaatgcagcatctgctgattccacgatgagcagcaaaactgattcaattctgtgttttacagcaaggcaagcccattcaagcgtatcattttctggccttactggagagagtagtgcaggagattaccaagattgtggggcttcgtcaatgcttctcatgggagaaccttcttggtgtcctccatgtgctgagagctccttccaatcagcaactcgaagcaatgcggtcatgcgttacaaggaaaagaagaagacacggaagtttgataagcaagtgagatatgcctctcgcaaggcaacggctgatgtgagaaagcgcgtaaagggacgctttgtcaaagccggggatgcctatgattatgatccattgaaccataccagaaactgctg

SEQ ID NO: 9636 - DNA, 112 bp, Gossypium hirsutum
  unsure (1)..(112): unsure at all n locations; Clone ID: LIB3828-025-Q6-K6-H11
gggggggggggggggggctanaaaaactcanncgcnctttttgnggcgctttcttggtgggggtttcgctttcctcttgccggnncacgtgttccttcnngttgttnntggt

SEQ ID NO: 9637 - DNA, 597 bp, Gossypium hirsutum
  Clone ID: LIB3828-025-Q6-K6-H7
cggccgcgtgggcggacgcgtgggcggacgcgtggggggtgacatctgctactagaatcctattactgccaatgtttttaagtcattcctatggctagatattcttccacggcaactagtggaattgaactttgtctaattcttattcttacagcttctcttgttgtcattctcaattattcctattgtgttctaattgaaacaaagtcttttctgtttgcagattagaagtttagcatggccagcagttctagttggatgggtggcgcaaagtgccagccttggcatgaaagattcctggggacctttgaaagcattggctgtttccagtgccataaatggtattggtgatgttgccttgtgcatgtttttaggttatggtatcgctggagcggcatgggcaacaatggtttcacaggttgttgcagcttatatgatgattgatgctctaaacaagaaagggtacaatgcatttgccatctccattccaacatttgaagagctgctgagcgtgctagcaattgctggtccagtatttgtaactttgacggcaaaggtaattttctattctgtcctcgtatatttcgctacatccat

SEQ ID NO: 9638 - DNA, 505 bp, Gossypium hirsutum
  Clone ID: LIB3828-025-Q6-K6-H8
gggggggggggatagagggattaattccagagctgctaaaggggaagttgtcaaaaagccggcggaattggaatgattttagctaatggtgttttcgacggtgaagggttagtcgctttttgccatgtcttgccagcgactgccgttggggcgtcaaatggggatgagattagggggtacattgtttccgcctctaaatccaagtcaccagccaccgccaccatcctctttaaaggaactcgattaggtgtacgaccagcacccgtcgtggcttcattttcagctcgagggcctaaccctgaaactcccgaaattctgaaacctgatgttattgctccaggattgaacatcctcgccgcctggcccgaccaagttggtccatctggtgtttcatcagacagtcgaaacattgagttcaacattctttcgggcgcatcaatggcttgtccccatgtttccgggttggccgcattgttgaaggtggctcaccccgcatggagccccg

SEQ ID NO: 9639 - DNA, 54 bp, Gossypium hirsutum
  Clone ID: LIB3828-025-Q6-K6-H9
acaaaaaaaaaaaaaaaaaaaaaaaaaaaaaaaaaaaaaaaaagagagaggagg

SEQ ID NO: 9640 - DNA, 601 bp, Gossypium hirsutum
  Clone ID: LIB3828-026-Q6-K6-A10
gcgttcttactgcctcatccgagttgccaccaccacctggggggggggcttggtcactcaatcaattccgtaccttccgttggaacttgacttctaacgctgctaggcctaaccctcagggctcctacaaatatggttccattaacattacccgcaccatcaagcttgccaacactgcacaaaaagtagatggcaagctccgatatgctcttaatggagtctcctatgtcgaaccaaccactccactaaaacttgcagaatactacggcgtagccgacaaggttttcaagtatgataccattcccgatgagccacaaagtgacaacactaaggtaactttggcacctattgtgctgaacatgacacacagaaactttgtggaaataatcttcgagaatcacgagagcgccattcagtcttaccacttgtctggctactcattctttgctgtgggcatggacgttgggaaatggagccccgagaagaggatgaactacaatcttcttgacgccgtgagcagacacaccatacaggtattccccaactcctggtcagcaatcctattgacattcgacaactgcgggatgtggaacctgaggtc

SEQ ID NO: 9641 - DNA, 591 bp, Gossypium hirsutum
  unsure (1)..(591): unsure at all n locations; Clone ID: LIB3828-026-Q6-K6-A11
ccgggttcnacccacgcgtttttctccttttagtttgtagatctagtgggggggcgctgtgttcactccaaatgctttatattttttttcaatttgcagatctattttatgagtatcttcaatatcttcccaagttgtgatggacaaatgatgatgtcgtctttgaacctttttctatcatcaatggtttcttttggaaggggggtgggttgtataaactcaaacagtggctcttcatcgacttcctaatatgtttatgttttgaaataataaatgaatttgagattttctgatcggcctctctagtttgatggatgctcaattattttgtcgattccacccaccgctctgaatcatctgaggttgattttctgatcgtgatagttgcttgcaatcgctccaaatatgttgtgtgtgagttgtgacgaagtcaaatatcaacgtgttgtaatgttctattgatgttaaagttgaagcctttgtcgtgtttatggagcttgtccttcaccaccaacaacgagtgtttgttgtttttttttcttttcctcgattgttagatcccattcatggaatgacttaatgaattttccc

SEQ ID NO: 9642 - DNA, 428 bp, Gossypium hirsutum
  unsure (1)..(428): unsure at all n locations; Clone ID: LIB3828-026-Q6-K6-A12
gnaaagtatgcttatgctgtgggatctgctttgcatggcgtgcaacatatacttcgggaggacttcatgctgcagccaccgtgggattttgaaatcggaaaaagtttataattcattacacctatggatgtgactacaacatgaagggcgagttaatgtatggtgaaattggtgaatggcgatttgacaagagatcatttctacgtggacctccaccacgaaatctctcattgcctcctccagggtcccagaaagtgtggtgacccttgtgaaaatggtgaatgaagcaactgcaaacattcccaactgggaggcttaataaacgccagatgtgacaaaggaggggaaaaatacatagcatttatggaaatctttctttgtggtggtaaaaaggaatttttgtttatttatttagtaaactctttgaa

SEQ ID NO: 9643 - DNA, 592 bp, Gossypium hirsutum
  unsure (1)..(592): unsure at all n locations; Clone ID: LIB3828-026-Q6-K6-A7
cggncgcgtgggtttcattctttgctgttgaagtagtaatatctatagcatacagagatggagaggcaaagaagcaagcaggtttgtttgttgatgtgggttttggttgctgcctttttctcccacaatagggtcattgcagtgacctccactggccttggtgangcagaaaaactactatccagctcctgaccctcatgctggaactcccccttcaggttcacatggcacaccaccatcttcaggaggtggatcacctccctctcatggaaccccgtcacatggaggtggttaccacccttcaccaacaccatcaacgccttcgggtggaaattgtggaactcccccacatgacccttcaactccatcaacaccatcacacactcctcctcatggtactccaccatcatctggaggtggtagtcccccatcgtatggaggaggcagtcccccatcgtatggaggaggcagtcccccatcgtatggaggaggcagtcccccatcatacggaggtggcagtcccccatcatatggaggtggcagtccaccaactactcccattgatccaggaactccaagcattccctcacct

SEQ ID NO: 9644 - DNA, 365 bp, Gossypium hirsutum
  Clone ID: LIB3828-026-Q6-K6-A9
ataagcaggggggggggggcgtatggcatatctgttcaactggcaaccttcttgtatcattttgaaggatgggagtttgaccgggttttgtgtgttttatttaccgattcaaagtttggcactgttactggttttaactattctctttgcagacatacttggggggtggtgttaattttgcagttttgtccagtggatagttgctgtttacttcaagcatcctctactatcactaaagtataattttttatctattatcttttgttgtggcttctttttcttttcctctttttctcggctggtttgtgttcttttcctgttttgtgggtttgtgtttgtttctttgcccctgtgggtgttttttt

SEQ ID NO: 9645 - DNA, 394 bp, Gossypium hirsutum
  Clone ID: LIB3828-026-Q6-K6-B10
cccggggcatgttgcatatattctttagtttgaaattattgaagtttcaagtgagagcatttcactaacttaataagtccgaacttcagttggtcatgcgattcttcctctattctccatgtgagggagatatgaagttgggttttgaaaagcctgctgactagaagggctactggctgagttagcctcctgcaatattggcaaaatatatgattcgtggagcagttagacttgcttgggcagtggacaggatagtctgatgttaactggattgatggcatgctctgggttcattcaaccaatgacaaccaaatatcacatgtagaaaagaacacagaattcattttattttataaaggaatattattattaatattattgctgttgtcactca

SEQ ID NO: 9646 - DNA, 606 bp, Gossypium hirsutum
  unsure (1)..(606): unsure at all n locations; Clone ID: LIB3828-026-Q6-K6-B11
ttttggnacgcgtggnggcaagggnaggaggtgggggagggtgggggtgctaattaccacaagnagnatcacatnngtgatcctganatgcaaggcgcacatagagaagactctttatagtggtcatgcttcatataaagttctatccatggcaggatttcttgttatatgggaaccggctactttgggcggggggagggatggttacagtatcaagtgtagtggacccaatggtcctgtggtcactgaaaagttttacccaaccactcagattaaaataacattcgaagagcctacagagtttacaatttttggatcaaatggtgtgcagcgtgtgttacgagcagataacaactctcaagatattagctgctcaagagatacaattgtgctcaccttgagattattcatcttacgggctggtgagagaagaaaaggaaagaagagaggtttattctttaacaagtaaggtacatggtacattcactgtgcagctgagttagaaaccttgttattgaaagatttgtgtagaatgtatatttgaggactgcctctctttgttaactagttaacttgttgagagtagctagctttagtggtctaata

SEQ ID NO: 9647 - DNA, 472 bp, Gossypium hirsutum
  unsure (1)..(472): unsure at all n locations; Clone ID: LIB3828-026-Q6-K6-B12
gccccgctttcttcntttccctccttgtttatccgggggggcatggatgggctgatgcggctttgtttggtccagctgctggttttccgtgtggctttccnngttcatttcttggtggccttgctcttggtttccttctccgccgcctcctcttttttttttttcnccgcnccnggccctctggggggggggggggggatgctgtttctgtttctccttgtttgtgttctctttgcggtgctttctccctcggccttctctgctctcgtcgcgtttcttgcttccttatttttggagtgcctttccgctctcttgtgtctctctgtttgttgccttttcgttttcctttttgtcttttccttcgtgtttgcggtctttattgtgtggctcttcccctgttgctttttggtctctccgttggttcggctttgtctttctgctttggcgtgtctttcttctccctctttggcct

SEQ ID NO: 9648 - DNA, 598 bp, Gossypium hirsutum
  Clone ID: LIB3828-026-Q6-K6-B7
tccctttattttcttacttttcatttagtccaacatgcttttaaggagcgcatcgatgccgttacttaattcatgggtcccacactcgaaggagccgtcgccggagctcgatttgttgcacctgattggccgaacccgatccgtttcgttcaggattttgtgttcgagctcgacctcgagctcgagctcgatttctgttgggtcgggcgatgactcgagcaggaggatgacgagggcggtgtcggagacggatctgagggagatggtggtccctaagatgagagaagttaagcgaaacaatgggatcttgaatacgatctttgttgaggaagaagaggaggtggagagagaagaagctggatttcagtggcggagaacggcgtcgctcgcggtggaggaagagtgtgaaattggcggggctgatggtggtggtagatcggacagtggtgatgataacgaatggagctcgtgggattcgaataacggaaacgatagtaccgagttgtattatcagaaaatgatcgaggctaatcctggaaattcacttctcctcagcaattacgctagattcttaaaagaagttcgtggggatttcgtg

SEQ ID NO: 9649 - DNA, 627 bp, Gossypium hirsutum
  unsure (1)..(627): unsure at all n locations; Clone ID: LIB3828-026-Q6-K6-C10
ccgggtcgnacccacgccgttctcnttcctgcaacatcaagncttttcacccctgtcctcgtgggaccatatgaacacgtggtgccaactgtagnnatattcctcttgattctgccaaggggatctaaaagcaagnanaaaaggnnaacttaaagcaaaaaaggggctgaactgaatannagcgtgaacaggtatattgagaagggaaagaaaggatgcaataggcgacgagcggtggaatnntgtaatagagggaccaaaaattnggccacnncgtattttccttattatccatnncatgatattgcaaatgaaaatanccagtccnnacctacaaaagattcagtatgnttgctttcacaacattgttaggtnnttggttctttgtctcacttgngaatgtggtagtctgttactaccgtcctggtatcaaaggagaaggtccaacaatttggtttcttgccattatatatttcatatctggggtccctggtggctacgtaatgtggtatcgtcctctctatcgtgctatgaggactgatagtgcgttgaaatttggatggttttttttgttttacttgttgcatattggcttttgcatctttgcttcagttgctcccccaatta

SEQ ID NO: 9650 - DNA, 502 bp, Gossypium hirsutum
  unsure (1)..(502): unsure at all n locations; Clone ID: LIB3828-026-Q6-K6-C12
atggcagttcttccaggggggggggcgtnagggtaacggtgcaaaaatggttcagccggttgggatgacgcgcgggagccaaatttgnaccctgttttgtncaccttccaaactgatggaactagtcccaagttttttttttttaacccatccaacatccctgggggggggcggtgctcgttcgctgtcctccctgntgcanaagtcctcatggcgggaagcatcacgaacccaggttgcctcgatgatgcattgtttcccaccgttgttcgggtcgtgaaattctcaccgcattacttggaccctancttggccatgttccgtcttgagatctttgccggtttgtccgctctcttctttatgtttggcctgttcttctcagtgctgttccgtgggtgcggtgtattcgtccctctcttgcttcgtgtgtcgatttactcgccgccgtttgtgtcccccggggtctgcctgtgttcttggttggttcggttgggaatttttg

SEQ ID NO: 9651 - DNA, 613 bp, Gossypium hirsutum
  unsure (1)..(613): unsure at all n locations; Clone ID: LIB3828-026-Q6-K6-C7
ttcggnacgcgtggngcgnacgcgtggggaaaaagtgtctcatttttagcaaagttacagtcgtcctcatcgaacaactatggcagccatcaaagtccacggaagccctatgtccactgctacacagagggttcttgcatgccttcacgagaaaggtactgattttcagtttgttcccataaacatggctgccggtgaacataaatccgaaaactacctttccctcaatccattcggtcaagttccagcttttgaagacggggacttaaagctcttcgagtcaagagcaatcacccattacattgctcatgaatacagcgacaaagggacccaactcttaatccctggctctaacaaggatatggctgtcttagaattatggaaggaagtggaagcccaccagttcgattctccatcttcaaaaatagcctgggaggcgttttacaagccatttttcggcatggttaccgactccgcggctgtggaggaaaatgaaggtaagcttgccaaagttcttgacgtgtacgaggctcgattgacacagtcaaaatacttggcaagtgactgcttcaccttggccgacctgcatcacattcccaacattcaatgcttg

SEQ ID NO: 9652 - DNA, 721 bp, Gossypium hirsutum
  unsure (1)..(721): unsure at all n locations; Clone ID: LIB3828-026-Q6-K6-C8
tcagtataagtttatcggcggtgccctatggtaagnagggacccgggaatcgtccagccattggctttgacggnagccgatnngggtttcaaaaccaagcannacggttttcnncgcatgaaagctgtatctctgttatttcttcannacctctatnncgatcctgtatgcctggggcgggatgtgcggtngncctgggnatttaggtattaggnnnttatgaaaagaaagcgcctgtacgtggtgatcgactgggcgacgatnngtggatatttcatgggnnncggcagcttttttgcnnggcgccctnngcaattaccggnnnatgcccttnnnaccgcagnngttcaaaataatgngnngtgtggnntggtggtattttgcttattatttggatgaactnnncaaacgaacgaattannaggacctnntaccatgnaaacnnttgatgccannatggtcttttnnagggaaaaagaaagnngccatgaatatacccaagctanttggcgccnnagaatcttcatttagaaatcttcatagnatttattatataggattatttagaaaactanccggattctattaccanaggaggaaaggaaaattaaaggaataacccaaggcagcctttgatattattgatttgaaatttacaaaaatgtgctnnagctggttttttttattttaattttatttattaattaacaatgaaataaaa

SEQ ID NO: 9653 - DNA, 307 bp, Gossypium hirsutum
  unsure (1)..(307): unsure at all n locations; Clone ID: LIB3828-026-Q6-K6-C9
ggggggggggggcggggggggncttctcttncttgcgttctctcttgcggctggctcgggctgggggcactctggctttccttttgctgctggcttttgtnggngtctctcttggtgctgttctctttgtgggcgcttcccccggctgggcttgggtggggggtggttggcttcctcaggtgggcttcctcctcgaatttccgtgttggcgnctctcttctttttctgttcccccctcttttcctcttcgtgcgtgcttgtgtccctcgtctctttcctgtcctgctgcgggccttctgccttcgcc

SEQ ID NO: 9654 - DNA, 502 bp, Gossypium hirsutum
  unsure (1)..(502): unsure at all n locations; Clone ID: LIB3828-026-Q6-K6-D11
atcaatcgacggcagcggttccgaatcccgagaatgactctgattgtgacgaagtgaactcgagaccagtcgccaggggacccttagcctcgtccgaccccgattatgacggagcgaacgaagaccaggtttgtggggggggtacggtgatgtggcacggctcggtgtagcgcatggaggcggggcacgtggctgtggcgcacatgcgaaggcacacgagagggcagaggctcgacacgtggagacgaaggccctgggtggctgtggcgtggcatgtatagaggctaattggtgtgcatggaggctgctngggtttgccacagtgcattatgatattgggccttttgggctgaatcgatttgctggtttaggtttagggctaggctaatttgggtagtttgggttaaaatgagttgggccaccttgggcttgtgtnactggacatttgatttttttattatttaaatctagttttaaaatgaccgggttaaaattggttatt

SEQ ID NO: 9655 - DNA, 542 bp, Gossypium hirsutum
  unsure (1)..(542): unsure at all n locations; Clone ID: LIB3828-026-Q6-K6-D12
cgttcggggnacccttcacaaggtgnatggggcggggtgccggggaggtcgggtgcgntgaaacctatgattcaagggaaacccacagttgaagtttctcatgagaagcagaaacttgctgcttcactgtttggaggttcattcaaaaaccggaaaagagccctgcttctggtcataaggctgcaaaggcaagcggggagggggtggagaagtctcatgtgccaaagtctagtttggaagttgcatcagaaaaggccactcctgctcagcaacctccggacttgcttgatttgggggaaccaactgccacaagtactgctcttcaactagatccatttaaacaattggagggccttcttgacgcaanctgagttgcttcagctgtnaatggtgcacctgctgcttccagatcacctgatataatggcattgtatgctgacacagccgctggtgtacacgttttgagtggtttcttatcttttatctggcttgtcaaatcctttcgtgtctaacatgcctggctctactgccttgccttctgt

SEQ ID NO: 9656 - DNA, 465 bp, Gossypium hirsutum
  Clone ID: LIB3828-026-Q6-K6-D7
tgtaactccttaggtctatcattatgtatcttgataagttaacctcacaggaggttatcagcttagaactatcaaccgggatacccatgctttacatttttaaagaggggaagttcattagaaggggaagtcccatcgcaccaacagaggctggagtttatgcttatactaggaagttggctcagtacaggcagaaactagatgagatgttgcattgacatgccccttttcagcataggagagcctacttgcatgatcatttacatctacgattacattggttgtaatgtcgggccaaatacctaaggtcagctactgtcacagttgatttttcttttggttgcggtaatcttatagttccatccttacaattctagttacgtgcatctctggaaaagatggtgaaccctgtaacagatatacatacagcaataacaactttccttcatttgtctttgtattgag

SEQ ID NO: 9657 - DNA, 597 bp, Gossypium hirsutum
  unsure (1)..(597): unsure at all n locations; Clone ID: LIB3828-026-Q6-K6-D8
tctcccagcgtccgcggccgcgtgggctgtggtgtttcaggcgacgtattttttagcttttcggccaaatttcgtaaatgggctgcttgcaatgtaaagcaaaaagatatgccccaanacgggaaaaccctgtcaaacttgcttcacagactgcttttagtgtcagtgaagttgaagcgctgggggagctatttaagatcattagcagttctttgattgatgatgggctgattagcaaggaagagtttcggttagctctggttcacaataataagaagaaaaacatttttacagatcggatctttgatttatttgatgctaataagaagggagtcattgattttgctgactttgttcgagcactcagtgtcttccatccgaatacctcgcangaggacaagataaatttttcatttaggctttatgacatggatggaacaggctttatcgaacgtcaagaggtcaaggaaatgttaattgcgcttttaagtgaatgtgaaatgaagttttctgaagaaatcattgaggcattacttgataagactttcatggatgccgacactaaccaggacggaaagatagatatgcatgaaatgg

SEQ ID NO: 9658 - DNA, 329 bp, Gossypium hirsutum
  unsure (1)..(329): unsure at all n locations; Clone ID: LIB3828-026-Q6-K6-D9
ccgggtcgnccccgcgtttttttgttgnggggttgtggttcgggggtgggggcttgatgttgcntctgttcttggggtgagcttcccatcttctcgggggggtgtggtnttttgggcngttttggttggcgcgttccttgttttttgangtcttgccccctggtcttttttgtccggtcgcttttttcttccttgggggggggttggttgtttgagctctgaagggcttcccattgagtgctccggcttcgtcctccgcttctgctttttctagcttgtgtggctctcttcttctcctgcgtcgactgtttcccggttttttattttta

SEQ ID NO: 9659 - DNA, 128 bp, Gossypium hirsutum
  Clone ID: LIB3828-026-Q6-K6-E10
cccattttagttattaacaccggtgcaggaaccggggtggaaaaaaaaaaaactaccctcgtcacgacgctggtagtttttctcttttcaagctttggttttgaccggtgttaataactaaaattggg

SEQ ID NO: 9660 - DNA, 664 bp, Gossypium hirsutum
  unsure (1)..(664): unsure at all n locations; Clone ID: LIB3828-026-Q6-K6-E11
ccgggttcgacccacgccgttcgttttgngcgttcccggtgccctttgagcgggggctgggggggtgggaaacatagttcctggnnattcatcgagnaaagcagnngggagctgaaatccaagggggcgttgatgaaattatttttgcattanngcgtgaatgggatcccttnnngtgatgaagggcatggtaccataaactttaccctgagnaacanaanatgtgcaaggggggctgagctgnnatggttcagcaaccataccacccnnatgcccttgnngtcttgagnnctcaaccttnnggcgataaaggggtctcggcactttcgttcttaggagggttcgcactttcttggtcgatgaaacctcaaggtgaaggggcagcaaatgtcgaatnnctggaggggagtnnttaccgtgtcaagtgctgatgatantccttaaagctctttagatttgctttgtgcctaataaggtctatgttttcttggcctcggctattaatatagattgctttatttagcacaccttttatggtattgttaataataaaatacgtctcttggaggatgtaagatcgaacgtgtttaagagcgaatatgttccgttttgtatcgaagaaccatgttccgttttgtgtcaaagaaccaattacttctttctt

SEQ ID NO: 9661 - DNA, 522 bp, Gossypium hirsutum
  unsure (1)..(522): unsure at all n locations; Clone ID: LIB3828-026-Q6-K6-E12
cccgggtcgcccagcgtttctttttcaaagtnacttacagggggtgcggggggctttganattaatgttcagggcactataaagctccggctgtcctggtgctttcaagaccctattgggttagttctttgtnttgaaatttcaaaatgtccggtggtggattttcgtggtcagggaagcggggggtttgagagaataagtccccacatcgtgcatttcgtgtcaaactccccgttatataaggtttgactttgtgaccaacgctttgntcctgaaatatctagcnnngaccgtnaactattccacgttaatgtttttgcatgcccaatctttnccctcgaacgtttcccggttgaggctccggctgtttgcccctcctcagatggggattcacatgggccattccgacgggggttttttttttgggtgttggggtttaaaccttttttttgtttgttttttcttttcggggcttggcccttaaaaatttggaccctctcgggttttaacctttgggggccc

SEQ ID NO: 9662 - DNA, 482 bp, Gossypium hirsutum
  Clone ID: LIB3828-026-Q6-K6-E7
tagggtttgtgggaggtccctcatcctggctaaacctttttatacccagctcaaagatgctgagttcgataagggagtcttcaagggcattttggggaataaaacaagtggcccaattctcatctatccaatgaacaagaacaaatgggaccataggagctccgtggtgacaccggatgagggtttgttttacctggtggcattgctaaggtcagccttggatagtggggaggaaacccagagcttagaatacctgaacaaccagaaccgtcagattctgagatactgtgatgaagctgggatcaaggtgaagcgatatttacctcattacactacgcaacaggagtggatggaccactttggcaataagtgggatcggttctatgaaatgaaaatggaatttgacccgaggcacattttagcctcaggccaacggattttcacacccacattcccttcgttatcgaacatgccttcatgac

SEQ ID NO: 9663 - DNA, 240 bp, Gossypium hirsutum
  unsure (1)..(240): unsure at all n locations; Clone ID: LIB3828-026-Q6-K6-E8
tttttcngaaataacattaaattcttgggggaggggggacagaaaaaaaaaaaaaaaaaaaaaaaaaaaaaaaaaaaaaaaaaaaaaaaaaaaaaaaaaaaaaaaaaaaaaaaaaaaaaaaaaaaaaaaaaaaaaaaaaaagcggagcatgcaattttttttttcttctatagcgacccctatgtggggggggggggaggctcnntttacaccnacaacctttggtttaccccggggggg

SEQ ID NO: 9664 - DNA, 353 bp, Gossypium hirsutum
  unsure (1)..(353): unsure at all n locations; Clone ID: LIB3828-026-Q6-K6-E9
ggggggggggctcttcttttgtgcccccttctttcctttccctgcccggcgttctcccccgncttgtttgtgttttccctgccgcccccccccttggggtcgcggggggttcctccccctttcccctcctttctcccttgcgggggggcccgctccgttcgcccttcccccctgtttccctctctgtctggcgtcctggtcctctcccttttccctctcttttttgctcgtttgtttgtggtgttttctccctctttgtccgtttctttttcccccttttccttctctctcgtttctttctttttttttcccttccttttttcgcccccgtttccccccccttttctctcttc

SEQ ID NO: 9665 - DNA, 224 bp, Gossypium hirsutum
  unsure (1)..(224): unsure at all n locations; Clone ID: LIB3828-026-Q6-K6-F10
gtttacgttggctgttttaccaaccaaactccgggcgaagattttatgctatctgatagataatcgtgtgagtttacattgtctgtttttaccgaccaactccgngaaaaaaagaagctatgtgatagatatttgtgataagttttgattgctaacagcatgaatgttgtaagtaaaagtgaaagattgagcagtgtaatatatatatcaatatctattttcac

SEQ ID NO: 9666 - DNA, 577 bp, Gossypium hirsutum
  unsure (1)..(577): unsure at all n locations; Clone ID: LIB3828-026-Q6-K6-F11
cgttcgggnggcatgnnaaggtagtgcctggggtgtgcgatcagatgtgaaattgatggcttttgttcattgagtttgnntgatgggagattggcatcatcccccgaggcaaagggaaataagnaacaggctttgnagggggttattgggctgagccccagttagtgatgccctgggtatttgaatctcaggtnnnttctgatnngtgttacagcaggtgtggtgggtgaatgaagaagnaaaggnannatttatttnngtgtgagccattagnntgagaaaggcttgnnctattgnncttatggnnaatttnntaaagaccgaaagcacncnnagtgccannattagaanntagtaaagaantctannagagtttgcatttcgatntnggtcatgnnaagtgaccaanagaaaancatcagtannaaatctattganngcgtgaannataattgttagagaatcgtgtnntcggttccattaanngtttgtagattggtaccttnngctcttgcannaggattattgnngtgattctcaaatttattannagctaaatgcccaaacccatgatcca

SEQ ID NO: 9667 - DNA, 592 bp, Gossypium hirsutum
  unsure (1)..(592): unsure at all n locations; Clone ID: LIB3828-026-Q6-K6-F7
gcaaaggaagcgaanacgatggacaggagccatagcaaatctcaccgagatggcttcaaatcttgattctctgcagaaatacttctcaaaaagctgttttcgtcgacgaagataccttcgccaaggcctcacttacctcggaacaagcccgaaccatcaaggtccttgaacaaagggtggagacgcttgaaagagaggtagatgctgcaatcacagcagcagcgcgtgctcgttccgagaagcgacaggctgaggctgcccaaaaggccgccgaattgcgtgcccaagaggttacaaaggagctcgagaacaccacaatatttgaacttcacatggaagagttgcgagcaaagcaagaagagatctctaagcgtgacaaggaaattaaactacttgaagcaataattcaaacacttggcggtaaagattctcgctcttccaaccttgaatgaggaaaaaagaaatttaaggaaacaataaaacttagttttctcatcatactacgtatcaatttttctttttagtgtaatgtaatcagtttatacaaatcttttactgtcatcgtaacgaaagtttgctttgtattttcaaa

SEQ ID NO: 9668 - DNA, 496 bp, Gossypium hirsutum
  unsure (1)..(496): unsure at all n locations; Clone ID: LIB3828-026-Q6-K6-F8
gcgtttggctgcacatatcctgnanaaacccaggggggagtgggaagacttgcaccggttggctccgccatttattttccggtgatccacagattttatcttacagtattcacaagtacctactatgccaatccgcattgtctacagttctttgttatttttcatagtcttatgtactctgtgggggggggggaatatatgtgatgttatttacaaacannnnnaaaagggggaaaaaaaaaaaaaaaaaaaaaaaaaaaaatttaaaattataaaaaaataaaaagttatcaaatgatataaatttgtttattgttaatagttttgtttggtgtaaaaaaaaaaaaaaaaaaaaagggggggccctttttgggggtccctttttttcgccccggggttggcgggttttttttttttttttggggcccctttttttttttcccggggccgggtttttccaccggggggggggggaaaaccccggggttccccccct

SEQ ID NO: 9669 - DNA, 599 bp, Gossypium hirsutum
  unsure (1)..(599): unsure at all n locations; Clone ID: LIB3828-026-Q6-K6-G10
attccaatagnantagagagagagaggaggagatcttcgcttctctccgtcgttctgctccatttgataaccgcttgcagttctctcaccgtgaaaaatggggttgtctttcacaaagctattcagccggcttttcgccaagaaggagatgcgtatactgatggttgggcttgatgctgctggtaaaaccaccattctttacaagcttaagttgggagagattgtcactaccattcctaccatcggtttcaatgttgagaccgtggaatacaagaacatcagcttcacggtttgggatgttggtggccaggacaagatccgaccattgtggagacattacttccaaaacacacaaggacttatttttgtggttgatagcaacgatcgtgatcgtgtggttgaagctagagatgagttgcacaggatgttgaatgaggatgagttgagggatgctgtcctgctagtatttgcaaacaagcaagatcttccaaatgctatgaatgctgctgagattactgacaagcttggccttcattctctccgccaacgccactggtacatccagagcacatgtgccacttctggtgaaggtctgtatg

SEQ ID NO: 9670 - DNA, 596 bp, Gossypium hirsutum
  unsure (1)..(596): unsure at all n locations; Clone ID: LIB3828-026-Q6-K6-G11
ctcanagttcaccgatgttggggtgtattatgctgcaggccctgtattgaggggtgaagtatttgatggtgctgaggcagttcgtaaaatggagcaatggctgatcaaaaaccatagttttcagccacagtatgcagtgtcggagctgaacgagaaggatttctggaggatgttcgatgctgacctgtatgagcatgtgcgtaggaagtacggagctgtgggaacattcatgagtgtgtactacaaatccaagaaaggaaggaagaccgaaaaagaggtccaagaagcggagcaagcccaccttgaaactgcctatgcagaggctgattagtgagcatgggggagtttggtagattttatgtgagaggaatctttgcattctctttgttgtctctttaatttagtatttgctttcagcgatggtattatggggggtcggaactgatgttatgggataggtttaagcagtgaatgttgtgggatgatttatggctatagtttagctattatggatagacttgtgataatgagaggcttttgtttttagctctcatatttggctgcgcctgctgcaatcactccaacattaccttttc

SEQ ID NO: 9671 - DNA, 569 bp, Gossypium hirsutum
  Clone ID: LIB3828-026-Q6-K6-G12
cccagcgttcggttttcaagggcaggttttgttgattgggagtggtgctcacatgtggcttgaccaattccaactacactgagctgagtaaattgtatgagcaatataaagatcaaggttttgagattcttgcattcccatgtaaccagtttggaggacaggagccagggaacaatgagcaaatcttagagtttgcttgcactcgctttaaagctgaataccccatatttgataaggtcgatgtgaatggtgagaaggctgctcccatatacaaattcctcaagtctagtaaaggtggactttttggggacagcatcaagtggaatttttccaagttcttggtcgataaggagggccatgtcgtcgatcgttatgctcccactacttctcctcttagcattgagaaggatataaagaaactgctggcttgaatttgatgggtggaagagattagctgatcacctcatggagttaataaattagatatgcctacgaataaaaaaaaaactattctatctctgtttatgtttcccccatctcctaatgatgggttagactgtactacaatt

SEQ ID NO: 9672 - DNA, 559 bp, Gossypium hirsutum
  unsure (1)..(559): unsure at all n locations; Clone ID: LIB3828-026-Q6-K6-G7
ctgnaaccttccttctganatgttcctgctactttgaagaaacaagctaaacctgctggtcgtcccatgggccctcccggtgaccgtccacgcggcccaccacgctttggtgacggtgagaggagatttggtgacagagatggctatcgcggtggtcctcgaggaggcggtgattttggtgataaaggaggagctccagctgattatcagccttcattcaggggccctggaacacggcctgcttttggtcgtggaggtggtggttatggtggtgctggacctgctggtcttccttgagagatgatttttcatgatggataattttgtcagtttaggtttgttatcatatggagttcatagaagtacttggcttatgcttcaatgttcggtaattttggtttgatgcttaaaaacgctgcttctctttggttcattcatggggaattctgaaacaatgttttctttgcaccaagtgcttgatatttctgttctgttcttacgagctttgttgcattaattttttttttcgatcagaactgagttatgttaatatttccat

SEQ ID NO: 9673 - DNA, 575 bp, Gossypium hirsutum
  unsure (1)..(575): unsure at all n locations; Clone ID: LIB3828-026-Q6-K6-G8
tcttggncgcgtgggtttggattggatgtgctgcgtgaacaccagtgtattattgacttgaaggataatgttcttagggttggaggaggagaagtttcagtaccatttttgcaagaaaggacatcccttctcgcttccttgatgaagaatggctcttaaaacaagcatcaagctcaggagctggtgtgacaactggaacaacaaagaaggctaatgtgccatctggaggccagtcttccggaggtgcacgaggtgttgcaacacataaacctgaatttgaagccaaagttgcaaagcttattgagttggggtttgcaagagaaatggcgatagaagctcttaaattatgtgatggtaatgaagaacaagctgctgggattctctttggaggctgaaaattacttccaattttctttcttttctttttagaaactaatgttctggtttcagtcacccaattacaaacttttaacgcattgaaatttatgtactttgattatctatttcattcgaactgttcatacacaattgccaaagtgttgtaattcaaaagaaagctgaaattactctttaaa

SEQ ID NO: 9674 - DNA, 466 bp, Gossypium hirsutum
  unsure (1)..(466): unsure at all n locations; Clone ID: LIB3828-026-Q6-K6-G9
ctacgtcagtggtttgtggggggaggaggggccgtgaagtttgaataacttgttggtggcttacgaggataagtcagcttatgctttatgtgcgttttcttttgcccttggtcctgatgttgaacctgttacctttctgtttaaaaccccgggtnnnntngttccgggcggggtgcccagtgactttggatgggatcctatttttcagcctgacggctgtgaccaaacttatgcggagatgccngaggaagagaagaacatgatttctcaccggtcangggctcttgatgtggtgaaatcccactttgccngagcnggatacattttcagcacctccttcttangagaacggtggaaacagtgaatgcatgtttctcgcttgggaaacattgaagattacattgtatgtaactctatattcctagcgcttagtttggggatcctgcttgcttcgttcctctcctgg

SEQ ID NO: 9675 - DNA, 567 bp, Gossypium hirsutum
  unsure (1)..(567): unsure at all n locations; Clone ID: LIB3828-026-Q6-K6-H10
ctgatttgttcctccanaagccaaaaaacactattaatgaagtgatcaatttcccattcttgaaagaacacacgatcccattgagaacaatttataccctttcgttttcctttcaactgatggcaacctcttcgtttttgccaataattgttcggttcttttgaacacccaaacccacacgattatccacgagtacccagtgctccctggtggtgctcataattatccgtcatcgggatgcgcttctctccttccaatcatgcttaaacctaatgaagataggaaatcaatccctgtcgaggttttggtgtgcggtggaacgccgcatgatgcatatacaaaggccgatttgcaacgccctaaggtgtttttgccaggaaacaccgattgtgctcgtattgacatcaccaaaaggaatggcaagtggaagatccaaaacatgccataagctcgactcttgggagacatggtggtgctttcgacgggagatgtgttacttgtcaacggtgccaagaccggttcagccggttgggatgacgctagggacccgaatttacacccagtttt

SEQ ID NO: 9676 - DNA, 458 bp, Gossypium hirsutum
  unsure (1)..(458): unsure at all n locations; Clone ID: LIB3828-026-Q6-K6-H11
gcgttcggtccctctcggcgatgatcatcaggggtggtgggggggggggtaatattttgagctacaacctcggcgggatggggtgcagtgcggggattattgcggtggatttagctcngagaatgttgcaagctaacccgaataactatgcggtggtggtgagcactgagatggtgggttatagggggtaccctggacgggacaggtccatgcttgtcccgaattgttttttcaggatgggatgctccgctgtgcttttgtctaaccgccgtcgtgactaccgccgtgctaagtatcggcttgaacaccttgtacggacgcataaaggtgccgatgaccggagtttcaggtcaatctaccaggaagaagatgaacaaggtttcaaaggtcttaaagtcagcaaagacctaatggaaatcggcggcgacgccctcaaaaccaacatcacaacattgggt

SEQ ID NO: 9677 - DNA, 579 bp, Gossypium hirsutum
  unsure (1)..(579): unsure at all n locations; Clone ID: LIB3828-026-Q6-K6-H12
gnaaaaacataaaaggtctccacctaaatgcgggggagggctttccttcggtaacggtatgcgatggattgatatactaattgatcgccgccggtctggttggcacgcttttaatctcacgaagctctttcccctacttgatgcttattgccgttgaagcgggaagcctccttctagggcttatccttgttctttctctgcctctggtgatcatatcttatctcttcatttccgaagctattggtattcaaatcctcattttcatctgcttcgctggactcaagatccgcgacattgagctggtttctcgcgctgttcttcccatattctatgctgcaaatgtaaggaaggaaagtttctaggtatttgacagatgctcgaggaaagtagtggtaacggctattcctacgttcatggtggagccgtttgtgaaggattttctcggcggagataatgttttaggcacagaggttgaagtgaaccctaaaacacagaaggcgacggggatttgtgatagaatccctgcgttttagcttgggaagtttaagagattagccattttgaaggactttggtgata

SEQ ID NO: 9678 - DNA, 558 bp, Gossypium hirsutum
  Clone ID: LIB3828-026-Q6-K6-H7
gaaaatctcacctggcgttagaacagtggtaatcaatccgggtaactcttgttaagaacaccgagcttcaaacgcactgctagttatgaataaggcaacaggtcgatcatttacccaaatccggggatacgaaatcgccgcggtcatagaatgcagacttgtcaaaccccgattcgcacaataagcccgagtaggcttctcaattcaattggctggacgatatctagaaccagctttcaacgtgctattagctttatcactgcactacgtgtgagtcgttgagagatgttaatgaccaccaatccatattctctgatgcacatggtgatggacaggatctcagggcctaatttaccatctccaccccatctcttactgaaagagagagaaacgaattggtactcaaaaaccactttctaaccatactattcccagttgaccagttctctgagatgctccttcttcacgaacatatttcagcaatgacggctttacatgtgtgcaagttttgcattatatctattgcttttatcaagagaacatgttgagtcatgaaat

SEQ ID NO: 9679 - DNA, 604 bp, Gossypium hirsutum
  Clone ID: LIB3828-026-Q6-K6-H8
gtcgacccagcgttcggcgttgaaaaatgaaaaggctggtgccttctttaggagactctccaaagccaccccagctaccttcaacaatgcatttcgaggtcaacccaagtctggttttgctggatttcgcttcactaccatcgccgccgttgccggtggaatctctacttactactgcttctccgactgaaatgtggttcatctagatcaagtcaatgaagagactggtccaaaagttgctttgaaatctgataagtggcttgaatttaagttgcaagatactgcaagagttagtcacaacactcacttgttcaggttttcatttgatccctctgctaagttgggattggatgtcgcttcatgcatccttactagggctccattaggacaagatgctgaaggaaaaaccaaatatgttataagaccgtatactcctatatcagatccagatgctcagggatactttgacttattaatcaaggtgtatccagaaggaaaaatgagtcagcattttgctagcttgaaaccaggcgatgtagttgaggtgaaagggcccattgaaaagctcagatactcacccaatatgaagaaacacattggcatg

SEQ ID NO: 9680 - DNA, 407 bp, Gossypium hirsutum
  Clone ID: LIB3828-027-Q6-K6-A1
ggccgcccttgttaaaaacattattttgatatgcatacattctctcttttgttatgtacaacattttgatatccatgcattgtacatttgggatttattgggaatgattatcaggaaatgttattatttgattccaaaaaaaaaaaaaaaaaaaaaaaaaaaaaaaaaaaaaaaaaaaaaaaaaaaaaaaaaaaaaaaaaaaaaaaaaaaaaaaaaaaaaaaaaaaaaagggcggggcgttttaagaaggaaccaaaccttacattcgcggtggctggcaactgcaatagctttttttttgggaaaccgtaacttaaattcactgcgccgggcttttacaacgccaaggcctggaaaaaaccaaggcgcttaccaaactaaatgcgcttggcagaacatcccttttt

SEQ ID NO: 9681 - DNA, 603 bp, Gossypium hirsutum
  unsure (1)..(603): unsure at all n locations; Clone ID: LIB3828-027-Q6-K6-A10
gttctaanagtagagaactcaaaaacaggcaaacccctngaagnaaacaggaaagctgtttcacttttctcttcaaagacagcttcttctttcttttcttttcttttctttttttcaaatttcctttctggggttttcatttcatngaaagatttcaccttccactgcattgttttctctgttctatgataagtttgtcagtgataggttttgttgaatttgttcaatggaatcacttgtaatttcttcatcaaagagtaaccctccttcaacatctgggaatcctaggccatctcggcctccgtctccgaaccgatccgaaaatgaaaagactatttcgacatcccatgtagctactcttaaccatggcgtaaggattgttcgacatcccaaaggttctataggttatcaaaagcattcttccaaaccagctgatggcaatgtgcagcatgaagaattgcctgatgctgcaaaacaatgtttcgattcgagtaaagggaaatccgagaaagcggaaaacaaatcttccttcaaacatcccattgatgatcacaaaagtgctagttcaagtggttcattggaatctgaaaaattgtgcagttg

SEQ ID NO: 9682 - DNA, 600 bp, Gossypium hirsutum
  unsure (1)..(600): unsure at all n locations; Clone ID: LIB3828-027-Q6-K6-A11
cacacctctctcaaagccccctcctccccctctcctttccctctctctcattggtggcaaaatggcaaactcagcatcgggcatggcagtaaacgatgaatgtaaaaccaagttcttggagctaaaagcgaagcgaaactacaggttcatcgtcttcaaaatagaggaaaacctccaacagattgtagtggagaaagtaggtgcacccaaagacagctatgagaaattatgttccagtttgccgtccgatgagtgtcgttacgctgtctacgatttcgatttcaccaccgatgagaattgccaaaagagcaagattttcttcatcgcatggtcaccagacacatcgagggtgaggagcaaaatgttgtacgcaagttccaaagataggttcagaagagaactggatggtgttcaagttgaattgcaagccaccgatcccagtgaaatgagctttgatatcgtcaaagaaagagccttctaaaataatgcttatattgccaaaaaatggggggcattaaatatttttctttttaaattttcctataatcataaatattattnggaaatttaggaactgatcatattatgtgttatggtgtc

SEQ ID NO: 9683 - DNA, 578 bp, Gossypium hirsutum
  unsure (1)..(578): unsure at all n locations; Clone ID: LIB3828-027-Q6-K6-A12
ccccgcgtccgggccctaagaagctttacagcccaaaatcttgtttntccgggnaaactccaccgataatcgacgaactctctctcgatctcacctaagattcgccgataatcgaaaatttaaaaataacccgacaacaacaaagatgaagaaagaagacacagtgaaactcattagcgctgaaggaatggaattcgttatcgacaaagaagctgctatggtttctcaaacaatccgtaacatgcttacttctccaggtggtttcgctgaggcggagcatggggaagtgactttcccggagataagtgctgtgattcttgagaagatttgtcagtatttttattggtctcttcaatattccaggggcaaagagactgagttccacattgaacccgaactgactctggagctgatgatggctgcgaattatctccatacttagccaattttcgtattttaggtctgttttcttgcccgagaggagtatgtatgtcgcgtgctttttagcttctctgctccaatgcatagtggtatatttatgattatcttatgtgattgttttgacttagaacatagac

SEQ ID NO: 9684 - DNA, 589 bp, Gossypium hirsutum
  unsure (1)..(589): unsure at all n locations; Clone ID: LIB3828-027-Q6-K6-A2
cccagcgtccggtcatccggnttattgattggttttagctacaacgatgatggtggggtatatttttataaatatgtatgtaaataatctgtgatcagctgatgatgagttttgtgttcttaatgcctggggattaaaaacgatccgagaaaagagtgagctaagaataactcttttgatgcctgttacgtgttctgctattttcttctgctacaacaataaattgttagtttttaattgttgaatctttcccatttcttggagttaatctttcaatgtcttttttctgtgttgctgaatatgatggtaggtagttgaacttgtgggtaataaagggtcaaaatcatattcagctatggcggttcagaaatgctttggattatcatttcttacctgccggtgatgctggaaaggcattttcatgtcatttgtctgtaccaagcttcagtcttgaaggtttaatggagtaaaactgagctgaaccaatttactgcccgtgggtcctcattagggtaagtcaagttatgttttctatgagatagaaggggttaccgacctcattaaggcatttttcatgttggtattctgt

SEQ ID NO: 9685 - DNA, 572 bp, Gossypium hirsutum
  unsure (1)..(572): unsure at all n locations; Clone ID: LIB3828-027-Q6-K6-A3
ggtcgcccacgtcgctttcacgaacgaagacaaacagaaaacttgtgaagaaaaaagagggaaatcttgcatatccaaggaggccaatgtgggaaccagatcggggctaagttctgggaagtcatatgcgatgagcatggaatcgacaacactgngaaagtataacggtgactccgatctccagctggagcgtatcaatgtctactacaatgaagccagtggcggtaggtatgtccctcgcgctgttctcatggatcttgaacctggcactatggactccgtcagatccggtcttttcggccagatctttcgtcccgataactttgtcttcggtcagtctggtgctggcaacaactgggccaagggtcattataccgagggagctgagctcattgattctgttctagacgttgtcagaaaagaggcggagaattgtgattgtttgcagggttttcaagtttgtcattcattgggtggcggtactggatctggaatgggaacccttcttatttccaagatcagggnaggagtatccagatcgcatgatgttgnacattttcggtcttcccttc

SEQ ID NO: 9686 - DNA, 605 bp, Gossypium hirsutum
  unsure (1)..(605): unsure at all n locations; Clone ID: LIB3828-027-Q6-K6-A5
ccggaaagattatttctttaatccggggcaggacatgacggtgggcacatcctggaactattgagaccagagacagttgaatcactcttttatttgtggcgcttaactggtaataagacatatcaagagtggggttggaatatatttcaggcatttgaaaagaactcccggatagaatctggatatgttggactgaaggatgttaacactggtgtaaaagacaacaagatgcaaagtttttttcttgcagagacgctgaaatatctttatcttcttttctcaccacctaccgtcatcccattggatgagtgggtattcaacacagaagcgcaccctttacgaatcgttaaccgcaatgatgcaaatcttgcagcattggaagggcaacataaacctgtgatcaaaatacgaagcaggaaaactggtcgattgggtggtaattaggatttgtttccagtttattgttccttgctgaactatgagattttaatcctcaaatagacgacaagccttactttataatgataccatattaagatgaaataacgaggaagagttggnttgtcgtcttattaattatacaaaataagaagtaatgatgttgc

SEQ ID NO: 9687 - DNA, 574 bp, Gossypium hirsutum
  unsure (1)..(574): unsure at all n locations; Clone ID: LIB3828-027-Q6-K6-A6
cggccgcgtgggcggccgtgtggggtttcttagtggtgagccctgatgatttggggtttgaatgatggcgtctgngaaaanagattgagatgagtttgggggaagaaatgtggcgaatttagaaaaagcggaatcagaggaagcagggttgctcgagaacaaggattctgattccctggctgccattggattcttggaggcatggaggttgccaggtgtggcaccattttctttctgcctcttcttctccaagttggtggcttatacatttttgtattggttgcccttctacataagacacacagccattgcaggagtgcatttgtcacataaaactgctgggatcctctctacaatattcgatattggaggagtcttaggtggggtgctagcaggcttcatttcagatgtcattgatgctcgtgcagttacttcggttactttcttattactatcaatacctgcactcattttgtaccggattttatggaagtgtctctatggttaccaatataggattgatgtttatctctgggttgctagtgaatgggccttattcactaattacaacagc

SEQ ID NO: 9688 - DNA, 601 bp, Gossypium hirsutum
  Clone ID: LIB3828-027-Q6-K6-A7
ggtcattattgcctttggttttcaatccagccatcatacagaagtaactaaatgagctttctcctgagaatgtcagaatcttctgggagtcaaagaaatttgagggactgactgacaaggttgagccatggtatggtactgcatattccattgagaaagttagctcctcaacaattcaggcatggatgtcctcagctcctaatgagaacttgcatctacctgcacctaatgtcttcataccaaaagacttatctattaagaatgcacaagaggaggtcaagtttcctgttttattgagaaagtcatcctattccaaattatggtacaagccagatacagtgttctctactccaaaggcatatgttaagatagacttcaactgtccccatgctggaaactctcccgaaactgaggttcttgcagatctttttgcacagttattggtggattacttgaatgaatatgcttattatgctcgggttgctggtcttctttatggcataagccacacagatagtggttttgaggtgacgttggttggttataatcataaactgaagatcttgctggaaactataatcgacaaaattgttaaatttga

SEQ ID NO: 9689 - DNA, 457 bp, Gossypium hirsutum
  unsure (1)..(457): unsure at all n locations; Clone ID: LIB3828-027-Q6-K6-A9
gcacgtgtcngacaccgatcgcggccctgacatcggaagcttcctaaanaacctaagcaaatttgcggttgattccgccattaacgtctccctcaaggtttcactggtgggaagaaactgtatcagacttttttgcaggaaaagttaaaagatgaggcaagcaatgtgaaactaatgaaggaggagacacaatcaacaaaaatggaagacattgcaaacaaagctgtaggaggaacagagcctgtgaagaagaagaagatggtacctcaagactcgaaggaaatggagctcgaagatcctaaaaggaaaacaattttcattcgatctcgcctgtaaaatactagngaaaagttaatgggtaaattgatacttanattatatatatttcgaagatgtacttttttttattgtaccttgttaatgtttaagttataatttgattaaggtttctattgct

SEQ ID NO: 9690 - DNA, 617 bp, Gossypium hirsutum
  unsure (1)..(617): unsure at all n locations; Clone ID: LIB3828-027-Q6-K6-B1
caaaatacgcttaccgcagcctgncatagaggctcgaagtggaatgaccataaaagaagtgtgaaggacgtattcattggtggtggtgaatatgtaaggccactttgtaaatggagattagtggacattattactattgttgaaactgctcttttgttttgcagatcgtaaatgatgtaaaatttactgtaaaccaagcagttgagccagttgagaaggggattaccaagttcaatgagaagctgcacaagatcaaagaccggagaaagacaaaggatgatagttgcattgccactgccgaaccgagggtaattcgtggaatagacgatcccctcttaactgggagcatgagtgatagtgcggtagcaaggggaaagaaacattgtaaaaaatcaggaagcactaccagtgcggaaagtggagacagtagctgctatctaaactctggcggatatcttattaggggccgtagatgggtcacaaaggattaaaagcttatatgaattattgtggttatatgatgaactacaaacacaccttgtgatggcttaaaatatagtcatctcctactcttagtttctggactgctagcttgcttcacatgcctaacagcattc

SEQ ID NO: 9691 - DNA, 613 bp, Gossypium hirsutum
  Clone ID: LIB3828-027-Q6-K6-B10
tgcaaagcaaggtcgaagcatgaaagaagatacgaggtttgaagaaaatttacttcagtatccatttaatatgacgagattctgatcccctttcttctccctgttttgatttctgaatcccgttttgttgtcagtcgaactggactgaagaaaagaaacaagctgctgctgatgttctatttcaatattcgaaatttgcaatggcatgcataggaaaccaagttcgtccttgtgacatgaggttgcatttgatgaaggaaatatcagggctcccaacttctcttaagagagtttcatcccaagctgctgcttctcctgattcaatgggcgagtcatcaagctcaggtaccgcaagacttgataagaaggctgataaagttgataaatgaggtgaattgggagcgattctgatatttacttgaagcatcgttttattttatgaaagtttcaatttctatgtaactaggcttcgtattctactagatgcttaatgcaacttagggcattccaaagatgttaattataggaaattatttcgtttgtttgatacacgaagtgtgtctgtgtactctgacttattatttcttaactctgagttcacaaattgtcttcc

SEQ ID NO: 9692 - DNA, 597 bp, Gossypium hirsutum
  unsure (1)..(597): unsure at all n locations; Clone ID: LIB3828-027-Q6-K6-B11
cgcactccanagtggttagggatttcttctgggatgatgaatttcgaccaaattgggatactatgcttgcatacttcaaaactttggatgagtgcccttgtacgggattaatgattgttcactggataagaaagttcccatttttctgcagtgatcgagattatataattggtcgaaaaatatgggaggatggaaagacttactattgtgtgacaaagggggtaccatatcctggtttgccaaagcgtgataagccaagacgagtggagctttacttttcaagttggattattaggcctgttgagtctcggaaaggcgacggacagctatccgcatgcgaagtttctcttgtacattacgaagacatggggatcccgaaagatgtggcaaaactgggcgttcgtcacggcatgtggggagctgtaaaaaagttacactcaggcatgagggcgtaccagagtgcaagaaaaaccgatacttcattgtctaaatgtgcactcatggcaagaattacaacaaagatctcttgtgatgagaacataagttctcccggttccggtcatgtttcaagggaagatgaaaacagtcaaagtacgg

SEQ ID NO: 9693 - DNA, 568 bp, Gossypium hirsutum
  unsure (1)..(568): unsure at all n locations; Clone ID: LIB3828-027-Q6-K6-B12
gtgctttgngacagnanaggagagctctgtcactcttattcgtgatagaaagtatcgtgtntctctccaaccagnnatcgatactttccaggnaaaaaggtgnnaggaatgtggaagagatacacaaaaatctcttacatgaactggaatccctgaaagaagatccatatggattagttgataatggaggggattatgataccctgatcgggtatcaaaatggaggtcctcgtatatttgctttacgcctgcagccaaaccatcctagccttcacagtggcggaggctccgatctcaccacctatcccttgcttgattaaaatatctatctcgtgatgatttccgtatccataagctaagttcatgctgttaatcatataatattgctgtgaaagcaaaattggtgtgtactgttacttttactttaaaaattatcgtcacttctattatgtgcctatgttgtatcgtatctgttggagattatgtatttgatgatgatggaacattttcctgtttgtcgttttctaaatttctgtatttaaatcttatgttaaagatatatttggat

SEQ ID NO: 9694 - DNA, 593 bp, Gossypium hirsutum
  Clone ID: LIB3828-027-Q6-K6-B2
ctttgtctctctgtttctactttcactttgcatttttcttgattccttccttcacgacctcaatctctaggagtgtttgtaataaatggctttggtgacaactgctgaagtctgtgatgcaaatccacagctaattgtgagcggtgaacttcgggcccttcaaccaatattccaaatatatggtcgtcgcccagtattctccggacctatagtcacacttaaagtgtttgaggacaatgtattgatccgtgagttccttgaggagaaaggtaatggcagagttctggttgtagatgggggtggtagtttaaggtgtgccatacttggaggcaaccctgtagttcaagctcaaaacaatgggtgggctggaatagtggttaatggctgcgtaagggatgttgatgagataaacggttgtgacattggggtgagagcgcttcattctcatccaatgaaggccaataagaagggaattggggagaaacatgtccctataaccattgccgggactagaatctgtgatggggagtggctttatgcagacactgatggtatcctcgtctccaaaactgagttatctgtttgagttccct

SEQ ID NO: 9695 - DNA, 575 bp, Gossypium hirsutum
  unsure (1)..(575): unsure at all n locations; Clone ID: LIB3828-027-Q6-K6-B3
cggccgcgtgggaaaaaanaggcgtctgtaataaaatctgcaatcttaattctgtcggtgtttttatctgtaagcttcagttcgggtgttaggttgctccaggaacagcccaatgatgacctcaaaaacatggacgctattcctcccattgatgcactcaaccctaccgagttcaatggacccggtgttggcattcacgaagatcatgttgtcccaaaggttccgaaattggtactcttggttttggttttgaaggtggtcctgaaaaatgttgttcttctggatgttccggtaattgtaatcctggtggtttcgttctaccatttcctcaaattccagaaatcccaagaattccacagatcccacagatcccacaaatcccacaaattccactaatcccacagatcccacaagtcccacaaatcccactaatgccaggacagtcgggatgtgagagtggggagtgttgccgtcagggttgcggtgggacttgtgctgagtgtggtcagcccaggtgcgcatcaggatgttgccaggctgaaactgtaaagagcaaagggatagaagaggttatg

SEQ ID NO: 9696 - DNA, 611 bp, Gossypium hirsutum
  Clone ID: LIB3828-027-Q6-K6-B4
cttcactgccatccatgtgtccttgggatttgagcattactcagaactgccaggccatttatttacactgaattcgaacttcaatgaagtggaggtcggatgctatgatgccctggttattcctggcggccggttctcggagcacttcagcgttgacgagagggtcttgagcattgttaaagcgtttgctgaagcaggaaagcctattgtcaccacttgccatagccaactcattttggcggcggcagggcttttgaaaggcaagaaatgcactgcctttgcaagcatgaaaccagtgattgagctggcgggtggtatttggtgggagcaacctggaatcacatcaccttttgacattactgcttgtctcaaagatggaaacatcttgagttccataggatggccagcgcatgctgaaattctcaaaactttgtttgaatccatgggagctcgaattcatacaaccaaggctaactcagtgcttttcctttgtggggactatgtagaagattatgaattcaatgtcccattccgtgcgctccaagcattagggtgcaaggttgatgcagttaccccaagcaagaagaagggagaaacctgtcactgccatc

SEQ ID NO: 9697 - DNA, 595 bp, Gossypium hirsutum
  Clone ID: LIB3828-027-Q6-K6-B5
gcgagaatcaaaagccagcagcgcagcagctaaaaaacagtcttttgacaattattcgccatgggtaaggttcacggatctctagctcgtgccgggaaggtgagaggccaaactcctaaagtggccaagcaagacaagaagaagaagccccgtggccgcgcttacaagcggatgcaatacaaccgacgcttcgtcacagcagtggttggatttggcaaaaagaggggacctaactcatctgagaagtaagagatctatgtaggtgaagaaggcaagaagccttgttgaaagctttgatggattttaagtctttgttttcttttgataatgtttttatgatattggtttcaaggattggattgaactgccattttgtttgctagatattatgtgatattgttatcaattatcttaatttttggtttactatgagtttcgattcctcttcatccatgctgtaattgacttgccgttcccctccctgcattcactgccgaaactaattgttctactagttagggctgaatggagaatgatttgaaatactactatctgagaatgtggagtccaaaataatgaacgaatggatagatta

SEQ ID NO: 9698 - DNA, 572 bp, Gossypium hirsutum
  Clone ID: LIB3828-027-Q6-K6-B6
cccagcgtccgattgctttttaaatatcatccatggcatataagcttcttaagtcattggaggtggtggcgatttcagtgctgtttgtaatattgcaaaactcggcaaatgcaaagccccaagtgccatgctatttcatttttggggactccttatccgataatggcaacaacaataaccttaacaccttggccaaagtcaactattcaccctatggcattgattttcccaaaggaccaacaggaaggttcagcaatggcaaaaacatgcaggattatattgctgagtatttggggttcacacgttctatgcctcctttcgccgaatcaaaaggggaaaacattttgaatggtgtgaactatgcgtctggtgctgccggcattcgtgacgaaactggaaaagatctgggtgatcgaatacccttggacaagcagatacaaaatcacaaaattataatattgagactttctaagttaatgcgaaataatatagagactatattgctcttaaaccgatgtatttattcaattcaaatcggaagcaacgactacatcaacaattatttcaagcca

SEQ ID NO: 9699 - DNA, 619 bp, Gossypium hirsutum
  unsure (1)..(619): unsure at all n locations; Clone ID: LIB3828-027-Q6-K6-B7
gaagagcctctcacacaggtgaacataactgttccagggacagaggttgcagctgagactgctgctgctatggcttcagcatctctggtgtttaagacatctaactcggcatactcaagcacacttcttaagcatgccaagcaactttttaatttcgcagacaaatatccagcttcttatagtgagaacatcccagaagttgctacatattacaattcaacagggtatggagatgagcctttatgggcagcaagctggctctatcatgcaacaggcgatcgatcgtaccttgactatgcgactggcgaaaatgggaaactgtttgcttcatggggaagtccaacctggtttagctgggataataaaaatgcaggaacccaggtcttgctttccaggttaagcttgtttggtgccaaaggagtctctgggaattctggccttggaaactataggagctctgctgaaggtgttatgtgtggtcttttgccaaagtctccctcagccacatccagcagaacagatggtggtcttgtatggatcagtgaatggaatgctctgcagcaccctgttgcctctgcattnttagctgctctttacagtgattacatgcttacatcac

SEQ ID NO: 9700 - DNA, 558 bp, Gossypium hirsutum
  Clone ID: LIB3828-027-Q6-K6-B8
attaaactgagctacttacctttgctactcttcaccttcttccttgtagcacaaggatctagaactcaactaatacttccattccaacaaggggtctatcaatatcctcaattgcatatgcaagcaacacaaggcagcaatgaagcaaaaaggataggaattcaaggagattgatgattggatccacagcccctacttgcacttttaacgaatgtagaggatgcaaatacaaatgcagagctgagcaagttccagttgaaggaaacgacccaatcaatagtgcttaccactacaaatgtgtttgccataggtcatgaaaccagatatggttctaagtttactggtttagaatcaaacagcatattagaaactagattcccttctacattcaaatactactatttcgtctcagtagttttctggtttacttttttggcacatcaagaatttcctgctatcatgaaagaaagctggaatgtgtatcattaattccttttcttggcttcttgttatgtaaaggtttataaagttgatttgagagcaactgccttaatattc

SEQ ID NO: 9701 - DNA, 577 bp, Gossypium hirsutum
  unsure (1)..(577): unsure at all n locations; Clone ID: LIB3828-027-Q6-K6-B9
cggncgcgtgggcggacgcgtgggatgaaatagacgtcactgatgacattgggatggctgatgcaatattagcatctgcatctgaaataaagcagaatccgtggattcgtggggtagcaaagtttcacaagttgccaatgtttgttattaagtcaaataccatggcacaaatggtcaaagcagtgcgcatgattctcgaaagggaatcatatgcctcaaggtcaaggcttctagacagagattcttctgatattgagattgaagatgatgcaccaaaacgaaaacctacattagaagagatcgatgccttagaggaggttcgtctggcgatcgagtatatcgtcattcccggtggtgaaccagtggagcttctcccgagacgttccgaaataatagcccgtcaacttgagcttgtcaaaagctatcagttggatgcagagaactcaggtactgagcttaacccaaggttgcaaattcttcctcatagattgaacaaaaaggtatcatcaaaatccctgaaagctacatcgaatttacgaaacgaaactggctcaaagcccctaactgatagctgcgg

SEQ ID NO: 9702 - DNA, 596 bp, Gossypium hirsutum
  Clone ID: LIB3828-027-Q6-K6-C1
gggaggtccagcacagaaagttgttcgttttattggtgcctgtacaaagtttccacagttgagcatagtaacagagtacatgcctgggggaagcttgtatgactatttgcataagaatcataatgttttgaagctctctcagttgctgaagtttgctattgatgtctgcaaaggaatggagtatttgcatcaaagccacataattcatcgggacctgaagacagcaaatttgttaatggatacagacaatgttgtcaaggtggcagattttggtgtcgcccggttcttgaaccaaggaggagtaatgacagctgagactgggacatatagatggatggcacctgaggttataaaccatcagccctatgatcaaaaagctgatgtattcagttttgctgttgtactgtgggagctagtgacagccaaggttccttacgataccatgacaccactacaagctgcactgggagtgagacagggcctgcgtccggaactacctgagaatgcacatccaaaactcttagatttgatgcagagatgttgggaagcagctcctgacaagcgaccgtccttctcggagataacaactgagcttg

SEQ ID NO: 9703 - DNA, 601 bp, Gossypium hirsutum
  unsure (1)..(601): unsure at all n locations; Clone ID: LIB3828-027-Q6-K6-C10
ggaaatgcttctaaaagtgcagatggtgccatgattcttaacacattaaagaagaaaattgtcccgtcacaggtgacagtcaaactgatacaaaaggagatggaattaagtgacaatcacaaatttctcattgatggcttcccacgtactgaggagaaccgagtatcatttgaacaaattattggtgtagagccaaatgttgtacttttctttgattgcccagaagaagaaatggtgaaacgtgtgctgaatcgtaatgagggtcgagttgatgacaacttagaaacaatcaaaaaacgtcttacagtttttcaggcattgagtcttccagttattaactactactctgagaaaggaaagctctatacggtagatatataaaattgtctcctttggggctttatgtttttccctttctaatttgtggcagcttacatagcatattggttatagtaaatgaagcaaatacttgcagatcaaggcaataggaacagaagatgaaatatttgaacaagttcgtccaatctttgccgcgtttgaggtatgttctgtgagtgcaatgatcctttctatccagctntgctgtttttttttgttacat

SEQ ID NO: 9704 - DNA, 608 bp, Gossypium hirsutum
  Clone ID: LIB3828-027-Q6-K6-C11
tcagttaaaaacactgcaactcccccccgcccccgccctacccaaaaaaatgataggcggacgaagggaaggtgggttgatgaagaaaagcatcgcagtcagtggtgaaatcaacaatattaatagctgttgccattgggatttccattggttgcctcttcgcttttctttatcctcacggtttcctctctttctattcccctgctttccactcccaggttctatcttccaaatgtgaatcatctcataggttgaacgagttgaaagcagagtatgcggccgaattggagaaaaacgaagagttgagacaacaagttaaggagcttactgagaaggttaggttggctgaacaaaagaaagatcatgcacagaaacaagtcgaggcattgggtaaatggcgtaaagcggggccttccggaaccgttaaaggtttaagaacaaaccccacagtgattccagatgaacccgttaatccgagattggcggaaattctggaagctgttgccgtcggaagagagcttatagtggcacttgcaaactggaacgtgaaggagtcgttagagatttggttcacaaacattaagagagttggcataactaattatttg

SEQ ID NO: 9705 - DNA, 568 bp, Gossypium hirsutum
  Clone ID: LIB3828-027-Q6-K6-C12
ccgggtcgaccagcgtcgggctaaggctgtactgcaggtcggtcagatagcaatggccgaacttttaatactcttcattaccactcgagactagaaccaatcaaactcaaaactactcaaatccagaagtctagaaagcagaggaaaaagcgtagaagaagattacgagatttaagtattgtccagaatactccaaattcggaagaagcaaatagtgaacagcagatagttgttggatcttcaaatgtgccggagacacttaacgagcctatagaattttaaactgaaagtggtgggacgcgcagaggtcgaggacgtaagctgcttaaaaatttatacgacttaaatcctgtctagcgtgtcaaagtaagtagaaacaatcatggtcagcctgttggatctgaagctcgacttttagcaggctatttggacattatatcacgaaatgctaatatgttacccatcaactacgaatcatggcatcacattcctgatagcaacaaaaatcaatctctcgataatataaaggagagatttgctttaaaggtctccgatgactatatcaaga

SEQ ID NO: 9706 - DNA, 594 bp, Gossypium hirsutum
  unsure (1)..(594): unsure at all n locations; Clone ID: LIB3828-027-Q6-K6-C2
gttttgcagtgtttctcttttacattagagaattattactgcatttcccttgaanacattaaaaacatttacttatatttcttttatttttaaaatttaacccagcaaataaagatggctcgccaagttatgctcgtcgtcgcccttgttctcattgccgttgttggggcttatgcggcggatgtgcccaagacctcttcttcttcatcgccttcaacatctcccgcctcatctccctcctcctccattggcactagcagttcccctcctacaccaaacggcggtgctctcgctccatcaccatctagtgccgtttctctcaaagcctccagtttcgttggtgctgttaccgttgttgccggactcggactcttttacttctaaggtttaacacgctacatgcatggccggtggatctacgctttatatatatatatatgattaaaatgtattttgcttgcgaatagccgcggcatagaatgtgtgaacagtcttgaataataataataagaagactttggcgagtgttttttttcttttttttttttccattttgtttgcttttaccgcataggaaatttcaaaggatataat

SEQ ID NO: 9707 - DNA, 572 bp, Gossypium hirsutum
  unsure (1)..(572): unsure at all n locations; Clone ID: LIB3828-027-Q6-K6-C3
tattgtttgcattttcttttaggaaaaaccctaaattcttcaaaactctcacggacagaaatctcattcgattttctccagaaagtttagcgaagatggtgttagcacaattagggggtgagcantttcccggcgcgataccaacagtnatgagcaatgcccacgnatgaagtggcgatgagaaaggggttttaaaccgaatgcgctcaatgataatcaccagagctcttcttcaatccgatgttcaattcaagctcgttcgtgatatgcaaactaatattaagaagatcgtcaatcttgatgatctagctgccggtcataacaagcgaaaaatcatccaacaggcaatttttaatgaactttgtaagatgttggatcctgggaagccggctttcacaccgaagaaagggaaaacgagtgtcgtgatgtttgttggtttacaagggtctggaaaaacaactacatgtacaaaatatgcctattatcatcagaaaaaagttggaaaccagctctagtctgtgctgatacgttcagagctggtgcttttgatcaattgaagcagaatgccacta

SEQ ID NO: 9708 - DNA, 616 bp, Gossypium hirsutum
  Clone ID: LIB3828-027-Q6-K6-C4
ggtgaactcaaaattgtgactttggtatggcgcgacagtatgggagccctcttaagccttacacaaccaaggtggtgactcagtggtatagggctcctgaacttttacttggagcaaagaagtattcaacagccgtggacacgtggtctgtgggatgtataatggctgaattgttagctaaggaacccctgttcaaagggacaagtgaaattgatcagcttcgcaagatatttgatactcttggtgttccaagtgagaagatttggcctgggttttctgaattaccaggttccaaagcaaattattctaagcaaccgtataacttgttgcgcaagaagtttcctgcagcatcttttactggatctgccgttctttctgatgctggatttgacctgttgaacaggcttcttacctatgaccctgagaaaagaataacagcagatgatgctcttaatcatgattggttccggaagcttcccctgccaaaatctaaagatttcttgcctactttcccaccaaaagtgtgaatggaacaatttccttgcctgatttgtggaagctggacacaaccaaaatattagcaccgcattcttacctagcaattgtagtggtcatg

SEQ ID NO: 9709 - DNA, 607 bp, Gossypium hirsutum
  Clone ID: LIB3828-027-Q6-K6-C5
gctgccttaggttccctggccagctcaactctgacctccggaacttgctgtcaacctcattcctttccctcggctccacttttttatggttggatttgctcctctcacctcacggggatcacagcagtatcgttctttaaccgtcccagaactcactcagcagatgtgggatgctaagaacatgatgtgtgctgcagaccctcgacatggttgttacctcacagcctcagccatgttcaggggtaagatgagcaccaaagaggttgatgagcaaatgattaacgttcaaaacaagaactcatcctacttcgttgagtggattccaaacaatgtcaagtccagtgtttgtgatattcctcctcggggcctgtctatggcatctacctttgtcggcaactcaacctccattcaggagatgttcaggcgagtgagtgagcaattcactgctatgttcaggaggaaggctttcttgcactggtacactggtgaagggatggatgaaatggaattcactgaggctgagagcaacatgaatgaccttgtttctgaatatcaacaataccaggatgcaacagctgaggatgaacttgaatacgaggatgaagac

SEQ ID NO: 9710 - DNA, 569 bp, Gossypium hirsutum
  Clone ID: LIB3828-027-Q6-K6-C6
gccgcttcctctgttaaaggctcattattctctgtttcgtatttctcttaaaactctacatggctaaaacctttgcttgctttgtcctattagctctcatagttagttgcgcacttggtcaggctcctagctcggccccaaccaagtcaccgccgtcttctaaccctactccggctcccaaggtttctccaaccatgtctccaaccactacaccaaccgcatctccgccgtcaacatccactcccccgtcttcagcccctgaatcttcaccaacttcctctcccaccacttctcccccagctcctcccgctggttctcccgctggttctcccgctggctctcccgctggctctcccgctagcgctgtttctcccacaaactccatcagcgatacaccaggcagctctcccacttctcctacgagtgcagccgctttgaacagggtcaccgtcgccggatctgccgttgcagtcgtttttgctgctttgttgatttagatctgactttcgggggaggacaggatttggatttgatgatttttattttaggctcattgttaatttcttatt

SEQ ID NO: 9711 - DNA, 608 bp, Gossypium hirsutum
  Clone ID: LIB3828-027-Q6-K6-C7
aaaaaaaaacccccctctttccaaattaaagaaagtaaattggaagagagagctggaatgatgttgggaagttacggagggaaggtgagtgtgttggaatgggagacagaatctggtgctgcggaggagacgatgctgctttggggaatccaacagcccactctctccaaacaaaacgccttcgtttcccactcttctctccaactccttcttgatgcctgcggccattctctctccattctccagtctccttcttccttgggaaaacctggagtaactggagcagtcatgtgggatagtggagttgtgttagggaagtttttggagcatgctgtggacttgggaattcttgttctgcaaggcaaaaaggtcgttgaattgggctctggctgtggattagttgggtgtatagcagctcttttaggtgctcaagttatcctcactgatctgcctgatagattgaggctacttaaaaagaatgttgaaagcaacttgagacatggagtgaggggttctgctgctgtgaaggaactcacttggggagatgaccctgacaatgacttgattgaacctccacctgattatgtgctaggttcagatgtgatcta

SEQ ID NO: 9712 - DNA, 610 bp, Gossypium hirsutum
  unsure (1)..(610): unsure at all n locations; Clone ID: LIB3828-027-Q6-K6-C8
tttgctttaaaatcctctcaaacatcaaaatttgntttggcaaacagnnaccaaaaaaatccagctatgggcaatacggagaagctgttgaaccagatcatggacctcaaattcacctccaaatcgctgcaacgccaggccaagaagtgcgagaaggaggagaaatctgagaaattgaaggtgaaaaaggcgatcgagaaaggtaacatggacggtgctcggatctacgccgagaacgccatccgtaagcgcactgagcagatgaactacctgcgtctcgcttcccgactcgatgctgtagttgccaggctcgatacccaggctaagatgaccaccatcaacaagtccatgggaaatatcgtcaagtctctcgaatcttccttggccaccggcaatttgcagaaaatgtcagagacaatggataaattcgagaagcagtttgtgaatatggaggtccaggcagagtttatggagagtgctatggctggctctacttcattgtccacaccagaaggtgaggtcaacagcttgatgcagcaagtggctgatgattatgggttggaggtctctgttgggttgccacagcccgccgctcatgctgtgccaacca

SEQ ID NO: 9713 - DNA, 578 bp, Gossypium hirsutum
  Clone ID: LIB3828-027-Q6-K6-C9
ggccgatccaaaatgtcgaacgaggaaggggaggtagtgcggggaacaagttcagaatgtcgctgggtttaccggtggcggctacggtgaactgcgcggacaacactggggccaagaacctctacatcatctctgtcaaaggaatcaaagggcgtctcaacaggctcccatcggcttgtgtcggtgacatggtcatggccaccgtaaaaaaaggaaagcccgatttgaggaagaaggtgttgcccgccgtcatcgtccgacaacgcaaaccttggcgtagaaaggacggcgtctacatgtacttcgaagataatgctggtgtcattgtcaatcccaagggagaaatgaaaggatctgctatcactggtcccattggaaaggagtgtgctgacctgtggcctagaattgcaagtgctgccaatgctattgtttgaaaggtttccatggttttgtttgctactgtagctttgatgttatctttcaattacttacaacatgttttgagagattttgatcagacaatgttacatgtagttgtctaaaacttatttctggtttctttttatggaattacaaca

SEQ ID NO: 9714 - DNA, 313 bp, Gossypium hirsutum
  unsure (1)..(313): unsure at all n locations; Clone ID: LIB3828-027-Q6-K6-D1
gntgtccccctgtctcctatgactgaaaggtgggataaagtgtggaatataattattttgtctctccagttgggttggctggttggtggcattggatgtctgctggattctaggctggaaagaaagctttgttattaacctttcattctaatttctttagattatttattcccctaatttgactcaaccttttgttcttttacgtttcgactgtattttacactctctactgaaaaggggtaatttagtctttgtacattatattaaagagtaaattagttattttttataaaaatttcatccatttgtacgt

SEQ ID NO: 9715 - DNA, 486 bp, Gossypium hirsutum
  Clone ID: LIB3828-027-Q6-K6-D10
tataaaaaaaaaaaaaaaaaaaaaattaagatgatagaaaaaaaaaaaaaaaaaaaaaaaaaaaaaaaataagagaaaaaaaaataaaaaaaaaaaatatataaaaaaaagtgggggagtgataatgagaggatattgttgtgtaactgtggggggttgcgctggataattgttttgggatgtggtatattggtatgggggtggggggtcttttttttgggtcgcggtttttttggggctggggtggtgcttttttgtttctgttgggggggggtgtttttctttttctgcttggcatgcctttgttgcggggttcgctcctcctttctctccctgtggcacttgcgttttggtgggggatggttctccgtttccgggggtggactcttttaggggggggggggtcattcctcccattctttttacttgccttctttggtagagatgttcggtccgctgttttccctttctttttccacggggggg

SEQ ID NO: 9716 - DNA, 598 bp, Gossypium hirsutum
  unsure (1)..(598): unsure at all n locations; Clone ID: LIB3828-027-Q6-K6-D11
gnggaggtggagagacatgctttttggagtcagagtggtggttgattccatgaggaaagtgtgagtatgaacaacctttctcaatacgaacaacctcatgaatcgaacaagaataacaacaagaacgacaaagatcaaggcgatgataatctcaccgccggttacgcgtccgccgacgataccgttcctcactctaccggaaatcgagagcgcaaaagaggggtgccgtggacggaggaggagcacaagctgtttctggtaggactgcaaaaagtagggaaaggagattggagagggatttctagaaacttcgtgaagactcgaactccgacacaagtagcaagccatgctcagaaatactttctccgacgaagcaatctcaaccgtcgccgtcgcagatctagcctctttgatatcaccaccgatacggtgcaggcaattccaatggaagaagagcgagttgatcgacaagaaaactcaactcagccatctgaaaccaatgtgtttcccattatgccggcgacttttcccatggcctttaaccaggtagttccgccggttccaattcagaatccgactgaaaatctcacaatagcac

SEQ ID NO: 9717 - DNA, 271 bp, Gossypium hirsutum
  unsure (1)..(271): unsure at all n locations; Clone ID: LIB3828-027-Q6-K6-D12
ctcaaactgnaaacatggttaatttgtttgactctaattggcatagtgctgatggaagaggtgatccaaattgatgcagcaatgacaatccaccatccagaggtctccggtcttgtttcctaccgtcgccttctccaagaagctattaatccttggaatcgtggctgctcaagactcactaggtgtcgaagttaatgtatattttgataatatgtgacggtatctttcttttataaatgtagaaacctctgcatattaaggcaacacgatt

SEQ ID NO: 9718 - DNA, 574 bp, Gossypium hirsutum
  Clone ID: LIB3828-027-Q6-K6-D2
acccttctttcttctttctcctttgactggaattttaaatttacgttcgccccaatcaatcaatctcttatatctgttatttacaaggcctgatttgaaatatccaagatctgattccgacaacggaaaacgctactgttttggggcctagacttgaagccctttctgcttcttttttgaggtttgggtttttcttggatgtgcttatgttttgttctcaaatctgggttgggctgtatttgtagctttgattcggtattctggcaaatgtcgggtttgcccaagggtgaatcggttcatattgcgggaagttcggaacgataatctacaggaacagtttgctttgatccgtgaaattgttgatacttacaattatgtggctatggatactgagttcccgggtgtggttctacgccctgtggcaactttcaagaattaaatgattataattaccaaactttgaaagaaatgttgacatgttgaaattgatccaattgggtctcacttcttcggatcaaaatgggaaacttcccacttgtggaactgttagcttttgcatttggcaattcaattt

SEQ ID NO: 9719 - DNA, 594 bp, Gossypium hirsutum
  unsure (1)..(594): unsure at all n locations; Clone ID: LIB3828-027-Q6-K6-D3
gcccttttaggcatgggtgactgggtctggnattcatggnacaaaattcatgaagttgttcccatggatcaacaacctgagcttctccaaaagctttcagaagggaactttaccttaaggattatgtatgagcaatttcaaaacatactcaaaatgggtccaattgggcaggttttctcaatgcttccaggatttagtgctgaactaatgccaaaaggtcgtgaaaaagaaagccaggcaaagatcaagcgctacatgaccatgatggactcaatgacgaatgaagagttggatagctcaaatcccaagctcatgaatgaatcaaggatgatgcgaatagcgcgggggtcaggacgtcatattcgagaggtaatggaaatgatggaggagtacaagcggctagcaaagatatggagcaagatgaaggggctgaaaattccaaagaagggtgaaatgagtgcgttgtctcggaacatgaatgcacagcacatgagcaaggtccttcctccgcagatgttaaagcaaattgggggtatgggtgggttgcagaacttgatgaagcaaatgggttcttaccaaagacatgatggggat

SEQ ID NO: 9720 - DNA, 534 bp, Gossypium hirsutum
  unsure (1)..(534): unsure at all n locations; Clone ID: LIB3828-027-Q6-K6-D4
ggcagcaaaaagagtgcttgtttctcatattgtgcttgttgacaccaatttttttttaaaaagggtcgacttggattttgaaaatgaaaacgaaaatgagagtggccaccaatcctttttgataaggtgtgatcgggtcaccttaaaagtggttgtttttaataaataatttaattttattaaaacaacgattttggtccacgaaattcaaaaaagggctcggaagtcggttacgtacgaggaaggattagcaccctcgtaacgcccaaaattggtacccagttgattaattagtgtcttagcattgaagattgaaaactttaaagagatttgaaaatacgatccttgtattaaaaacttgtataaatcaaattacatgttaagaccctctcatttcggagagagaaaatgtcatacctaacgagttagggcatgttatttcacatcctcaaaaatgagcttgtcctttaaaaatctcatgcaataaaattcaaaagcatattcaattttttaaaaaaaaaaaaaaaannnaaa

SEQ ID NO: 9721 - DNA, 111 bp, Gossypium hirsutum
  Clone ID: LIB3828-027-Q6-K6-D5
gcgagggccgccctttttttttttttttgcactttccctttttgacagcaggagattggaaccgtaatttattatttcatgtattttttgcaataaaaatgttcatttatt

SEQ ID NO: 9722 - DNA, 586 bp, Gossypium hirsutum
  unsure (1)..(586): unsure at all n locations; Clone ID: LIB3828-027-Q6-K6-D6
naatgtaactnaaaaatttaacctcgaaagggtgcttttataagatttttgaaggagtttatatgcctgtgctggattaacgttttcgtgaagctgtgaattttgggtgggtgctaggatgatggttgattcaggtgcaacaacaaaccagggtcccgttgttgatatgatatctgagaaagatggtgatggcggatatgttactggagggtggaaaagtgaagatggaaaattaagctatggctattcaagtttcaggggaaagagagcaaccatggaagatttctatgatattaaaacttccaagattaatgggcagatggtctgcatgtttggaatctttgatgggcatggtggttctcatgctgctgagtatttgaaacaacacctttttgagaatctaatgaagcatccaaagttcatcactgacaccaaacttgccataagtgaaacatatccacagactgatgtagatttcttggattctgaaagaaatacttatcgagatgatggttcaactgcttcaacagcagtattggttggtaaccatctatatgttgccaatgttggagactcaaggactata

SEQ ID NO: 9723 - DNA, 613 bp, Gossypium hirsutum
  unsure (1)..(613): unsure at all n locations; Clone ID: LIB3828-027-Q6-K6-D7
ggccaaactgctgggcaggnaactcgccctgaccattgtgatcagcagtccaaaatttagtgttctcaaatgctttatcaagtcctgttcgtcggagtctccagcattaccacatagctcaagaaggctactgtcctaatggcggccttccttcaggaaacggagccaggaacaatgaacctagctttctcccaaaccagactagggattcaaatcctcttagctctaatgactcctcaatggacatgcatgccgatagtccatctcatgaatctacctactgagaatgcaaggtaactcccttttgaacccccaacgattaacaagatcaagaagggcttttggtgcatcaccattttgtttgtcgctgctgttacccaagtaaagaaagcatgacataaagatggttaaacatcacacagaaataaaaagcacattggcacaggtgactgtttgaaggcgtttgaaaaagatagtgtagtgtgttgtctatgtgcttggtttgtgtttcagttctatttgcttggagggtttaaatttcatagtaaagcattttttgttcaatcaaaattcagctacttttttaagggggaaaaaatatttcttagggctt

SEQ ID NO: 9724 - DNA, 591 bp, Gossypium hirsutum
  Clone ID: LIB3828-027-Q6-K6-D8
gggctgttggcgagtatggtgggggtggtccaactcacaaagagctgctagagaactttttgaaagtctagagctacttttgtatgaaaatctttcatccagtcgtctaggtctgagacaggaagctgcggtcaattctaaccgtaagagcttcagtaagtcatcacaatcaaggcttctatgttttgttatcacagctatcactaagctcgccactcatcaccgtgaactattgccaagagcacgcgtagccttgatcaaggttgctcgatctcgaatatcagattcaaaggtgtcgaagtgagctcaagtttatttgggtttaattgatgagtctggtatttgtttgcctgtcttgggaccttcccgcccttcacatggattcgtgcattatccaggcactgtcaactggaatgaaggaggcaacaaaatggtcgcacatatcccgttttacattctcggcgaacaggaaggtccacccttccatgatttttcactatcagatgttcttccaagaagatcataaagctacatagtaaggtatctttggagtccagagtttccgatttatagcagggataagtaacattc

SEQ ID NO: 9725 - DNA, 589 bp, Gossypium hirsutum
  Clone ID: LIB3828-027-Q6-K6-D9
cttacaatggcatcttctgttgcaccacgaatgccgatgtacccacctggtggtccaggtcttggacagcaaatattctatggtcaagcacctccgattttcccccctcagcctggatttggatatcagcagcagcttgttccgggtatgaggcctggcagtgctccaatgccaaatttcttcgtaccaatggttcagcaaggccaacagggtcagcgtcctggtgggagaagggctggagctgttcagcaaaatcagcaaccagttccattatgcagcagcagatgctaccccgagggcgggtctatcgctatccagtggggcgtggtctacctgaagtttcgatgcctaatgttccaggaggcatgctttctgttccatatgatatgggcagcatgccaatgcgtgatgcaccactttctcaaccaattccaattggagctttggcctcagctcttgcaaatgctactccagaacagcaaagaacgatgctgggggagaatctctatccacttgtcgagcagctggaacccgatgcagcagccaaagtaacagggatgcttctggagatggaccagacggaggtttt

SEQ ID NO: 9726 - DNA, 604 bp, Gossypium hirsutum
  unsure (1)..(604): unsure at all n locations; Clone ID: LIB3828-027-Q6-K6-E1
cccagcgtccgcanccctcctttgcaggttctgatgtgccttgtcaggcgcggggaaatggtagatttagtggttttggtgactaccctatacttgaaggtcgtaggattgaatgctcacgtggtaattggttgatgcctcccccaaccacttcttgttatgataattcaatccagtcaagagatttaatgccngaaaacatcattggctcaagagcataagaatggaaaatctagagaaggaaactgcaagctctttggtattcctctcataagtgcttctagcgcatcagagcctgcagtctctcatattagtgctttcgccaagcctgtaggacatatgcaagctgcattgcaccaggttcatgcacttgaatctgataaaaggtctgaaaattcaaacgcctcccagatggcagaggatgtttctgcttttaatgagcaggagaaaatagtgaagctgggtcagccccatgcacgggagtttcaaagcaaactgtctactgcttcaactaggagttgtactaaggttctcatgcaggggactgctcttggaaggtctgtggaccttaccaagttcaacaactatgatgagttgatcgctg

SEQ ID NO: 9727 - DNA, 570 bp, Gossypium hirsutum
  Clone ID: LIB3828-027-Q6-K6-E10
caaaaactctatttgagtttaaacacacacaccactccaccctttgaggccaaagctataaagatggagaagattgagcacaccacggtgaccaccaacggcataaagatgcatgtggcatccattggctccggcccaataatccttttcttacacggcttccctgagctttggtacacctggcgccgccagcttctttcgctctcatcccttggctaccgttgcgtcgctcccgatctccgtggctacggtgacagcgacgcccctccatcgcccgaatcatacactgtttttcacgttgtgggggatctcgtaggcctcctcgacgcccttggtgttgacaaggtgttcttggtggggcatgattggggtgcgatgattgcttggaatttttgcttgttcaggcctgatagaatcaaggctttggtcaacttgagcgttccttatcatcctaggaaccccaaggtgaagactgtggatgggtatagagctttgtttggtgacgatttttatatttgcaggtttcaggtaccaggggaggctgaagcacatttcgcgcagatggatact

SEQ ID NO: 9728 - DNA, 281 bp, Gossypium hirsutum
  Clone ID: LIB3828-027-Q6-K6-E11
atttgcagtaatcttatgtttacactcatacagagaggtggcggaggcaaggggacctatcatttcgtttagatgccatagaagtgaagactgtggaagtgtctgcgccaaatgccccacctgcacttgcctctttcacctttgtacttgccctaccgaccctccatggccattatcataatctcatttacttctcagcaataaatcactctgatcctttgtctttgcaacaagctttcagatcttataataataacaactcatgggcattgtttctgttc

SEQ ID NO: 9729 - DNA, 593 bp, Gossypium hirsutum
  unsure (1)..(593): unsure at all n locations; Clone ID: LIB3828-027-Q6-K6-E12
caaaagcctctgnaagcccctctcagccgcataaataagtgctctttcacaagcccatgcctcagctacaaacgcatcagcaacatcctcgaccagataagtttctgcccctacgatatctcctgtagaatctctgactataactgcagttgtagcgattttgacatctttttggaaggatgcatcaaagtttaacttgataacatcatctgggggtcttcacagatccttcaccataattttaatgggaggacggagattctcttggtttaggcagatctctagttcataccctcgaataaaccctaaaaattcttgcataaaaaatttgacccctttgtggattaccttatttctgcgatgccaaagtccccaaactgacaaagtaatgattcatctctgtttgctcatctgttgcagaaacattctaacaaaacgcctcttacagcacaacgaagcttctagtggaggaacctttacttgtaatgaagcccaaacacgctattgagtatcacaagaccataccaaatgagctgtatcctccagatctgtcttacacagagggcaagcaacatccacactcaacttccgtc

SEQ ID NO: 9730 - DNA, 600 bp, Gossypium hirsutum
  unsure (1)..(600): unsure at all n locations; Clone ID: LIB3828-027-Q6-K6-E2
gggnggcactgggtggtacggcgcaaagcagatagggctaggatgaccacggggaccaactacttcattgaacacataggaaaccaatgaaattgactggtagagccggtggagcatttggcacgcctcgtatatttgcttcataaggaagagggtccaaacaagaagaacgaaccacccaattgccgggacaataaccaataccagtacaacggcgacaaggcttccgctaaggagactgattttggtaactatgatacggtgaattgatgagttattgttgctggtttgaagatgatattcgatttgccaagctgcagcgtaaacaagtgtgacgatgataaccatcaacatgagcgcattgtaggtctcaaatggtgccatggactgatacttcactggcatgagagccaggaatactcctactgcaaaggccaagccagcatgccaattgttgttggttgtcgtaccattgctacactcgaggaaaaaaacacatatgttattcgtgctcaacaatcattccttaaaaaggattaaatacattatatcccgatattcaattcaataattaatgcataattgtttctttcttgtcac

SEQ ID NO: 9731 - DNA, 588 bp, Gossypium hirsutum
  Clone ID: LIB3828-027-Q6-K6-E3
caaaaacattaccctcgacgtttcacggtagaagcaccggcagatagcccaaacacagatgggattcacatgggcaaatcagacggcgtaaatattattggatgtgagattaaaaccggtgatgattgtatttctatcggagatggcactaaaaatttggacataaaagatataacttgtggaccaggacatggtataggtatcggtagtcttggaaagtacccaaatgaagagccagttgagggagttaaagtcacaaactgcaccatcactaatacttcgaatggagctcgaatcaaaacttggccaggcgaatctcctgggatagtatcagatgtacattttgaggatattatcgtgaataatgtctcttcccctatcctaattgatcaaaaatattgcccatggagtaaatgcaagataaatgaagaatcgaaagttaaactaagcaacattagcttcaagaacatccgtggcacatctgcgcttccagaagctgtcaagtttatttgcagcggttcttcgccatgtcaaaatgtggaacttgcagacattgatattaagcacaccggacctgaacccgcaaca

SEQ ID NO: 9732 - DNA, 581 bp, Gossypium hirsutum
  Clone ID: LIB3828-027-Q6-K6-E4
aatggttgagaattttgagatgggtgtgtcaaataagactcctgagttcatcaagatgaaccctttggggaaggttcctgtgttggaaacacctgagggtccggtatttgagagcaatgccattgctcgttatgttgctcgctcaaaggttaacaaccctatatgtggttctacattgattgattatggtcatatcgagcaatggattgattttgcagccttggaaattgatgctaatattgccaaatggttgtatccaagacttggttacggtgtttaccttcctccagctgaggaagctgctattgctgcattgaagagagcccttggcgctttgaacactcatcttgcttccaacacatttcttgtgggacatgctgtcacccttgctgacattatcatgacatgtaatctctacttgggtttcttccagatcatgaccaagagttttacctctgaattccctcatgttgagaggtacttttggaccttggttaatcagccaaaaatcaagaggattcttggtgaagtgaagcaggcagtctctctaccacctgttccttcaaagaagcctgctgccc

SEQ ID NO: 9733 - DNA, 459 bp, Gossypium hirsutum
  Clone ID: LIB3828-027-Q6-K6-E5
tgttcataggaagtgcttctagaaatgtgcttgtgttcttttgctatccaccatgttgtcctgggtatttgctcgatacgaatcgagcaagggaaatcacagctcttgcaccaagtagcatgaagattaaggtggtagcacccccagagagaaaatacagtgtctggattggtgggtctattttagcttctcttagtacattccagcagatgtggatatcaaaagcggagtatgacgaatctgggcctgccattgttcataggaagtgcttctagatatgtgcttgtgttcttttgctgttaccttgtgtggttttcattttgttttgtttgtttttttattttcgtccatcatgaatgtatgagatatggtttataagtattgttatatgctagcatgctttgtagtgtttacatataattattttattctataatgataggaatgttgcttggtttt

SEQ ID NO: 9734 - DNA, 590 bp, Gossypium hirsutum
  unsure (1)..(590): unsure at all n locations; Clone ID: LIB3828-027-Q6-K6-E6
ctagnactgttgactttactgccaggattggtctcaacttaggtgggcgtacgtatttttcctccgccgaggatgactttgtgaaccggctttatcgcaggtctagacccggagatctcagctcaaccaattcccccaggtgccaagccgagggttgcaatgccgatcttacccacgctaagcactaccatcgccgccataaagtctgcgagttccattccaaagcttccaccgtcatcgccgctgggttgactcaacgattctgccagcagtgcagcagattccatcttctgtcagaattcgacaatgggaagcgtagctgtcgaaagagactggccgaccacaatcgtcgcaggcgaaaatctcaacagcagcaacccaatgccactcaagaacaccagaagcacctcccgcttgaaagtggtggcaatccctcctgtgataatcccccaaggtcaccgccggattctggggtccagtcatcttcttcagtaacggtggcagcttcgccggcccgaatttcattggattgtttcaggcaaagacctcacaatgcaacggtctcttcatcatcatcaggcacacttttt

SEQ ID NO: 9735 - DNA, 269 bp, Gossypium hirsutum
  Clone ID: LIB3828-027-Q6-K6-E7
gtcgtcctcggtttcaacgtccctgcggtgcgtatcatttatcgtgtggcacactagataggaaatttaaaactgagaaaaaagaaaaaagaaaaaagaaaaaaaaaattaaatttttttttaaaaaaagaaccccttacattgcattatccctttgcgaatttcatcggatatatatattatttttcttttcacaatttaatttgcctttggtttcggtgtagtaaatgaataaaaataatatatatatccgatgaaattcgccgcga

SEQ ID NO: 9736 - DNA, 598 bp, Gossypium hirsutum
  Clone ID: LIB3828-027-Q6-K6-E8
ctgcctatcacaaatccaaaaaccctactctaaagtctcctaaaagctaattccggctttcagccgtttccttttatctgttctatctctttcttttatttgtttctttaaatacccactgttagtctttttttcaatcttgcgttctttcgtttttctttttttggtagaaatggttggaaaatgagttttttttaacctctgttagtttttgaattgattttctttcttctatttgtttgaaagtgtttgaattgaattttttccctgcttgtttgaatttacaaaaactgctacggttagtgtttgaattgaatttctttccctgtttgtttggatagaaaatttctttttgtttttcctgtttggctcgttaaacgagccgattccgccttcacccaaatcttgaaaaagaatataaaaaaggaaaattatgtctttagaagtgtctaggaaagagaacgaacagccaacgccaccaacaggtggtcataacggaaacggcatggcggtgttgcagagcatggcgacgacgcaccggttacggctgaaccctaacacggagcacaagccggaaagctacgagggtttgcatttg

SEQ ID NO: 9737 - DNA, 589 bp, Gossypium hirsutum
  unsure (1)..(589): unsure at all n locations; Clone ID: LIB3828-027-Q6-K6-E9
gttttaatttctcttcctgngtttctctatatatttaattatataatattctgttgcatttcttgtttttatttttccccttttgggggagattttgtggtaacttgtaatgttaaacgaatggcgaattcgaatcaccagcgaacgccaatgtacggttcaggtgccgcgaacatgcaacggaacattgacgaagaagaagacgatgacgttccaggcggagccggaggaggaggggaagagtccgtggataaccctcagattggatttcaagaaaacggtgccgttgttgcggttatgaataatggcatggacgaagcttctcatgcccacgtttatggtcaaggatctgattcaacctctgctcctggtaatggtggcgctgatcagctcactctatcgtttcaaggggaggtttatgtctttgattccgtttctcctgacaaggtacaggcggtgttgttacttctaggtggatatgaaatcccttcaggcattcctgcaatggggacagtgtctgttactcaaacgggcttaagtgactttcctgggaggtcaattcagccacagagagctgcttctttaaacc

SEQ ID NO: 9738 - DNA, 456 bp, Gossypium hirsutum
  unsure (1)..(456): unsure at all n locations; Clone ID: LIB3828-027-Q6-K6-F1
cccagcgtccggnaagttggaagatataccatagtccacagcagaatagtcgcaactgctcctcgtttccttgaccaaagattccagtgagccatctccataaatcctcattattgtagttcagtatccacgaaagattaagatgataccagacctcaatcgctgcagggcactgttgcaaaatatggcgactgctttcttcttcagactcacatctgggacatttagtattcaccaaaacccgctttattttgagattgagaaaagatgggatatagttccatgaaatcctccatatagtcattttgattttcgatggaatttgtaatgtccatagtttcctgtaaaagtttatagtttcggtatgtaaaaataactcattaggatccaaagtcaactcatgtaatagtttataggcgctcctaactgaaaattctccggtcgactcccctttcc

SEQ ID NO: 9739 - DNA, 605 bp, Gossypium hirsutum
  unsure (1)..(605): unsure at all n locations; Clone ID: LIB3828-027-Q6-K6-F10
cacatatgtggcatgaccggnanaggtgtgaatgatgcaccagctcttaagaaggcagatattgggattgcagtcgatgatgcaaccgatgcagctcgtagtgcgtcagacatagtattaacagaaccaggactaagtgtgattgtgagtgctgttctgacaagtagagcaattttccagagaatgaaaaactataccatctatgctgtctccattactatccggatagtgttaggatttatgctccttgcacttatttggaagttcgatttttcacctttcatggttttgatcatagccatactcaatgatggaacaattatgaccatttccaaggacagggttaagccatctcccatgcctgactcatggaagctcaaggagatttttggcactggcattgtcctcggcacctatctagcttgcatgactgttgttttcttctgggctgcgaatgactcgaacttcttttcggataaatttggtgtaagatccattagacacaatcaagacgagcttacagcagctgtttacctccaagtgagcatagtgagtcaagcactcatcttcgtcactcgttctcgaagctggtctttcatcgaacg

SEQ ID NO: 9740 - DNA, 587 bp, Gossypium hirsutum
  Clone ID: LIB3828-027-Q6-K6-F11
tagagactaaaaattttctcctctttctcatttgctcgagaggtgttggctcagtgatggccttcatctccatcccctatcaatttctgaatcggtgagaacttgagtaacagactcatgaacagagtatgcattcaccctcgttttcagcccttcagatgccaggttatgtgctgctctttttgcatgctggaatttgcatccataaaaattcgcattatgctcttgaatatcatcaatataagggccgattaccgatttatcttttttttttgtgttcactttttttataaccgtcagagagtcgccttcgaaaataacatattttatctctagttcttttcccaccataactacctgcaaacatgctaaggcttctgctgcaaatcctgaagaaatattgtcatggatgaccgattttgaaacgaatacatcacctttaaagttcttgactattacccctgaacaagatatatttttccccttatcaaaagcagcatcgaaattgattttgaggaacccgctttccaacgccttccatgaatttaaagctgagtatttggcatggtgttttctttccatctctt

SEQ ID NO: 9741 - DNA, 568 bp, Gossypium hirsutum
  Clone ID: LIB3828-027-Q6-K6-F12
cggggttatgttgatgcaagaatattagtagaatcaaaaccggatagagatgatactgctgcttatgctcgttggttggtctcccagaattcttggggtattttaactacattatcaattgagttggaagggtcaccatttgggaatgtcgtctcgtttagtgatggggtacctggaaaggtactggtgtcccatatttctatttgacaacccttgatccaacagcaagaaatgcattaaaagaccatcggtcctcactcgcaatcagtgagtatccgcttggaacctgcagcaatgctgacccagaaagccctgtgtgtgcaaaaatcacactcacgggaaggttggtcctacttgaagcaaactccgaagaagcagagttcgctcgaactgcgctgttcacaaagcatccggaaatgaaggggtggcctaaaggtcacgatttccaggttttcaaattggaaattgaagacatttttatgattaactggtttggcggccctaaaccgctcacagttgatcaatacctcaaatacaaaatgaacatatttgccatcgataagtgaaa

SEQ ID NO: 9742 - DNA, 586 bp, Gossypium hirsutum
  Clone ID: LIB3828-027-Q6-K6-F2
aaagacaaagcttctctgatcatccttgtttctttggctctttgcattttgtcttcactcaatttggcttatggagcagcatccgatcaaaacaagttcaccgtcgtgggtcttgtttattgtgatacttgtcgtgttgaatttcagactagcataagcgaacctatttctggtgcaacagtaaaattggaatgtaggaatcgaaccagtgaaaaattacttttcaaagcccagaaataacaactgatgctgcgggaagctacaaaattgaagtgacaggagattatgaagactcagactgtgatgtcaacttgatgaagagtccccgagcggattgtaatgatcccacagaagcgtggaggaaagccagggtggaactcaccgcattggatggtgttaccggcccaattcgctttgccaacaatcttgggtttaaaaagaaagaagctcttccaggttgtaaaaaagttcttacagacatgggttattatgagcttaaggatgaacttggaagcgaagccgtgtgacatatttgttctgacttgttctcgtgtaataagaattgagtcattatgagtatcttact

SEQ ID NO: 9743 - DNA, 563 bp, Gossypium hirsutum
  Clone ID: LIB3828-027-Q6-K6-F3
gctatctctaattttgtttgtgatgaaggatgagtcagaacattttggtgttttgtggcactaatagaacgctttgggcccaattttaatcgtgatcaaaacgacatgcattctcagctttttgcattatctaaggcctctctctctctttcacagacgcacactcatacacacaaacatgcttaagtgatggatttattatggtttatgtcaaaatgaccaagacctttttccttgttctaaactttgggatatgactgtttaatggtaatctcatgctttatataacttccaacaacctcctgcccctgttgtcccttttggcatgaggttaaattttctcctcatctattgtagaaaagggcaatagtgtttatgttcagaattcttgaccataagtttctgtataattaagaccgtttaactttgtaagtgtgtctgttggtaagagaattctggcaattgttttggagacttctttaattattaaaattttttattcttcttcatcttgtgtagctccctaaaatttcagcctttgcgttggtgtaaagttaaaaagc

SEQ ID NO: 9744 - DNA, 626 bp, Gossypium hirsutum
  unsure (1)..(626): unsure at all n locations; Clone ID: LIB3828-027-Q6-K6-F4
acttcacccttcaaaaccctagccaccgttccatgccgatctgcttctaagacgccatcgccgtcgccgctccgtttcaagtctcacgtttctccattcccttccacttatttccttactcgccgcttctctactggttcagcgggtactgctgtgaagaagagggttgaggatgtaatgcctatcgccactggtcatgagcgcaaggagcttcaggctgagcttgagggaaagaaaatccttgaagatgtaaacaatccagtcggtccttttggcacaaaggaatctcctgctgtcgttaagtcctactacaacaagagaatagttggatgcccaggaggtgtaggtgaggatgaacacgatgttgtctggttttggctggaaaaaggcaaaccacatgagtgctcagtttgttcacagtattttgtgttggaagttgtgggccctggaggtcctccagatggacatggtgacaatgatcatcattaattgcaacctccaatttttctactgaaataaagttttggagaacatgatggaatgatgtccaggcatacaatgcaccttcaaattttcaaacaaaggnntgncttgtttttgtttttaattattccttggttctcatg

SEQ ID NO: 9745 - DNA, 623 bp, Gossypium hirsutum
  unsure (1)..(623): unsure at all n locations; Clone ID: LIB3828-027-Q6-K6-F5
cccgggttcgnacccacgccgtccggtgnattcctnaagggnaccatatttattgatcaaaagtaaacttagnaaggtccattgcaaggggctcctattganattaatgttcagggcactataaaggctccggctgatcctggtgctttcaaggaccctaattgggttagattctatagtattgaaaatttcaaaatgtccggcggaggaattttcgatggtcagggaagcattgcttatgagaagaataaagatccccacaatcgtgcatttcgtgtcaaactccccgttaatataaggtttgactttgtgaccaacgcattgatacaagatataactagcaaagacagtaaactattccacgttaatgtttttgcatgcaaaaacattaccctcgaacgtttcacggtagaggcaccggcagatagcccaaacacagatgggattcacatgggcaaatcagacggcgtaaatattattggatgtgagattaaaactggtgatgattgtatttctatcggagatggcactaaaaatttggacataaaagatataacttgtggaccaggacatggtataagtatcggtagtcttggaaagtacccaaatgaagagccagttga

SEQ ID NO: 9746 - DNA, 567 bp, Gossypium hirsutum
  unsure (1)..(567): unsure at all n locations; Clone ID: LIB3828-027-Q6-K6-F6
ggcggtgacagccataaattgctatggcatcagnaatgtttgtggttccacaaacaagagtactgtcttgtgttgcaaatgtggtatttcaatggcgccaaatcctgccaacatgtgcgtaacatgtttgaggtctgaagttgacatcacggaaggtttacgaaagcatgtgaccattatgcattgtcccgattgtgatagctacttgcagcccccaagaacttggataaaagctcagttggaatcgaaggagctcttgacgttttgtgtgaaacggctggagactgatttgaagaaagttaggctggtaaatgctgaattcatttggactgaaccacattctaagagaatcaaggtcaagctgaaggttcaaaaagaggttcttaatggagcgattttggagcaatcttatgttgttgagtatgttcaacaagataacatgtgtgactcttgtacgaggtttcaggcgaatcctgaccagtgggtggcttctgtgcaactcagacagcgtgtatcccacagacgaacctttttttatttggaacagctcatcctgaaacatgatgc

SEQ ID NO: 9747 - DNA, 616 bp, Gossypium hirsutum
  Clone ID: LIB3828-027-Q6-K6-F7
gcggtccttggttgttgaaaagatgcaactgctactcccagcaaccaaggtggaactaccgaggtgacggttgggaagcccggagacaataccctcgatgcgtctgtaggcaatgatgaaattaaagatgcaagtatgattgaggctgcaactacatttaaagggagttgggaattattccttgagaatggcggtgtttccgcaatgcatttgcaattacttcctaagatcaatcaagctttgatgtttgacgccacagtgtggaagatctcgaagataaaattaccaccgccatgccgacacgtcgagggaaccaatgaagaagattgctttgctcattcggttcttatggacattgaaacaggaaagcttaggccacttaggttgcactatgacacttggtgttcatcgggtggtcttgatatcaatggtcgattggtaagcactggcggttttaacaatggctccgacactgtgagaatcctcgacttatgcgatacttgtgagtggaaagaatatcccggtgcacttgcaaatggaagatggtatgccacacaagtaaccttaagtgacggtaaattcatggtgttcggaggtcgagatttcccaacatatg

SEQ ID NO: 9748 - DNA, 591 bp, Gossypium hirsutum
  unsure (1)..(591): unsure at all n locations; Clone ID: LIB3828-027-Q6-K6-F8
anatatctacctgttcaagctggtcatgctgtatcagtgcaaagtgctgcagtgccaaccccatcagttatcaacggtgaacatatagatgcgacagctataaaactcaaagaacctggaataagtgacatattttcttcgacagacagctctctacttggcaagctgaaaggtgaatctacagtgcagaagccagatgctgacttgtttcagagaaatattggtgagaatgacataaaggatattgaaactgggttactcgagccattattacatcccagtgtggaagtgccaccttcgtctcaaacaataacagaaactgaatatagaggtactgatgctggtgaagttcgtgaatgggaaattctgaaaagtatcgtctatggtggattaattgaatcaatcacaagtttaggggttgtgtcttctgcagccggtgctggtgccggtacattgaatgttttggctttgggagtggcaaatctgattggaggacttatcatcatttgtcataatcttagggaactgaaaaagaccaacctcgagcttctgatgttgaggaagatcggtaccaagtgctgttaggacggc

SEQ ID NO: 9749 - DNA, 513 bp, Gossypium hirsutum
  unsure (1)..(513): unsure at all n locations; Clone ID: LIB3828-027-Q6-K6-F9
ccgggtcgacccagcgttcgcttttttaaaagnaaaactcccctatacttctgctagggtttctgctttggggagctgcataggagggtcatcggcgcctcaacgcctccacctccggccccgaaccacgaggtatattaggtgcgtggtgggtgtagactctgacgtggaggtggaatggcacacgactcggaggagacgcgcgacgtgcaaggaggcgctctgttggttacggcgcaagggcagtctacttagggtttggctgaaaattgtttgagcttttgggctatgggattgggcttggggtttgggttagtttgggtttcaattttgtattgggtttgggttttgtttatggttgggcccatataatgtttgaattggtaaacaaagtggacttgtttattctgatttctgtttatgggtcccgggctgaattgggccataacagaagtctaatataaaattctatttttagaataatagtctttcaagcgtgcaaattcagtccaa

SEQ ID NO: 9750 - DNA, 610 bp, Gossypium hirsutum
  unsure (1)..(610): unsure at all n locations; Clone ID: LIB3828-027-Q6-K6-G10
tgnaaaaaccggctacaanacttttgctagtttgcttaccagcagtggcatgcttaagacttataagtcggcgcttgataaagggttgaccgtttttgctccgttcgatgaagcttttaaagctgaaggtgtccttgatttgagcaagctcatcaatgcagaacaagtctcacttttagagtatcatgcctcttcggattacaaacctaagggaacgttgaagacgacgaaggacccgatcagtacaatggcgactaacggtgctggaaagtacgatttgacagttacaatcgtcggtaactcggtgacactacacacaggggttggcccatctagggtcgccgaagtagtttttgactcatcgtcggtcgccattttcaccgttgacaatgttttgctctcttctgagttgttcgacaagtcaccgtcgtcagcaccagccctagaaccagtttcttcgccttcacctacaccatatttatctccaagcccatctccaatgtctaaagcagcgtcaccactaacagcttcaccacgagctccaccaactggcaccccagtcggatccccggccgatgcgccaactggtttgttagagaacaacacatcg

SEQ ID NO: 9751 - DNA, 319 bp, Gossypium hirsutum
  Clone ID: LIB3828-027-Q6-K6-G11
cggccgcgtgggcggccgcgtgggcggacgcgtgggcggacgcgtgggcaaagatctggtggagccccagtggtggatcaactgaagaagatgatgattctcatgatgaactttaaaaaactggtaatgacattttgattgctgaaacaagcaaacaaacaaaggtgagaaggatgagagcataggtaggtgagatgaagatatacaggaatttttctccatggtagaagttaaaaaagggagaattatatccccctttgttcggatgttatttttgggtgaatgaatacgttttaacggatattattttttttgtttt

SEQ ID NO: 9752 - DNA, 586 bp, Gossypium hirsutum
  unsure (1)..(586): unsure at all n locations; Clone ID: LIB3828-027-Q6-K6-G12
cccagcgtccngaaatcccatagcagtgaaggatctccgatctctccttgcgaaccccacaccttcgtgtcgccttccattaacaataacattcagtatatggcaatgacaagagaaggaaggacagtaggggctagtaaccctttgtttgtttggtacgaaagatggaaaagtggaaccatcggaaaagatctttcaatctaacggttaaccgttggactaaaagtaatttctgtcatgttccttctctaccttccctaccaaacaaggcctcagcaaattttattttatactgcaactgctacattcttcatgccatctaaagactcgtttagttaattagttgacaaagtttcagaaccaaatgcacttgtttatactagttttctgagaaatacagaaacctgtgtttacaacagaaatccggaactagctcatgctgccaccctctgcaaatatgggattcgaattttggcatctgtaatattttctgttattcgtagactatggtgtcttttgtactaatattacattatatgactcccttaattctgtgttatgttgaaatcaatattgtgaagtttgg

SEQ ID NO: 9753 - DNA, 576 bp, Gossypium hirsutum
  Clone ID: LIB3828-027-Q6-K6-G2
cgttttcctagttgtctctaattttcccgcattttctcgggcttcctctcaattttctctctcttccggcgagattggatctaagtgctctgacatatatatatttttactccaacctcacttggtcccttcaaaccggaagagaaaccccaatttcttaacttccgaggggtttccagttagggttttactggatctaccactattggaatatttggtttttggataattcgtgatatttacggctttgggttgcttttgtttttcttggaggggttttatttgttagatttctggagctccggcttagttttaaaagggaagaatttgaatagccaatgccatatttgggtaattggtatttgaaaggtgtatttttagcgtaattttttttggagagaccgaaaaaaaagtgatcaatgtcttgggcaggccctgaagatatctacctttctacttctcttgccagttatcttgacagaaaacttttagttctgctgcgagatggacggaagctcatgggaacattacgttcatttgatcaatttgccaatgctgttcttgagggtgcttgtg

SEQ ID NO: 9754 - DNA, 579 bp, Gossypium hirsutum
  unsure (1)..(579): unsure at all n locations; Clone ID: LIB3828-027-Q6-K6-G3
aaaaaaggcaaagcttcacanaggccctggtttcaatggcaatctgcttattgtcttccctcgttggcttcgcctatgccagcagtctcggcaacaagttcgtcgtactcggcaaagtttattgcgacacttgccgcgtagagttcgaaaccaaactcagcgaacccataccaggtgccaaggtgaagttggagtgcaggaaagaaggggacgaaactgttacgtacagccacgaagcggaaacagacgcaaacggtgtgtacaagatcccggtggaaggcgaccacgaggaacagatttgcgcagtgagcacagtgagcagtccaagggcagattgtaacgagaagatggaagcatttgaaaaggcacaagtggagttaactagcgatgatggcttagctgagcctagcagaaaggctaacaatcttggcttcaagaagaaggtagctgtccctggatgtgctcaagttcttaaagaaatgggcttccctcttaccgaataaggatttttaaatcccaagatcatatccagtcttaatcatgcaagcatagcatactctcgatatgattttaacttat

SEQ ID NO: 9755 - DNA, 592 bp, Gossypium hirsutum
  Clone ID: LIB3828-027-Q6-K6-G4
gttttcaaggtatgataccattcccgtgagccacaaagtgacaacactaaggtaactttggcacctattgtgctgaacatgacacacagaactttgtggaaataatcttcgagaatcacgagagcgccattcagtcttaccacttgtctggctactcattctttgctgtgggcatggacgttgggaaatggagccccgagaagaggatgaactacaatcttcttgacgccgtgagcagacacaccatacaggtattccccaactcctggtcagcaatcctattgacattcgacaactgcgggatgtggaacctgaggtcggagatatgggacaggcattaccttgggcaacagctttatgctagtgttatttcccctaaccgatccctcaaggatgagtacaacttgccggaaggtgtattgacttgcggcatcgtgcaaggcatgccaaggcctccacctttcagcagttaatttaattaagcttataaatctgtatccaattatggtatatgaggagagagagggtgagaaaagcttgagttccaaatgtatttaatgaaataaaatgttttggaccatatgtttatact

SEQ ID NO: 9756 - DNA, 357 bp, Gossypium hirsutum
  Clone ID: LIB3828-027-Q6-K6-G5
gaaaactttgagtattcttacctttctcatggcttgttaacattcgaattccataaaataagacaattacttgccaaaatgagagcaactaggaggttgacttgaagatgtttaagtgattttaacataaagacaaggaggaaagccactatgggaagccgcaaagagtagccgtagatagccccctacatccagctgtttactcttcgcattgtgaaatgaccgtagatagcccccctcagctactatttcttacccttctctttattgttaaattattgttttatatgtcaggagataagattgcatctcaatctttatttttccagtttaatatgacatgacttaattttgttt

SEQ ID NO: 9757 - DNA, 577 bp, Gossypium hirsutum
  Clone ID: LIB3828-027-Q6-K6-G6
cggccgcgtgggcggccgcgtgggtggatggcaatcaaaatgacttggaaaagcttacgacagagttagttgggagttcattgaagcttctcttcgagtggcaggtatccttgactttcttattaatgttattatgtcatctatctcgaattctaccatgcaggttatatggaatggaataccgctggctaagttcaagcctgttagaggagtttgtcaagggtgtcccctttcctcctacctttttgtgctttgtatggagtggcttggtcacctgatacagtttgctatcttggaaggtaaatggagccctatttgactaaatagaaatgggcctgctatctctcatttattttttgtagatgatttggttatctttagtaaagctatggtggggtcttaaagaacatcctggataatttttgtgagttgtctggtcataaaataaattctagaaagaccaatatattcttttctaaaggagtggatgatactatggtgaattcgattagctcattgtttggttttcaacgtgttcataatctgggtcactatattgtagttcctcttttccacc

SEQ ID NO: 9758 - DNA, 438 bp, Gossypium hirsutum
  Clone ID: LIB3828-027-Q6-K6-G7
cggccgcgtgggcggccgcgtgggtttgcaagtatgcatggtgtggagaagccgttcgtggtgacgtgtcgaggctcgggactcagtggcgctggagaccctcgctaaggaggctgcaattttggtcctagggtttcagtccttgaaaccggaatttgggccacctaggtcgagtttcaattgggttaaatttttgggctgtgatagttttcttgtaaataggctatgtaattaagtttattgggtctgttgggccataagagtaatttgtaaatggactggacacttattattggattttattttgttattttgttttttttcattctggttttggcatgggcccaggcgaaatgggcctattatagtgtattctaggtttctctttgatgtgtgtccgccattcatctaattcattgatttgtaatcttctttctt

SEQ ID NO: 9759 - DNA, 571 bp, Gossypium hirsutum
  unsure (1)..(571): unsure at all n locations; Clone ID: LIB3828-027-Q6-K6-G8
caaanagttaaaaaatgagggaccttaaccagaaacttttgtgggatcgatcactataatgggttcttgattcgatacataaaggcttcaaaggcatatctaggccaatctgaggactccatagttgttgatttcaactattatcgagctgatgaagcttccaccccgaggttaaaccaagatgtaatggaagaagtggagcaaatggcgtttttcaagtatggggctcgcccacattgggctaaaaacaggaacttggcgtttttgaaagttcaaagtaagtacctaaactttaatatgtttattgcagtgaagaagcaattagacccagaaaaatgttgtcgagtgaatggtcggatgagatattatttgggaaaggtgttagaagtgatggatgtgctttagaagggctttgcatatgttcagaagatagacattgcagtccaagtaaagggtatttttgcaaaccagggcttgtttacagtgaagctagagtttgcagatattcaccatcatcctccaatctttgattnttttagcggattggtcttcaggttttctcctttttctt

SEQ ID NO: 9760 - DNA, 582 bp, Gossypium hirsutum
  unsure (1)..(582): unsure at all n locations; Clone ID: LIB3828-027-Q6-K6-G9
ggcggntccccattcaccagtaggtctcattcatttccggtgcgtttaataatccctttctacgccatggacatgaagaaggtctccaccgccatcattgttgctgccgcctcaatgagcgccgtcatggccgccggtgtcccagctcctgccccttccgaagtggttctggccctagctcctctcctgcttctgctgcagcaccgggagcggattccagcgtcgctgccgccaccttgcctgttcttggatccttggttggggcttcccttgtttctttcgtttcttactttctgtaatcatctaaatgtatgaaaaccatgcgatgaatattgaaaatattggaaatgaataaaatggagctttgatgaanaaaaaaaaaaaaaaaaaaaaaaaaaaaaaaaaaaaaaaaaaaaaaaaaaaaaaaaaaaaaaaaaaaaaaaataaaaaaaaaaaaaaaaaaaaaaaaaaaaaaaaaaaaaaaaaaaaaaaaaaaaaaggggggcgcccctttttgggggatccacaattttaacttcccgggggttggcaaatttaaaaagtttttttttataggggccc

SEQ ID NO: 9761 - DNA, 611 bp, Gossypium hirsutum
  unsure (1)..(611): unsure at all n locations; Clone ID: LIB3828-027-Q6-K6-H1
caccaacaaaaactcaccaaaatgaactctaaacactcatttaactgttaacagcactcaacaatggcgaccacccttttcttcctcctatttttcacccccttcctctactccgccgccgcaccaaatcacaatgcaccgcaagatctggtccgttcatcatgcatcaacgccagctacccctcactctgcctccgcacactatcatcctactctggccccaccggcaccccacgcgacttagcccaagccgccgttaaagtcggcctcgcccgcgccctcaaagcttcgacctacttaaaaaccagcctcacggggaaaagcgaaagggaacgagcggctctaagcgactgcgtggaacaaatggctgagtcggtggatgagttaagcaaaacgttgagtgagttgaagcatttgagaggcgaaacgttcgagttccagatgagtaatgcacggacgtgggtgagtgcggcgctgacgtatgaggacacgtgtattgatgggttcgaaggggttgatcggaaggtgaaaggtgatgtgaagaagaagatcacaaatgtggctatggttacaagtaatgctntgtatctgattcgtaggcttgacgaaag

SEQ ID NO: 9762 - DNA, 602 bp, Gossypium hirsutum
  unsure (1)..(602): unsure at all n locations; Clone ID: LIB3828-027-Q6-K6-H10
cagnaggtgaagaaagcattggacaatggagaagatgccgggtttatggggtattagatgtccaagggtggnctggaaactttcacatctccgttcatgggttaaacatttatgttgctcaaatgatctttggaggagcaacgcatgtcaatgtaagtcatatgattcatgatttatcattcgggccaaaatatccaggactccacaacccgcttgatggtacagtgcggattttgcatgaaacaagtggaacattcaagtattacataaagattgtccctaccgagtacagatatatctggaaagaagttttgcctacaaatcagttttctgtctctgaatacttttcccctatgaaggagtatgataggagttggccagctgtttactttttgtatgatttgtcaccaatcactgtgacaataaaagaagagcgccgaagctttctccattttatcactcgactttgtgctgtcttgggagggacattcgctttaacaggaatgctagatcgttggatgtataggcttattgaagaagtgactaaagcaagcggtacgcgtgcatatcggtagaagagtttgggttcagttcagagtgca

SEQ ID NO: 9763 - DNA, 603 bp, Gossypium hirsutum
  unsure (1)..(603): unsure at all n locations; Clone ID: LIB3828-027-Q6-K6-H11
gcgttcgcggtaattgtaatcctggtggtttcgttctaccatttcctcaaattccanaaatcccaagaattccagaaatcccacaaatcccacagatcccacaaatcccacaaattccactaatcccacagatcccacaagtcccacagatcccacaagtcccaaaaatcccactaatgccaggacagtcgggatgtgagagtggagagtgttgccgtcagggttgtggtgggacttgtgctgagtgtggtcagcccaggtgcgcatcaggatgttgccaggctgaaactgtaaagagcaaagggatagaagaggttatggacagtgaacccagtccaccaaagtagagagatgataccatattaagatgaaataacgaggaagagttggttgtcgtcttattaattatacaaaataagaagtaatgatgttgcagaagggtttgctataaaatcctcttggacaaaaagagtaattatgaagaataaatagctcaaaacaatattcgatttgcaatatcctaaagttccttgaatcttgttttgtagccatatgtaattaatgcatgtgcatgctaatatatatgattttctttgttaaaaa

SEQ ID NO: 9764 - DNA, 405 bp, Gossypium hirsutum
  Clone ID: LIB3828-027-Q6-K6-H12
ctaaaattcacctgaaatttcttctctttttttccccattttatttttcccaaaccctttctcccctaacccgattacctttattttttcaccaatttccccaaatcggtagccctctgcatctctgtctgtaccctgctgctatatctctggcgacatctgctataaagtatattgaaaaaggacccaaggcaagggttatctttcagcaactgatatcaggagtgagttattgccatgcaatggtatatatactaatgctgaaaatagtttcccattttttacctattatatcttatctaattcgaaatttttcaccccttttctatatagaaaatttgtcatagggatctcaagatggaaaacacgctgttacatgcgagtactgttccgacacttaatata

SEQ ID NO: 9765 - DNA, 585 bp, Gossypium hirsutum
  Clone ID: LIB3828-027-Q6-K6-H2
tccaactggtatcacgcctttcacttccgccaagccccttacggcaagcacaaccgccctggttggggtcctaccatctctccacctttggcttggttcctcatggaaagtcccaccctctggctcactttctttctctttccctccggccaacatttctacaaccctaaatcattccttcttatctccccctttctctttcactacttcaaccgcaccgtcctttaccctcttcgcctctccaggaacaccacccaaaccagggcttttccggtgagtgtagcttttatggcgtttgggtttaatcttttgaacggttatttgcaagccaggtgggtgtcgcactataaggacgactatgaaaatgaggagctgttttggtggaggtttcttggtggattgttaatttttgtagttggtatgtgggtgaatgtctgggctgataaagtgttggtgggactgaagaaacaaggtgatggtggatataagatcccaagagagggctgtttgagttggtgagttgccccaactattttggggagattatggagtggtttgcgtgggcgttaatgacatggtcttggg

SEQ ID NO: 9766 - DNA, 578 bp, Gossypium hirsutum
  Clone ID: LIB3828-027-Q6-K6-H3
ctttcaccttttttgtcgaaccctgtttaaagatgggtttcccgtctttggtcttctgcagacttattgtggatggtttgaccattgttttgagatgagttagcaactttttgacaaaaagtgaatttatcagtcattggggtttaagtcttttaagagaatggaagattggggttgggattaagggtcggttttggcgacagaacgtcgccgctaagtagaaatggtcggacgacgggccaaatattgggtaaacccaaatgattcggatcggattcttaggaggcggcaagagagaacagactcggaacagggaagaaccgaaaaactaaagaaatattttgtgcggttaaatataagggtttatgtttttatggattgtgttgccacttgccagttatagaatctatacgctataattcatttaattctttgaaatattaaataaataaatttccgtaaaatttgaaataccacttttggacatgcatggtgaactaggatatgagggtgtttttgtcatttcatggttagagctttcttacatcaggatcacgttttctcctagctggcatgca

SEQ ID NO: 9767 - DNA, 375 bp, Gossypium hirsutum
  unsure (1)..(375): unsure at all n locations; Clone ID: LIB3828-027-Q6-K6-H4
ctttttttttaaaaaaaaatgttgcttcataaacacanagnaccacattttgaaacaaaaatggcacgccaacttgttgttcttgctttggttttgatttttctcgcaggcgtcatttctaccgacgcctcttccgctggtggcagcccagcaagtgcaccagctggagcttctacagttggcagtactgctagttcctcccctacttctcaggctaccaatccaggtcttagcgatggtatccctattgatgacccgtagaatgattgtcaacgaaatgtcgataaatcattaaataaattgtaatttaaaagaatggtgaggttttggaaaataaataattagttctataaatagaatgctatgtttttcatt

SEQ ID NO: 9768 - DNA, 583 bp, Gossypium hirsutum
  unsure (1)..(583): unsure at all n locations; Clone ID: LIB3828-027-Q6-K6-H5
gcagggcgagagcanacganaaacagatgagagagagggagacaattatgggagcctgggctattgcagtgcatggtggcgctggtgtagacccaaatctccctaaggaaagacaagaggaggctaagagactcctcactcattgccttgatataggcatctctgctctccgctctaacctccccgccattgacgtcgttgaacttgttgttagagaactggaaacagatcctctgttcaactccgggcgtggatctgctcttacggataatggaacggtggaaatggaagccagcattatggatggcccaaagaggagatgcggcgccgtttcaggcttaagcactgttaagaaccctgtctcccttgcccgtcttgtcatggacaaatcaccccattcttatctggccttctccggtgccgaagactttgccaagaaacagggagtggagttggtggacaatgaatattttattacggaagataacgtggggatgcttaagttggcaaaagaggcaaactcgatcctgtttgattaccgtatcccaacgattggcacctgtggtgcggnggcagccgccat

SEQ ID NO: 9769 - DNA, 474 bp, Gossypium hirsutum
  Clone ID: LIB3828-027-Q6-K6-H6
cggccgcgtgggcggccgcgtgggctttttttgcggcggttaacgtttgctgatcgttgcttggtttccgaggatcaatcatgactcgtggtaaccagagagatcgagatcgagaaaggctcaatcccgagcgggcggcaaaggcagcaagaccaaggacgatggcttaaccccagaacaacgtcgtgaaagagatgcaaaggccttgcaagaaaaggcggcaaagaaggctgcgcaggcggcagctggagggaacaatgctggaggcggtagtaaaaccaagaaataattatccgatgatgtcaaattgttaatgatttatttacgctggacggtaaagatagtgttgtttcgttgattggggaatcagatctatgtgtttcttttagggtttttcagagtctttgcctatgtcgtcttaagattaacaaactgttgtcgtgtttgcttgatttgacattgatcttgactctt

SEQ ID NO: 9770 - DNA, 601 bp, Gossypium hirsutum
  Clone ID: LIB3828-027-Q6-K6-H7
ggcagggtaaacactctctacaaacacttttccggatcgttgaacctgcagcagggcagatcataatcgatggtgtaaacatctcatcgattgggttgcatgatttgcgttcacgactcggcatcatccctccagagcctaccatgttcgaagggactatacgaagcaacttggaccctcttgaagaatacacagatgaacagatttgggaggcattggataaatgccgactcggggatgaagttcgaaacaaggccggccgactcaattccttagttagtgagaatggagagaattggagcatggggcaaaggcagttggtgtgccttgggcgtgtactattgaagaaaagtaagatcttagtgcttgacgaagcgaccgcatcggtggatacagccactgacaacctaatacagatgacgttaagggagcacttctccgattgtacggtcatgacgatcgctcaccggataacttcggttctggatagcgacatggttctgcttctaagtcatggagtaatagaagaatatgatagtccatcaagtttgctggaaaacaagtcttcatcatttgcacagcttgtagcagagtacactgt

SEQ ID NO: 9771 - DNA, 482 bp, Gossypium hirsutum
  unsure (1)..(482): unsure at all n locations; Clone ID: LIB3828-027-Q6-K6-H8
ngaaatctcccctgcctcacttcaaacaatcaaacctgaagcagatcttgcttgttgctgatcgaaagctgcatcaaagaagactgacacactcgttcttctttcttcagttctcggaccaccatttcctgccaaattacccaaagcccacaacagnaaaagttggcactgttcatttgaccctcgactaaaaacccatgacatccacgaaagatatgattgcaatcctcctcttcttggttgcatcaaggacaccgggcatcagcaactatacatttaatcttcagattagcaaaagtaggaatgtaattccaagaaattcctcatattgtaattttgactttcgaggggatttgtaaattccatagttttttgtaaaaggctttattttcggtttgtaaattaataggattttgagtaccctcctgtaatagtttgtaggcgcttctaanccgaaaaattaccagatggttctcctctcc

SEQ ID NO: 9772 - DNA, 334 bp, Gossypium hirsutum
  Clone ID: LIB3828-027-Q6-K6-H9
gaaaaaaaaaaatcttcaatcagtagaagtcaaaataaagggaacggaacgtgagccttcttgaatacaaatggtatgtaagttatatatgatctcttcatctgaaaaaaaaaaaaaaaaaaaaaaaaaaaaaaaaaaaaaaaaaaaaaaaaaaaaaaaaaaaaaaaaaaaaaaaaaaaaaaaaaaaaaaaaaaaaaaaaaaaaaggggggggccctttttaaaaaaaccaaattttacacccccggggaatggaaaattatattttttttttttgggggcccttaattaaaattctcgggccgtgttttaaaaacgtgggattgggaaaaccc

SEQ ID NO: 9773 - DNA, 116 bp, Gossypium hirsutum
  unsure (1)..(116): unsure at all n locations; Clone ID: LIB3828-028-Q6-K6-A1
naaaaaaaaaaaaaaaaaaaaaaaaaaaaaaaaaaaaaaaaaaaaaaaaaaaaaaaaaaaaaaaaaaaaaaaaaaaaaaaaaaaaaaaaaaaaaggggcgggcggtttataaagga

SEQ ID NO: 9774 - DNA, 559 bp, Gossypium hirsutum
  Clone ID: LIB3828-028-Q6-K6-A10
gcaagctcaggcgaattccacccttttgagggatctgggataagtatgaagggactagaagtgctttagatgcctgcaagatttgttgagttctaccatgagcgaatttaacaagtctacttgaacttgttgacaagatagaagttaatacggtgaataaattgttgggtgatatgaagatttggttgagtgctaccattagtaaccaacaagcttgtatagatgggttcgaaaaaaccaaatcaaactctgaagctggggagaaaatgaagaagttgttgaacatcacgatgcaactcagtaggaatggtcttgccatctcctgtgagttatcggagcaacttaaacaggtggagcttgccggactgtttgaacgtcgccgtgttctccaagacgaagatcaacttccggttgtcggccattctgattggacttcttttttagaacgaaacaaggaatggaatcgtagccgtcttctccaagacgaagatggacttccggttattggccattccgactggacatcctttatagaacgaaacaaggaatggaatcgttg

SEQ ID NO: 9775 - DNA, 584 bp, Gossypium hirsutum
  unsure (1)..(584): unsure at all n locations; Clone ID: LIB3828-028-Q6-K6-A11
gnaaaaggcagtctttgggatctcctcctgtttctaccaanaagaaaagcttggttggggcatgcgtttaaggatagcacttggagcagcgcaagggttagcttatctgcatcatgattgtagtcccagaatcatccacagggatgtcaagtcatctaacattctgttggacaaggattttgaggctcatattactgattttggcattgcgaaaagcttatgcatctcaaagtctcacacttccacttacatcatgggcactattggttatatagaccctgaatatgcccgcacttcccgcctgactgagaagtcagatgtttacagctatgggattgtcctactcgaattactgactggaaggaaacctgtagacaacgaatccaatctccatcatctgattttgtctaagactgccaataactctgtcatggaaactgttgatccggagatcactgatacatgcaaggatcttggagcagttaagaaagtttttcagctagcccttctatgcacgaagagacaaccgtctgatcgaccaaccatgcatgaagtgacccgggttctaggaagcctaatgccat

SEQ ID NO: 9776 - DNA, 592 bp, Gossypium hirsutum
  Clone ID: LIB3828-028-Q6-K6-A12
ggctcatttgggtacattgcaaactacctaggttaactaataaagttaaagagtttttcttttaaatattttaaccttttatgtaagctatcacaattggaaaataatggtctgcctatcacaattgttccatgtttttgcattctttgacatgggaataaaatatttgtttgattgcatttcgaatttatccaataattatatatcatctcagggagcaaaaaatttggggcaagtagtatggttcatcatagttatactttttgaaccttttatttcatcattataaatgtatctatcaaagatatcttttatttaggtaaaattatttacttccatgtctaacattgtgtagtatagatcacagaaaaatggggaaagcagaggctgaccttatcagcagtgaaggtgttagtggaactgttttcttcactcaagagggagatggcccaactacagcgacggggaacatttctggtcttaagcctggcctccatgggttccatgttcatgccctaggggacacaacaaatggttgcatgtcaacaggacctcacttcaatcctgctgggaaaagagcatggtgctcctg

SEQ ID NO: 9777 - DNA, 583 bp, Gossypium hirsutum
  unsure (1)..(583): unsure at all n locations; Clone ID: LIB3828-028-Q6-K6-A2
attcatagcatagcagcttagtccaactccacacccaccaccattggctgtttgtgatcatccgaaaaagatggtgaccgtggnaagaagttcgtaaggctcaacgtgcccaaggccctgccaccgtgttggccatcggcacatcaaccccgcctaattgtgttgatcagagcacataccctgactactatttccgtatcacaaatagtgagcacaaaaccgagttgaaagagaagttcaagcgcatgtgtgaaaaatcgatgatcaagaagcgatacatgtaccttacagaagagattttgaaagagaatcccaatgtatgtgaatacatggctccttcactggacgctaggcaagatatggtggtagttgaggtgccaaagctaggcaaagaagcagccaccaaggccattaaggagtggggccagcccaagtccaagatcacccaccttgtcttttgcaccactagcggtgtggacatgcctggggctgactaccagctcaccaagcttttaggcctccgcccctccgttaagcgcctcatgatgtaccaacaaggttgcttcgcaggggnggacggtgc

SEQ ID NO: 9778 - DNA, 589 bp, Gossypium hirsutum
  Clone ID: LIB3828-028-Q6-K6-A3
attaatgcctgtcaactttgctgacatgacataaacgtcaatttccacattgactgcatgtaagcaattaattaaatattttaaaatttaaaaattcaaaaaatttatgaagattatttaaaaaaaatttaaaaggtataaaaattataaagaatatattttaagatttaaaaaaataattaattgctaacatagtatacatgtgaagtgtcatgtggatgtatgttaacaaagttaataaacattaacattttcatccattttgaggtgcttggagaaataataaatgaaaaactaaaatatatatatttgtaaaattggagggccaaataaacgattataccttatatatcccacaaattgctgatatggtttgattggaaaatttggaaggggtggataccaaatattttattacccatatacatagacagaatacataaagcgaagcatgggagtgattcagcaacatttgacactgaaggaaggtttgcatatgagaatcagttatatatttcaaccgctgaaaattcttttataccctctaaaatacagagttgttgaatgcaggttttatgccagtgaacct

SEQ ID NO: 9779 - DNA, 590 bp, Gossypium hirsutum
  unsure (1)..(590): unsure at all n locations; Clone ID: LIB3828-028-Q6-K6-A5
ggctttctnccaacaggnaaatttcagggaaaagggaaagccaaatcccganaaaacccanaattctgtgcctccatggattcagaacaagcgctgaaattttcaagagacaggtccttcgatggcctgcagctgtgcttgataagctggacctcattttccttgatgccccatatcctgcccaagggaagtccggtgttgaacgcttttttgatcctccttactatgaatggttccaagctacagaggatttcactgagtacacaaattttgaagaatgccttgcgtttattgaagataatatgatgaagagtggtccatttgatggttttctgggcttctcccagggagcacttttatctgctgcattgcctggaatgcagagaattggattagcccttaccagggttccaagaatcaagtttctgataataatatcaggagccaagtttggagggccaaagttcgtacatcataagctcacttccaatgcatattcttcacctcttgaatgcccttctctccatatcataggagaaacggacttcatgaaacaagaatcaatttctctgctggaatattttgtggat

SEQ ID NO: 9780 - DNA, 590 bp, Gossypium hirsutum
  Clone ID: LIB3828-028-Q6-K6-A6
ggctgctcatctgtagcatcaatctctatttgtgcacaagaaaccaaaaaggtccaatcccttgatggtagtttgcatgctaaacctaaagtcacaattccgtaagtaaccagaactacaaacagcaagaagggctcagagacacaggactaaaggtaaggcagagtcagatgaaaatgcaaaatcaagtgttcatttgtttaaagcactccccttaaacaaaaagattcttcaggctccctcattgccccttcccaagaaaagcctgcctcaaccaccagagtttcagttgtttcatctgaggacatccgagagagccaggcagcatgcatctaatcatgcaatgaaagtacctagttatgtgtcaacttcaagaaatgaaaacacaggcctcagaagcttcaagcccatcagttcattaaaggaggagaaacatgaagctgttaacaaatttaaagcttgtgctcttaataagaaggcaatttctagtaaaggtgaaaaacggggtcctcccagaatatgaaccaaacaacagccacaatgaagcttccggatgaagcaccagtagaactattcaataagctcacgct

SEQ ID NO: 9781 - DNA, 430 bp, Gossypium hirsutum
  unsure (1)..(430): unsure at all n locations; Clone ID: LIB3828-028-Q6-K6-A7
gcggattccaaagttgaagttagaggattcgctacgtgtaacgataagtgtggctgtccttcgccgtgccccggcggcacgacttgcagttgcggagccggcgaggcggaccacaagcggtgctcgtgcggggagcattgcggatgcaatccatgcacatgcagccaggctgaagccgccgggggcagtggcaccgngaaagatgtactgcaaatgtggtgccggttgtacctgcgccacttgtgccacttgtgccaattgaattttaagagcaaagagtaatgtatggatgggtacattatttgatgatatgttttaagctatattattatagaacggaaagtaaattatgcaatgtatgttgtttcgagagatacgatgataagggttgtttttgttatgatgtaaacgaattgaaattttgtttctc

SEQ ID NO: 9782 - DNA, 579 bp, Gossypium hirsutum
  Clone ID: LIB3828-028-Q6-K6-A8
gcaaaatcaagacatagcgttctttttctgcccccgtccctccattgagggacaggaagctaaaggaacccatggcttttccttcctttctcttcctcctcatcctccttccccttttcttctcccaactttcgcctgactattacaggcaattttgccctaacttggacaacatcattcgagatgtcgtcaccaccaaacagatcagcaaccccaccaccgccgctggcacccttcgcctcttcttccacgactgcatgataggaggctgtgacgcttccgtactcatctccagcaattccttcaacaaggccgaacgtgacgccgacatcaacctctctcttcccggcgatgctttcgacgtaattgtacgtgccaagactgccgtcgagctttcctgccccggcattgtctcttgcgccgacatcctcgccttggccacacgtaacgccattaccatggttgggggacccttctacaccgttaaccttggccgcaaggacagcctggtgtccactcagtccagcgtagaagggcacatgccactggctaacatgaccatggatgagatcatcaaaa

SEQ ID NO: 9783 - DNA, 342 bp, Gossypium hirsutum
  unsure (1)..(342): unsure at all n locations; Clone ID: LIB3828-028-Q6-K6-A9
cgcacatcccaagtttngaagtcaagcctaaactagtggcaaattaaacccgactccatgttccagccctgtcccaaaaaccctaagtgccaccgcttaaaccataccaacagattcagtgcaattgtaattaatatatttattcatattacataaaaacagttctttttcattttaaaaaaaaaaaaaaaaaaaaaaaaaaaaaaaaaaaaaaaaaaaaaaaaaaaaaaaaaaaaaagaaaaaaaaaaaaaaaaaaaaaaaaaaaaaaaaaaaaaaagaaaaaaaataaaaaaaaaaaaaaaaaaaaaaaaaaaaagaaaataaaaagaaataaaaagagg

SEQ ID NO: 9784 - DNA, 553 bp, Gossypium hirsutum
  Clone ID: LIB3828-028-Q6-K6-B1
ctttggcttatctatcgctttgatttcgcatccttgctgtgcactcgatggcaaatcgatggttgaggcctgaggtgtatccgctgtttgcggccgtaggtgttgctgtcggaatctgcgggtttcagttggtgcgcaatatctgcatcaaccctgaagtcagggtaaccaaggagaacagggctgctggggttttggacaactttgctgagggagaaaaatattctgaacatttcttgagaaaatatgtccgcaacaagacgccagaaatcatgcccagtatcaacagcttcttcactgacccaaagtgaggcttcactcttgctttatgctgaaactaaaaaataaaaaaaatagaagaactaagtcttattcaatcaataccaagttatgccctttctttctgctgactgtgatgcaaatttgtgttggttttgcacttggatgaggtgtgttctttaagagaataaaaggtggtgtggatttttcgaagttgtgttgttttagcttaaatgaatgacttttatttgcaataacatgattttggtaagtg

SEQ ID NO: 9785 - DNA, 602 bp, Gossypium hirsutum
  unsure (1)..(602): unsure at all n locations; Clone ID: LIB3828-028-Q6-K6-B10
ggcctttcttcagnatgacaattgatttggttgaaatggtctttgcaaaaggagatcccgggattgcagccttatacgataagcttcttgtttctgaggaactctggtctttcggagagcggttgagaaccaactttgaagaaactaaaagccttctcctccagattgctgggcacaaggatcttctcgaaggggatccctacctgaagcaaagactccggctacgtgattcatacatcaccactctaaatgtctgccaggcctacacactcaaacgtatccgtgacccaaattacagcgtgaagttgcggccacatatctctagagagatcatggaatcaagcaaacctgctgatgaacttgtcaaactgaacccaacaagcgagtatgcccctggtttggaggacaccctcatcttgaccatgaagggtattgctgccggcatgcaaaacaccggttaaacaccgacctactacacgaggtgtgcttatagtcttttaagtccagagaagatgaattattcatcaaagactgatgtcatttcggcaaaaacctttcttataggtaaacaaaagaggcggatatatatataaatgctcttt

SEQ ID NO: 9786 - DNA, 589 bp, Gossypium hirsutum
  unsure (1)..(589): unsure at all n locations; Clone ID: LIB3828-028-Q6-K6-B11
ctcgtctctccggcttcatttcctttttgctcagatctcctcatctctcccatttttttctttcttctaatacccaatggccgtcactttctcaaatctccacaccgagtctggtcttaaagctcttaatgacttcctctctgngaaaatcttacatctctgggaataagctgaccaaggatgacataaaagtttatgctgctgttctgaagaaccctggtgattctttccccaatgttagccagtggtataattctgtttcttctcaacttgcggccagcttccctggcaaagctgttggcgttgggtttggtggcaaagctgctccagctgagtctgctaaagctgaggctgcagatgatgacgacgacttggatctattcggtgatgagacagaggaggataagaaggctgcagaggagagggaagctgcaaagaagtcagctaagaagaaagaaagtggaaagtcctctgttctcatggatgttaaaccatgggatgatgagactgatatgaagaagttggaagaagctgttcgatccgttgagatgcctggacttttgtggggagcatcaaagctggttgctgt

SEQ ID NO: 9787 - DNA, 546 bp, Gossypium hirsutum
  Clone ID: LIB3828-028-Q6-K6-B12
tctctcgacaaacaatggaagcgttctttgaatctcgatcgagaagcaactggagttacgatacactcaagaatttccgtcagatttctcccgtcgttcaatctcatctcaaagggtttatttgaccttatgttgtgccctggttgcctctgcttttggggcttatcttcatatcttatggaacattgggggttacctcacatcattcgcatgcttcggaaccatgatttggctcctctctatccctccttatcaggaacaaaggagagtttcccttctgatggcatccgcagtgttcgaaggggcttcagttggtcctctgattgacttggccattcagattgatccaagtgttttggtagctgcatttgtgggaactggcaatagcctttgcatgtttttcaggagctgcaatgttagcaaagcgcagagagtacctttaccttggtggcttgctttcatctggtgtgtccatgcttctgggtttgcatcttgcttcctttatctttggtggtaggcggcagccttctttatgtttgagatcta

SEQ ID NO: 9788 - DNA, 504 bp, Gossypium hirsutum
  unsure (1)..(504): unsure at all n locations; Clone ID: LIB3828-028-Q6-K6-B2
gnaaaaaggcatccaatgggacaacanagaaaaggctggcaaatatgcatccttcttctccggcacacaagacaaatgtggagtttgcaagaaaactgcatacccattagagaaggtgacaatggaaggagaaatctaccataaaaactgctttaggtgttcacatggtggttgtgtgcttacaacatcttcatttgctgcattagatggtatcctctattgtaagattcactttgcacaattgttcaaagagaaaggtagctatgcacatgttaccaaggcaactgccatgaagaaaacctcatcagaagccaagacagaagatgatccaacaccaggggctgaagctgaagctgaagctgaataagatgattcttacatagggatttgaattaggtgttttctttttacgggttaagctacattccattacttttttttttctatcaccattcataagtatgacttattgaaaagtaatgaaagggatcttaacttctgttt

SEQ ID NO: 9789 - DNA, 573 bp, Gossypium hirsutum
  Clone ID: LIB3828-028-Q6-K6-B3
ggtcctatatcaccttaagtgtttgaggacaatgtattgatccgagagttccttgaggagaaggtaacggcagagttctggttgtagatgggggtggtagtttaaggtgtgccatacttggaggcaaccctgtagttcaagctcaaaacaatgggtgggctggaatagtggttaatggctgcgtaagggatgttgatgagataaacggttgtgacattggggtgagagcgcttcattctcatccaatgaaggccaataagaagggaattggggagaaacatgtccctttaaccattgccgggactagaatctgtgatggggagtggctttatgcggacactgatggtatcctcgtctccaaaactgagttatctgtttgagttcccttttctacctaaagactgaaatctgcaggatgcatggtaagttacgtatgcgtttcagtcattccgtgcctgagttggaattttgaactttggacataatgtgaattactctattaatggtgtgacgatgaatgtttgctgcttgatctctttgtcatattagagtaatgttattttgggtgtcttt

SEQ ID NO: 9790 - DNA, 451 bp, Gossypium hirsutum
  Clone ID: LIB3828-028-Q6-K6-B4
ggagcttgtaggtataagaaaatgaaagaacccacaaccaaaacatatttgaggaaggcagcaagctattcatcgaacaatccaaggtgcacgcatagctctgctttcaatttatgatgaagggcaattctcctgctgtgatttccctaaaaaatatatgtaagtgcctgtgaactttgttttgtatttttggtcccacttaactaatttcaaaagagatgattacgaatgaacatggaagagtggggcatataatggtttttttttttgttctttttttctttttaacaaaatttgtatttgctgtaaaatgttgaacttttagtgaataggtttcatataagctgcccttcatttgttttttgcttttttaaaaaattcttcttagtgtttaaaacatgggagcatttttactttatataataaaatggatcttgcttggttgtcaacc

SEQ ID NO: 9791 - DNA, 582 bp, Gossypium hirsutum
  unsure (1)..(582): unsure at all n locations; Clone ID: LIB3828-028-Q6-K6-B5
gngnaanatgaaccagtacgtctttctcctcctgtccctctcagtctcttctccttctccgtttcagctgcccccgggcctgaaccctctttcatcaccttggatacccatatggcaaaaccggtttccataatgccaggcaactttcattccggccttcagaaagtctgctccgccaccgatgaacccgtcgattgtatccagctgctttctcccttgatgaccgacaggaccgccgtggatcccatttccatcctcagggtgggtatcgaggcgaccaaccagaaggtgaaagaagccttggacaaagctaatattatcatgaaagatccatccaccacccccgaatacggcgagatcctctggacttgcgtcaagaacttcgaggacatcatcgactcggatcagaaagccatggaagccatcaccgagcacaacgccaaccacatcatcgaagaactctccgccgattccgcgtctgtgtctccctgcgaggacgagttggaagcggctaacatcgagtcgccggtgagggatatcgttaagtcgattcacaagacgattcgcatcaatttggccatc

SEQ ID NO: 9792 - DNA, 476 bp, Gossypium hirsutum
  unsure (1)..(476): unsure at all n locations; Clone ID: LIB3828-028-Q6-K6-B6
cggccgcgtgggttttttttctcaaattgcaattcccacttgttttcatccctatcattctcatcctcactatcttcttcggtatccgaatccgtggggacatcaagcattagatcaatatcttgttccgttaactccttcttttcaagcttggctatcaatggcgttacacccattgatataaagagaggagaaaaaccttgtgatgaaactcattgatgtaagagttttcattagagttccatttaagagtccttgactcgattaatagaactcagtagccattgagttgattgctgcaaactcatgttagaccaataatgatttgctaattcagagggatggttgcagatgagaatgtgcattcttagtttatgttatccggatttttcttttcctgaacttggatatgagaatataacctaaccgtaccgaagttnnacannnnnaattaaaaaananaaaattnttatttt

SEQ ID NO: 9793 - DNA, 581 bp, Gossypium hirsutum
  unsure (1)..(581): unsure at all n locations; Clone ID: LIB3828-028-Q6-K6-B7
ggacctgggtggcatcacacttccctcaaagggcagtggccgtttccccgaagaagttttggcaaatctagttatttcaggaacatacaggttgttgatgactccaataatctcaaggctcccaagggcttggcacctttacagaacaatcaaactgctatgatgtacaaacagggagcaacggggattggggccattacttttattatgggggccctggtaaaaaccccaattgtccttaagagcaagagggaaaagcacctttttctttttggcgttgtgttttctacctttgttcccgtgtatcattcaaaccctagtgtactgtctcctcttatatatctttttggtttttactattaggttgggttagtaacctctctagcggaaaatttagttttgattctggttgttttacttgaaaaagatcccatcccatgtaagtggtctggaattcggccaagtttctgaaaaagccaaagaggaactggcctttgttgntactctttgtaattctatttctttgnttactactttctcggagttttggtttgttattgttaatgaatggagctctttaa

SEQ ID NO: 9794 - DNA, 447 bp, Gossypium hirsutum
  unsure (1)..(447): unsure at all n locations; Clone ID: LIB3828-028-Q6-K6-B8
ccccgcgtccgcggntggattccagtcagtctgactgtgtacgaccatgacacgttcagcaaggatgacaaatgggagattcagagttcgaggtgaggtcattcatagnaagctttngaaaacgtatacgaatttggaagaaataccaagtggaacagtattatcaaggttgaaaccggacaccgacaactgcctggtggatgagagtgccatatacgtgaataatgaagggaagatcatccaagacctcttccttagattgagaaatgtggagtgtggggaagtggagatccaactgcagtggattcattaccctggctctaaaaccttttgatttttatatatgtttatttgtttgatttctacgctacctttctacacaactcaatttgttgtccacttatttatctcatttcattatattcgtaattcaataattttctttcc

SEQ ID NO: 9795 - DNA, 413 bp, Gossypium hirsutum
  Clone ID: LIB3828-028-Q6-K6-B9
cctatgactgatgattgacgaggagaatggagcagacttgaagaacttgaagtgctgagttggaagaacaacttctccagcctgcaacaactgctcctgcagctccagtgcaggtgcctgctggtaggcaaccagctcgtcctattcctcaaaagcgcactgctgaggaagatgaacttgctgcattgcaggctgagatggcactttaaggcatgtagtagagaagtgattttgttgatgggagtaccgcaggtcatgttgcaaaacatgaagagaggccatgttgtattattgaatcgtctacttcaaaatttgtgtggatttaagatttgacaatgtacataaagatttgcatgaactaaatgaagctccccctatcttttgttcgttcaataaaatatttatattctatt

SEQ ID NO: 9796 - DNA, 551 bp, Gossypium hirsutum
  unsure (1)..(551): unsure at all n locations; Clone ID: LIB3828-028-Q6-K6-C1
aggcagtccgtatgcttcttgggttaggtgtcctgctactctgccttgcaaaggtttcatctgatctgaaggcagaagaagttataaccaatgtcggtgaggtgggttctttggttaccagaggcggaaacagaagactgatgctagagattgattgtggaggattatgcaagaaaagatgcagtcaacactcgaggccaaacagatgcaacagggcgtgtgggacttgctgcttgaggtgcaagtgcgtgccaccggggacttcagggaacagggaggtctgcgggacctgctatactggcatgaccacccatggaaacgttgccaagtgcccttaacctttacgtcgcccaatatgtgttgcagccatcaaggggaaaaatgaaatgtttgtttgtgtaatatgtatgttgtagctcagatgtctcacctactcctaaaattattagtacttgtaatatatatttttaaaatagtagtatgcatttagcctcnnnaaaaaaaaaanaaaaaaaaaaaaaaaaaaaannnaaaaaaaaaaaaaaaanaaa

SEQ ID NO: 9797 - DNA, 584 bp, Gossypium hirsutum
  unsure (1)..(584): unsure at all n locations; Clone ID: LIB3828-028-Q6-K6-C10
ggttgagcccttgtaaacatggggcangatacacgtgtcacagttccaatgaatctttcccttgctgtggttgcagagcttgacgatcttacagtaggtggtctcatcaatggctacgggattgaaggaagctcacacatctatggcctgttttctgatactgttgtagcttatgagatagttttggctgatggccgtgttgttagagctaccaaggacaatgaatattctgatcttttctatgctatcccatggtctcaaggaactcttgggtttcttgttgctgcagaaatcaagcttatacctgttaaagaatacatgagactgacatacacgcctgtagtggggaatttgcaggaccttgctcaaggttatatggactcttttgcacccagagatggtgatcaggataatccagagaaagttcccgattttgtagaaggcatggtctactcacccactgaaggtgtgttcatgactgggagatatgcctctaaagaagaggccaagaagaaggggaataaaattaacaatgtaggttggtggtttaaaccctggttctaccaacatgcgcaaacggcctt

SEQ ID NO: 9798 - DNA, 581 bp, Gossypium hirsutum
  Clone ID: LIB3828-028-Q6-K6-C12
gtgttgtcaaggctgtacctaggtgtgtctttgcctttgcagcattcacaaaatgcctcagacctttccaggcgaggcccatttaatgaggcatagacgccttgtgtgccttggtgctcttttttgtaaggcaatagacttagataaacctggatgattgaaatttttactaataaaaaagggataatgtcaaacttgattggccaatgtttgctgttgatttcatgttatggtagttttaaaatggtttgggtttctttgataattggtttataattgagtttttttaatgtgtttactctcctttgttttaaatttgggtctatatattgtttttaatgtgaaaattcttgtgctttaaacaatataaattttggatttatttaaagttttcttctttcaggctagagggttgaagaaattcttgaagaggctcagtgccccccaggcattggttgctcgacaagcttggtgggggcattcatatgttatttttcccgagctttcttttggcttcctttctagtccgatgctggcttcattttaattttggattccttgggtttttttaattaacttgc

SEQ ID NO: 9799 - DNA, 599 bp, Gossypium hirsutum
  unsure (1)..(599): unsure at all n locations; Clone ID: LIB3828-028-Q6-K6-C4
aaaaaganagaggcgtctgtaataaaatctgcaatcttaattctgtcggtgtttttatctgtacgcttcagttcgggtgttaggttgctccaggaacagcccaatgatgaccccaaaaacatggacgctattcctcccattgatgcactcaaccctaccgagttgaatggacccggtgttggcattcacgaagatcatgttgtcccaaaggtgctgaaattggtactcttggttttggttttgaaggtggtcctgataaatgttgttcttctggatgttccggtaattgtaatcctggtggtttcgttctaccatttcctcaaattccagaaatcccaagaattccagaaatcccacaaatcccacagatcccacaaatcccacaaattccactaatcccacagatcccacaagtcccacagatcccacaagtcccaaaaatcccactaatgccaggacagtcgggatgtgagagtggagagtgttgccgtcagggttgtggtgggacttgtgctgagtgtggtcagcccaggtgcgcatcaggatgttgccaggctgaaactgtaaagagcaaagggatagaagaggttatggacaga

SEQ ID NO: 9800 - DNA, 456 bp, Gossypium hirsutum
  Clone ID: LIB3828-028-Q6-K6-C6
ttaatgatcagggcactatataggctccggctgatcctggatctttcaatgaccctaattggcttctattctattgtttagaaaactgcaaaatgtccggcacaaggaatttctgatggtccagggaaccattgcttatgagaagaataaagatccccacattcatgcattagctgtcaaacttcccgataatataaggttactactatgtgaccaacgcatcgtatacaagatataaatagcaaagacagtaaactattaaccgttaatgcttttgcatgcaaaaacttaccctcaaacgttttacgttagatgcacctgcaatatattccacatacagatggttattcacattggcaaatcagacggtgtaaatatacattgtatgtagaccattaaaacttgttgataatatgtatttcttatcgggagatggtcactaataaattctcacat

SEQ ID NO: 9801 - DNA, 604 bp, Gossypium hirsutum
  unsure (1)..(604): unsure at all n locations; Clone ID: LIB3828-028-Q6-K6-C7
cgngngactccaatgaagcaggntgttatgctgatctttctgatgcanacagttttagnaattatttgaaatcaagcagtttagataacgtctcaactcaatcactattcagtataatttacaagattatggatgaaagtattgaaagaaagaaaggagatgtacctcatcgtgtcgcatgcctgttgagaaagattgtagaagagatagaatggcgagtttcaactagggcaagaaatttaaaaaatcaaaacaagctttttagggcacaggaggaaaagtatcaatcaaggataagagcacttgagaccctagcaaagggaaccatggaggaaaatatggttgttctaaagaatctacaacatataaagtttgaaaagagcaaactagaggagaagggtaaagttgaagagcaggatgtgcttcagcttaagaaggagaaggttcagaaagacctcgagatttctaggctaaaagaggaactagagagcagcaaaaagatgcatgaaatacagtgtctacaattggaagcccaggctgaggataataaagtattgttagaaaagaagttaaaagaagtcgagtgtcttttaagtgactccag

SEQ ID NO: 9802 - DNA, 363 bp, Gossypium hirsutum
  unsure (1)..(363): unsure at all n locations; Clone ID: LIB3828-028-Q6-K6-C9
gcagtgcatttgatcccacacactcgtgatatgttgagagactgagagatgaacctttgtttttggtccttgctcaaaatgtccaggagtatttagagcgtattggtgatttgaagtctgctgctaaggttgctctaaggcgggttgaacttgtctattacaagcctcaagaggtttatgatgctatgaggaaactggctgagctatcgnaagatggagaaacagatggcgatgagactaaagtggaagataacacggngtacatctgcgtttgttgttactcctagagctcgtgtcccgnaagcccacattccccnaaaatatgggggattgggggatgggctagcgactcttatattcaaa

SEQ ID NO: 9803 - DNA, 214 bp, Gossypium hirsutum
  unsure (1)..(214): unsure at all n locations; Clone ID: LIB3828-028-Q6-K6-D1
ggnaaattaaggnaagacanagttcaatagataaacaagatttgtaggaaggactgaactacaaccatttgagtcctagttgcttcttgcaaagctatcaagagtttaattccatttagtgcaatatatatacatatggttaaattcctcataaataaacctagaaacatctattacaagaatatatatatatatacattttttttagatcgaa

SEQ ID NO: 9804 - DNA, 580 bp, Gossypium hirsutum
  Clone ID: LIB3828-028-Q6-K6-D10
cccagcgtccgctttctacacacactctctgcctgcctccccttatccactctttcccaaaaacccagaaaccaaaacaaagcctttatcttctttattgttttacttatcctttttgttcatcaaactacaataaaaagaaatggcctctgcaaatgctctttcttcagcttctattctttgctctcccaacaaggggagtttaaggaggaagggaaatcagagacagaaccaaagggtaaattataggcaaggaaacaaccggtttggtgtgaaggcttgtgctaaagaaattgcttttgaccagagttcaagagctgcaatgcaggctggcattgataagttagctgatgctgttggccttacacttggtcctagggggaggaatgttgtgttggatgaattcggaagtccgaaagtagtcaatgatggggtgacaatagctagagctattgagcttcctaatgccatggaaaatgctggtgctgctcttatcagagaggttgcgagtaaaactaatgactctgcaggtgatgggacgactacggcatcggtacttgcacgggaaatcatcaaacta

SEQ ID NO: 9805 - DNA, 427 bp, Gossypium hirsutum
  unsure (1)..(427): unsure at all n locations; Clone ID: LIB3828-028-Q6-K6-D11
attgcgttcctttgggnaggacgtcaccgactacgtcaacatcatcaccgctaaaaccccactggaaccggagccttggcgccgatcacttcatccttgcttgccatgattgggtaactttaccttttgtgtcatttatgattttgggttaatgttttctatcgatttaagcaatcacatcttttcattagcttgagtattaaatgctttgctcggatatgatactgatcatatgtaaaacatatgaaactaatttagacacgtgtgtacttattgtatagacagtttagatttttgatgtgcttaaaatacttaaacccaaattgtccatacaatagatacgtgtttaaaatttgatctttatgtttttaaatatgattcatgtctgaatcaatttgacatttaaaaaaaaaaaaaaaaattaaaa

SEQ ID NO: 9806 - DNA, 570 bp, Gossypium hirsutum
  unsure (1)..(570): unsure at all n locations; Clone ID: LIB3828-028-Q6-K6-D2
canaaactgatgcaaatcttactaagccccagctcacactcctctgtcccattaactgtatgagagagaggaaatctgattttcaatttcatcactgcatcttctctttgcttttggcctcatcttcagaaggtaagtcaagttctttagattgcttgccgctttttgagtttcaagatctatgaaccccagatctgtagagccttgatcttgttgctgaattcttgaattttagtagtttgggttcttttgctttttccttaataactagatttagtttattgtaagggcattttagctcattcaggatgttgggtcgtcctgggttatctagaactggaagctttaggcctgagaatctaggacaaaatgctttgcatatgattggcaatctttgtttcactatatttgtaatcggtgtcctagttttcaccattatagctgctacttatgagcctgaggaccctcttttccacccttccaccaagctcacagctttcctcacttccacatcaaatgccacctttcaatcggataacacggttgttaaaaccggagaggactttatgg

SEQ ID NO: 9807 - DNA, 341 bp, Gossypium hirsutum
  unsure (1)..(341): unsure at all n locations; Clone ID: LIB3828-028-Q6-K6-D4
tgcacggctaagaatgagtggctcgacggnaaacacgttgtgtttggacaagttgttgaaggcatggatgtggtgaaagccattgagaaagttgggtctagcagtggaagaacttccaagcccgttgttgttgctgactgcggacagctctcttagagaagaaaaagagaactatgtgttaagttgggatgttgtctaatgtctagaatatttaatgtctgtcatttagactcttttatggtgctgtttttatcgtcactgggtttggtggttttcaggaacttgctttatgtagtttttacgattaactaccattaaataagatactctttttcgtcatc

SEQ ID NO: 9808 - DNA, 563 bp, Gossypium hirsutum
  Clone ID: LIB3828-028-Q6-K6-D5
gctgtttgtgacagctgtacttcttgtaattagtcgtattggatatttcatccctctacctggctttgatagaaggttgataccgcaggactatcttagctttgcctctgggtctgttgatgacctgggtgatttttctgcggagcttaaactgtccttttttcagcttggtatcagccctcagataattgcatctataattatgcaggtactctgtcatgttgttccatccttagtgaagttgaggaaggaggggctggatggtcacgagaagattaagagttatatatggtggatttcacttggctttgcaatagtagaagctgttatagttgcttgttattctcttcaatattcaatttatgcagccagttacagggtcaagcatgtgatggtgactgcttttcttttggtttgtggtgcaatgactatgacatggatctgtgatacaatatcagaatctggatttggtcaaggttcgtctctaattatatgtgttggaatattaaccggatacactgatacactgtacaagatgttgactcagctctcaggaagtgctg

SEQ ID NO: 9809 - DNA, 599 bp, Gossypium hirsutum
  Clone ID: LIB3828-028-Q6-K6-D7
cttttctctgccatcaaccacttcctcgttttctcaagttgtagaagatggcagagggcgaggatatccaaccccttgtttgcgacaatggaacaggaatggttaaggctggatttgctggggatgatgcaccacgagctgtgtttcctagcatcgtcggtcggcctcggcacaccggtgtaatggttggtatgggccaaaaagatgcatatgttggtgatgaagctcaatcaaaaagaggtattttgacattgaaataccctattgaacatggtattgttaacaactgggatgatatggaaaagatttggcatcatactttttataacgagcttcgtgttgccccggaagaacaccccattttacttaccgaagcccctcttaaccctaaagcaaatcgtgagaagatgacccaaattatgtttgagaccttcaacgcacctgctatgtatgtcgccattcaggccgtgctctctctttatgccagtggtcgtaccaccggtattgtgttggattccggagacggtgttagccacacggtccctatatacgaaggttacgccctcccgcatgctattcttcgtatcgacttggctggc

SEQ ID NO: 9810 - DNA, 518 bp, Gossypium hirsutum
  unsure (1)..(518): unsure at all n locations; Clone ID: LIB3828-028-Q6-K6-D8
aaacccctanagttaagcagtgaagaagattcaaggtggtttggtggattgggtaaaccattctctcaaacacagggnagaatcaaagatgccattgacaaagatctgtatgggaaggggcatgatgaacaaattgtgcaggtcctcaaaattggatgcaactgtgtggttgctcatccaaagaagagatggtccatgttcaaggtttctcagtcattgcgaaccatggctgaggaaaatggtttatcagaagagtttgatgatttccctctgattttcacagaccaagatgatgaatcaatatagattgggagtaatgttaattgctttttatttatgtcagttataaatagttgtataatatcaataaaaatgttaaacaaaaaaaaaaaaaaaaaccananaaaaaaaaaaaaaaaaaaaaaaaaaaaaaaaaaaaaaaaaaaaaaaaaaaaaaaaaaaaaaaaaaaaaaannaaaaaaaaaaaaaaaaaaaaaaaaaaaagggggggccccttt

SEQ ID NO: 9811 - DNA, 420 bp, Gossypium hirsutum
  Clone ID: LIB3828-028-Q6-K6-E1
cgaccacgagtggcgtacggtcaaacaccgacgccgagaagaaaaccatctgtttgaaatccaagccatcaccggccgccatgtttcgctcgatatagcgtcggtttgtttcagtgctttctccgttgtgtcgttgatggggttcttctttatggagaaaagaaggcaaggaaatctcagcagtagtgtgatatattatggttttaagaaccctaattaaacctttgaaaggatttttatagtaatgggtttgatttgcatgtcttatttactttctttgtgtttttaatcctagatgatgggagataaagagttaagttgaatggttgtgttttagtgggaatggggtgaataaaagagttggaattatctgtgatcatctccttgttatatattaaagttgaaaattgtctttttgtt

SEQ ID NO: 9812 - DNA, 477 bp, Gossypium hirsutum
  Clone ID: LIB3828-028-Q6-K6-E10
ctttaaagccattcgcagacatttgaacaggcaaacaaacctaagatttgctcccattcacacgacgctttcaacatacacatttgatggatggcaccgttagatccccccttgctaatcacctattcatcttcaccggatggtgctcgtcgagcccggagaaatctcaaaccgaaatccctcctccaacttcgatttcagtaaaacaaaggagaagaaatccatggactgctcgcactgaacagtcgtacagaggagtgaggaaaggcgtgcgtgaaagaggccgtgcggggaaaccgctcatggaagccggaccccttggtactattctgtacacgttacacaagctactactgctctctgctgttgagatacccctttagcgttctgcatttgagctaggttaagaatatgggtttatgactttggcttagaatatgatacggctagcataggatctttatttgagcctgaaat

SEQ ID NO: 9813 - DNA, 600 bp, Gossypium hirsutum
  Clone ID: LIB3828-028-Q6-K6-E11
gcgttcggtccaatgagacctcaaaacatggacgctattcctcccattgatgcactcaaccctaccgagttcaatggacccggtgttggcattcacgaagatcatgttgtcccaaaggttccgaaattggtactcttggttttggttttgaaggtggtcctgaaaaagttgttcttctggatgttccggtaattgtaatcctggtggtttcgttctaccatttcctcaaattccagaaatcccaagaattccacagatcccacagatcccacaaatcccacaaattccactaatcccacagatcccacaagtcccacaaatcccactaatgccaggacagtcgggatgtgagagtggggagtgttgccgtcagggttgcggtgggacttgtgctgagtgtggtcagcccaggtgcgcatcaggatgttgccaggctgaaactgtaaagagcaaagggatagaagaggttatggacagtgaacccagtccaccaaagtagggagatgataccatattaagatgaaataatgaggaagagttggttgtcgtcgtattaattatacaaaataagaagtaatgatgttgcagaagggcttgcta

SEQ ID NO: 9814 - DNA, 417 bp, Gossypium hirsutum
  Clone ID: LIB3828-028-Q6-K6-E12
cttacccccgtatgcctatcttatctggctggcaaacctggctcgagctgctgcttacccgaacacgctcacgctttgacgttgctagattccttccaagacctgaaggaactgggggccaaagcttatgtgaggccggcaaatcaccagctagcacatttctcttccgtgtgaaatagaaagtaaatgctgtgcatgagccatcaagatactaaccttgctgccaaacgacaaaacatccaaaagctatagtgatcgctcccgtggaatcatagaccaaagcaggcattcctcctatattactctctcatctcataaaacttgccatggtctgcattagaggttactaattcatggttgcgcccacataatcaatttcgcaaaatgtaatttctatttagaaaactatacttatat

SEQ ID NO: 9815 - DNA, 588 bp, Gossypium hirsutum
  Clone ID: LIB3828-028-Q6-K6-E2
ttactcttttacgtggtatcctttattggattgctcaactccttggctcaaccgtcgcttgcctgttacttaagttcgccactagtggcctgggagtaccagctttcggactatcatccggcgtgggagcattaaacgcgttcgttttcgagatcgtgatgactttcggactggtgtacaccgtttacgccacagccgtcgatcctaaacgaggcaacttgggagtgatcgcaccgttggcgatcggtttaatcgtgggagccaatattttagctggtggggcattcgacggagcctcaatgaacccagccgtttcatttggaccagccttggttagctggtcctgggaaaaccactgggtgtattgggctggaccacttattggtggtgggctcgctggtctcgtctatgagttcatcttcattaaccagacccatgaacaactccccaattattagtcaataaaatttccggtgtatttaatttttgttcagctttcttttgtgcttaatttgtggccgttgatcttgtttactttttttattataatcttctatcaatgatcatcgtgcatggctgatggtattt

SEQ ID NO: 9816 - DNA, 569 bp, Gossypium hirsutum
  unsure (1)..(569): unsure at all n locations; Clone ID: LIB3828-028-Q6-K6-E3
tacaatccagcggtctcatccacgcactgccaaaatcctcaaaacccaccctaaccctctctctctctctctcctttttctattatcatatttttgtttctttcccattcaaatttctagggcctgaccgccgcaccatggcttctcacgccgccaatctatgggtgctgctcggcttgggtttagctggaatttttctgatgactaaaaggcttaagaaaactattaaagccgactttggggcttttattcagaagttagagatgcttcctncgcctcagcctgctcctcctaaagctccccatcctctcaccggtctcaatttcgccgtttctgatgtatttgacattgaagggtatgtgacntgggtttggccatccagactggttgaggacacatgaaccatctactcgcacataacctngtgcgtttggccccttgtagaaagaggtgntaccctgtataggtgaaactggttgtggatgaactggcattacagtatccatgggagagaataaacactataagaccaccanaccaaaccctgctgcaccctacaccgcttaccc

SEQ ID NO: 9817 - DNA, 579 bp, Gossypium hirsutum
  unsure (1)..(579): unsure at all n locations; Clone ID: LIB3828-028-Q6-K6-E4
gttaaagaatctgttatgggttctgtttcgttcatggattagtattttattttcaattttttccttggtgtttgtgctccagtgtgtgtgtgttttcattttagtcaagcttctgctgctctaatgttattttttttcgtggttagccttagagaatagcatgatccacataacactatatgggaaatgcatgtgatataatgataatgaaacgttattgtgctatctcatgtatgcatttagaacgaaataggctgcagggggaaaaaagcattgcaacttgcaagagttaataaaggaacaatttggtacaccgagtttaaagataatgtataaaaacagtaaagatattctgtatgatagctggtccccggctatgactgtcagttccatttgtatcagcatcctctccatgttatcaagcgcaactttgaagcaacggccaactgataatgatcgatacgttaagaactgtcggaatgggagatctcccaaggagacgagatggtggttccatgatgataaagtgtaatattttagaactgntatctatctcttataactgcgagggtttcatca

SEQ ID NO: 9818 - DNA, 591 bp, Gossypium hirsutum
  unsure (1)..(591): unsure at all n locations; Clone ID: LIB3828-028-Q6-K6-E5
ctttngacaactcctgatttagcatgccttacaatgttatcacaatcacatgcacagtgtttgcattgtattttggatcattgctcaatgcactaaggcggcgtgttgctgaggaggagagatttcttaaagacaaagctgccaagaaaagggtcggatacctctgctgctaacaaagttgtttgccaagcttagaggtagacatttggaaggtcctcaagcacccccagcttcatcatccttcattaactctaaatcagtactcaaagtcatactcatagctggactcgcagcgtgttggcaatactatttttcatgaagatataatagaagttttcagtgtacaatacaaggaaaacgaaagcacagtgtacctcaggttagggaaaaaggattttgtgtatcattttgagctattgttcattttgttttagtttttgaaactttgaaccatttttataattttcctgaaaatgtaaagattttaaccgacctttgtcatgcaaaatgattctcctttggatttccagctctgttggtgtaacggcttaaggaagggtttgataaaaaaaaaaaaaaaaaggcggccgc

SEQ ID NO: 9819 - DNA, 575 bp, Gossypium hirsutum
  unsure (1)..(575): unsure at all n locations; Clone ID: LIB3828-028-Q6-K6-E6
cgacccacccgtcccggctttggaaggcaaaaggacactggcgatgatggtgatggctcaccttccataggctggactcttcgtgaaacatgcaaaatctctatgagacggcgaagaaagccaatggttgcccaggcttccggctgtgaaggtgcaaacagtaactagctgctgcaaaatttgatggctattgtgaaggggagctgcataatgcaacattatctggaaaccagcatcctatacgcattgagattactgaggctgcaatggaacttggcgcatgaaagctatcatttttagtcaatgaagcaatccagatacacatcaaaagagtgtacaggccatgaaagcaaagatgagcgatctctgtcaaagattacgaatgccacaaggtctcgttgagggattaaagcaacaatgatctcccaactggtccccgatgtgagcttagcaaggngaccaatacgatgttcacatctccaccacgtcaacaccctggcatgagcttttcaatttacttgcgttacaaattcaatggccgaaaaatgcctcattttattaatgcttctcttacc

SEQ ID NO: 9820 - DNA, 609 bp, Gossypium hirsutum
  unsure (1)..(609): unsure at all n locations; Clone ID: LIB3828-028-Q6-K6-E7
cggnatcagctcagagagcaaaggagggaaggtatgctatgtggaagatgatgccagatatggtgccggtcattggtagncggaaagtacattactagaccaattattactgacgatggccaaccgatagaaggtgaagattgtcatgtgacaagtgctgtttcagacaagaaagtggcgcactggatgcttttcctgcatcaaattggtttggatgtttttcgaactgatcgagcacttgtgttctacgaggatgaagctaatcaagcaaaactttgggatattcttgctatatattcatgggtagatgatgatattggttatgttcaaggaatgaatgacatttgctctccaatggtaattcttcttgaaaatgaagccgatgcattttggtgctttgagcatgcaatgcgcagactgagggaaaactttaggtgcagtacaagttcaataggagtgcaatcccaacttggtatactttcacaagtaattaaaactgttgaccctaagcttcatcaacaccttgaggatctagatggtggnggagtatttgtttgcgtttcgcatgctgatggtacttttccggagagaattctccttcgtcgatgc

SEQ ID NO: 9821 - DNA, 591 bp, Gossypium hirsutum
  Clone ID: LIB3828-028-Q6-K6-E8
ccaatccatatttcaaatccctttaatcttcttgatcaataaaaccaccccacccagattgttggttagctatcccatcaaatcatctatcatcaatttcctaacgtttcctttttggtttattgccgtctcccacaaatctaatctaagttgttttaaagaaagaaaatgagctggtggtgggctggtgctatcggagctgctaagaagaaatttgaggaagatgaagcaccgaaaagcctcaagagcgttgggctgatcattggagtcaccggcatagttggcaatagcttggctgaaatcctccctttatccgacactcccggcggcccatggaaagtatacggggtggctcgtcggcccagacccaactggaacgccaaccatccaatccagtacattcaatgcgatgtatccgacccgaatgataccgaatcgaagctctctcaacttaccgacgtcactcatatcttctacgtcagctggaccaaccgaacatccgaagcagagaattgtgagatcaacggttccatgcttcgcaatgttttgcgttccgtgatcccaaacgcacccaatctccgccacatctgt

SEQ ID NO: 9822 - DNA, 608 bp, Gossypium hirsutum
  unsure (1)..(608): unsure at all n locations; Clone ID: LIB3828-028-Q6-K6-F1
ctcatcgctttcattcaccaagccgtctaattacaagnnattgtttactttcaggnaaattcaattccaacctttttgtgatgaaaaagttcagaatgctcgaccgatcccaagttcccaaggcggcttttggggtataatacatcagaagcgaaacgggcagcattgaagaaattggaagacgttcttcttgaaccaccaagagcatcctcaaggacgtccagaacttaccttaaacgaacgaaatatttgccagatctattgggggactcactcgaaagctacccccgtcgggttttcattgatgtaggcttgcctaagaaagatggcggcagtgccaccacctggtttgtcaagaattatcccacaaggaatctgaagttcgagatgtacaagatcgagacactgaccaaggactctaccaagaaagaggtgccgcagactgcggcggagactgggatgtcgggttggctgaggaagaacgtgcaggaggaagagtatgtagtgatgaaggctgaggctgaagtggttgaagatatggtgaagagcaaggctattagattggttgatgagctgttcttggaatgcaaacctaaaggacttggtgg

SEQ ID NO: 9823 - DNA, 593 bp, Gossypium hirsutum
  Clone ID: LIB3828-028-Q6-K6-F10
cccagcgtccggttttctcgcagatcgccaccgaggttttttttcttttttctttgaagggaattttgaaacttggggggctgtttttcataggaaggcaataaaatactgtctttgtgaaccatggggaccccagaaacttctcgagagccatgccctgatcggatcctcgatgatcttggtggtgctttcggtatgggcgctgtcggaggtgctgccttccatttcttgaaagccacaaacaactcccctagcggttctaggttgattggaggaactcaagcagtgcggatgaatgcccctcgtgttggtggtagttttgctgtttggggtggcctgttttcgacctttgattgcaccatggtatatgttcgacagaaagaagatccgtggaactcgattatagccggtgctgccaccggagggttcctttctatgcgtcaaggactcggtgctgcttcaagatcggcattgtttggtggggtattgcttgctttaatagaaggtgccgggatcatgttgaataaatttctcagtcaaccacagatgccaattatgatcgaagaagcggcaccgaatgtggccggtatgcc

SEQ ID NO: 9824 - DNA, 489 bp, Gossypium hirsutum
  unsure (1)..(489): unsure at all n locations; Clone ID: LIB3828-028-Q6-K6-F11
gcctaaccgnactcgcagnaaaacctaaataaacaaaacaaacggnaaaacaagggnaagacgttatactgagccgacatggcaagggacagctgcttggctcgcgtcaccgctggggtcgccgtcggaggcgctgttggtggcgccgttggtgctgtttatgggacttatgaggcaattaggtacaaggttccaggactgctgaagattcgatatattgggcaaaccacattgggtagtgcagcaatattcggacttttcttgggcgcagggagcctaatccattgtgggaagtcctactaaaccaattcattgtttgtgttgaagaccttgagaatgtatttctcagaatggtgcttagctttagatataaaaagaaatggtgtttaacgtttgcaagtctcggttttgttctttgagcttcctctattgcctttctgtgggaggatgcatacttgggaatacatttgacttcaatcaatgttgcat

SEQ ID NO: 9825 - DNA, 573 bp, Gossypium hirsutum
  unsure (1)..(573): unsure at all n locations; Clone ID: LIB3828-028-Q6-K6-F2
gcanaaataatattggagttaggagtatattctgcatcttggagaagctgaaaagtgtggtggaaaaaatattgcgcggggatggcaaagccccccattacgtcaaagtggactgggacaaatgggtggatgaagatgaagacaagggtcttggtgatcttgacttaggaggaatggacttctcgaacttcgggggaatgggcggcatgggcgacatgatgggcggcatgggcggcatgggcggcatgggtgacatgatgggtggcatgggcggcatgggtggcatggatgaatttgaggacagtgatgatgaagggcaagaagtgacaaagccagatgacaaggccgaaggagatgcaaagcctgaggagcatggcatcggatcttcagagaaaaaggaggctgaaccgagcacatgaaatcattttagctgaaacctgaaatgctgttaactatagttatgggtgatattttgctctttccctgtcatggatgggggagaggggatcaaagcctgatgtgtttttaactgcgtgagattaaaaaatttgcggaaaaatgtgttgttgtgta

SEQ ID NO: 9826 - DNA, 596 bp, Gossypium hirsutum
  unsure (1)..(596): unsure at all n locations; Clone ID: LIB3828-028-Q6-K6-F4
gctctctctcttgttgtaagctaaaaaaagagctccattttcgattcctttttctcttaattttctttagagaaagagagagatggcttcctttgatgcgtacggaatggaaggagaagaggttcatgcaggtgcagcacctaataaccatcctttcgatgtagacgacgacgagagctattccaattacggctcttactctaacttcaccgacaatcagcaattcccggccgacggtggtgatgtggcggtggatcacttggcttcttctcctgagatcttcggcttcggatcttccgatccgtcccctgcttactcgcaatctcctttcggtactacgattcctgtggaaaacggaaacggaacgaatggatttagcggtggaaacgacgatgttttcagttctgatggtcctgtgcttcctcctcctactgagatggcgccagaggaaggcttccttcttcgcgagtggcggcgtcaaaatgccattcagcttgaagagaaggagaagaaggaaaaggaattgaggaaccaaattatagaagaagctgaggagtacaagcgagcattctatgagaagcgggaaanaactatcg

SEQ ID NO: 9827 - DNA, 591 bp, Gossypium hirsutum
  unsure (1)..(591): unsure at all n locations; Clone ID: LIB3828-028-Q6-K6-F5
ttcccggtcgacccagcgttcgccagnatccancctggnagccttgcgagcctcggcgtcggtcgttggtcgccggtgcggctccttgtccacggtggctgacaaaaaaagggcctttttgatcgttttactatcctctaccccaatctaatgccaaaatgcccgaagagcccaccaaaattcaaaacaaatcaaaggaacccttcgattctgtctttttctgtcgcgaccatttggcaaaccttgaggatccattagtctttccaaacggagggagaagactgcgatgagggcactggcgcgtggtcaacgaagaggagagaagggctgcctttgccattttggtgcaatggcggcaagtgcgcgttaggcctcgggacgaggtgggctgacgtggcacgagcggagggagggggtgcggcgcgcatagaacattagagttctgagaatgagtttaagttgtgggccaacgggctgtttaaggctttttttcattttgggccatttgggcctattctataaatggatttctttttttgtttttgggcttgtatcatttggactattaatttattaatatttcttggttta

SEQ ID NO: 9828 - DNA, 620 bp, Gossypium hirsutum
  unsure (1)..(620): unsure at all n locations; Clone ID: LIB3828-028-Q6-K6-F7
ccgtccggctttntnnaaaanaaaaaaaaaaaaaaccacgatggctgctcatagttatagcttgtttcttttttccttgtcttttgttgtcttaatcccaacccttcaagctcacattgctgaatatgacgattattggaaggcacggaaattggaagccattgagaacctgaacaaggcttatcaccccaatcctgaggagatggtccaccattacaatgaccaatttgccaaaaccatgattaagcttaataacaccagaagggtgttgaagggaacgaaagaaaatggtccatgtgaaataaccaaccccgttgatagctgctggcggtgtgatcctaactgggaaaaaaacaggaagaggctggccgattgtgcccctggatttgctcgtggtactaccggtggaaaggagggtgagttttacgtggtcactgacccttctgatgatattcttaaccccaaacctggaactctgcgtcatgctgtcatccaaagaagaccactttggatcactttcaaaagatccatgatcatcaccctggaacaggagctcattattacaagcaacaagaccattgatgctaggggcgccaatgtgcagattgctaagggtgctg

SEQ ID NO: 9829 - DNA, 562 bp, Gossypium hirsutum
  unsure (1)..(562): unsure at all n locations; Clone ID: LIB3828-028-Q6-K6-F8
ctccatggcttctattgctggttcatccatctccatgcaacctcgcccctttgctaaaggcagtgtttctgggttgaaattgggttcatttattgaaccaggngaagaagcaccctctcatttacgatgcgtccaatgcctgctcgcttgcagatctgctgtgctgccaaacaagagaccgtggataaggtatgtgaagtagtaaagagacaattagctttagacaatgacaaaccaatcaccggtgaatcaacatttcttgatcttggagctgattctcttgatacggttgagattgtgatgggacttgaggaagaattcggaatcacggtggaagaggacaatgcacaatccatcacaactgttcaagatgctgcagaacttattgagaagctgtgcagtgagaaaagtgcctagaaaacaaggatcgcagttggttggtttatttgccgatatttgatattcacatactagaccgcaaacttgggggaaatcatgtgtgaacttttattatgttgaatatgtaggaaatttcgtaataaagttgttgggattcttagtt

SEQ ID NO: 9830 - DNA, 584 bp, Gossypium hirsutum
  Clone ID: LIB3828-028-Q6-K6-G1
ggcacacacggctgatgttaacacggtaacctttgccgatgaaagcggcaatttgatatattctgggagtgatgataatctctgcaaggtgtgggataggcgttgctttggagcaaaagataagccggcaggagttttggtgggacacctggaaggtattacattcctcgacagtcgtggggatggtcgttacttcatatcaaacggtaaagatcagactatcaagctttgggatatccggaaaatgtcctccgatacctcttgcaatttagggtatcggaatttcgaatgggattacagatggatggactaccctccacaggctagagatttgaaacacccaagtgacggatcagtggctacttataaaggtcactcagtgttgcgtactcttattcgctgttatttttcacctgaatactgcacgggccaaaagtacatttacaccggatctcacgattctcgggtttatatttatgatgtggtcaccggagcccaagttgcggtactgaagcaccatacatcaccagtaagagactgtagttggcacccgcattaccctgtgttggtcagctcctcttggg

SEQ ID NO: 9831 - DNA, 609 bp, Gossypium hirsutum
  unsure (1)..(609): unsure at all n locations; Clone ID: LIB3828-028-Q6-K6-G10
gcagnacccaanaagttagaaggatgaaggagagattggtaggtgtttctgaagaactacaactggagttaagaggctttatcagatgcaggccaacggtaccttgttgttccctgccattaatgtcaatgactctgttactaagagcaagttcgataacttgtatggatgccgtcactcacttcccgatggtttgatgagagctactgatgtgatgattgccggcaaggtcgccgttgtctgtggttatggtgatgttggaaagggttgtgctgctgccttgaagcaagccggtgctcgtgtcattgttactgagattgatcccatctgtgcccttcaggctcttatggaaggacttcaggttttgaccctagaagacgttgtctccgaggctgatatcttcgtcaccacaaccggtaacaaggacatcatcatggttgatcacatgaggaagatgaagaacaatgccattgtttgcaacattggtcactttgacaatgaaatcgatatgctcggtcttgagacctatcctggtgttaaacgcatcaccattaagcctcaaaccgataggtgggtcttccctgaaaccaaaactggcatcattgtgtt

SEQ ID NO: 9832 - DNA, 575 bp, Gossypium hirsutum
  Clone ID: LIB3828-028-Q6-K6-G12
gctctgcattcttggaaaaatcagaggaggtcaaacctacataaggataaaggttgttaactttgggagcaattcagtcaacctccaaatttctgttgatggattggatccaaattctgtaaagctgtctggatcaacaaagaccactctcacgtctgctaatctgatggatgagaattccttcaaggagccaaagaaggtcgctcctaatcaaacactgctggaagatgcgcaagagatgagtgcgctactgcgaccacattctttcacttcatttgatttgttaaaagagtctgtgaatcttagaattacagaagatgattcttctctcgtatcttccatctgaaataaattaatgggaagtagtaatatgcaaaacgtaaaagatgcgtgggtctatatatattaaaataatgatagttcaccagcgctctggtggatatcaagtctttgcattcaatcagctatgtatataaagtctcctctgccatttggttttcattttagggttcatcaaatataacataacattccgtaatctcacatccctgaataaaattatgtgtttgggtttt

SEQ ID NO: 9833 - DNA, 535 bp, Gossypium hirsutum
  Clone ID: LIB3828-028-Q6-K6-G3
cgaaagggtctttaatgacgctgcaataccctaatataattggatggcttgctatatcttttgcaagagattcctcttttctttacatgggaaggctgttgcaaggttctcgtgtcagcataatctcttatacggtgcctgtatatatagctgagatagcacctcagaatttgaggggcagcttgggttcagcgaatcagctatctgtcactctcggaataatgctggcctatctacttcgactttttgttgagtgccggatactcgccgttttaggaatacttccttgtacaattttgatacctgctctatttttcattccagaatctcctcgatggctggcaaaactgggtatgacagaagatttcgaaacttctttgcaagttctcaggtgctccgatgctgatatttctattgaagtgaatgaaatcaacagatctgtctcatcaaccactagcaagaactacgattcggtttgcacatctcaagaaagagatattggtctccattgatggttggaattcgctcacttatg

SEQ ID NO: 9834 - DNA, 608 bp, Gossypium hirsutum
  unsure (1)..(608): unsure at all n locations; Clone ID: LIB3828-028-Q6-K6-G4
cattccttaagagnagaccctatgtgttatcggaaaggggtggtagtacatttgccaggtttattcaaagaaatcgatgggttggaagctaatggggtttcttgcaaagggaggatattggtatctgatcgtgctcatttgctatttgattttcatcaagtagttgatggattaagggaagctgaacttaacaagtcatttatcggtacaactagaagagggattggacctgcttactcgagcaagatgaacaggaatggtatcagagtaagtgacttgaggcacatggatactttccctcagaagcttcataatctattatctgacgtgaattcaaggttcccggattttaattatactccagaagtgctcaaagaagaggttgaaaactacaagagatatgccgagaggttggagcctttcattgctgatactgtgcacgtaatgaatgaatcgattgcacagaagaagaggatattggtggaaggaggtcaagctactatgctcgacattgatttcggtacttatcctttcgtaacttcctccagtccatcagctggtggaatctgtactgggctcggtattgctcctagnattgtgggtgatct

SEQ ID NO: 9835 - DNA, 514 bp, Gossypium hirsutum
  Clone ID: LIB3828-028-Q6-K6-G6
tccccatccttccggactctttctcttatgcatacgcctacgcctgcccctgtgccaatttaaaactctctaactatagatattagtaggtgcttgcgagcttatgacagattactctagttggttgctctgtgcctacaactgatggaatctcagtatgtacaagcaacctgctgcaaatttttatgagttagccttcaccgcatggctcaataaggacgtaataattcatggatatatgtggctggctgtatatagtctagtgatgggcctgatatgtttatggaatcctgactttctttcaaccgacgaatttctggaacaacctttttcgctgaccagcgctgagagctccattttcctttgttatggtgtcactaatatggagaccgtacggaggtatcatcattcgacactttttatccatggccatatagtgtatcagtaacgcccatataacttatcttgacccaatacccattgtctgagcattgtttagcccaagcataagaag

SEQ ID NO: 9836 - DNA, 496 bp, Gossypium hirsutum
  unsure (1)..(496): unsure at all n locations; Clone ID: LIB3828-028-Q6-K6-G9
gcgctctggcacacactccataattgtctgcctctacgggcatccaatcggtttgccctatatttaacctcactgtcctttggtgactttatagcagccatacttatctttgtggcgcacaagttcccggccagatgatgtaccacctctggtaaaaccgcccaggccaccttgtacggcggcttagatattgcggactcaatgatgcgcaccatgactgccatctaaccatgacattcaaaggttcatggtacacacagacttgtcggtcacttttcttngacaacaatagtgccttttattgatgtgtgctttgtctttcgtgtatcacaatgaaactggtgacccaaagatgactatccctgggacccctgctgtatgcagatctgtcactaactgtagacctcctatctttgctcttagaagcgactatggtgagggatataaccctcccacttcttattagattcttgccatgcctgatgttaccttaaaa

SEQ ID NO: 9837 - DNA, 572 bp, Gossypium hirsutum
  unsure (1)..(572): unsure at all n locations; Clone ID: LIB3828-028-Q6-K6-H1
cttgggcatttgctgttggtgggattgcatggaaaaaggaaggaaccgaatggtacccttcctattcctggtcctaggggtttccctgtttttggtagcctctttactttgagtcgtggtttggctcaccgttcgcttgccgccatggcttggtccagggccaatactcagctcatggcttttagcctaggttccaccccagtggtcgtagcttctgatccccacacggctcgagaaatcttaacttcccctcactttgctgaccgacccattaagcagtccgctaaaagcctcatgttcagtcgagccatagggttcgctcccaacggaacccattggaggcttttgagaaggatagcttcctcccacctttttgcacccaagcgcattttagcacacgaacccggtcgccagcttgactgtactgtcatgctgcgcaacattgcgaacgaacagaagcttcatggctctgtttgcttaagaaaacacctccagtttgctgctttgaacaatatcatggnggagtgtttttggcagaagatatgaccagagaaaagacagtgaagaactag

SEQ ID NO: 9838 - DNA, 595 bp, Gossypium hirsutum
  Clone ID: LIB3828-028-Q6-K6-H10
atcaggctgaaaagtcctcagggttttctgaatacaatgaatcacgcttgcaacaattgccatgccaaatttttgatcctattcgattgggagaaggtgctggtgttggatttatgaaaggagttgagtccatggccctccctgaaggggcaacattgtatgacctggttcaaatgggaatcaagtacacacatgcagctgttggagttgtagttcggttgaggaaagaattatcactcgttaaagatgtccctgtgcttatagcaattgaccagtataataattggtttaccttcagtgagtatgaggagccagtgactgtccgttcttgtcgaccaatacacgccagagaacttgcaatggtgaatgcctttaggtccatgatgcatgaggacatgatggttggtgcattctctcattcaactgctgtgggaaaacttcgtttagatttgccagatatacctgttggtgcccgtgttaacatgcctcgttacagtcctgatgaggcagcaactgtttgccattactacgtcaggcaaaggcttgtaagaagggaagcattctcggaggaaagctggaaaaaatgtactactta

SEQ ID NO: 9839 - DNA, 482 bp, Gossypium hirsutum
  Clone ID: LIB3828-028-Q6-K6-H4
tcgaaaaaaaactttccagtttctattttctaaaacaaactgaaaatgtcttgctgcggaggaaactgtggctgcagctctggttgcaagtgtggcaatggctgtggaggatgcaagatgttccctgacataatagagaagactacaactgagactattgttcttggtgtgacaactcagaaaatgcactttgagggatctgagatgggagttggggttgagaatggatgcaagtgtggagacaactgcacttgcaacccttgcaattgtaaataagagggggggaaaatgaacaacaaagagaagcagagaggcctttgtctttttaactaaataaattctattactttagtatgtatcagcaaatcttcatgaggatttggttcttaattatgtgtaatgtgggcttttctgctatgtcagaatgtattatgatatttaagaaagtttgttttcaattgaaagaatggcagttcctttca

SEQ ID NO: 9840 - DNA, 51 bp, Gossypium hirsutum
  unsure (1)..(51): unsure at all n locations; Clone ID: LIB3828-028-Q6-K6-H6
aaaaaaaaaaaaaaannnaaannnaaannaaaaanaaaaaaaaaaaaaaaa

SEQ ID NO: 9841 - DNA, 599 bp, Gossypium hirsutum
  unsure (1)..(599): unsure at all n locations; Clone ID: LIB3828-028-Q6-K6-H7
cctgcactgctgaactccattttagnagactcagttaaaggctgccttgatttcaaaggcagacctgtgcaccgttcaagctccggtggatggacttcggcttctttcataattgcggttgaagttgctgagaggtttgcttattatggaatctcttcaaacctcataacatacttgacggggcctctgggtctatccactgccgccgccgctgcacaagttaacgcctggtcaggggtggccacgcttctcccactcctgggtgctttccttgctgattcttttcttggccgataccgtaccatcattcttgcttcccttgtttacattttggggctaggcttgctgactctgtcagccactcttccatctgtcaccacttccggtgccccaaatgctgatagtgtcacattaaacacttcatcaatgcttcagtatcaagtgatactatttttcttctcactatatctggtggcattcggacaaggtgggcacaaaccatgcgttcaagcatttggtgctgatcaatttgatgcagaacatcctgtggagtgcaaagccaagagttcattctttaattggtggtactttagtattga

SEQ ID NO: 9842 - DNA, 606 bp, Gossypium hirsutum
  unsure (1)..(606): unsure at all n locations; Clone ID: LIB3828-029-Q6-K6-A1
aaaacttaanatggctcggttgacgttggtgtcctccatcatccttctgctatgctccgtcgccgccggatcaactttcgaggactccaaccccatccagatggtatccgatggcctcagcggcttcgaatcctccgttcttcgtgtcatcggtcacactcgtcatgctctctccttcgcccgttttgcatacaagcatgggaagaggtatgaaaacgtggaggagatgaagctacggtttcagattttcaaaggcaacttggatttaatcagatccactaacaagaagggactgccttacactcttgctgtcaatcagtttgctgattggagctgggaagagttccagaaacacagattgggggctgctcaaaactgctctgctaccacaaagggcaatcaccagctcactgatgtcgtccttcctgattcgaaagactggaggcgagtgggcatagttagcccagtcaaagatcaaggctcttgtggatcttgctggacattcagtaccactggagctcttgaggcagcttaccatcaggcatttgggaaagggatctccctatctgagcagcagcttgtggactgtgctggagcttttaacaa

SEQ ID NO: 9843 - DNA, 614 bp, Gossypium hirsutum
  unsure (1)..(614): unsure at all n locations; Clone ID: LIB3828-029-Q6-K6-A10
acagctttccgttttcactgcttatcctacgccactaggtccaccacctcttccgttgtggtaatcatccttctccatcgggaacattggtactcatgacccagtttgtcttctgtctctctccacctccctcataacaaatcccgccacctcatccacaagttttcactgattgtatctgcaaagactacagttttcttctattcgctaattgctctatcagtgcatcagtggtttcctttggattcttctcttgatttgggctttccgttttttgattgtttgggaactcaaaaggatgacagtgctgaagaggtatgtgctgaggttgttcatatcacttaagtacataacagcaaatgtcgtggacagaaataatggacggatagttgcaacagcatcaacagttgaacattccatcaagaactcattggagtgcggccggtcttgcaatgccaaggcagcaaccgttatcggtgaagtattggctatgcgactcaaggtggaaggtcttgagcaaggacagggaagagggattcatgttgatgtaaacaaggaggtcgagaagaaagctntaagaaccgaaccaaggtctgggccgttgtcaatgccct

SEQ ID NO: 9844 - DNA, 56 bp, Gossypium hirsutum
  Clone ID: LIB3828-029-Q6-K6-A11
cggccgcgtgggcggccgcgtgggcggacgcgtgggcggacgcgtgggtagatcgc

SEQ ID NO: 9845 - DNA, 581 bp, Gossypium hirsutum
  unsure (1)..(581): unsure at all n locations; Clone ID: LIB3828-029-Q6-K6-A12
gnaacctttagtgattttactatctttcactttttttagcacaactttatatgcaaattctcattcacaacaacattttgacactggaggcttgagtagagaaagttttccagaaggattcttatttggaacagcagcatcagcgtaccaagtggaaggaatggctagtgaagatggtagaggacctagcatatgggatgcatttgttaaaactccaggacatattgcaaataatgagactggtgaattttctattgatcaataccatcgctataaggaagatgttgatttgatgcagatgttgaattttgacgcctatcgattttcgatctcgtggtcgagaattttttcaaatgggataggagaggtaaactggaaaggagttgactactataatagattgattgactatttgctagaaaaaggaatcactccacacgcaaatttgtatcactacgatttgccactagcacttcaggaaaaatatttaggtttgctggacagacaagttatccaggattttgctgattatgcagagttttgtttcaagacatttggtgatagagtaaagacttggatga

SEQ ID NO: 9846 - DNA, 590 bp, Gossypium hirsutum
  unsure (1)..(590): unsure at all n locations; Clone ID: LIB3828-029-Q6-K6-A2
atcacttctcggnaaagcatctctggatcatgacgattcgtgctttcaggaaggaggatagtttttgtcaggaaaatgttgacagagttaattccaatttacgcatggatttccacaacaatggatccaatgagtggttaggcttccgtttggaacttatcgggactgtagtcctctgcctttctaccatgtgtatgattttgttacctagtagcattgttaggccagaaaatgttgggttatctctgtcatacgggttgtccctcaatggagtgttgttttgggccatatttttaagttgtttcgtggaaaataggatggtttcagttgaaagaataaagcaattctcaagtattcagccagaagcagcatggcatattgaggaccgtcttccccctccgaattggcctacccatggcaatgttgagctcaaagacttgcaggttagataccggccgaacactcctcttgtacttaaaggcattacactgagcattaaaggaggcgaaaagatcggtgtcgttggtcggacggggagtgggaagtcaacattaatccaagttctgtttaggctggttgaaccaacagca

SEQ ID NO: 9847 - DNA, 578 bp, Gossypium hirsutum
  Clone ID: LIB3828-029-Q6-K6-A3
tttctttgagaaattctcttctcgatctatccatttcgagtttgggaaaggagagacaagatagagagaaacagagagtgagaaatttggaatggcacatagagtagatcacgagtacgattaccttttcaagattgtgctgatcggcgattctggagttggaaaatcgaatattctctctagattcaccagaaacgagttttgtttggaatctaaatccactatcggcgtcgagttcgctaccagaactctccaggtggagggaaagactgtgaaggcacagatttgggacacggcaggtcaggagagatatcgagctataactagcgcttactacagaggagctgttggtgcacttcttgtctacgacataacaaagaggcaaacctttgataacgtccaaaggtggctgcgtgaattgagggaacacgccgattctaacattgtcgtcatgatggctggaaataaatctgacctgaatcatcttcgagctgtttctgaggtggatggtcatggtttggccgagaaggaaggtctttcatttctcgagacgtctgcgctggaagcaaccaacattg

SEQ ID NO: 9848 - DNA, 474 bp, Gossypium hirsutum
  Clone ID: LIB3828-029-Q6-K6-A4
ctaaagctctcactttttcgtaatagcttcaagttcagaagtacttgtgggatatgtttgaatagtgtgaagacaggtcaagggacggcgatttacacggcggaatgttcacatgcttttcattttccttgtatagctgctcatgttcgtaaatatgattcacttgtttgtcctgtttgtaatactacttggaaagatgttccacttctttctattcataaaatccccagaagtattaaccagccaaagcccaaaccggatttgagatcttacgatgacgatgagccattgctttcaccaaccgctggtggtggtcgtttcgttcctattccagaagctgatgaacacgaagaagaaatcggcggcgatgtagaggagtttcaaggattcttcgtgaatcccaacccttcatccatcgaagtacacccattcaacggccgtgattcgaggaatgtacaagttcggttatcacct

SEQ ID NO: 9849 - DNA, 130 bp, Gossypium hirsutum
  Clone ID: LIB3828-029-Q6-K6-A5
ggccgcccttttttttttaattttgttatccccttccctccgtacctcccccaatattgtattataaaaataaaatttctcaacatttaatcatcatagttataattttgagagcaaatttattattagt

SEQ ID NO: 9850 - DNA, 586 bp, Gossypium hirsutum
  Clone ID: LIB3828-029-Q6-K6-A6
aattgacaaaaatttaaatacttatcacatcattgtaacttattgaaaacaataaactttactattacaataaaacatgactgaaatatagtaggttatgagatggaattttaaatgaaatttgagtttaatgagattagactctttaaagctttgaaaatctacaaagcaacaaaagtgggtcaaaaagttgtcttctacctcatttggctttctatccaaagaataatatgaaacacaacaaaagtaaatgatgaagcaacaggtaataaagataaaggaggaacgaatcaagtaaagagcattgacaattgactttatgaaagaattgccaaagaaacaaggggttggagcaccattttcttctttatgtacaaaataatttgatatagaaattaaccaaagaatgttttgaagaaaaatgttgattttgaggggagattctagagtgattgattgtgtggttatatacatgtagaaaaaacataatttagcattgacaattaaacatttcattaggcttccaaactaaaaaaagctacaaagaacatttttagtgaattatatttaagtagaaatattatat

SEQ ID NO: 9851 - DNA, 617 bp, Gossypium hirsutum
  unsure (1)..(617): unsure at all n locations; Clone ID: LIB3828-029-Q6-K6-A7
gnaaagggcattagttctcatgacttcagtgaattgttaatgtcatctgggattgttttgaatgataatgtgcattgggtgacttttcatagcggctacgattttgggtatttgcttaagttgctcacttgcaagaatcttcctgaaacacagacagggttctttagtttgattaagatttatttcccgactctatatgatatcaagcatctgatgaagttttgcaatagcctacatggtgggttgaacaagcttgcagagctgttagaagtggagaggattggtatttgtcaccaagctggttcagatagtttgcttacttgttgtacattcatgaaactgaaagaaaatttctttagtggtttggccgagaaatatgctggtgtgttatatggtcttggtgttgagaatggacagaatactctctaataaatcaaagaaaacttctttagttggtcgactgagagatatgctggtttgttatatggtcttggtcgttcagaattgacagaatacttcttaaatatcaaagaattatgaaataaaagctgtttgttagactntgtgttccatttgcaatctacttataatatctcgtatcttatcatcagcctgtt

SEQ ID NO: 9852 - DNA, 590 bp, Gossypium hirsutum
  unsure (1)..(590): unsure at all n locations; Clone ID: LIB3828-029-Q6-K6-A8
naaaaatttcaacatgnaaanactgtttgctctttaatctaacatataggaattagtatgcttattttctgagtagaggagacaaatacaagctgattcataatataagggcctccatgatacttttatcgggatcaaaggccaagattgtgcaggataatgaaattcaatacaactattgtgtatataactcagacatagcaactggctatggtgttggtgcatttttgttcctcatggctagccaagcccttataatggttgccagccgatgcttttgctgtggaaaggctttgaaccctagtggttcaagggcttgggcagtcatccttttcattgtttgctggttatttttcctaatagccgagatatgtttgttggcgggatcagtacggaatgcataccacacaaaataccggaccatcttcagcgagcagccaccgtcttgtgaaactttgaggaagggagtgtttggtgcaggggctgccttcattttcttgactgctattgtcaataagttctactatatttgctattcaaatgctagggaaaacagcttccggccatacggtggcggcggagaggctggt

SEQ ID NO: 9853 - DNA, 558 bp, Gossypium hirsutum
  unsure (1)..(558): unsure at all n locations; Clone ID: LIB3828-029-Q6-K6-A9
aaaagtgtatatagtttacttggggctacacaacaatgggngagaaagctttgcatgagaattgagaaaacccatatctcatacttactttcagtcaaagaatctgaagaagagctaaatcttcccttctttacagctacaaacacagcatcaatggctttgctgcaaagcttacaccagatgaagcctccaagctctctggaatggatgggcttttgtcagtgtttccttcacatggaaagcactcagtgcagacaacaaggtcatgggaatttgttggcttagatgaaggagatagctattcatgggaaaagcttaagatgggaggagaagacttattgtcaaaagctaaacatggcaaaaatgtcattattggagtgatggatagcggtaaaaaagttttgcaattataatttaaaactatatatgaattccaatgccatctttttagattactcatgtgactgtctcaagcattattgcttttgttgtattaagacaactgagtagcaaataattcatttttctaaatgtattatgtaattattggattgtttt

SEQ ID NO: 9854 - DNA, 596 bp, Gossypium hirsutum
  Clone ID: LIB3828-029-Q6-K6-B1
gttcaagaacggccaccaatgccggccagaatgaactcatggaaaaatgcctagcatcaaaccaactgcactaaggttttatgggagctttaatgtgacagtcacgggcataacaattcaaaacagtccacaatgccatcttaagtttgataattgcataggagttgtggtacacgacatgtccgtctcatctccaggggacagtcctaacacagatggaatccacctacagaattccaaagatgtgctaattcatgcaacttctcttgcctgcggagatgactgcgtttcgatacaaacaggatgctcaaatgtatacattcacaatgtgaattgtggaccaggacatggaatcagcattggaagcttgggaaaggataatacaaaagcctgtgtctcaaacatcactgtccgtgatatcatgatgcataacacaatgaacggtgtcagaataaagacatggcagggtggatcaggcaatgttcaaggggttctattctcaaacattcaagtttctgaggtccagcttccaattgtgatcgatcaattctattgtgacaaaagaacatgtaagaaccaaacagcagcagtcgctc

SEQ ID NO: 9855 - DNA, 65 bp, Gossypium hirsutum
  Clone ID: LIB3828-029-Q6-K6-B10
tttttttgaaaaaaagaaaacagtacatgaataaatgagtggaaagcaaaatacaaggataggct

SEQ ID NO: 9856 - DNA, 598 bp, Gossypium hirsutum
  unsure (1)..(598): unsure at all n locations; Clone ID: LIB3828-029-Q6-K6-B11
cccatcctcaccctggggaggattcaagcccttctattgcagctgttgttgcctctcaagattggccagaggttacaaagtatgctggcctggtttgtgctcaagctcatcgacaggagctcatccaagatttattcaagacatggcaggatcctgcaagggggactgtttctggtggcatgattaaggagctcttaatatctttccgacgagccactggacagaagccacagcgcattatattctacagagatggtgtcagcgaaggccagttctatcaagttctattatatgaacttgatgctattcgtaaggcatgtgcctcattggagccaaattatcagcctcctgttacatttgttgtggtgcaaaaaaggcatcatacaaggttgtttgctaacaatcataatgatcgccgttctgtagacaggagtgggaatattttgcctggcactgtggtggactccaaaatttgtcacccaacggagtttgacttctacttatgcagccatgcntggattcagggtacaagccgtccagctcattaccatgtgctatgggatgagaacaagtttacagctgatgcattacagtccct

SEQ ID NO: 9857 - DNA, 592 bp, Gossypium hirsutum
  unsure (1)..(592): unsure at all n locations; Clone ID: LIB3828-029-Q6-K6-B2
catggcaccacaccttaatttgttccttcctgtttgtgcttttattattattcatttcagcctctaaagttcaatcaggcgctattgatgttgttgccaagtttggcgcaaanagctgacgggaaaacggatctgagtaagccatttttggatgcttggaaagaagcatgtgcctctgtaaccccatcaacagttgtgattcctaaagggacatatttattatcaaaagtaaacttagaaggtccatgcaaggctcctattgagattattgttcagggcactataaaggctccggctgatcctggtgctttcaaggaccctaattgggttagattctatagtattgaaaatttcaaaatgtccggcggaggaattttcgatggtcagggaagcattgcttatgagaagaataaagatccccacaatcgtgcatttcgtgtcaaactccccgttaatataaggtttgactttgtgaccaacgcattgatacaagatataactagcaaagacagtaaactattccacgttaatgtttttgcatgcaaaaacattaccctcgaacgtttcacggtagaggcaccggcagatagcc

SEQ ID NO: 9858 - DNA, 536 bp, Gossypium hirsutum
  Clone ID: LIB3828-029-Q6-K6-B3
acgttccgcaaagggattttaagcattgctgcaattcctgatataattgggtggcttgctatatcttttgcaaaagattcatcttttctttacatgggaaggttgttgggaaggttttggtgtgggcataatctcttatacggcgcctgtatatatcgctgacatagcacctcataatttgaggggcagcttgtgttcagtgaatcatctatctgacactctctgaataatgctggcctaatctcacttgatctttttgctatgtggggcatacttacaggtataggaatactaccttgtccaatatccatacctggtctttttatcattccagaatctcctctatgtctggcacaatatgtggatgacacaagatcaaaaaacttctatgtaagttctcacccttttctatcctgatattgctattggagtgaatcaaatcaagagatctgtgccatcaaccactataagaactacgattgagattgcaaatctcaaacaaaggagatattgactttccattatagtgggacgaa

SEQ ID NO: 9859 - DNA, 185 bp, Gossypium hirsutum
  unsure (1)..(185): unsure at all n locations; Clone ID: LIB3828-029-Q6-K6-B4
cggnaaagtggatatgatattcataataatgatgatcataaacattgtagtgcagtggattaggcaggttatatttttaattcagacttttgaaagcagcatgttttgaataaacaagcatcaatgttccgagcctcgtctatgtcagcagacatgaataaatacagccaagacaaattatattt

SEQ ID NO: 9860 - DNA, 591 bp, Gossypium hirsutum
  unsure (1)..(591): unsure at all n locations; Clone ID: LIB3828-029-Q6-K6-B5
gccaactccaaagcggagnagaattctgaggataaaactcttgttgaaatcgtagatgagaataaacagattgagcttgctaagtatataaactatgtcagtgcccctcaagctggagccatagcaacattttcgggcacaacgcgcgacacttttgaaggcaaaactgtagtggagctaagatatgaagcatatgtaccaatggcaattcgaaacctcaagtctatctgttcctcagctagatcctcctgggatctccactctatagcagttgcccatcgtgtagggttggttccggtaggagaaacaagtgtgttcatttctgtatcagctactcatcgtgctgatgccctagacgcctgtaagtttttgatcgatgagttataggcatctgttccaatatggaagaaggaggtttattctaatggagaggtttggaaggagaatacggagtttctggagcggaggttcgaacatggcaaggatggcagctgctgcagaaggaagatcaagaccgaggcacgttatataaagggatgttgcaaacccaaggttaaggaggaggatgcagcagatattagcaccagctaa

SEQ ID NO: 9861 - DNA, 570 bp, Gossypium hirsutum
  Clone ID: LIB3828-029-Q6-K6-B6
cgggtagcttccatttttcggtcacttactattatgtcgcgcctacgctgcagtaaggaaatttaaaattttctaaagaagagtatgagaggtgcttggagcttaagacagattttctagttggttggctatgtcctaaaactgtatggaatctcagttgaagagcaacctgtttcaaatgtttttgagttagccttcaaggaaggctcagaagggaggaataattcatggaatatgtggatggctgtttataagttagtgatgggcctgatatgtttatggaatcttgactttctttcagcagactaatttctgaaacaaccttattcggtgaccaatgctgatagctggattatcctttggcatgttctcacttctatggagattgcaaggagttttcatgatctggaatttttatccatagccataaggagcctcagtaaagctcatataacttcttcggacccaatacccattgtctcagcattgttagcccaagcagaagggaagcattggttctaggaacaagtgggagagaaatcttcgccttgaatggttttcttggccacc

SEQ ID NO: 9862 - DNA, 212 bp, Gossypium hirsutum
  Clone ID: LIB3828-029-Q6-K6-B7
gtttatttcgaatggaaaatgcttgaaagtcctaaaattaaagtgatcataatttaactactctcatttccttctctagaaaaaaaatcaactctcatttcctgctctagaaagaaacaatgaaaatgaggttaagagcaaactttattttggctactgttgtcaacctatggatggtccacacagtggctagtttatggaacataggtatc

SEQ ID NO: 9863 - DNA, 591 bp, Gossypium hirsutum
  Clone ID: LIB3828-029-Q6-K6-B8
cttcattctcattctctctccactgactcttgctaaacggtatcgttttagtcagtctttcatcaatggcgaaagaaccagttcgcgtcctcgttactggagctgcaggacaaatcgggtatgctcttgtacccatgattgctaggggagtcatgttgggtgctgaccagcccgtgatccttcacatgcttgatatcccacctgctgcggaggctttgaatggtgtcaaaatggagttggtggatgctgcatttcctcttctaaagggtgttgttgctacaactgatgctgttgaggcatgcactggagtcaatgttgctgtcatggttggtggtttcccaaggaaggaaggaatggagaggaaagatgttatgtcaaagaatgtgtctatttacaagtctcaggcttctgccttggaacagcatgcagctcctaactgcaaggttttggttgttgctaaccctgccaacaccaatgcattgatcctgaaggaatttgcaccttcaatccctgcaaagaacattacctgtttgacaaggttggatcataacagggcactaggtcaaatctcagagaaactaaatgtccaag

SEQ ID NO: 9864 - DNA, 485 bp, Gossypium hirsutum
  Clone ID: LIB3828-029-Q6-K6-B9
tcggtgctctggaaacagctgagatccgtggactctttgggtccgaatcggtttgatatgcttacgaaatttaccggcaattttgtgaacttagaagaggagatacttatgtttgtggcgaagaagttaccggcaagatgaggaatcacaaacagctaagtactcgagggacagattgaatgacctcttaaaagatggctggaggcaagggatgcacacaagggactgccatcttgtcatgaacttcacaagctcatgttacaactagacttcacggtggacttttgtgaattctgatgctaggtattagttggtttacttaatgtgccacttaaaatggtcatgaagaatattactattaacagtgcacatactgattggagataactgtatgatgctacatttatactactttacatatgtagcatctttgtatgggaatatcaacgacacaatatttgacaggatactttacaggatgcttt

SEQ ID NO: 9865 - DNA, 434 bp, Gossypium hirsutum
  Clone ID: LIB3828-029-Q6-K6-C1
gtccttttccaccttcctgattggaatggaagctgctggcattcatgaaaccacctacaactctatcatgaagtgcgatgtcgacattaggaaggatttgtatggaaacattgttctcagtggtggaactactatgttccctggaattgctgatagaatgagcaaggaaatcactgccttagccccaagcagcatgaaaattaaggtggtggctccacctgaaaggaaatacagtgtctggattggaggctccatcttagcatctctcagtactttccagcagatgtggattgctaaggcggagtacgatgaatccggcccctctattgtgcacaggaagtgcttctaattcttcaaagagtgcaagaggcgcaaaagtaatgtctttgttttttatttggcaaaacaattgcagctcgcaagcttcttttttt

SEQ ID NO: 9866 - DNA, 614 bp, Gossypium hirsutum
  unsure (1)..(614): unsure at all n locations; Clone ID: LIB3828-029-Q6-K6-C10
tggaatcgtccctctgttttctctacctttccagnatctcttctcacgatggcccaagcagatcagattagcaacangccctgnaaatcaaagagccatccccgaaagtcccaaaactcggtcaaaatggagtacatgaagttacccatggtccagcctccctcttgaaagtcaaaaagctttctgaaaaagccgtgttgccgtcaagaggctctcctctcgccgctggctacgatctgtcaagtgcaacggatacaaaggtgccagccagaggaaaagcgttgattcccactgatctaagcattgctatccctgaaggaacatatggtcgcgttgcgccaaggtctggtttggcttggaagcattccatcgacgtaggtgctggagtgatagatgctgattacaggggacccctgggggtgattttgttcaaccattctgatgttgattttgaagtgaaagtgggtgacaggattgcccagttgatcattgagaagatcatgacacctgatgttttggaagttgatgatctggattctactactagaggtgctgggggatttggatctactggcgtttaaatctctgngttttctttcccaaatgtaataatg

SEQ ID NO: 9867 - DNA, 321 bp, Gossypium hirsutum
  Clone ID: LIB3828-029-Q6-K6-C11
ctccaccgccatcattgttgctgccgcctcattagcgtcgtcatggctgccgatgcacctgctccctccccttccgccggtggttctattcctagctcctctcccggttccgccccagcatcaggaccagattccagcgtggctgccgcagccttgccggtccttggatcattggttggggcttccattgtttctttgttttcttacatgctacatgtatgaaaaatcaacatgtgaacgaatattatattttatattatattttttattttttgaaagaaacatgtgatgaataatgaaaaaattgaaatggagctttgg

SEQ ID NO: 9868 - DNA, 589 bp, Gossypium hirsutum
  unsure (1)..(589): unsure at all n locations; Clone ID: LIB3828-029-Q6-K6-C12
gcaacttggcgttctcctgttctactgagttaacacagttctccacggcaaccaaaattcctgtctttcacgcctttgaattgaatcctacgaattcaatcctgaaaattctctcttacaaactacangaaaaaaaacccanattttttttaacatggattccctgtcgtctgtctctccatctatagttctacctccgaccaacactttaccgacccgacggcggcatcgtccccaagttgttgccttctcgtttaccaccaatacccgtcttcctcgcttgtcgtctttctttggcgtgaagcttaaagggagattgaatcgagttgttgattgtaaatgcaaattcaacggtggggatgcgagaagaggagaagaagatgatcatggtggtaacgatgatgatgttgatggtgagaaagacgaggttgaaagggcgcttcatttggacggtacgattccatctacttccagcgagttcttgcgacgggtttcgtctcgggcgtatgatatgcggaggcattttgcagcaaagttttgatagcagcagttatgatgtgttggaggcaaatccatggagagatccttc

SEQ ID NO: 9869 - DNA, 596 bp, Gossypium hirsutum
  Clone ID: LIB3828-029-Q6-K6-C2
tccgtcaaccctcaatatcaagcccctcaaatcttctcaatttgaagcacatcatagaactgctcgcccttggttccactcttctgttactgttgaagggtcatgttgaataagctagccttgccagaatccagcactttcccaggaaagccaatgccacccacagctgaatgctggtttgatgatgcatgcatccttgacatggactactttgtgaagaccatctcaggcataaaggccaagggtgttcgtcccgacttagtaggctcaatcattgcacattatgcatcaaaatggctacctgatctatccggcaatgacaccgaaaagggtcctatgagtctccaagagtcatcgccggagagtgtcacagtttcatggatgaaaaagaggttctttgttgaaaccttggtgggaatcttgccacctgagagagattccatcccctgcaacttcctcctacgccttctccggacggccaacatggttggggtggagccttcctacagagcagagctggagaaaagaatttcgtggcagcttgaccaagcatcactgaaagagctcatgattccatcgtttagtcacacttgtgg

SEQ ID NO: 9870 - DNA, 509 bp, Gossypium hirsutum
  unsure (1)..(509): unsure at all n locations; Clone ID: LIB3828-029-Q6-K6-C3
tggtaagcaataggaattgcagtgggagacagtcttgtcttgtgtccttgagntaagttaaggagtctacagtttaacagcccccccctnatatgctgattgcagtggtaggttatgacaagtatgtgtattgtgcctctattncgtggacttattgtgttctacttgtaccaacatggaattgcaaggaaatcgactttgtagtgtatatcgtgatcccccacacatttccagcaaattcttctaacagggccttcgttaactagaatcctcaggcactctgtaagaataaataaaaatctggagctcacaggtatgattgaccattaaaggtagctttaggtcctgttgatgatttgatgaaaacatcccggattcggaataccaacactgatgataaaatcgcttacatttacatttgcctatcacacctatttttgcagtcactgatatagatgcaagcgccgagtacgaagactagcagacactatgattattttggataacct

SEQ ID NO: 9871 - DNA, 468 bp, Gossypium hirsutum
  Clone ID: LIB3828-029-Q6-K6-C4
ttcggttttttttccttaattccccccttttttttctttaattcccagcttctctgaatctctttctgtctttcaagctgaaaaaaaaggcaaaaaatctgttctttttgaaagccaggtgattcagaatagagatccaggtttgggtttttcttttaaattataaagttttaatctctactttgatcagctaagagggtttattttgggtccctcaaagttgggttttgcctgttctttggttttgattaagaaacaggtccgttttttttggatatggcagctgttatagatatgtataatagtagcagaaactcagctttttatgatcctttaagagaagagttaatgaaagcacttgaaccttttatgaaaagtgcttcttcttcttcttctcccttacagcccaatttgtaccctgaatattgctccccattgaacagtagtacccacttgttttcaaaccat

SEQ ID NO: 9872 - DNA, 587 bp, Gossypium hirsutum
  unsure (1)..(587): unsure at all n locations; Clone ID: LIB3828-029-Q6-K6-C5
gcctggctgtctctccaaaacanagataagctctctcaagaagtctcttatgaaaaggagaaggctcaatgtaataaacggaagagacaaaatcgatgaagtgtacgaaatggcgaaaccaaattggctgtaatggaacgagcattggatattcaagctaatctatcatctgagttccctagcatgataaaatacatgcttccatcacatgtaaccggaggattttggctgggtcttccgaagcacttctgcttgaatcatttgccgaaggaagatcgaatgatggttttggaagatgaagaagggaaagagtttcaagttaaatatttagtggaaaagattggtcttagtggtggatggagagcgttctccattgctcataaattattggaaggagatgtatgtgtctttcatttagtgagaccctccaaatttaaggtctatattgtgagaaaaaaatgttcagaagaagtagatgttgctcttggccttctaaagctagaatcttccactcaattagttgacaatggngaaagaactaaagatatgtgaaatttcggtaggaaaaacagaagatagaaatgacc

SEQ ID NO: 9873 - DNA, 462 bp, Gossypium hirsutum
  Clone ID: LIB3828-029-Q6-K6-C6
ggccgacctttattatttttttttttttttttttttttttttttttttttttttttttttttttttttttttttttagtttttttttttgtttttttttttttgtttttttttttttttttttttttttttttttgttattaagactgaaagatataactttcaggttgcaatggttgattaaaacttttttttaatagggtgggcccacccaacagacagggtttcgaagggtaccaaggaactagaaaagattaggagctccttgtgaagaaaggatgttccattagtgttacacccaactggtgctgctgtaaaaggggcctttttttgttctgagagtcggctttcttttttgcacatcagatatattgttccctaagaacttctatacttcatgtcttagtggtcattcttttgtttacttcttaggaaacctttttgcctattagcccagattatt

SEQ ID NO: 9874 - DNA, 292 bp, Gossypium hirsutum
  unsure (1)..(292): unsure at all n locations; Clone ID: LIB3828-029-Q6-K6-C7
ctttgntatcgctgttactagggattgggggtaacaacgggctgcgcaagctcaaggatgcattccatgcggattattgcgatccaaaaatctcatcttgtggaaggcctttcttggtttatccagctcctcctcctttctaaactctatgctttttaatttcatacgataaatagaaataatgggtgggattgtttgtctctttgatgggggattaccaaactttaattctattgttgctttgtaatgtggtatgatgcttatattataataaagatatgctattaatctc

SEQ ID NO: 9875 - DNA, 590 bp, Gossypium hirsutum
  Clone ID: LIB3828-029-Q6-K6-C8
gtcgggtcaaaaactgttattcagattcgtagtcatgcccagaaatattttctaaagttcagaagaatggaacaaatgaacacctacctccacctcgacctaaaaggaaagcagctcatccatatccactgaaagcctcaaaaaagttcatgtacagccacaagcatcagggtctcttcaatcatcgaatgcattagttgacactggatgtgttctgagatctgatccctcattgatgcttatgaaccctgttactgctgcgtcttcctggacacacaatgaacaaaccatcagtttctcacaagctaaaaaaggttctggaatggccaataaatctaggggcagctcaatgagcaccccacagaggcgacaaattggagagatgactaatcagggaaatcatggtcatgcactaagagtgttgcctgactttgttcaagtatacagttttattggcagtgtctttgatccaaacactaccggtcatctccagaaacttaaaaagatggatcccatagacattgaaacggtgctgttgttgatgagaaacctctccatcaatctgacaagtcctgatttcgaggatcata

SEQ ID NO: 9876 - DNA, 601 bp, Gossypium hirsutum
  unsure (1)..(601): unsure at all n locations; Clone ID: LIB3828-029-Q6-K6-D1
cggccgcgtgggcggccgcgtgggttttngaatacactttcttttttgaatttctatttcaataatgtcttcttcagaaaagagagagaaactcatgtttatttagctaaactcgctgaacaagccgaacgttatgaagaatggtggagagtatgaaaaagtggcgaaacttgattgcgagctgacggtggaagagaggaacctactgtcggtgggatacaaaaacgtgatcggggcacgaagagcctcatggcggatcatgtcttccattgaacaaaaggaggaatccaaagggaacgaagagaacgtgaagctgatcaaagggtaccgtcgaaaagtagaagaagagctttccaacatttgcactgacattttgagcaccattgataagcatctcatcccttcttcttcctctggtgaagccactgttttttactacaagatgaaaggtgattactaccggtatgttgctgagttcaagacagatcaggagaggaaagaagctgctgagcagtctttgaaaggttatgaggctgcttctgctgctgcaaacactgatcttccttcaacccatccaattcgtctgggccttgcccttaac

SEQ ID NO: 9877 - DNA, 586 bp, Gossypium hirsutum
  Clone ID: LIB3828-029-Q6-K6-D10
aaaaaaactgctgaaactgaactggctgatgatgtacatgcagaacctgctcagagcctcaagaacaccctctagaaaagagcttattgattatagagagaattgtatcttgctcctctaaccacagttgggaatcttccttttcttagggtttgcaaaacactgggagcagatgtgacatgcggggaaatggcaatgtgcaccaaccttttgcagggtcaagctttacaatgggctctgctgaggcgacattcatccgaagatttgtttggagtccagatatgtggggcatatcctgcacactgtagcacgttactgttgaacttatatgaaaaggagtgtacggtggacttcattgacattaatatggggtgtccaattgatattgccgatgataagggtgctggatcttttcttctcacaaaaccattacgtatgaaaggaatcattcaagcaccttctggcactgaagataagcctataactgttaacgtgacaacggattattttggaggtaaaaaccgcattgattcgctacattgcagatattggcagttggggtgctactgcactgacaatacatgga

SEQ ID NO: 9878 - DNA, 81 bp, Gossypium hirsutum
  unsure (1)..(81): unsure at all n locations; Clone ID: LIB3828-029-Q6-K6-D12
cgccccccccccccccccccccccccccnccccccncccncccccccccccccccccccccccccggccgcccgcgggggc

SEQ ID NO: 9879 - DNA, 599 bp, Gossypium hirsutum
  unsure (1)..(599): unsure at all n locations; Clone ID: LIB3828-029-Q6-K6-D4
ggctcgagtgtccgtatgcaaanaacctgggggtcaagcaatgtcggatattgttaacaataggtcgttttggaattcatgtatgttgattgctcgtataacatatcccctgttacgagtcctagaatagttggtagcaagaaacgatccgcaatgggatatgtttatgccgggatttacagagcaaaagaaacgattaagaaagaacttgtcaagcaagatgattatatggtctattggaatattatagataatagatgggaacaacaacggcatctccctctttacgctgcgggtttcttccttaacccgaaacttttctacaataccgaggaacatatacacaatgatatcctatcatccgtatttgatagcatagagaggttagttcctgatacgaacatccaggaccaagttgttagagaaataaatttatacaagagtgctacgggagatctaggaaggccaatggcagtcagagcccgagataatttacttcccggtgaatggtggtctatatacggtggaggttgcccgaatttgcaacgtttggccatccgcattctcagtcaaacttgcagttcaattgggtataaacc

SEQ ID NO: 9880 - DNA, 606 bp, Gossypium hirsutum
  Clone ID: LIB3828-029-Q6-K6-D7
cggccgccgtgggctgggactctgcctcctttgtgcaattccagtgatgaccaagatgcaagttggaatgtgtctatgaaggcttgcatcaccccgtactctgcaagggtgcacaaagaaagatggatggactacttccttggccacagaggcttactgcagcgccacctcgccttgaagaaattggtgttagctctgaggaattccatgaagatactaaaatatggcattttagagtgattgagtattggaaacagatgaaatctgttatacagaagaattccatcagaaatgtcatggatatgaactcgaaccttggagggtttgctactgcactcaaagataaggatgtttgggtaatgaatgtggcttctgtcaaaatgtctgcaagattgaaaattatttatgaccgaggcttgattggaacagttcatgattggtgcgaagcattttctacatacccacgtacatatgatcttcttcatgcttgggcggtgttttcggagattaaggagcgcggttgtagtccagaggacttcctgattgaaatggataggatacttcgtcctgatgggtttgtcattataagagataaacactcagtga

SEQ ID NO: 9881 - DNA, 146 bp, Gossypium hirsutum
  unsure (1)..(146): unsure at all n locations; Clone ID: LIB3828-029-Q6-K6-D9
aaaaaaaaaaaaaaaaaaaangagcccaccaaaaaaaaaagaaaaanaaaaaaggggggggggcgcggtttttttttttttttggggggggagttttttccctcncccccccaaaaaaaagcccccaccccccccaccccccccac

SEQ ID NO: 9882 - DNA, 587 bp, Gossypium hirsutum
  unsure (1)..(587): unsure at all n locations; Clone ID: LIB3828-029-Q6-K6-E11
anaaatcctcaagctttctcaggaactgaggttctcgcttacgtctcacaagttcaccaggttgtgcttccagacggttcagtttaccatgatactgtaactcttgatcagatagaaagtaatattgtaaggtgcccacatcctgaatatgctgagaaaagattgctgctattgatgctgttcgaacgagaggagattctattggtggtgttgtcacatgcatagtgaggaatgctccacgtgggcttggttcaccagtttttgataagcttgaagcagagcttgctaaggctgtaatgtcattacctgcaaccaaaggatttgaatttggcagtggatttgcaggtacttttctaactggcagtgaacataatgacgagttctttactgatgaacatggaacaataaggactagaacaaaccgctccggtgggatacagggtggaatatccaatggggaaattataaatatgagagttgctttcaagccaacggccactatcagtaaaaagcagcatacagtgactcgagaaaagaaagagatcgaactgttagctcgcggtcgtcatgatccttgtgttgtccct

SEQ ID NO: 9883 - DNA, 520 bp, Gossypium hirsutum
  Clone ID: LIB3828-029-Q6-K6-E12
ccggtgttgtcaagtcatgttcctaggtgtgtctttgcctttgcaagatccaacaaaatgcctcagacctttgcaggtgaggtccatttaatgactggttgacgccttgtgtgccttggtgcctttttttgcattggacttgcctaagatgaacctaggtggttgaaattcttgcttatcaaaagcgctttggggcagctggattaggccttgtgggctgttgctccatagcttatgctgatgagagatggcttgggtttgtttgatcctaactatataatggcttatttgtgatgacgtaagctcatcttaccatgattatatccgcagtatttcctaggtattgccaacaagtttgtgcttctagcaatttcaatgtctctattctcattaaggagatcttctttgcagctgcagtcatgcgaaaaagaatacaaaggagtatggtagcccccgattcgtagtggtgcgactggcacctaatggatgagggttaataatggttcacctcgcacctggc

SEQ ID NO: 9884 - DNA, 591 bp, Gossypium hirsutum
  Clone ID: LIB3828-029-Q6-K6-E2
ctttcatttccttctcttctcataaacccatcttctcatcaaagccacaacaatgggataagctggaaaacccatgaatttagacctagaagaagcttaaaaatatgtgccttttctattaaaagacctaggagtggaagaaaggtaaagagtaatgaggaactgtgtaatgatataagggaatttgtagctgaggttgggcttccagagggtcatgttccttccttcaaagaactttctcagcatggaaggaatgatctggctaacattgttcgaaggagaggatacaagcttatccaaaagcttctttcgagctcaccagaaaccgatggacttattgcagatacaagcgtagttcaaaagcacaatgccaacagtgattcggaagatacttttgaaggtcaatatctaaagagggagaatgcaatcgaagttgttcctttgtcaaccaaagttttcaacatggagaataagttggttgcagaggatattgattccgataaccataattgcatgagggaaactacagtgtatacttcaggagatcaaatggaaatggaaagcactgtgcttgaagatgtttccgcatca

SEQ ID NO: 9885 - DNA, 440 bp, Gossypium hirsutum
  unsure (1)..(440): unsure at all n locations; Clone ID: LIB3828-029-Q6-K6-E4
gntttgttggccattttttgcagnacaacagatgaattgtttctactcgtgcaccaagtggggcattgggatggagattgacagtgatgtcaaaagggagaaagttgaaagtcttgtgagggagttgatggaagggatgaaggggcaaggtttaaggcaaaacgccatagattggaagaagaaagctgaaatagctacaagccctgatggctcttcttacattaattttaataagattgttacacagttgaaacaagggatgccaaatgcttgaactgtatcaacttccaagtttctgctatggagatttgctttttgtgttattaaatcggataaaagttcacattacatatgtgtaaatctagaatactaatgaaatagcttttaaaactgtgtaacaacttcaccaattaaggtataaaattcacataatcaatttt

SEQ ID NO: 9886 - DNA, 455 bp, Gossypium hirsutum
  Clone ID: LIB3828-029-Q6-K6-E5
catataataacaatcaccggcggatccccattcgccagttattaaacgcaggtctcattcatttccggtgcgtttaataatccctttatacgccatggacatgaagaaggtctccaccgccatcattgttgctgccgcctcaatgagcgccgtcatggccgcagatgcacctgctgcttccccttccgcaggtggttctagccctagctcctctcccgctttcgccccagcagctggcccggattccagcgtcgctgccgccactttgcctgttcttggatcattggttggggcttccattgtttctttgttttcttacattctccagtaagctgataaatgtattaaagtaaaagaatatatgcgatgaatattgaaaattaatatatggagctttgatcaatatttcttgtttcctatttttttggaataataataatatttcaatttttatt

SEQ ID NO: 9887 - DNA, 588 bp, Gossypium hirsutum
  Clone ID: LIB3828-029-Q6-K6-E6
caaagtaaactaagaagtccatgcaaggctcctattggagataatgttcagggcactataaaggctccggctgatcctggggctttcaaggaccctaattgggttagattctatagtattcgaaaatttgaaaatgtccggtggaggaatattcgatggtcagggaaagcattgcttatgagaagaataaagatccccacaatcgtgcatttcgtgtcaaactccccgttaatataaggtttgactttgtgaccaacgcattgttacaacatataactagcaaagacagtaaactattccacattaatgttatttgcatgcaaaaacattaccctcaaacgtttcacaaaaacaggcaccacgcagatagcccaatacacagatgggattcacatggacaaatcaaacggagtaaatattattggaatgtaagattaaaactggtgatgattgtattgctatcgaggatgtcactagctttcagaacataaaagaattacttgtggaaccaggacatgtgataagcatgcaggagtctcggtaaagtacccaaatgaagaaccagttgatggagttaaattcacaaac

SEQ ID NO: 9888 - DNA, 234 bp, Gossypium hirsutum
  unsure (1)..(234): unsure at all n locations; Clone ID: LIB3828-029-Q6-K6-E7
cggncgcgtgggaaaaaaaaataggagagaatggaggatttgtttgtgagattgcccctcttcttccctttggtgtttttttttctgttatgtatgtctcagttatctgtagatatcaaccgtctgtcatgtccatgcttttatctctggttctatgtaataagctgctatatatatgtccatgttctcctccaggctctttaatcttgagggtggtacattgatgaagtttgt

SEQ ID NO: 9889 - DNA, 198 bp, Gossypium hirsutum
  unsure (1)..(198): unsure at all n locations; Clone ID: LIB3828-029-Q6-K6-E8
gtcaacatttctacaacaagttgaagctgatacatggcaatcaggtggatggcctcagaaatttaccgactacgctgtatctaaacttgctgttaatctttacagtatgctaatggctaaacaactctctgaacgaccagnaaggtgaaaagnatatatataaattgttattgtccgggatgggtgcagaactgctat

SEQ ID NO: 9890 - DNA, 280 bp, Gossypium hirsutum
  unsure (1)..(280): unsure at all n locations; Clone ID: LIB3828-029-Q6-K6-E9
aaacataccctcgntgcgtctgtaggcaatgatgaaaattaaagatgcaagtatgattgaggctgcaactacatttaaagggagttgggaattattccttgagaatggcggtgnttccgcaatgcattngcaattacttcctaagatcaatcaagcttngatgtttgacgccacagtgtggaagatctcgaagataaaattaccaccgccatgccgacacgtcgagggaaccaatgaagaagattgctttgctcattcggttctttatggacattgaaac

SEQ ID NO: 9891 - DNA, 610 bp, Gossypium hirsutum
  Clone ID: LIB3828-029-Q6-K6-F1
gggaaaacatgtcgggtaactcaaaaggcaacaagcgagaaaagccaacacctcaacatgaacaagcactcaagtgcccaagatgtgattccatcaacaccaaattttgttattacaacaactacagcctttctcagacaaggtatttctgcatggcatgcatgaggtactggcccaaaggaggcgcattgagaaatgttccggtgggcggcgggtgcaggaagaacaaaagatcatcatcatcatcgtcatcgtcatcatcatcaaagagaagccaagatcaaccgttattaacatacaatactaacccactcattgctggtcacctcccacctttgaattacgacaccaatgacctaagcctggactttgctcggctccaaaaacaatctggattacctttcagggttgatgattttggaaaccctaaccttaacggttgtaccagaaatacttcaccacccaatcctgccattgttgatgcactaaaaaacacgttccttggaaaccagaacagcttgcagaatttttactatgggtttggaaatgagaacatgggggaggctgtagatatggaggataacggggaacttatggtaccatatcataa

SEQ ID NO: 9892 - DNA, 622 bp, Gossypium hirsutum
  Clone ID: LIB3828-029-Q6-K6-F10
gtcaattacttcagtacatatggtccggttcaagatgtgaggataccataccaacagaagagatgtttggatttgtcacttttgtttatcctgagaccgtgaagatcatcctggctaaagggaatcctcattttgtttgcgatgcgcgggttctggtgaagccttacaaagagaaaggcaaagttccggacaagtacaggaaacagcagcaacagcaagtggaaagaggagagttctccccttgtggtactccaactggccttgattctagagatccatttgaccttctgctagggtcaaggatgttttacaatacccaggacttgttatggaggagaaagttggaggagcaagctgatctccagcaagcccttgagcttcaaaatagaaggttgatgggcctgcaactccttaatgtgaagaagcatcaccatcacagggctctttctagtggaagtcccattccatcacctacccactcaccaaacccgttcagccagtcacttgtacttactcaatttcacaacagtcaagaagctccacaagagaattgttctaaccctgtgctggctgtatctgccactgcttccgagaagcaagcagcgagtactactgctgttgc

SEQ ID NO: 9893 - DNA, 574 bp, Gossypium hirsutum
  unsure (1)..(574): unsure at all n locations; Clone ID: LIB3828-029-Q6-K6-F11
gttaaggtcgcaggnaacgcttgcttttggaacttcggcttatgttactcaagatgatgctctagtgacaacgcttacagtaagggaagctgttttctactcagcacaacttcagttgcctgactccatgtcaatatctgaaaagaaagaaagagctgagatgacaataagagaaatggggttgcaagattccatggacactagaatcggagggtggagcaccaaaggacttagtggaggacaaaagcgaagagttagcatttgtattgagctcttaacatggcctaagcttctcttccttgacgagcccactagtggactagacagtgcagcatcctaccatgttatgaatcgaattgtgaagctagctcaccaacatagaaggactgtaattgcatccattcatcaacctagtagtgaagtttttgagcttttccataatctttaccttctctcctctggcaaaacagtctattttggtcctatttcaatggctgagatgctttttgctataaatggattcccttgtccacctttaaagaacccatcagatcattatcttaaaaccatcaac

SEQ ID NO: 9894 - DNA, 330 bp, Gossypium hirsutum
  Clone ID: LIB3828-029-Q6-K6-F2
accatctcaactgtggtagtttgcggtaattgccagaaagttttatgccagcctactggtggtagagccagactcaccgaagctgctcgttcaggaaaaaggtgactaattctgatggctctgactagaagaatttcttttttaggtgttaaaatctaattagttttagtaggaacaacattaaggatttaaaaagactgttattgttcttgatgtattggattttttttaatgaatgttttgagttgtatttaattggtttcctaaaaaaaaaaaaaaaaaaaaaaaaaaaaaaaaaaaaaaaaaaaaaaagaagaacaatcataaaaa

SEQ ID NO: 9895 - DNA, 138 bp, Gossypium hirsutum
  unsure (1)..(138): unsure at all n locations; Clone ID: LIB3828-029-Q6-K6-F3
aaaaaaaaaaaaaaaaaaaatatttttttttttttttttttttttttttgtttttgtttttttgttgtgtgtttttatttgttttttcccccgcgggnnncccccccccccccccccccccccccccccccccccccg

SEQ ID NO: 9896 - DNA, 586 bp, Gossypium hirsutum
  Clone ID: LIB3828-029-Q6-K6-F4
tgtatacaaaggtaagtgggtgtatgacagctcctatcctctctacgatacatcagcctgtcctttcatccacaaggagtttaattgcctcaagtatggccgccctgatcatctttaccttaaatatagatggcaaccaagcaagtgtaatttgccaaggtttgatgggacgcatttgttgaggagattaaagggcaagaagataatgtttattggggactccataagtataaaccaatggcaatctctgttatgcatgcttcacgctgcagtgcctactacatctggtataatcacacaagacttgcataatcacactgtttccactgttactttcaagcattataaggtatccgtgatgctatttcgttcgttgtacttagtagacgttgataaggaaacaattggcagggttctgaaattgaattctgtaaggaatggaaaactatggaaagaaattgatgttttgatattcaacacttggcattggtggcaccgtagaggactgaagcaacaatgggattatgtgcaatttgatgggaagattcgtaaggacattgatcgcacggttgcttttcgtacagct

SEQ ID NO: 9897 - DNA, 571 bp, Gossypium hirsutum
  Clone ID: LIB3828-029-Q6-K6-F5
cacaacttgtgagaaaactgcagaactggccacccagttctttattaatcctgcaaccagtcagcccatgttgctgggctgatactggctggttcagctgacttcaagactgaattgagtcagtcagacatgtttgatcctcgtttacaagccaagattttgaatgttgttgatgtgtcttatggaggtgaaaacggttttaatcaagctattgagttgtctgctgaaatcttgtcgaatgtgaagtttatacaagaaaagcgattaattggaaaatactttgaggagataagccaggatactggaaaatatgtgtttggcatagatgatacgttgaaggctctggaaatgggtgctgtagaaacccttattgtgtgggaaaatctagagatcaataggtacgtgctaaagcacagtgcaaccggagaaattatcataaaacacctgaataaggagcaggaggctgatcagagcaacttccgtgatcctgaaacctctgcagagttggaagttcaagaaaaaatgcccttactcgaatggtttgccaacgagtacaagcgctttggttgtt

SEQ ID NO: 9898 - DNA, 543 bp, Gossypium hirsutum
  unsure (1)..(543): unsure at all n locations; Clone ID: LIB3828-029-Q6-K6-F6
ggggttgggggggggnnnngggcggccccccccccccccccccccccccgaaaagagggagggggggaaaagggggggggggagccccccccacacaggcgggggagaaaaaaaaaaaacgcggcgcccccccccccccccggggggggcgggggagggggagactaacgaacaccgagggggcgagggaaaaggaagacgcaatcgcggggggggggggggggggggaaaaaaagggggggggaaaaagaggggggggcgacccacgagggaagagagaagaaaacgggaggggcagggccccccgagagaaaaaaaaacaaaaagaggggggggggggggcccccccccccaaacaaagaggggagggggggggtgaaaaacaagagggggggggggggggggggggggaaggcggccccacccgacgcgatgaagagaaaaaaaaagagggggggggggggggggggggggagtggtctagaaggaaagaggggagggggggggggggaaacgaacaaccgggggggcgggggggggggg

SEQ ID NO: 9899 - DNA, 599 bp, Gossypium hirsutum
  unsure (1)..(599): unsure at all n locations; Clone ID: LIB3828-029-Q6-K6-F7
gttagtggatagnatgatagaatataatccaggggtatcggctgttggtataaagaacgtgaccataaatgataactttttccctggacatttccctgagaggcccataatgcctggtgttctcatggttgaggcgatggcccaagttggaggtctagttatgctgcaacctgaggtgggaggttctcgggaaaacttcttttttgctggagttgacaaagtaaggtttaggaaaccagtcattgcaggagatactttggttatgaggatgacacttattaagctgcaaaagcggtttggaatcgcaaagatggaagggaaagcatacgttggaactgacttggtatgcgaaggtgagttcttgatggctactggtagtacttgattgtctcagtattttatactttgtgtatccactaattttcggggaaatcaccagccgtgttgtacccgacgcttttgttctgtatgcatccctttttagtgagattttcattggggtttttttcgacgacagtatgtttgtaagtttctttgtactttgcagacaaagaaaaagttttcttgaggtttcttctatatgtttgtaagtttctttg

SEQ ID NO: 9900 - DNA, 576 bp, Gossypium hirsutum
  unsure (1)..(576): unsure at all n locations; Clone ID: LIB3828-029-Q6-K6-F8
attttggactagcaaaaggcttccttctcaatggacacaccattctattgctccaattgaagggacatttgggcatttagcacccgagtacttcatgcatggnaacnnagtggatgagaaaacagatgtgtttgcctttggagttttcttgttagagattatttcagggaggaaaccagttgacgcctctcaccaaagcttgcactgctgggcaaaaccactgttgaaacgtgaagagatggaaaaattggtagatccaaggcttggagggtcctacgatatttcacagctaaagagacttgccttcacggcatccctctgcattcgagcctcttcagcctggcgtcccaccatgaatgaggtattggaagttcttatggaaggggaaactgataaagagaggtggagaatgccagaagaagaggaacaagaagaattctggggctttgaggatcttgaatatgaatgtcacacttctttctcactttcacctgatgattctctctcgactgcaagttctttgagggaaaaaaataaaataatccaaaatcataaacaaaattttaaccactgcta

SEQ ID NO: 9901 - DNA, 586 bp, Gossypium hirsutum
  Clone ID: LIB3828-029-Q6-K6-G1
gtgctagcctttctccttgggccatttggccgagggcatggaccgctgaagaaaacaggcatggcgacctacttaataagtatctctacttgtcgggaaaagtcgacatgaggcaaatcgagaagacaatccagtatttgattgcttcaggaatggactcgaagagcgaaaacaacccatatctgggagcgatctacacatcattccaagaaagggcaacttttatttcccatggaaacactgcaaaactcgctaaggagtatggggacactgagttggctaaaatatgtggtttcattgccgcggatgaaaagcggcacgagacagcctataccaaactcactaacaagctgtttgaggtggatcctgacgaaaccgttcgagcctttgccaacatgatgaggaagaaaatcacgatgcctgcttacttgatgtacgatgggcaagacgaaaaccttttcgaccacttctcggctgttgcacaaagacttggggtttacactgcttccgactatgctgatattgtggagttcttggtggatcgatggaacgtgaaggaattaactggactttcagctgatgggcg

SEQ ID NO: 9902 - DNA, 573 bp, Gossypium hirsutum
  Clone ID: LIB3828-029-Q6-K6-G10
gcgttcgagccgcaaaacggagggagagcattcatggcttggttgatgtatacaccaagactctcaaatcagatggtattgctggcctctacagaggtttcaacatttcatgtgttggtatcattgtgtaccgaggcctgtacttcggaatgtatgattctctaaagccggttatccttgttggaaagttgcaggatagcttctttgctagctttgctcttggttgggttattacaaatggagcaggtcttgcctcctatcccatcgacactgtccgcagaagaatgatgatgacatcgggtgaagccgtgaagtacaagagctcgatggatgcgttctcgcaaatccttaagaaggagggctttaagtcactgtttaagggagctggtgccaacatcctgcgtgcggttgctggtgcgggtgtgcttgcaggctatgataagctccaaatgattgttttcggaaagaagtatggttctggtggggcataatcatatggcaactacagatgggtcatcaaattcattgcaatgttatttattacattccaaattttgccttgcctaccgcaaa

SEQ ID NO: 9903 - DNA, 589 bp, Gossypium hirsutum
  unsure (1)..(589): unsure at all n locations; Clone ID: LIB3828-029-Q6-K6-G11
gctgtgggacctggnctgactggcaggaagttggagatatcgtagcttatgctggtaatcctatgggttcatatgccgaggagcagattcttccagcagacaaacttgtgcctgtccctccttcggttgaccctattaccgctgcatccatcatgctgaagggtatgactgcccagtttctagtcgaatccggacacacggttcttgttcatgctgcagctggtggggttggatctttattatgccaatgggcaaatgcacttggtgccactgtcatcggaactgtctcgaccaaagagaaggcggctcaagcaaaggaagacggatgtcaccatgttataatttataaggaagaggattttgtttcccgtgtcaatgagataacatccggcaagggggtggaagttgtatacgattctgtagggaaagatacctttgagggctcgttggcatgtttaaagccccgtggctatatggtgtgctttgggcagtcatccggtacaccagatccggttccgttgtctgcacttgcacccaaatcattgttcttgactaggccttccatgatgcaatacacgtcaactcggga

SEQ ID NO: 9904 - DNA, 582 bp, Gossypium hirsutum
  unsure (1)..(582): unsure at all n locations; Clone ID: LIB3828-029-Q6-K6-G2
gtttgcgagtaggttgactgggattaaanagaatgcaaagttcaaaaagatgaccaaaacaacgaacagatctctggcctaaaacatgttgtagacgaggccaagcagcatcataatgtgaagaatgtgtatgtgtggcatgctttggctggctattggggtggagtcaaacctgcagctgctggtatggaacattatgatacagcattggcatatcctgttcagtccccaggtgtgatgggcaaccagccggatatagttatggacagccttgctgttcatggccttggtttggtgcatccgaagaaggttttcaacttctacaatgagcttcatgcctacctggcttcatgtggagttgatggtgtgaaggtcgatgtgcaaaacatcatcgagacacttggtgctggacacggtggtagagtatctcttacccgcagttacgttcaggcccttgaagcgtcaatttcccgaaacttcccggacaatggatgcatagcatgcatgtgccataacactgatggaatctacagcaccaagcagaccgctgttgttagagcttctgatgacttttatcctcgt

SEQ ID NO: 9905 - DNA, 217 bp, Gossypium hirsutum
  unsure (1)..(217): unsure at all n locations; Clone ID: LIB3828-029-Q6-K6-G3
gtgtttcatgnaaaatctcacaccatcagacatgtatcccgcgcagtgcaagtgaactagaaggccaccgtccccctctcctctttaggcttttcatttttactgtgaacgaatttacaagctttacaactccttgtcaaatctgcttggtcccatgcaccgagcgctctactttgtcttctatgcagccgctcgtattcttatcagtcttctttca

SEQ ID NO: 9906 - DNA, 569 bp, Gossypium hirsutum
  Clone ID: LIB3828-029-Q6-K6-G4
cttttctctctttccaaaaaccctttcttttatatcttcagctacaaattcagagatttttttgaccccacttttcctcttcttctaccttatataacacccacatagatatctatgtatgttttatggtaagaattttttttcttttattacaaaggaaggaatatatatttttgttatttttttgttgttgccattgtggctaccacaagagggcagctaccgtcagatacaggaggagcctttgcagattgggcgacatcatcgtccacagcaattcgagctggccccgatgatttattatcactcggtttcaatcccaacgccgcttctacggcggcgactgcggcggctccggctcaatggcctccttctgctcgtccgatcaactatggacttgctggtcctgagatggggatggttggtctacgggactttgtcgtcgttgctcctgctgcttcttttaaccatcatcatcatcatcaccatcatcatcatactcaagatcccatcatggtgaatgaacaaatcaacggtccgagttccgccgccgccgctgccaccgcact

SEQ ID NO: 9907 - DNA, 582 bp, Gossypium hirsutum
  unsure (1)..(582): unsure at all n locations; Clone ID: LIB3828-029-Q6-K6-G5
ataagtagtgaataataaggaagggttttcaatagttgtagaaagagagccctagcagtcatttaaacttataaacagagagagatggcagccgaggtgatcttgaagctcacaatatgcttcctagcattaatggttggtgtccaaggtggagacccttacttattcttcacatggaacgtcacctacggcaccatctctccattgggagttcctcaacaaggaatactcattaacggtcaattcccaggacccgaaattaatgccaccagcaataataatatcgtggtcaatgtgttcaataaccttgatgagccattccttttaacatggagcggtgttcaacatagngaaaaattcatggcaggacggtgtacttggaacaaattgtcctattgcacctggtactaactttacgtaccaattccaagtaaaagaccaaattggtagctatatttattatccatccacagctttacatagggcagccggtggttttggtggtcttagggttcatagtcgtttacttatccctgtcccatatcctgatcctgctgatgaatacacagttcttactggtga

SEQ ID NO: 9908 - DNA, 583 bp, Gossypium hirsutum
  unsure (1)..(583): unsure at all n locations; Clone ID: LIB3828-029-Q6-K6-G6
ttccttaccccaccgaccggcttgttacattggcataaccccgtaactgccctatcctaggtaaaactcattcacctattctcaatgacgctgttgctatgacatgagcaagaccatttgcggatctaggtatatactgaaatctgtgttttcaagtccatagatttcctgttgaatgtcaaaaatgtatactcccaccatagatctatcttgactcttccactacattatacgactatcgtgagggagcctccttcaaggatcaaatgatgccatcccctcctgatttccattggaacgcctttccggaaggcacttgctttagcagaaaaggctgatggaataccacaatgaatatctgaatatgaaaaaanaatagtaccattcgaatctctggccacaatacccacacccgactgattatctactttatcgaaagcaccatcaaaaatgtatctctcatgaaacttctctgtggcggcgaccatctgttttcctttaagagtgcacaacaacatacgcctactctgatcaccgttagacctgctctattgcctaacttcttctacacatcaggggctgc

SEQ ID NO: 9909 - DNA, 179 bp, Gossypium hirsutum
  Clone ID: LIB3828-029-Q6-K6-G7
gttttaggtgactataattgatgatttatgtgtttaatgagtagtatttgcaaattattaggttatcttaaatgaaattgtgttctgcctatagcaaaaaatatgtcatattggtatcattttctcatgttatgattgtgtttaaagtattatatatattttttaacttttaacgtgtt

SEQ ID NO: 9910 - DNA, 586 bp, Gossypium hirsutum
  unsure (1)..(586): unsure at all n locations; Clone ID: LIB3828-029-Q6-K6-G8
gcggnatcaaagtcattgagnaaacctgtttttaccaagtggaccaactccgccctggcactattggtcacactcttactgtcaaggttgtcaatacaaagatggtattgcagaagggtcgggctgatggtcctcaggtgcgtcaaatgcgaattgctgaatgcttggtaggagatgaaactggaatgattatctttactgctagaaatgaacaagtggacttaatgaaagagggtactaccataactcttcgcaatgcgaaaattgacatgtttaaaggatcgatgaggcttgctgtggacaagtggggtcgtgttgaggttgctgagcctgctaatttcaatgtgaaggaagacaacaatctgtcactgatcgagtatgaactggttaatgtcgttgaacagtaacctttcgggacggcgtttgctttgtttctgtattgtgtcccaagaataaaatcgactccagtaaatgtgttattctgatctatgcaacatctcgtcttcaaaaggcttgtgaagttcgcttttaggaagaagaaatctggaagctagcgtgtagtactcaaaattgcttcttgccttga

SEQ ID NO: 9911 - DNA, 587 bp, Gossypium hirsutum
  Clone ID: LIB3828-029-Q6-K6-G9
tccgcaaatcagcacacccccattccctctccttatttccatacgcggctgccccaaaacttcccttctctctctgtaagatccatcgcctccattcaccaactttggggaacgcaaggatccccggtgctttctataccggctctcgggaaaccgcccacgccacctttaacggtggcagcgctgctcctggcacaatgggtggtgcatgtgggtcacggaaacctgaacagacaaggctacggtgttaacacggcggatctgagcactgcgcttttcaacaatggccttagttgtgctgcttgctctgagatcaaatgtactagtgacccaaggtggtgacaccctgttagcccttctattctcgacactgccactaacttttgccctactaacttagctctgctaagtgacaatggcggaatggtgtaaccctccccgtcctcattatagatctaggccatggcctatgttcctttaaaaatgctgagaaaccgggcccgtaatttgacccaaactcctttcctattagagccgtcgcccgaaagcaaggggggaattaagattcacggttcaaacggtattcc

SEQ ID NO: 9912 - DNA, 593 bp, Gossypium hirsutum
  unsure (1)..(593): unsure at all n locations; Clone ID: LIB3828-029-Q6-K6-H1
ggctgatcaagctcagatgaagaaggatgagnagatgagccaaacatccatgaactctcagtcttctgatcagaatgctagttatacttctcaggcctccaacttacttcaacagacaggagagcaaatgaagaacatggcacaaggagctgctgaagcagtaaagaacactttgggaatgaacaatgctactaataatgcttctaatgccccggacaccaaccatccaagtaacccattttccaggggttgaatttttccttacccgggtaatttacatttgaggtcacagaatttagcatcaattatcatgtacgtcacgtatttttaattttatcgaattaagtcgatcaattttaattattaataaattaatttctgtatgttaatttcattaagtaattttaatggaaaattttgactcggtaaacttcattctgatatacattccgagcttgctttgacattaaagttatttaacgaaattaacataaattacttaatttgttaataaaaaaaaagtatgatgataaaattcgatgaaattaacgatttgtgtcctatatgaaaattgatgttaagtttaataacct

SEQ ID NO: 9913 - DNA, 608 bp, Gossypium hirsutum
  unsure (1)..(608): unsure at all n locations; Clone ID: LIB3828-029-Q6-K6-H10
agnaaaggcaaagcttctgtgatctcccttgtttccttatttatttgcattttctcctcacccagctttgcctatgcttcagcttcagctccaggtccatctccatcatccaatcaacaaatgagattcgaggtcttaggtcatgtttattgtgacacttgtcgtgttgaatttgagacatctatcagtgaacctattcccggtgcaacagtgaagttagaatgtaggaatcgtacagacgaaaagatcacttatcaaagtccagaaataacggctggcgataaaggaaattataaaatccaagtgacgggtgattatgaagaatcagattgtgatgtaatgctagtgaagagtcccagagcagattgcaatgaccccaccgaagagtggaggaaagccagggtggttctcaccacattggatggggtttcgggtgaaattcgctttgccaacaatcttgggtttaaaaaaaaggaagctcttcccgaatgtaccaaagttctaacagaaatgggttactttgaacttcaaaaagaacttggaaacgaagctgcttgaggaaatatgttaggtaagttggactttttccatgaattggataattatga

SEQ ID NO: 9914 - DNA, 577 bp, Gossypium hirsutum
  unsure (1)..(577): unsure at all n locations; Clone ID: LIB3828-029-Q6-K6-H11
anagcttatgcacaanatgaagagatctccggntatggaaagagagagtgccctagtggaacgtatgtgttggagaatagctgcaaagaggaaccaaactgtcatttggcaaaagcctttgacaaatgattgttatatggaacgagcacctggtacaaatccaccgctctgtcggtctgatgatgatccagatgcagtttggggtgtgccaatggaagcttgtatctctccttattctgaccatgatcagaaagccaagggaagtggtttggctccttggccagcgagattgacatctcctcctccaaggcttgctgattttggttattcaaatgaaatgtttgaaaaagacatggaaacttggcgccagcgggtagagaattattggaatctcttgagtccaaagattgaggccaacactttgagaaattgtggaatgaaagcaaatgggatcttttgcggcttctctaaaagagaggaatgtttgggtgatgaatgtcatccctgaggatggaccaaacacacttaagttgatatatgacagaggcctcattggcactactcataactggtgtga

SEQ ID NO: 9915 - DNA, 582 bp, Gossypium hirsutum
  unsure (1)..(582): unsure at all n locations; Clone ID: LIB3828-029-Q6-K6-H2
gctggcttagggcggcagaactaacttgtgatcgtgcagcccttcttgttgcacaagatcccaagttgccatctctgttttgatgaaattaactggtggctgcccatcaatggctgatcagctaaatgttgatgcatttttggagcaagctcactcttatgaaaaggcttcttcaagcccaatcgggtggtatataagaaatgcccaaacacggcaactttcacatccactgcctgttctacgagctcgtgagattgatgagtggtcaagaagtcgtgaatacagaagtcttcttgaacgtgcaacacagatgagcatgtagaagaggtttagcactgctctgaacctggagaaagtcatagtttaaacagctttaatagatatcggctttgccttacgatatattgctaggcagtggagagcacagaaatggaggcaacatttgtaaaaagcatctatagctaacatttgtccataaagatgatagtttaaattgtgggacgaacatatttggattttctgaaaccacngatagagaaaattctgggaagttacagaaacataggtttgatactcatagga

SEQ ID NO: 9916 - DNA, 235 bp, Gossypium hirsutum
  unsure (1)..(235): unsure at all n locations; Clone ID: LIB3828-029-Q6-K6-H3
gaaaaaaaaanannnnnnnnnnnnaaaaaanngggcccccaacaaaaaaaaaaaaaaaacctttttttttttttttttttttttttttttttttttttttttttttttttttttttttttttnnnnnnnnnnnnnnnnccnnccccnnnncnnnnaccnnnnacncccccccccccgcggggggngnnnggcccggcgggggngggggggggggggggggggggaggaggcgaac

SEQ ID NO: 9917 - DNA, 532 bp, Gossypium hirsutum
  unsure (1)..(532): unsure at all n locations; Clone ID: LIB3828-029-Q6-K6-H4
cccggngtcgacccacgccgtccgnngtttttcgnatttgatcaagaatatatttcccaatggtatatgatatcaagcacatgatgaagttttgcaacagccttcatggtggtttgaacaagctcgccgagttgttggaagtggaaagagtcggtgtgtgccatcaagctggttccgatagtttgctcacctcgtgcacctttaggaagttgagagataactttttcaacggctccacagagaaatatgcaggtgtattgtatggcctaggtgtccagaatggacagaatactaattagaagaaaataattggaaaaaaatgttgatggatgtagactatttagagcttgagcctgaattttctttgtatacattgtcaaaaaaaaagtattgttgatttagctgtgacttttctccttttgcttgcattgtaactgaaaccttaactggtttttccggttgaagtccagtgtaaattatgcagttagtgtttctatctttttcaataataatcataatcatttgcatctaa

SEQ ID NO: 9918 - DNA, 582 bp, Gossypium hirsutum
  Clone ID: LIB3828-029-Q6-K6-H5
cccaaacagcaccgatcggaaaggcttcaattgctggcatctggttaaccaaaaacctaattttctcttctccgcaaaccctaacaaaaccccttcaaatcccacaattcttatccctaaatcaacgcatacggttcccttctggaagaacccaccagaaaacagccgtaaaagcgtcgagctcgagcttcagcccaagcgcaccctccggctcgtcgtctaccggactgtactcttcaaagaaattcgagctcaccgctcaaaacgtggaccttgttcttgatgacgtgaggccttacttgattgccgatggcggaaacgtcgacgttttgtccgttgaagatggcatcatctcgcttaaactccaaggagcatgtgagagttgccctagttcaacaacaaccatgaaaatggggatcgaaagggttttgaaagaaaaatttggggatgcagtcaaggatattcgacaagtatacgatgatgaacaaaaggaaactactgttgaggcagtgaatcgtcatcttgatatattgagaccagctattaagaattatggtgggagtgtggaagtattgtctattg

SEQ ID NO: 9919 - DNA, 571 bp, Gossypium hirsutum
  Clone ID: LIB3828-029-Q6-K6-H7
ccccgcgtccggagagaggcgtctgtaataaaatctgcaatcttaattctgtcggtgtttttatctgtacgcttcagttcgggtgttaggttgctccaggaacagcccaatgatgaccccaaaaacatggacgctattcctcccattgatgcactcaaccctaccgagttgaatggacccggtgttggcattcacgaagatcatgttgtcccaaaaggtgctgaaattggtactcttggttttggttttgaaggtggtcctgataaatgttgttcttctggatgttccggtaattgtaatcctggtggtttcgttctaccatttcctcaaattccagaaatcccaagaattccagaaatcccacaaatcccacagatcccacaaatcccacaaattccactaatcccacagatcccacaagtcccacagatcccacaagtcccaaaaatcccactaatgccaggacagtcgggatgtgagagtggagagtgttgccgtcagggttgtggtgggacttgtgctgagtgtggtcagcccaggtgcgcatcaggatgttgccaggctgaaactg

SEQ ID NO: 9920 - DNA, 587 bp, Gossypium hirsutum
  unsure (1)..(587): unsure at all n locations; Clone ID: LIB3828-029-Q6-K6-H8
cccttnttgnaaatctcaactcctcttgcaagcaggcactctccttttgtacaggggtgctgctttggagatctgatccaaaattcatgcactgatagagagtgatttttccattttttttacgagatgggtattctgtttacaaaattgttctcttctctattgggaaacaaggaggctcggatccttgttctcggtcttgacaatgctggcaaaaccactattctttatcggcttcagatgggtgaagttgtctccacaattccaacaattggatttaatgtcgaaacagtacagtacaataacatcaaatttcaagtttgggatttaggcggacagacaagtatcagaccatattggagatgctactttccaaatactcaggccataatctatgttgttgattcaagtgacacagataggctggtgatagctaaagaagaatttcatgcaatcttggaggaggaggagctaagaggagcagtagttcttatttttgcaaataagcaggtttgtaccttttttatttattcatttcttcttcttggacctggggtagaactagttcttttgcttatattgtgtga

SEQ ID NO: 9921 - DNA, 604 bp, Gossypium hirsutum
  unsure (1)..(604): unsure at all n locations; Clone ID: LIB3828-030-Q6-K6-A1
ctcttttccaatccctattcctcaaaggaataatctaacttcaccagcagtggcaacagccatgccaaatcttgctccagggcttatctttataattgcatgggcttgcaggtttcaatattttcaattcctttttcttctttcctcttaaaccagacttataatcaaattacagtgcgtngaaaatccaatggtgtattttgactgcaatgctgatgcaggttagaaaaagttgatttaagttgcctatacagtaaagtaaagatcggtggtacattgttgtgtgtcttaggtgcccttacaatgagcctaatgcatagctctgtatcaccggaaagcgcaagaatgttcgctgccccgaccagtgatttcgttttcaataaagataagatcatcggttgcatgtacctcatggctgcggtcctagttttgtcgagcaatgtggtattgcaggcgacaactttgggcgactttcctgctccgatgtccttgtgcgcgataacatccttgatcggagtgattataacggcactggttcagttggtcgaaaatcatgttttccaatggagttggccccttgttgatgttagggagctacttggct

SEQ ID NO: 9922 - DNA, 316 bp, Gossypium hirsutum
  Clone ID: LIB3828-030-Q6-K6-A10
catttgttgtgttgggaaacaggttgatgttgacggtggtaacagtcgcgtggtttctgagaagaagcaaagcatggtgtgcttcaaaaggaaacataccttactttgagacctctgcaaaaaaaggattcaatgtcgatgctgcttttgagtgcatagccagaaatgctctcaagaatgagcctgaagaagaaatctaccttcccgaaaccattgatgttgctagtggaggacggccacagagatctacaggctgcgaatgttaaatgagtcattggatggatcttgttttgtcagagttgcaaaaacagctgcc

SEQ ID NO: 9923 - DNA, 612 bp, Gossypium hirsutum
  unsure (1)..(612): unsure at all n locations; Clone ID: LIB3828-030-Q6-K6-A11
tttctttctctgccaaaacanagccaatctactctcaacccttccttaacgctgacgccggcgtcggtggcgtcgccgctgccatcctcaaatccggtttcaacagcggcaatggaagcgccaaagtttgtatgggaaggggcaattcctcttcaaatccatctccacgaatcccaagtcaccactcttcctcctcctcctcctgctctgatcttagctccacggatcgggtatctgccgctgttagcgcctttgattaagccctattttagcagcacacttcctcctggtgttgataccatttggttcgattacaatggcctccctctcaaatggtacataccaactggagttctttttgatcttctgtgccctgagcctgaaaggccttggaacatcactgtccattttagaggatatcccggaagtgtattgataccttgtgaaggtgaagattctgtgaagtggagctttataaactcattgaaagaggcagcatatataatgaatggaaattgcaagaatgttatgaacatgtctcagtctgatcagctggagctttggcattctgtcatgaatggtaatttggaagcctaccagcgggtctcatct

SEQ ID NO: 9924 - DNA, 353 bp, Gossypium hirsutum
  Clone ID: LIB3828-030-Q6-K6-A12
gcccactcgtacggcacctagctctatatggccctttatattgcctcagcgattatatctatgccgatagctcttctattcgtccttattatacataccatgacagaggagggggatgctgctggagaagcaactctaacaatactgcttgtaactctaggtaagacggaacggaagatgggacagaaaagggttaagcatatgggcaatcatagagtctagcaatgaggaaatccatgctgaaggtgccaagggcccacccaacaacgcatcgatcatagggtccatgatacaagccatgaaagcagcaaccatactgacgggaatactgatggaaagaatatgaagtgatg

SEQ ID NO: 9925 - DNA, 611 bp, Gossypium hirsutum
  unsure (1)..(611): unsure at all n locations; Clone ID: LIB3828-030-Q6-K6-A2
gaattgtaacgtgcaaaaggtttgngaagaatcaaaacatgataacaaagggaatacagatggtgagatagaaggtaacaatgtgcaaaagggtcagngaaaagtcaaatattgaagccaaagaaaagaggatggtgaagaaaagggaaaaccagatgatagtgaaaatcataaggaagttaagtccgagaaagacaagacccagaacttggttatgccaccaccaccaccaacatggaaagatggttttcggggtgaagaatgtgatccttctaatatgtgtatggacaagaataaacggtttgctgcgtgtttgcgagtcccaggaaatgaatctccagatctatcacttctgattcagaacaagggaaagggggctttagccattaaaatatctgcccctgcttttgttcggttggagaagacagatgttcaaatccaagagaaacaagacggaaaggtaaaggtctccatagaaggttctggaatagggaacatgatagtcttgaaggatggtaaaggagaatgcagtctcgatttcaagggagttgatcgttcacaattccgcaacgtcttacgtaaacttcttgtcacaaacccctacaactgcg

SEQ ID NO: 9926 - DNA, 425 bp, Gossypium hirsutum
  unsure (1)..(425): unsure at all n locations; Clone ID: LIB3828-030-Q6-K6-A3
ggnagaggcgtctgtaataaaatctgcaatcttaattctgtcggtgtttttatctgtacgcttcagttcgggtgttaggttgctccaggaacagcccaatgatgaccccaaaaacatggacgctattcctcccattgatgcactcaaccctaccgagttgaatggacccggtgttggcattcacgaagatcatgttgtcccaaaaggtgctgaaattggtactcttggttttggttttgaaggtggtcctgataaatgttgttcttctggatgttccggtaattgtaatcctggtggtttcgttctaccatttcctcaaattccagaaatcccaagaattccagaaatcccacaaatcccacagatcccacaaatcccacaaattccactaatcccacagatcccacaagtcccacagatcccac

SEQ ID NO: 9927 - DNA, 607 bp, Gossypium hirsutum
  Clone ID: LIB3828-030-Q6-K6-A4
tccgggagttttcaggagctttctgccagtgatttgttggcactcttttatacatcaatctttggaagtgccataagctatggtgtattcttctacagtgcaacaaaggtagcttgacgaagctcagctccctcaccttcttgacgcctatgttcgcttcaatttttgggtttttgtactttggcgagaccttctcacccttgcaactggttggtgccattgtcaccatagttgccatatacatggttaactttcgaggcaaaccttcatagcaaagaacatgcttgataaagatacatacctacctacgtaagacatgtcagaaaatgagaatgaaattaagctttgacagaatgaagcatgttttggagtcagacatccttttaaaagatgggttatggttgaagaagcatgatgtttgagatccctggctaagatattgaagtaatcacgatctgtatatatatatatgtgagctagaaatgtatataccaatggataaatatagtcgtgttttagaatcttgtaatttgccgaaatctaaaggtcgtttggataaaaatatttagtcccggcaatgcatttggacaaaaaactctcacattaa

SEQ ID NO: 9928 - DNA, 606 bp, Gossypium hirsutum
  unsure (1)..(606): unsure at all n locations; Clone ID: LIB3828-030-Q6-K6-A5
gcagaggtttgtttcggnggtgaagaaagaagttttgtgtatatagtgtattgtttggaaggaaggaaggaagtgagggaaataattaaagaggtggaatacatgaaaaaggaagtggtagaagatgtggtgatagttgcaggattgataggggtgcaattctttttcgcagggaattcagttttacttggatacctaatgtcccttggccttaaacctttcaccattgttattttcttctccttttcaaccttcctcgttgtctctccttttgctgttcactttgaaaggagcaaatggcccaaacaattgacattgaagttgataattcagctggtttccatctccttttcaggggtaagtctcttccagttcctatttctaaaagggataaatctatcctcacctgcaatggcaacagccatgccaaaccttgctccagccctcatctttataattgcttggacttgcaggttagaaaaagtagctctaagttgcttgtacagtaaagtgaagattgccggcacaatcttatgtgtcttaggtgcccttacaatgagccttatgcaaagcactgtctcctccaaagatgcaacagccatgcct

SEQ ID NO: 9929 - DNA, 482 bp, Gossypium hirsutum
  unsure (1)..(482): unsure at all n locations; Clone ID: LIB3828-030-Q6-K6-A6
cccagctccgaaaattttgggagggattcanagtcggctcgatggatggagtcgagctcgaggtttggtagtgaagacgctggtgttaattggaggcgcccttttgctcaagaggtttaccaaatccaccactcgttgggaccacgctagaatcgttgctcgttctcttagcggcgaaaagttctcgcgggagcaagcctctagaaatccagatagttacttcaacatcagagcacttacttgcccagcaacggagatggtggatggttcaaatgttttatatttcgaacaggcattttggaggactccccagaaaccttttcggcagaggtttttcatggtgaagccttgtccaaaggatttgaaatgtgatgttgaggtaagttcttacgcaattagagatgcagatgaatacaagaatttctgcgatcgtccaagggatcaacgcccactacctgaagaagntattgatgatattgctg

SEQ ID NO: 9930 - DNA, 615 bp, Gossypium hirsutum
  unsure (1)..(615): unsure at all n locations; Clone ID: LIB3828-030-Q6-K6-A8
ctttcaaatattattatattctcaaaataaccaattttgatttgcntgaaacaaacaacgtaacccaaaaaagaagcgaagatggcatcctttgctcaagcaccgcgtggtgactcaaagtccggcgagaagattttcaagaccaagtgtgctcagtgccacaccatcgaaaaagctgccggtcacaaacaaggacccaatctgaacggtctgttcggaaggcaatcgggtaccgctcctggttattcatactccgctgctaacaagagcatggctgtgatttggggggagaatactttgtatgactaccttctcaaccctaagaagtacatccctggaacaaaaatggttttccctggattgaagaagccacaggaacgtgctgatctcattgcatatttgaaggaatctacggcttcctaaatgggtttacaaaattcccattccattttgcagcctttagagaaatgattcttataataaagtagacatgcatgctctttctacaatgagcattccttcccttcctgccaaattgttacccttgagaagagtttgccatttctggcaaatctaaggctttttcattacttcctgaatttcttgtgatttacc

SEQ ID NO: 9931 - DNA, 446 bp, Gossypium hirsutum
  Clone ID: LIB3828-030-Q6-K6-A9
cgattttctattttgttttctctccctccaattaagatgcagatcttcgttaagaccctgaccggcaagaccatcaccctcgaagtcgagagttccgacacgatcgacaacgttaaggcgaaaatccaagacaaggaagggatcccaccagaccaacaacgtctcatcttcgccggaaaacagctcgaagatggccggaccttggccgattacaacatccagaaggagtccaccctccatctcgtcctccgtctacgtggtggcatgcagatcttcgtcaaaaccctgaccggcaagaccataactttggaagtcgaaagctctgacaccattgacaacgtcaaggcaaagatccaagacaaggaaggcatcccaccagaccagcaaaggctcatattttgccgggaaacaactcgaggacggtcgcacctttggccgattacaac

SEQ ID NO: 9932 - DNA, 603 bp, Gossypium hirsutum
  Clone ID: LIB3828-030-Q6-K6-B1
gtttttggtgccgtagcttgtctctcatgtcctattagggtcctgtttgcatccaaccagttgtttccaagagctaggctttgatacttaaaataagaaccactatgggtatttctagttatagtttctttctgtttttatttgttgtcataatcccaaccctagaagctcatatcgctgagtatgacgagtactggacggcacgagaattggaagccattgagaacctggacaaggcctatcactccaacccggaggaggtggtccgccattacaatgaccacttctctaggaccatgctcgagttttatatcaccaaaagggtgttggcagaatcaaaaaagggtccctgtgaggttaccaaccacgttgacagttgctggcgatgtgatcctgactgggaaaagaataggaagaagttggccaactgtgcccctggatttgctcgaggtactaccggtggaaaggatggtgagttttacgtggtcactgaccctattgataatgctgctgaccccaagcctggaactctgcgtcatgctgtcacccaaactggaccactttggatcactttcaaagggtccatgaccatcaagctgcaac

SEQ ID NO: 9933 - DNA, 617 bp, Gossypium hirsutum
  unsure (1)..(617): unsure at all n locations; Clone ID: LIB3828-030-Q6-K6-B10
cggacgcgtgggcggacgcgtgggngaaanacccgaccctgatacagattatgccagagctcaggaggcccgtcgtttcatgatctatgttcatgctaaaatgatgattgttgatgatgaatacataataattgggtctgccaacatcaaccagcgatccatggatggtgctagagactctgaaatagccatgggagcctatcaaccatatcatttatcattaagggaaccagcacgaggtgaggtccatggtttccgtttgtcactgtggtatgagcaccttggcatgcttgatgacacattcctcgcaccagaaagtgaagagtgtgtcaggaaggtgaatcaggttgctgacaaatattgggatctctattcaagtgagtcacttgagcgagacttgcctggacacctactccgctaccccatcggtgtttctagtgatggatctgtcactgaattgcctggcgccgagttcttccctgacacaaaggctcgtgttcttggtgccaaatctgattatctgccacctatcctcactacttaggggatctttactttgttcttaagcaataataacttgtctagtttggtgttactggctttggtagtaacaataa

SEQ ID NO: 9934 - DNA, 612 bp, Gossypium hirsutum
  unsure (1)..(612): unsure at all n locations; Clone ID: LIB3828-030-Q6-K6-B11
gcagtatggtttagaaactgttcaggcttatatgacttatgtgcagcttaatgcagaagaagcagtaagagagatgctcaaggcagttgctgcaagaatttcctcggaatcaactaggcttggcgagagaaactctataacgatagaagaagaggattgcatggatgacgggtctgtcattcatttaaaactcactattgattctaacaaaggggaagcaagttttgattttagtggaaccagccccgaagtttacggtaactggaacgctccagaagctgtcactgctgctgcagtcatatactgccttcgttgtttggtcgatgttgatattcctcttaatcaaggttgtttggctccagttaaaatccacgtaccggcaggctcatttctttctccaagtgataaagctgctgtagtaggaggcaatgttctcacgtctcagagaataactgatgtagtattgactgcatttcaggcctgtgcttgttctcagggatgtatgaataatcttacctttggggacaatactttcggttattatgaaacaatcggaggtgggagtggggctggtccaacctgngatggaacaagtggagttcagtgtcatat

SEQ ID NO: 9935 - DNA, 582 bp, Gossypium hirsutum
  Clone ID: LIB3828-030-Q6-K6-B12
ggcgatctggtaaggagcttgagaggaacccagttcttgaagatggtgatgctggtatgattaagagattccaccaagcccatggttgtggagaccttctccgagtacccacccttgggtcgttttgctgtgagggacatgcgtcagaccgtggctgttggtgttatcaagaatgttgagaagaaggacccaaccggtgccaaggtcaccaagtctgctgctaagaagaagtgaaccgtgctggctaaacctaatgaagtttccgcagatggagtattttattatgataataatagtttgatagactttatcatttatgatatagttggtcttttgcttggttttgcatgttatagtgtggtgccattgttgtctggtaactgttctcagtattgggtgcttgacagacggtggcatagctatggcaggtggtctctagcgttatctggttttgtttaatttactactgtatcttgtcattgtcaagagggtgccccctttggttttccaaggtggctcgaaacttttatgattttcgttgaagctgcggaattatttattatgaaatcatgctgtattttt

SEQ ID NO: 9936 - DNA, 610 bp, Gossypium hirsutum
  Clone ID: LIB3828-030-Q6-K6-B2
atgacttccctcagttgacaagtcgtcctagttctgctggagggcctcaaggacaattgggttcattacgaaaacaaggtcctagccccattgtccaacaaaaccaagagttcagcattcaaaatgaagatttccctgctttaccaggatttaaaggtggtaatgctgactatggaatggatttgcaccagaaagatcaacttcatgacaataccatgttaatgatgcaatctcagcacttctctatggggaggcctgcaggatttaacttgggtggatcctattcttctcatcgcccgcagcagcaacagcaacatgcgccatcagccagtaccactggagtctccttttcgcctgtaaacgaccaagatcttctccatttacatggctctgatattttcacatcttctcattcgagctaccactcgcagaccagtggaccacctgggattgggctaaggcctctaaattcctcgaattcggtttctggtatgggttatgaccagctcatacagcaatatcagcagcatcaaaaccagtcccagctccgtctgcaacagatgtcagctgtcaatcaatcatttaggggaacctgggatgaaaccaatgc

SEQ ID NO: 9937 - DNA, 577 bp, Gossypium hirsutum
  unsure (1)..(577): unsure at all n locations; Clone ID: LIB3828-030-Q6-K6-B3
cggncgcgtgggcggncgcgtgggttccccctcatggccgccgctgatgtcgagttccggtgcttcgtcggagggctcgcatgggccaccgacgaccgggccctcgaagaagccttcagtgcgtttggtgaaatcgtcgaatcgaagatcattaatgatcgtgagactggaagatcccgaggctttggattcgttactttccgtgacgagaaagctatgagggacgcgatcgaaggaatgaacggtcaaaatcttgatggaaggaacatcaccgtcaacgaagcccaatcgcgcagaagtggaggcggtggcggaggatttggaggaggaaacggtggttacagccgcggtggaggcggcggcggatatggtggtcgccaaggaggatatggtggcggacgccgtgaaggtggatacggaaatggtggagggtatggtggtggtgggtacggaggtggacgccgtgaaggaggatatggtgacggcggatctcgttactcaaaagcggcggtgcatctgaaggcagctggaggtcttaagtttaggtttcaaagtgggcttgggcctatattgttat

SEQ ID NO: 9938 - DNA, 607 bp, Gossypium hirsutum
  unsure (1)..(607): unsure at all n locations; Clone ID: LIB3828-030-Q6-K6-B4
gngcttactgaacaaacccccaagcaaaaccctaattcatttcctacatctttattactctcttcggcatttattcaaacaccattcgcacctccaattttgaagccatcaaagcccattctcgtgcccngaaaatctaattcgtgaccttcaccagtcaatcgtttcaaccgccgataacttcttgaattccctccaacaaaatccggttttcaaaaacatcatctcattgtccactgaattccaaagcttcttcaatgaggtgaaaacttgcagaaaccagtacgtgaagattatgaattattctccagtttcaaatcacaatttcgctgcggttttgcctggtgattcagtggcaggggtcgtggttgctaacggaatcctaaatttcttaaacatttacaacacgttgttaatcgttaggctggttttgacttggttccctaactcacctccagccattgttagtcccctcagtactatatgtgatccgtacctgaacatattccgggggataattccaccattgggaggaacattggatctatctccaatacttgcatttctggttctaaacgcatttactagtaccgccgcagcactcccg

SEQ ID NO: 9939 - DNA, 604 bp, Gossypium hirsutum
  Clone ID: LIB3828-030-Q6-K6-B5
gtaagatcgttgattcttcgaaaccataacgaaccaaattggcggagaaagcaatcgagtcggttcaatgctttggccggaagaagacggcggtagccgtaacacactgcaagagaggccgtggtttgatcaagatcaatggttgtcccattgagcttgtcgagcccgagatcctccgtttcaaggccgtcgagccaatccttctcctcggccgtcagcgttttgccggcgttgacatgaggatccgagtcaaaggtggaggtcacacttctcagatctacgctatccgtcaaagcatcgctaaagcccttgtcgctttttaccagaagtacgttgatgagcagagcaagaaggagattaaggatattttggtcgggtacgataggactttgctggtcgctgatcccaggaggtgcgagcctaagaagtttggtggaagaggtgccagggcaaggttccagaagagttaccgttgaagaactgtcatggttcgttttgatgttgttcttagtgaaatgatatggttatgcttgttttgaattaaggttttattatatggatttaaattagctgtgactgagtttctgaatttttggatgtttgt

SEQ ID NO: 9940 - DNA, 532 bp, Gossypium hirsutum
  unsure (1)..(532): unsure at all n locations; Clone ID: LIB3828-030-Q6-K6-B6
tatttcctcatcttcattcgccacctgtcggcgaaatcgacccgtttcaatccgccggcaatagcagtaaccatattcttggtaatcgccacctttgcataccccnatcaacggcttgaaatcaagggagcttgatgagagtggtgatcaaggcgtcaagtgtaccccgtcatgtacacaaactcctcctccaccacctccgccatgccctcccccaccatctattatatacacaactggtccaccagggagcctgtaccctattgaccagaactttggtggtgcgagccggaatttccaggtggggtatttggctttgctttctggattcatgctccttctggctttttgaatggggattatattaatatagatttagaattgggagggttcctaggatcttgttcaagaatttgatatggtaagagaaaataatttgtcggaatagaaagtttaaggaactattagtttctttacctgctctttcatttgatattgttctgtaataacaaatttacccacttttcatttt

SEQ ID NO: 9941 - DNA, 603 bp, Gossypium hirsutum
  Clone ID: LIB3828-030-Q6-K6-B7
ccccgcgtccgatttcctcttttcagtcctacaaaggcggcccctcaactctcttctctctttccccttcactgtttcaactcaaagaaaggcggaggagaagaaggctcaatctgctggggtttggcctacggttaaaccttttgtcaatggtggtgcctctggtatgcttgctacctgtgtcatccaacccatcgatatgatcaaggtaagaatccaactgggtcaaggatcggcagcaactgttaccaagaacatgcttagggaggagggtgttggtgccttttacaagggtctatcagcaggactgctcaggcaagctacatacactacttcgattgggatcattcaaaatgttgacaaacaaagcaattgaagccaatgatgggaagcccttacctctatatcagaaggctttgtgtggtctgactgctggtgctattggagcctgtgttggcagcccggctgatttggcacttatccgtatgcaggctgatgctactttgcctgttgctcagcgcagaaattacaccaatgcattccatgcactctatcgtattgttgtggatgaaggggttttggctctttggaaaggtgcaggcc

SEQ ID NO: 9942 - DNA, 611 bp, Gossypium hirsutum
  unsure (1)..(611): unsure at all n locations; Clone ID: LIB3828-030-Q6-K6-B8
gnatcctcgnagggatcatcattataaacatcaaaatcttcttcttttttcagattttggtgcaaanatcaatcgaacatgccaaggggaaaatgggagaaaatcatcaccaagctgctgcaacatcgtcaagattgaggataaagcacgttggaggagagatcgttgaggttcaaggaggtcacattgttcgatcaactggaagaaaagatcgtcacagtaaagtttgtactgctaaaggtcctcgagaccgacgagttcgtctctcggctcacaccgccatccagttttacgacgtacaggaccgtctcggatacgaccgtcctagcaaagctgtggattggctaataaaaaaagccaaatccgccattgacgagctcgccgagcttcctccatggaacccattggatgcaacgatttcaaccaagaaacccaataaccaagaagacctaaacacatcaacagcaacaaacaatgaatttcacatcgaaaaccttgctgctgggtctggttctcaatgcgttcagcagcacgaaatgggagataacttgaataataattcgggttttcttccagcttctttagtttctgatgagattgctgatactatg

SEQ ID NO: 9943 - DNA, 584 bp, Gossypium hirsutum
  unsure (1)..(584): unsure at all n locations; Clone ID: LIB3828-030-Q6-K6-B9
gcgaactggtgngaagtcagtagctagnacaggtattagagtggtatagtaaaaagtcttcaactgggtcnaacacgagnaggaaaatgtttacatggccaagttggctgagcaagctgaacggtatgaagaatggtggagttcatgngagaaagttgtaaaagctgtcaatgtagaggagctaactgttgaggaacgaaatcttctctccgtggcttacaaaaacgtgattggggccaggagggcatcctggaggataatctcttcaattgagcagaaggaagagagcaaaggaaatggggatcatgttgctatcatcaaggagtataggggcaagatcgaagctgagcttagcaagatctgtgatgggattttgagccttctggaatctcatctcatcccttcagcctcaacagctgagtccaaggtgttttaccttaagatgaagggtgattatcacaggtatcttgctgagtttaagactggcgtcgagaggaaggaagcagctgaaagcactttgttggcttacaagtctgctcaggatattgctattgttgaacttgctcctactcacccaattagac

SEQ ID NO: 9944 - DNA, 599 bp, Gossypium hirsutum
  unsure (1)..(599): unsure at all n locations; Clone ID: LIB3828-030-Q6-K6-C1
aaatttcaaaatccgataaaaaacccganaggaaaaagaggcaaaaacttaaggagacaacaacaatgaggcttgtcataaataatgttgtattgtttgtaggtattttctgtctttacctctccttttcaccgccgataaatgctgccggtgggaacaacccgttagttgcgcacgcttgcgagaaggtgaaggcgaaagacctttgcgtctcaagcctcatggcagaacatgccagcaaaagtgctgacttagccacgctcgccttgatatcgatcaaggtggcgtcgaataatggcacgaacacatctttctatatcaagaagtcactcgacacacagaaactggagccggcagtggagcagaacttccaggattgtgaagataattacatatcggcaacacagcagctcgatggcgcggtatcgtcgctggtgtcgaagaactacaaggatacaaaaatgtttttggaatcggccattgatgacgcgatcacttgcgacaacgggttgaggaaaatgcctgggaatcaattggagttgcctcatagaaatatcatgtttcgacaactatgtatcaatgcgttggacgtcgttcta

SEQ ID NO: 9945 - DNA, 597 bp, Gossypium hirsutum
  Clone ID: LIB3828-030-Q6-K6-C10
atcccctctccctgctttgctctgaaagtccagtttttctccatggcgaccgtctctccaactcctctgttgaaagatgagctcgacatcgtgattcccacgattaggaacttggactttttggagatgtggagaccctttttccagccttaccatctcatcattgttcaagatggtgatcctaccaagaccatcaaggtccctgaaggcttcgattatgagctttacaataggaacgacatcaacaggattttgggtcctaaggcttcttgtatctctttcaaggattctgcttgtaggtgctttgggtacatggtttccaagaagaaatacatctataccattgatgatgactgctttgttgctaaagatccatctggcaaagacatcaatgcattggaacagcacatacagaacctactgagtccatccactccatttttctttaacactctttatgacccataccgatccggtgctgacttcgttcgtggctaccctttcagtctccgtgagggtgttaccactgccgtctcacacggtctctggctcaacatcccggattatgatgctcccacacagcttgtcaagccactc

SEQ ID NO: 9946 - DNA, 504 bp, Gossypium hirsutum
  Clone ID: LIB3828-030-Q6-K6-C11
aaaataaaaagcttaaatctgtgaaaaaggtggaacctaagagcaagattgaatcaataagggaatgggtcgttgatcacaagcttagaactgttgggtgtctgtggctgagcggtattgcgggttctattgcctacaattggtctcaacctggtatgaaaaccagcgttaaaattattcacgctaggttgcatgcgcaagcccttacgttggcagcattagccggtgctgcagctgtggaatactatgatcataggaacagagccaaagctgatccatatgcaaagttccttccggccgatggatactcgcacaaggattagaagactttggataggcgtttaaagtctgtaaacatactcggtttaataaagtttttttttaattttttcttttggttgtgtatagaggcatcacgtttgccccttcacatcacattcttttcaactgttccccctctaatatacctgtggtatagtggagtttgatacagagaatttacag

SEQ ID NO: 9947 - DNA, 565 bp, Gossypium hirsutum
  unsure (1)..(565): unsure at all n locations; Clone ID: LIB3828-030-Q6-K6-C12
cccagcgtccggnagaatagcgcgtggtcgactcgccgaggaacgtaaggcatggaggaagaaccatcccctggttttgttgcgaaaccagagacgttgcctgatggaacggtcaatttgatggtgtggcattgcacgatccctggtaaagcaggaactgattgggagggtggctacttcccgctcacgctccatttcagtgaagattatcccagcaagcctccaaagtgtaaatttccccagggctttttccacccaaatgtttatccatctggtactgtttgcctttcaatcctaaatgaggatagtggttggagaccagccataactgtgaagcagattcttattggaatccaagatcttctggatgctccaaaccctgctgatcctgctcaaactgaagggtatcacctcttcatccaggatgctaatgaatataagagaagggttcgccagcaagccaagcaatacccacctctggtctagtctgttattaaaaaatagtaactaagactttccatgaaattgctggtaaatgccggctgggttggctgcttgcctcatg

SEQ ID NO: 9948 - DNA, 501 bp, Gossypium hirsutum
  unsure (1)..(501): unsure at all n locations; Clone ID: LIB3828-030-Q6-K6-C3
cgaaaaccgctcctcacttccggacagacagcgcantcctctcacccacgaccatgacaaaagacgaanaagccggattgttggaaaatatggtacccgttatggtgccagtttgaggaagcaaattaagaagatggaggtgagtcaacacagcaagtacttctgcgagttctgtggaaagtatgcagtgaagagaaaggctgtaggaatctggggctgcaaggattgcgggaaagttaaagctggtggtgcttatactttgaacactgccagcgctgtgacggtgaggagtactattaggaggttgagggagcaaactgagagttgagcagctgctgactacgttatgttcaactttggtatgatgttcgtttatgtgttggctacaaaccagttgagtcattttgttgacaattgtggcgcttagttcttaattttatatcttaactctggtattggagctttatttaagttcaaatatttgagtattcttgtttcatg

SEQ ID NO: 9949 - DNA, 255 bp, Gossypium hirsutum
  Clone ID: LIB3828-030-Q6-K6-C4
ccgacgcgtgcggcgggagcgtggcgcggtacgcgtgggcaattaaacccctggttcttattactactactttccttggttcagtggtgaaggcttatcctagccttgtgttttcggttcatatcttgtcatctggggtaattgcgacgttgccatagctaaaaaagcatcggtgttgtgatggacggttgcgccaccggtcacgctatcatagcttctagaatcagccatacttgtctgcctatttctaactct

SEQ ID NO: 9950 - DNA, 86 bp, Gossypium hirsutum
  Clone ID: LIB3828-030-Q6-K6-C5
gctcggcgcttaatcagctttcgcatcagacaataactccttcctggaataagagctgatgcgaaagctgatgtaagcgcccgagc

SEQ ID NO: 9951 - DNA, 560 bp, Gossypium hirsutum
  unsure (1)..(560): unsure at all n locations; Clone ID: LIB3828-030-Q6-K6-C6
ncggctcctttcgtccatgcctgtctcaaagccagtggggttctcaggttaaaatccacaggttattgcttgaatctcgatttcgaaccagaaagaaagaggaagctgatttattctttgtaccagcttatgttaaatgtgttcggatgttgggtggccttaatgacaaagaaatcaatcaaacttatgtcaaggttttgagccaaatgccgtatttcaggaggtcaggagggcgtgaccatatatttgttttcccaagtggtgctggagctcacttatttagatcttggtcaacctatataaatcgatctataattctcactcccgagggagaccgtactgataagaaagacacaagtgcttttaatacatggaaagatatcatcgttcctggaaatgttgatgatgggatgacgaaaacaggggctactgttttccagccattgcctctatctaagagaaagtatttggcaaactatttaggccgggcgcaaaaaaggttggtcgtcttaagctgattgagcttgcaaagcaatatccanataagttggaatgtccag

SEQ ID NO: 9952 - DNA, 602 bp, Gossypium hirsutum
  unsure (1)..(602): unsure at all n locations; Clone ID: LIB3828-030-Q6-K6-C7
cggccgcgtgggtngaaaatgacatttcatttatgacatttcttctaaagtgaaaaccaaatttttggngaaactcaatagatatctatccacttggaaggacccgtgtgactctcaaaagagaggcacagtttttgatttggttcctcctctcacgaaagttaacaacttaatttttggacgaacctgggttgactcatcaggggagatgatcatgacaaacttgacaacaggcgacaaagccgtgctatattttcaaccgtgtggttggtttggagctggccggtatgagattgatggatacgtgtataattccgctgaggagccaaagatattgatgactgggaaatggaatgagtcaatgagttatcaaccttgtgatagtgaaggggaaccacttccaggcactgaactaaaggaggcatggaaacttgctgatgctccaaaaaatgataaattccagtacacacattttgcgcataagattaacagctttgatactgctccaaagaagctattggcatctgattctcgcctacgtcccgacagatatgcactagagcagggtgacctctctaaggcaggctttgaaaagacagttt

SEQ ID NO: 9953 - DNA, 248 bp, Gossypium hirsutum
  Clone ID: LIB3828-030-Q6-K6-C8
cttgttttgccctgttatgttgttgcacattagttccagaatggattttgatcgtaatttaacatgtggaaaaaaaaaaaaaaaaaaaaaaaaaaaaaaaaaaaaaaaaaaaaaaaaaaaaaaaaaaaaaaaaaaaaaaaaaaaaaaaaaaaaaaaaaaaaaaaaagcaaaaaaaaaaccatattgtataagggacagctaaattaaattaaactggcctttaattttaaaacctctggaaatgacac

SEQ ID NO: 9954 - DNA, 563 bp, Gossypium hirsutum
  Clone ID: LIB3828-030-Q6-K6-C9
cgcaatctctcccttcccaaagctaaactcaccccaaggcccgaagatccattcccctcctcagacaactctggaccttaccgtcttttaatctcacaccaactcgatccgtcacctacatgccccgcccaggcgacggtgcgccgcgagccgttaccttgatccctggtgacgggatcggacctcttgtgacgggtgctgtggagcaagtgatggaagcgatgcacgcgcctctatatttcgagcgatacgaggttcacggcgacatggagcgcgtgcctgaagaagtgatccaatcaattaagaagaacaaagtctgtttgaaaggaggattggctacgccgatgggaggaggtgtgagctcgcttaatgtgcaactgagaagagagctggatttgtacgcttcgctcgtcaattgcttcaatttgcctggcttgcccacaaggcatcaggatgttgatattgtggtgatcagagagaacaccgaaggcgagtactctggcctcgaacacgaggtcgtccctggagtcgtcgagagtcttaagttgataacaaagttctgt

SEQ ID NO: 9955 - DNA, 571 bp, Gossypium hirsutum
  Clone ID: LIB3828-030-Q6-K6-D1
gttgtggcgatggaacagccaatgaagagaatccagctttaaaggaaaatggtctcctccactaattgacaatcccagctacaagggtatttggaagcctcaggagattccaaaccccaactactttgagcttgaaaagcccgactttgatcctattgctgccattggtattgagattcggacaatgcaagatggtatattatttgacaatattttgatagccaaaaacgacaaggttgccgagtcatatcggagagaccacgtggaagccaaagtttgaggatgagaaggaaaaacagaacgctgaggatgaagctgccgattctgccaggcttgcaagctttcagaggaaggtttttgatgtcttatacaagggtgctgacattcctttcttaagcaaatacaagcatcaaattctcgatcttattgagcatgctgagacacagccgaacctcaccattggtgtcttggtctctattgtggtgattattctcacgattttcttcaagctcattattggtgggaagaaacagccaagagtagagaagaaaccagatgttgctaaaacatc

SEQ ID NO: 9956 - DNA, 609 bp, Gossypium hirsutum
  unsure (1)..(609): unsure at all n locations; Clone ID: LIB3828-030-Q6-K6-D10
aacaaacanaactgcttccttcctcttgaatttttagccttatatatctttatctttctccccagccaacggtttacttcgcaagttttcaaacaagaaaagcaacaatttcaatggctcctgaacttgttgttgtaaggcgtagtagcattaggcaaagggttgaggaaagtcaaatccccattggtggtctggggagcataggctgattcttgagaaccagggttgtatatcaacccgtttacccgccggtgaatcagactcagttcgccatggcttattacgtcattaactattccaagctctgtctttgggagttcgtggagtatagtaaaatgctatacctggacggcgacatacaattatatgacaacatagatcacttatttgatttgcgaaacgggcatttctacgcagtgatggactgtttttgtgagaacaaacaagaagccacaccccacaatacaacttcgattactgtcaacaatgtcccgacaatatcaaatgacctgacgagatgggtcaacaacccccttccctatacttcaacgcaagcatgttcatcttcgaacccaacctcaccacctataaaaaaccaagtaatagtga

SEQ ID NO: 9957 - DNA, 388 bp, Gossypium hirsutum
  unsure (1)..(388): unsure at all n locations; Clone ID: LIB3828-030-Q6-K6-D12
tcaaaaacaaacaagcaatccttggatgctgatctccaaacatgnnacgctgatgagctaaacatggnnacttaagctctaatggtggatcatnnataagccagtgcgaagatgcgttcngaagaagccaaaattaactccccaataccagaactgcattcgttacttggcaagatgattttcaacagtataaacattggtgttgatatggttgattttgagaacaagaattaattttaaataatctataaatgacatgaattctataattgtttatattttgtaaaaaaaaattattttaatttgaatcccctttacattttgtttcatctatttttccttcctagtacaaaatttatcaaatcaacaattagtctgatattaggcc

SEQ ID NO: 9958 - DNA, 591 bp, Gossypium hirsutum
  Clone ID: LIB3828-030-Q6-K6-D2
cggccgcgtgggcggacgcgtgggcttttagcattttctctcaaaactcaacctcccaaatcctctgtacctttttttttcttccaatccagacagcacccaattccatggccacctcttccccacgtgaggataatgtctacatggcgaagctcgccgagcaagccgagcgctacgaggagatggtgaagttcatggagaccgtcgtctccgccgtcccctcctccgacgagctctccgtcgaggaaaggaacctcctctctgtcgcatacaagaacgtcatcggcgcccgacgcgcctcctggaggatcgtttcctccatcgagcagaaggaggaaggacgcggcaacgccgaccacgtctccgtcatccgtgagtacagggccaagatcgaggctgagttgtccgagatttgcgccggaatcttgaagctcctcgacgagaagctcgttccggcagccaagaccggggattccaaggtcttttatctgaaaatgaagggagattaccataggtacttggctgagttcaagactggcgatgacaggaaagccgctgccgagaatacgctcacggcgtataaatctgctc

SEQ ID NO: 9959 - DNA, 547 bp, Gossypium hirsutum
  unsure (1)..(547): unsure at all n locations; Clone ID: LIB3828-030-Q6-K6-D3
ctttgcagaaagtcttaagggtacatacaagggactgggtatatgtgtggctgtaaagactgcaactttaagaaagctttgaatgcatatgagtttgagcaccatgctaattgcaagaccaaacaccccaacaatcatatttactttgagaatggaaagaccatctatgctgttgttcaagagctcaagaacactccacaggagaggctttttgatgtaattcaaaatgtgacagggtctcaaatcaatcagaagaactttcgcatctggaaagcatcatatcaagctgccacccgcgaacttcagcgtatctatggaaaggacaatgctgttgtgtcatcttgagatgaagactgcctttcgaagcttgtgaggcaagtcagatttgggcagagcagtatgcatattatactaaattatagacatgttttgggaatttaattaagctgggtaaatggatgtgaacagttatcatgggtttctgaaattttctaaatgtgacctttatattttgatcaatcatagaatctagctttcctaaannaaa

SEQ ID NO: 9960 - DNA, 540 bp, Gossypium hirsutum
  unsure (1)..(540): unsure at all n locations; Clone ID: LIB3828-030-Q6-K6-D4
cggncgcgtggngaaaaaaaagnaggcgtctgtaataaaatctgcaatcttaattctgtcggtgtttttatctgtaagcttcagttcgggtgttaggttgctccaggaacagcccaatgatgacctcaaaaacatggacgctattcctcccattgatgcactcaaccctaccgagttcaatggacccggtgttggcattcacgaagatcatgttgtcccaaaggttccgaaattggtactcttggttttggttttgaaggtggtcctgaaaaatgttgttcttctggatgttccggtaattgtaatcctggtggtttcgttctaccatttcctcaaattccagaaatcccaagaattccacagatcccacagatcccacaaatcccacaaattccactaatcccacagatcccacaagtcccacaaatcccactaatgccaggacagtcngnatgtgagagtggggagtgttgccgtcagggttgcggtgggacttgtgctgagtgtggtcagcccaggtgcgcattaggatgttgccag

SEQ ID NO: 9961 - DNA, 578 bp, Gossypium hirsutum
  Clone ID: LIB3828-030-Q6-K6-D5
tgaaaattccatgatatcctccatactggcatttgaatctttgcaaggtatatgtaatctccatagttttctatagaaatttttcgttcatggcaaaattagatcattagaatccaaactaggctcatgtaatagtttataggcactcctaacggagaactcccctgtcggctcccctctccatacttgataaatcttcatgtgctgtctccgctagtgggatctgtaatattttctccgatacatccgatcggaagcatagtgctttttcaagaagctctttgcgtagcccacacactttttcaggatgccataaattagccatggtgtcttttcattgctgggtaatggatgatactagctgtaagaaaacatccaaccagactaagagcttcttcttgccttaccgactccggatcaacttgtactcgcaagatttcttcttcatcaatggatataccagccaattctgattccatggacacaggaagagaaaaccaaccaaagaagactgttcaagactatggagatatcagccgtcgaaacaaaaaaaaaactcatgaaaacctaaagacttg

SEQ ID NO: 9962 - DNA, 584 bp, Gossypium hirsutum
  unsure (1)..(584): unsure at all n locations; Clone ID: LIB3828-030-Q6-K6-D6
aaaccctaacattcctccgccacccaacanatcaattcgttgagggctccccgctcttcattttctttactctcagaagccccgatcccatcttcaactccaaaatgtcgggagaagaggttgccgttgcccaaccagaggcacccgctactcttggtgagccaatggacatcaacacagccttgcctcttgtggtgaggaagtcccaagctcatggtgggcttgctcgtggcttacatgaagctgccaaggcaattgaaaagcacaatgcacatctttgtgttttggccgatgactgtgaccaacctgattttgttaagctggtcaaggcactctgcgctgaccataatgttaaggtgctacgtgcacctagtgcaaaagctcttggcgagtgggctggtttgtgtaagatagattctgaagggaaagcacggaaagtagttggttgctcttgcgtagttgtgaaggattacggtgaacaacacgagggtgtcgaagttgttcagcagcacaaggattaagtaaagaggatggtttctttggtagaatcagagtttaattttggccattcatgatatttgctt

SEQ ID NO: 9963 - DNA, 615 bp, Gossypium hirsutum
  unsure (1)..(615): unsure at all n locations; Clone ID: LIB3828-030-Q6-K6-D7
ggatctgataggttatagccatcggtgcccttccccgtggtaaataaagtggctgtgccgtagtttcgggggggaaatccaggggcactttcttccaaacctgttgatcacaacagccactcccactcccatcgcctcccctcactctacagatcgccacctttcaatctctgcctcattcaaaggccaggtgaaagaacgacgagaagaaaatatcatgtgccagactgagcaaaaagaccggggatccgccaaggaattcgccgataaatactctataacctgttcaacggctgacgctacatcgattcccgattggatggttgattcaatcaacggtggagccctgcaacaagttgaccttaataacggaaccaacggttggtcttctcccccgggtgatctcttctatctccgttctcaaagctacctgaccaaacgtcaaaaatgccccgccggcgattatttactctctcccattggtatggactggctcaagtccgattccaagctcgataacgtactcgcccgtcctgataatcgtgtttctaacgccctccgaaaagctcaatccgatggccaatctatgaaaagctntattttcgccgtcaatat

SEQ ID NO: 9964 - DNA, 601 bp, Gossypium hirsutum
  unsure (1)..(601): unsure at all n locations; Clone ID: LIB3828-030-Q6-K6-D8
ctcttgggttgtttttctttttccttttgttgaagctttaaaaaaatgctgacagtggaggaagttcgtaaggcacaacgagccgaaggccggccaccgtgttggcgatcggtacgtcgactccacccaattgtgtggatcagagcacgtaccctgattactatttccgtatcacaaatagtgagcacaagactgagctgaaagagaaattcaagcgcatgtgcgnaaaaatcaatgatcaaaaagcgttacatgtatctaacggaagagattttgaaagagaaccccaatgtatgtgaatacatggcaccatcactagatgcaagacaagatatggtggtagttgaggtaccaaagctaggtaaagaagccgccacaaaggctattaaggaatggggtcagcccaaatccaagatcacccacctcgtgttttgcaccaccagtggtgtcgacatgcccggtgccgattaccagctcactaagcttttgggccttcgcccgtcggttaagcgtctcatgatgtatcaacaaggttgtttcgctgggggtactgtgctccgtgtggccaaggacttggctgagaacaacaagggcgctcgcg

SEQ ID NO: 9965 - DNA, 580 bp, Gossypium hirsutum
  Clone ID: LIB3828-030-Q6-K6-D9
attttctgctctttcaattttaagaccaaacacgagcgactctcagactcagctgagttaagatcgctaaagcgatatggctttgcagctatgggaaacgttgaaggaggcgataacggcgtatacgggtctatctccggccacttttttcacggttctagctctgttatgggctgtttactatgtagcaacgggtctattcgggtcatccgatgaccatatccatcaacggtctacggctttcgaggagcagatggagccgctaccgccaccggttcagctcggcgagattaccgaggaggaacttaagcagtatgatgggtcggattcaaagaaaccactccttatggccatcaagggccagatctatgatgtttctcaaagcagaatgttttatggacctggtggaccttatgcgttgttcgccggaaaagatgcaagcagagctcttgcaaagatgtctttcgaagaaaaagatctgacaggtgatatttcagatctcggtccattcgaattggacgcattgcaggattgggagtacaagttcatgagcaagtaccgtgaaggttggatccatcaa

SEQ ID NO: 9966 - DNA, 559 bp, Gossypium hirsutum
  unsure (1)..(559): unsure at all n locations; Clone ID: LIB3828-030-Q6-K6-E1
gcccttttaanaagaagccaanaagatccgaacaaagttacgtttcacaggccaaggaccttgaagaaagaaggaacccaaagtatccacgcattagtgccccaccaaggaacaagcttgaccattaccagattctcaagtttcccctcacaactgagtcagccatgaagaagatcgaggacaataacactttagtatttattgttgacatccgtgcagacaagaagaagatcaaagatgctgtgaagaagatgtatgatattcaggccaagaaagtgaacaccttgatcaggcccgatggcacaaagaaggcatatgttaggttgacgccggattacgatgccttggatgttgcaaacaaaatcggaattatctaagcagttggcgactaccttgttttgaatgctttattttttgtgttttgttgcaaggtgagactgttattttcaggttcagctggaagatttaagctttagttttttagttttttaaggttgtaatcttgctttactgccacttaatcatctttggtataaacttaagtcagaaggtatttaac

SEQ ID NO: 9967 - DNA, 174 bp, Gossypium hirsutum
  unsure (1)..(174): unsure at all n locations; Clone ID: LIB3828-030-Q6-K6-E10
cgnaaaactctactggnaaatttaggttttgggcctagttcattttgagccgttgaattgggtcaaaggtgtaatgggcatgcttatggggtatttgggttaccagtctgctaggtctaggctaaatgggctgtaaaaggactgtttaataaataaacatttatttattttttc

SEQ ID NO: 9968 - DNA, 609 bp, Gossypium hirsutum
  Clone ID: LIB3828-030-Q6-K6-E11
gcgttgaagttgctccgattctgcttcttctgctgatcctttttactttgcgaatgccaagaagtcagccgatgtgacccagctacagatcggagtcaagcataagcccaaatcatgcgagttccaagctcacaaaggtgatagaatcaaagtgcactatcgggggaaactcactgatggaactgtattcgattcaagttttgaaaggggtgacccaattgaatttgagcttggtagtggtcaagtaatcaaaggatgggaccaaggactactaggaatgtgtgtcggtgagaagcggaagttgaaaatacccgcaaagcttggttatggtgaccatggttcaccacccaaaatcccaggtggagcaacactagtatttgacacggagcttgttgcagtcaatgggaagccatccagcggaggggataatacaagtgaagatgagctataataactgatgataggcactcgtctgagcagctttatccttttactacgtttgttttcctttaaaaatgctagcaatggtaaacctcaccagcctttctggctgggatttagaaaacaaattctggtgccatttttccataagcaaaaaactatttattg

SEQ ID NO: 9969 - DNA, 572 bp, Gossypium hirsutum
  unsure (1)..(572): unsure at all n locations; Clone ID: LIB3828-030-Q6-K6-E12
gtagtgacaaanaanacgacgganagccaccattcggaagctttacggacttgaattaaccgaccgaaactcacgttcgctcttgttgcggaactcgatcttcaccagcagtaagttccatggcaaaaatctaccaataaccttgaacaaactatngaaaataaattactaaatcctcgtattaggactcaatcttttaagagttgcttgtatataaagatcatataagggcataatttttacaaaaaatctcaattaagggcttttcacgcactttaatctaatttgtaataaaaaattaggttaatattgatgtgttaagaacaaaacaacataataattaaatcagatgatggttgaaaattaaagaaagtcaacatttaagagacccttatttgagtaatacttangaaaaattttgactcttatttaactattttgaaaggtatggcttttatttgaatacttttgtaatgttaagcttttatatgatcattttaaaagatttagtccttcaataagcaacccctaaacagttaggccccgaattcgaggatttagccaaaataaat

SEQ ID NO: 9970 - DNA, 603 bp, Gossypium hirsutum
  unsure (1)..(603): unsure at all n locations; Clone ID: LIB3828-030-Q6-K6-E2
gcagnaacactacatcagcggaaaatatattcgccatttggtctatctcttagaaaatgctgtcataaatctctccgaaggccaagagcaaatgtcatggttgatagacttcacaggattttccttgaacaccagtgttcccatcagaacagcccgggatatcatatacatccttcagagccactatccagagaggctggcaatcgctttcttgtataatccaccaaggttttttgaagccttctataaggctgtgaggtattttctggatccaaaaacagctcagaaggtgaaatttgtttaccctaaaaacaaagatagtgtggagatgatgcaattatattttgatattgagaatctccccaacgaatttgggggaaacgcaacattgaagtatgaccacgaagagttctcacgattgatggctcaagatgatgtaaaaactgctaaattctggggaattgatgagaaaccataccaaattggcaatggacattcagtagcaccggagccagcgcccatttcacaacaagcgggctgagacaacttgcctattttctataactggtatgtctctaaggttaagtgatgtgcctatgtaaa

SEQ ID NO: 9971 - DNA, 420 bp, Gossypium hirsutum
  Clone ID: LIB3828-030-Q6-K6-E3
ccccgcgtccagatgcccatgctttggtataaacaaatatccagattcagatgtatattggaaaaaggtagacgatgaatatcacttctcttggcagttcactgctgacttagtagccatgagtaatgctgattttattatcaccagcacataccaagagattgcaggaacaaagaatactgttggtcagcttgagagccatactgctttcactcttccacggctgtatgcgagtggttcatggcattgatgtttttgatccgaagttcaatattgtatctcccggggcagatatgtgcatttattttccatactctgcaaaaggaaaagagactgacggcactgcatggctcaatagaagaactgatgtttgcatcctaagcagtatgacgaacacataggtactctgagtgatcggtc

SEQ ID NO: 9972 - DNA, 518 bp, Gossypium hirsutum
  unsure (1)..(518): unsure at all n locations; Clone ID: LIB3828-030-Q6-K6-E4
cgcccagctagctaaatttttatttaaaaaaacatgaagaggttttcccttattgttttgtgcgtggtgactctagtggtggtgttattttcgggtgcagaggcagcgccagcgccgaaatgtgataaccccttggagtatagctcatgcttgaatgcgtacaagaagccacctccatcagctggttgttgccaaaagatgaaggaacaagcaccatgctattgcgagtacatgaagatagaagatgtcaaacgtgtttttgacagagttgagattgcgaaaatggctaaattgtgtggagtttcatattcttccacctgctagaatcccgtttggtttcatttgactatctctggctgggataacctagcatctcaataaatgaaattttatttgaaaactatttttttactcataatttcgactataatgtacttgtgttcttttttttttagaatgatactggtggtttgcttttnaaaaaaaaaaaaaaaaaaaannnnaannnnnanaanana

SEQ ID NO: 9973 - DNA, 421 bp, Gossypium hirsutum
  Clone ID: LIB3828-030-Q6-K6-E5
tcccgacactcttttcaataaaaatgactgctctaaaaactttgatggaccagatatcagggggccggcatactctctaaatcacgcttgaagcaactactaagggacacactcgtgaccctatcttaactgccaagctcgtggcgtacgaacaagaccctagccataaactccctttccactccactgatgctgcttactacttttcatcttgtatcctggcctgtgctacctggtaaacgcatggcacgcgtatgcatgttctttcaagaacatcgcgagggtgtcactatgattcaccattcctaacacttgatttcccgctcgaggcaatagaccgatcttacatggctgcgcactcactgtatgtcgagaactagagatatccacgccgacctgaatacgaagccatgtaacacac

SEQ ID NO: 9974 - DNA, 438 bp, Gossypium hirsutum
  Clone ID: LIB3828-030-Q6-K6-E6
gaaagttctcaactgggttccggcaatgagaatttgacacttcatatgtggttggtgatgaggagtttctgcccatcaaagaaagttcactagatttggtaatcatgttgcctagggctccattgcacaaatgatcttccaggggccatgatacagtgtaaactggcattgaagccggatggcctattcttagcagctattcttggaggagagaccttaaaggagctgcgaatagcttgcactgtatctcaaatggagcgtgaaggatgcattagtccacgggtatcacctctggcacaggtcaaggatgctggcaaccttttgaccagtgctggttttgcacttcctggcgttgatgttgatgaatacgtggttagatacaagagtgcgttggatcttattcgacatctgcgagctatgagtgaaaactaatgcgct

SEQ ID NO: 9975 - DNA, 581 bp, Gossypium hirsutum
  unsure (1)..(581): unsure at all n locations; Clone ID: LIB3828-030-Q6-K6-E8
cgtattaanacaggctgaaaagaaaaaaggcgtttggagaaagctcttgctacttctgcagccatccgatccgaactagagaagaagaaacagaaaaagaaggaagaacagcaaaggcttgatgaggatggtgctgcaattgctgaggctgtgggtgtgcgtgtcctggttggtgaagactcgggggattcatgtgagattatggtaaagaaggacgaggggttcaaccattgggattggggaaggagatctaggcttccccatcaggctcacacaacctctcaagggtgggtcgctaatgcgtatagtggtggatgcgagtgggctgagtttggaagcagtgactggtccttcacgtatggagcttgcagaagggatctacatgcaccatggtttgaggatagaggctggggaaacgaagaactttcagctggtcttatagcagcacaggctgtttcagcactgcaaatcacagaggacgcagatgtagtagacaccatcgtgcttgacagaatgttgagaggctagcctagcattttgttgttatatttgccactttccatgttgcttgctgtcttttt

SEQ ID NO: 9976 - DNA, 602 bp, Gossypium hirsutum
  Clone ID: LIB3828-030-Q6-K6-F1
cagaactaaggagaaaacatgaagcctatcgcaaagaacgttgcattggctttatctttcttcatttccctctctttcttccccattataaatactgctgttaccaatcccttactcactgaaacctgtcaaaaggtaaagaacaaggatctttgcacctcaagccttggggccgaacatgccacccaagacgcaaaagatgtagccgccctcgcattgatagctatcaacgttgcttccaaccatggcgtcaacgcttccgtctacatcaagaagcagctccttgacggtaaaattttggaacctacaacggagcagaactttgaagattgctcggaaaatttcgacgacgcaatgcaggagcttgacgatgcgctggcagtcacactgtcgagggatttcaaacaagtgaaaatcgagttggaaagcgccatagacgatgccgacacctgcatctccgtgctgaatcaaaaagcaggaaaagacaaggaactgtatgaaaagactaatcactttcgccaactagtcagcaatgcctacgacattgccaatattttggctccaaaaaatcatgtgccccgcttagcttcattacctactat

SEQ ID NO: 9977 - DNA, 551 bp, Gossypium hirsutum
  unsure (1)..(551): unsure at all n locations; Clone ID: LIB3828-030-Q6-K6-F10
ctttgcaagtgcatgctttttattatttattgaattttattgatgatttacgccctaaaattggtgtgttttgaatgaacaattcatagattttaaacgttggtggtgaaaatgtcggagaagggtggcagaatgttctccttgcccaccaaaacaacacccaaatcttctctcaaatccaccgctgngaaaagatgataattcagcaaaatcaaagaggggaaggaaagttcagtttggaactgaaggttcacctgatgttaatttctcatcgccaaaatctgatggcaagtttgcaaccccttttggtaaaggtggaaaaggagaaaaggcagcgaatggtggaaagactcatgtggccaaagaatcacagtcattggagctcagagttgaacagggtttttacttgccttaactaccatacatgtttgtttcaatgatttgttactctttgtttaccaagttagttctttgtcaagcctgcatttaggttgtatttatactttttttctttatttgaatgattaacagtatttcacttgtaggacgtg

SEQ ID NO: 9978 - DNA, 505 bp, Gossypium hirsutum
  unsure (1)..(505): unsure at all n locations; Clone ID: LIB3828-030-Q6-K6-F12
cggccgcgtgggacggcgcccatttccgatgtaatgatcccgattactctgtctcgaggactatttccaagacgcaggggtttccgaagaaactgagaaagctgcagtgngaacctggaaaatgaaatgtggcaaaggttttacggtactggattttggagaagcccctctcaaaaagaggtgagactcccaggtttcatcctctctaactacaattttccaacctttgctgctttagtgcccttcaccatatatatgttcaatgaaatgttgtaagacaaaaattatatgtaaatggaggtggtgggattttctgattcctcgtcatcaaagaaaaaatcggaaaggaattaggtagggtgattgattgtatggaacgtatgtcatattttaagattttgattgttgttgccttcaaatcttcatgttcaaatccttgaacacatcaacacattttgtgagctttttgataataatatataataaagatcgattttaagttatt

SEQ ID NO: 9979 - DNA, 580 bp, Gossypium hirsutum
  unsure (1)..(580): unsure at all n locations; Clone ID: LIB3828-030-Q6-K6-F2
gtaactctctcactctactcgtttccctttgcttaacagagcagagattttttcttttctaatccgaaatctgaaatctcaatctaaagcaggaatggaggcttcttctngtcactgaaaattcttccactggcaatgaccacgagcaagagcctgttttgaatcatggaggcacggagtcgaaccctgagactaatcgagaagaagaagaactagacggagaacaagttaggcgcgtattgcaagttagtgccgctactgggaaattttggcataattgggataagctgaagagcatgctatcctttcagttgaaactggttttatcagagtatcctgaggcaaaaatgacggttgagcaacaaaatgcttcactaggtgaaacttacctagagttggttacacggctaaatgaagagcttcattcttttattgagggcccaccatttacccttcaaagactctgtgagatcctactggatgcaagaagcatctatccaaaactcttgaagcttgccctagcactagaaaagaatttgctggtaacctccacattgacagtctgcaccgaaccctaccc

SEQ ID NO: 9980 - DNA, 585 bp, Gossypium hirsutum
  Clone ID: LIB3828-030-Q6-K6-F3
ctgagtcttcaggttgtgagggtgtatgtcaaagggaatgtagcatacttgttcataacaaggagcatcaagaaatcaagtcaattactttacatgttgaaagcttctgattcatccacaccaaatgataaatgtcctttaagaaggctgagttgtttgagaaacaaatttgtgggggtttaaaattaagcattttccaatattccatggtgcttttctggcaaggtggccatgaagaggaaccgtggttttcaagatcattgtttgttatcggaggacatgtgcttgtgtgcgttgaagacatctttcagtttagttctctcctaaacaatgcatgttccagtccatatttctcccttgattcaagctgcaacatcgcaggcatatcagagatggtcatcgagcaaggagagacgtgttgtataacattggccattaagtccagcacatcgaaagccggttcatcgaccaaaacgcaaaaaagggccggtctgagtagtaagaagtggaaactgaagtggttctctcaagaaagtctatcccaatttgtggcattagtgaaggcaatccaatttaggatgacat

SEQ ID NO: 9981 - DNA, 602 bp, Gossypium hirsutum
  unsure (1)..(602): unsure at all n locations; Clone ID: LIB3828-030-Q6-K6-F4
tttggagccttgtaggccgagtggctaatagaattggaggggctaagtttattttaaatggtgtcacttataaaaccgatgctaatgatggaaaaaacacccttcatggtggaagcaagggattttctgatgttatanntggactgtgaaaagttataaaaaacatagccatgtaacttttagctacgaaagttttgacggtgaagaaggttttcccggaaatctttcagtttcagtgacatatatgttgcttcataagaacaaactagctgtgaaaatgatggccaagccactaaacaaacccaccccagtgaatttagccttacacacctattggaacctcggtggccacaacagtggcgacatcatgtctcacacacttaagctatttggctctaagataacaccggtggactctgaactaatcccaacgggcgaaatcgttccagttcgaaaaaccccttatgatttccgccggcctcgcgagatcggcagcaagttcgaccaattaccccacggatacgacataaactacgtgctccataaatcgaggcggtcgagacacttgaggaaagttgctgtggttgtagaaagcaaatgtg

SEQ ID NO: 9982 - DNA, 537 bp, Gossypium hirsutum
  Clone ID: LIB3828-030-Q6-K6-F5
ggttttcccagtggtaactggtgctggggaagaaggagtgctgatagagcacaaacgtagactaggtaaacattggcgaaggaaataaaatgagtgtataaaaagaggaggtggtggtgtgttgcttggatttttcaagcatgattaaggtgaataatattttcaagtttgggatgaatatgattagtatgtttcaggcgtgtaaaatacaaatgttcccactatgtaaatggaggtcacatggtgtgcaggtggcaaactatataatgtccatcgtgctaaaaaggtggcatgcaattattgatgtggtgggcgccatgatatgatctaacactgtttaaaccggtgcgattcaagacattgatcttattaatgctggcaaaagatgtttacgaggagccacattcctgcaaagaagcatcgaatgtaattccaataaaccattagttcctcaactgcgatactcccagaatcttgcaatgcaatgatatatggtagcttgctgcgtggcgaatgctgtacagctagccaggaaga

SEQ ID NO: 9983 - DNA, 577 bp, Gossypium hirsutum
  unsure (1)..(577): unsure at all n locations; Clone ID: LIB3828-030-Q6-K6-F6
ccagccgcttcggtttatcaccgccggcggtaacaactcaaaacccttgccgccgaaaagagcaaaaaaaaaaaagaaaaatgagcganagatgggaaaaatagaggaggcgtcacctccagtttcaaccctcaaagccaatatcaatacggcacgtttcaaggcgtagccaattactaccaccctcatttccctcaacaaccgcctccacagccctttgtcggcttacctcatgccatccctccgccgggctgccccgccaacccctatgtccatggctaccagaccgttacaggttttccagttgaagaacccgtgcccttgaggcaacctcgcctacctgtttgtggacttggaatgggatggttattgttttttcttggcttcttctttggcggtattccctggtatgttggaacttttattctactgtgtgtcaaagtggattatagagaaaaagcaggataccttgcatgtgctattgctattctacagtccgttgtcgctatgatcgccattacctttggtttgacaaagggaggaactcgtgcctggtgaggtatgggctatgaaatta

SEQ ID NO: 9984 - DNA, 620 bp, Gossypium hirsutum
  unsure (1)..(620): unsure at all n locations; Clone ID: LIB3828-030-Q6-K6-F7
gttcaacaactggntggaacccaaatgagtggggttggtgcaaacaaaagctcggtgcaaatgccattcttgccgtgtcccttgctgtttgcaaagctggagctgaagtcaagaaacttcccctttacaagcacattgctaaccttgccggtaacagcaagttggttcttcctgtccctgctttcaatgtcatcaatggtggttcacatgcaggaaacaaacttgctatgcaggagttcatgattcttcctgtaggagcatcatcctttaaggaggccatgaaaatgggtgttgaagtctatcaccatttgaagtctgtgattaagaagaagtatggtcaagatgcaaccaatgtcggtgatgaaggtggctttgctcctaatatccaggagaacaaggaaggacttgaattgttgaatactgccattgctaaagctggttacactggcaaagttgttattggaatggatgttgctgcatctgaattttacggaacagataaaacttacgacctgaacttcaaagaagagaacaatgacggtaaacaaaagatctcaggagatgctttgaaagatttatacaagtcattcgtagccgagtatccgattgtgtcaattgaa

SEQ ID NO: 9985 - DNA, 601 bp, Gossypium hirsutum
  Clone ID: LIB3828-030-Q6-K6-F8
aaaactgcaatcttaattctgtcggtgtttttatctgtaagcttcagttcgggtgttaggttgctccaggaacagcccaatgatgacctcaaaaacatggacgctattcctcccattgatgcactcaaccctaccgagttcaatggacccggtgttggcattcacgaagatcatgttgtcccaaaggttccgaaattggtactcttggttttggttttgaaggtggtcctgaaaaatgttgttcttctggatgttccggtaattgtaatcctggtggtttcgttctaccatttcctcaaattccagaaatcccaagaattccacagatcccacagatcccacaaatcccacaaattccactaatcccacagatcccacaagtcccacaaatcccactaatgccaggacagtcgggatgtgagagtggggagtgttgccgtcagggttgcggtgggacttgtgctgagtgtggtcagcccaggtgcgcatcaggatgttgccaggctgaaactgtaaagagcaaagggatagaagaggttatggacagtgaacccagtccaccaaagtagggagatgataccatattaagatgaaataatga

SEQ ID NO: 9986 - DNA, 605 bp, Gossypium hirsutum
  unsure (1)..(605): unsure at all n locations; Clone ID: LIB3828-030-Q6-K6-G1
ctttttccaaccctaaccctacctcaccaaccaggnattcaacatgaagggaggaaaatccaagtcagatactaagagtgccaagctatccgtgaaatccaaagctggaaagaaatcggggaaggctgccaaggatccaaacaagccaaagaggcctgctagtgccttctttgttttcatggaggagttccgtgagcaatacaagaaggatcaccctaaaaacaaatccgttgcggctgtcggcaaagctggtggagataaatggaagagcttgtctgaagctgaaaaggcaccttatgtagctaaggcagaaaagcggaaggttgagtatgaaaagaacatgaaggcctacaataagagacaggctgagggtcccaaagacgaagatgttgagtctgacaaatcagtgtctgaggtgaatgatgaggatgatgatgaagaaggcagcggagacgaggaagatgatgagtaggaaggtccgtggtggatagcataatcaatgtaggctgtgatagtgtttgatcaaaaccttatgttaatgctttagatgtttccatgttattcttttagatgcgcatgccatctaagggagaaatgtacctctg

SEQ ID NO: 9987 - DNA, 599 bp, Gossypium hirsutum
  unsure (1)..(599): unsure at all n locations; Clone ID: LIB3828-030-Q6-K6-G10
gtaaaactcatgatttgagaatttgaataaaaacaaaaaccgatatacaaagagagttcatcatatatcgttaatggaagacgagaaagccagaagcaagttcaaaaggttgtgtgttttctgtggcagcaactctggacatagacaagtcttcagcgatgctgctcttgaattgggcaatgaactggttaagaggaagctagacttggtgtatggagggggaagtgttgggttgatgggtttgatatccaagacagtatatgatggaggctgtcatgttcttgggataattccaaaagctctcatgcctcttgagatatcaggagaaacagttggggaagtaagaaccgttttagacatgcatgagcgcaaagctgcaatggcccgagaatccgatgcctttgttgctcttcctggtggatatggaactatggaagagttgttggagatgataacatggtcccagcttggaatacataagaaaactgttggtttgctaaatgttgatggttactacaataatttgcttgctttatttgacaacggngttaaagagggatttatcaagccaagtgctaggcatataattgtctctgctc

SEQ ID NO: 9988 - DNA, 597 bp, Gossypium hirsutum
  Clone ID: LIB3828-030-Q6-K6-G11
ctccgtttttttattcgagggttcttttccttctcttcttcttgttgttttagagatgggtttggtgtctgttttttgggagattttaaagaaacccacaattggagatgtggtgagggagttgctgatttttatagctcctttatgggttgctgtaattgttggggttttagttggttgggcatggaagccgaagtgggcaaatataggcagggagatgttcatggattgttctggttctaagaattcggctcctgcagaatcttctgagtcttcttccagtggttttggttcccttccgagcttgaatttgatcaagtttcagttgtcgagtgctatctcttggatttcagatgatgggcctcaaaaagattctttctttttgtcacctactcttcattccaattgcagttcatcacagaacgagaaggaaaaactgggttttctgacagatgatgatttagagcatttatataaattagttgaagaaaaagatggaggtcctgcttggattcacatgatggataagtccaccccaactatgggatatcaggcttggcaaagagatcttgagattggtcctacacaatatcgtag

SEQ ID NO: 9989 - DNA, 523 bp, Gossypium hirsutum
  unsure (1)..(523): unsure at all n locations; Clone ID: LIB3828-030-Q6-K6-G12
gccatncgctcttgcatctgctgctgcggtgcatgctaccattgctcgatcgcttgctggggtgcctgaactggtcccgtagcttcataagatggctgatgggattgctacacgggattataaccgctcagatgactcctcgcctcgatctgccccttacgttgccagctatgcctgatgctactcctgctcctactgctgctcctaaaactgcttgcgcaccttcttcttctccttctgctattaattctgacttaaatggccactcagatggtcaatactttcatgaatcctttcaagaatctcaactcacgcatcaatttaaactgcaataaaaaaagccaaacacatagtctagacctaagttcagatatgatgtctacttgaaagaacacttctcataacatgaatcatgatttgaatgagcaattgcctttgcaggatcctatggaaaccaaaatggataccgcagctggtgacctaactgatgccctagtcgatcccaaacacactattactcaca

SEQ ID NO: 9990 - DNA, 569 bp, Gossypium hirsutum
  unsure (1)..(569): unsure at all n locations; Clone ID: LIB3828-030-Q6-K6-G3
caaaagcactggtagcacctgncgtggnacatccaaaagaacggaaggacgtgtgaacaatggaatgagtgtacttcaacaacatgttgccttttttgatcgagataacgatggaattatttatccctgggacacttataacggtttgcgagatattggtttcggtccagtatcctcttttattttaggagttctaatcaatggaacaatgagttatcctactctgcctgtttatgccagtgaacctggagaacttgttcaccaagtatgctcgcacagagcccggcaagttaacattcttcgaggtgttgcgattgactgaggaaaatcgggtgccttttgacttcttgggatggattttggccaaggcggaatggttggttttgtattcgcttgccagggatgacgacgggtttctatctaaagaagcagctagaacgtgttgtgaagggagcttgtttgagcagtatgccaaaatgaacaagggtgataacaaaaagcgaaaatgaaataaggcataatgacttttttgaccctccaactttataaaacaattattttagccattt

SEQ ID NO: 9991 - DNA, 611 bp, Gossypium hirsutum
  unsure (1)..(611): unsure at all n locations; Clone ID: LIB3828-030-Q6-K6-G4
cccagccgtccgattctctagatttccttcaacccgggtttctcaaccatctttcctctcttcctcgctgaaggcaagtgaaggctacatcctccaggtatatttcttctcccgttcttaaggcatcttttgcaagttcatgagcttgacgattctctgatctgtgaataaactggaaatggctttcttngaaaaaattgtttctttctttggatatctcggatgaccgccccgatcgctgacttgtctattgttgttgagttgcatttttttataactgtttttgaatctcctattatggtaattgattgaaaacccagtgagatccctaactttactgcttgtaatcctgcatatgcctccgccatgaacggggacgatattgcggagtggagtactgattttaaggcaagaaactcatccatctcccccctcaccatcatacccgaagccgatcttgaatatttgttgtcaaaggctgcgtcaacatagatagttgctgtcgtacttcttgtgttctgtctctgacgtatgttatcacctaagttggttcctggagctccatatcatccatgcagcacaacaaaaaagctgacacagttgactgttgc

SEQ ID NO: 9992 - DNA, 571 bp, Gossypium hirsutum
  Clone ID: LIB3828-030-Q6-K6-G6
caaaaaacaaaccaagtttcagtcctttttgtcctaattttctcgacctactttcttctccaaagttgcagtcaaaatgttgagcacaaatgcgattagaaccatcgttgggatcatcggaaatatcatctccttgttcctgtttctctcgcccgttcccacatttattaaaatatttaaattgaaatccgtggaagagttcaagccggatccatatgtagcaacaatcttgaactgtgccatgtgggtgttctatggtctccccatagtccatcccgacagtcttttgatcattaccattaatggtgttggcctggtgattgagggtgtcttcgtaaccatcttctttatcttctctaacaacaagaaacgaaagaggatttgcttttatcttttgatcgaaatcatcttcatggtagccgtagttttgattactttacttgtgtttcaaacaacccaaaaaaggtccatgtttgttggaattttggccattgtcttcaacattggaatgtacacttcaccattgacagtcatgcgtatggtgattaagacaaaaagcgtcaagtacatg

SEQ ID NO: 9993 - DNA, 604 bp, Gossypium hirsutum
  Clone ID: LIB3828-030-Q6-K6-G7
caaaattggggttaagttcttacctatggaatgcactcccttttatggcaatgattacagtggaatgcacagatgtgggtatatcagtgataagtaaagcagctttgagtaaaggaatgagcaacgttgtttcagttacttatttcaatgctttgggtactttgatccttcttccatacttcatcttttgcagaagctcaggacagattatatttcttactggagtcaaattcagctcccctactctctcatcagctttagtaaaccttatccccattttcactttcctgcttgcagtcatatttaggatggaaaagttagaaatgagaaaatcaagcagtcaagctaaattgttgggtgccattgtagctgtaacaggagcattcgtagtgactctctataagggtcctctagttttaatgtcttcatctcacccttttgattcaaagcaatctaagtggattattggaggcctttcagagcaatctaagtggattattggaggctttcttcttttattggtttgcctttcatctgcaacatggaatgttcttcaggcagccactgttaaggaatatacagataaaatgacgattgtcttctt

SEQ ID NO: 9994 - DNA, 605 bp, Gossypium hirsutum
  unsure (1)..(605): unsure at all n locations; Clone ID: LIB3828-030-Q6-K6-G8
cggccgcgtgggcgcatctttgtttgttcataaaataatagtatagttttcttagaaaagccagagtgaaagaaagaaaaaagtaaaagaaaaatggctttggcaagcttggtngagaagaaaggcataccttttgtctagaaacctgtcgaattcgcccgcagatgcgttgaaatactctttttcactcagcaatttctcgaggggtttcgcttcaggatctgaagagaacgacgtcgtcgtcatcggcggcggacccggcggctacgtggcagctatcaaggctgcacagctaggtctcaagacaacctgtatcgagaagcgtggtaccctcggtggtacttgccttaacgttggttgcatcccatctaaggcgcttcttcattcatcccacatgtaccatgaagctacgcattcatttgctggccatggtgtgaaattctcctctgttgagattgatttgcctgccatgatggcccaaaaggacaaagctgtttctaatcttacccgtggtattgaaggtctgttcaagaagaacaaggtaaactatgtcaagggctatggcaaattcatttctccctctgaagtttctgtagacactattg

SEQ ID NO: 9995 - DNA, 567 bp, Gossypium hirsutum
  unsure (1)..(567): unsure at all n locations; Clone ID: LIB3828-030-Q6-K6-G9
gctgtctaacccagcttagtcaaccattttccctcagtaccggttgatctgtgaatccaagngggcggtctgacttaccatgttttctacttccgtttacgagcaaagcgcctttagacttggctcatttaaccctaaccaggacggatcaagggttacattacattacattacatcttacagtactaatatgtaaaattcaatgaaaatatgagtgtcaaaaaaaaaaaaaaaaaaaaaaaaaaaaaaaaaaaaaaaaaaaaaaaaaaaaaaaaaaaaaaaaaaaaaaaaaaaaaaaaaaaaaaaaaaaaaacggggggggtccgttttaaaaggatccaattttacgtccccgtgattgcaacgtattaccttttttttagggcccccaaaattaaattaacgggccgggttttaaaaacgttgggatgggaaaaaccctgggtttccccaatttaatcgcttgggaaaaaatccccttttgcccacttggggaaaaatggaaaaggcccacacggatcgcctttccaaacatttgcccacccttaatggcaaatgggacccccc

SEQ ID NO: 9996 - DNA, 479 bp, Gossypium hirsutum
  unsure (1)..(479): unsure at all n locations; Clone ID: LIB3828-030-Q6-K6-H1
atttcatccgccgtttctttcctttttccttttctgccctcagcttcatcttctcctacgttttcttcttttccaaattgcagagattgaatgcaaaacaaccgatgggagaagaaaacaagaagattaggaaagaagaggtaattgcaaagctcaaggacaatggtgacttcgacaagctccgtctcaaaatcatccgcaagctcaaggacaacttacgttttttcttcttctttttttaatcaccaatattatctactttttttatcttttatatattttttctaggatttaggtaaaagttttagaatgctgaacttttgggtaacctggaaatcatggatgcttgttgtctgtgattgtttgcttgaatgggttttgtcttgattttgagttttgggtatcttcatggaatttaatttgattattatatctgggtataatttattaatttcaaattcaaggccatgtttgattna

SEQ ID NO: 9997 - DNA, 367 bp, Gossypium hirsutum
  Clone ID: LIB3828-030-Q6-K6-H10
tgggaattgtgctgagtgtggtcagcccaggtgcgcatcaggatgttgccaggctgaaactgtaaaagcaaaggatagaagaggttatggacagtgaacccagtccaccaaagtagggagatgataccatattaagatgaaataatgaggaagagttggttgtcgtcgtattaattatacaaaataagaagtaatgatgttgcagaagggcttgctataaaatcctgttggataaaaagagtaattatgaagaataaatagctcaaaacaatatttgatttacaatatcctaaagttccttgaatcttgttttgtagccatatgtaattaatgcatgtacatgctaatatatatgattttctttgct

SEQ ID NO: 9998 - DNA, 604 bp, Gossypium hirsutum
  Clone ID: LIB3828-030-Q6-K6-H11
gttaatataaggtttgactttgtgaccaatgcattgatacaagacataactagcaaagacagtaaactattccacattaatgtttttgcttgcaaaaacattaccttcgaacatttgaagatagaggcaccggacgagagcccaaacacagatgggattcacatgggcaaatcagagggggtcaatattattgcctctgacattaaaactggtgatgattgtatttctatcggagatggcactaaaaatatggtcataaaagaaataacttgtggaccaggacatggtataagtatcggtagtcttggaaagttccaaaatgaagagccagttgagggaatcaaaatctcaaactgcaccatcactaatactttgaatggagctcgaatcaaaacttggccaggcgaacatggtggggcagtatcagaaatacattttgaggatattaccatgaataatgtctcttcccctatcctaattgatcaacaatattgcccatggaataaatgcaagaaaaatgaagaatccaaagttaaactaagcaacattagcttcaagaacatccgtggcacatctgcgcttccagaactatcaagtttatttg

SEQ ID NO: 9999 - DNA, 573 bp, Gossypium hirsutum
  unsure (1)..(573): unsure at all n locations; Clone ID: LIB3828-030-Q6-K6-H12
cccagcgtccggcctacttngagcttgctgttaaaacaccgtaattttccagatgaataggcgtgtaagaggaatgaggaaaattggggaaatgaacaataaaccctaggcagaaataactgaacccaagacgccgtaccaccgcatgattgatgacgatgggtctttgtctcccagaggacgtagtttcaatgattgtgtcattgatgtggatgctgaggaattatgctctgctttgaaagatgtggcttccaagtagaaaaacaactgggcaatcaggtggttggacttcttctgaggatgaggctgatcctatggatcatgatgaagaagatcggaatagtaagagttttaaggagcaaaggaaagcacactatgatgagtttttgaaaataaaggaactgcgacgtaagggttctttcattgaggatgaagatgatgaagtggagggtgattcatcatcatcattaagctctggtgtcaaagacataggaattggggaaggtcctgcaagtttgccccaaaagtcttctgcaagtcctgggcatccaggtaatggattgtgattgtaga

SEQ ID NO: 10000 - DNA, 468 bp, Gossypium hirsutum
  Clone ID: LIB3828-030-Q6-K6-H2
ttagcattttaggtttcagatacctaaaatttggaagcaatagtttgaggatcatgccaagtatctttcgtacggaatggtatttagttataagcataaggatacattcatttcccgtgaagtagctttctagaaagttttatgaaaagtgaacttatttactagactaggggccgttctaagagcaggttggggccttgcccccctttagctcctccaaaatctctaggtttttaacgtgatattttttgttgtttgaatgattctttgtaaaatatttacttcagattttttatttgttggaaaattttgcattaatacaaaaacgatctattcctacacctattttctgctttgatttggcttatatctttagggatatgttacttggactcaattgcgagtgtaggatacgggtatgtagccaacatgagtatgggtaacttttctaggttttccatgtatttg

SEQ ID NO: 10001 - DNA, 583 bp, Gossypium hirsutum
  Clone ID: LIB3828-030-Q6-K6-H3
gcaggcttggtgcaaccttgggctgcaatagtaatgggaatgctttcgggcagtataccatgggtgtctatgatgatccttcacaaaaaatgcagttggctacaacaggtagatgatactcttggtgtgtttcacacacacgcggtggccggcctgttgggcggcctcctcaccgggctgttggcagagccagatctctgcagactcatactcccaagagaaacaaggggtgcagtttatggtgggaatggaggggttcaattcgtgaagcagatagtagcagccttgtttgttattgcttggaatgtagcgtccacaacaataatacttttagtaataaggttgtttataccattaagaatgcctgataaccaactcgaaatcggagatgacgccgttcatggagaagaagcatatgccctttggggtgatggagaaaaatatgacccaacaaagcacggttggcatacgtcttcgtactcagaggtgacagcaccctcacgtttcgttgatggtgcgagaggtgtgaccattagtttggtagctgcatgcatgtgaacgtaaacaaatttgctgtaaatac

SEQ ID NO: 10002 - DNA, 438 bp, Gossypium hirsutum
  Clone ID: LIB3828-030-Q6-K6-H4
gtttgctgtgctattatcaccttgccttcttccattcaagcccagtcctcttccccaacaagcgacggagggaattcgatagaccaagggattgcatgcatgttgatggtggtagcattgttgctcacttacctcattcatgctgctgatttctgctttagcttttgagcttccaattggaaaaatagggttttggacatgtgatgggatgatgaagctggcttctttattttattttattttagttaaagctaagggttttttttttgagggttgatgtttctttcttcaatctgatttgaggtctaaatgatttgtaaataagagcattatgtgattttagtcgaaaattattttgttcgagcttgataatctcattagcttgtcgatttttttttcagtgttatcaatattcaatctacgttcatttttctatat

SEQ ID NO: 10003 - DNA, 470 bp, Gossypium hirsutum
  unsure (1)..(470): unsure at all n locations; Clone ID: LIB3828-030-Q6-K6-H5
gcgttcggcanaatcagctaataaacaggaaaaaggacgcaattgactcagtttttgatccgctaagggagttcgctaaggacagtgttcgtctcgtcaagagatgccacaagcccgatcgcaaagaatttacgaaggtggcgctccgtacagcgatcggattcgtggttatgggatttgtaggatttttcgtcaagctcatctttatccccattaacaacattattgttggatccggttaggtttgctttcatgttactgactcaacagcacagatcgagagataaattgtctgagatctcgaactaatttcagtatagactttggttttcctctatattcatatttgttggattttggtttagtttttagtgttgaaatggaaactacttgaagcaaatacaatccttgagttttggtccattgatttatgtttttntccttgtatcgatgcttatcttgggtaaaag

SEQ ID NO: 10004 - DNA, 584 bp, Gossypium hirsutum
  Clone ID: LIB3828-030-Q6-K6-H6
cagacttgctgatgatactaatgggaccattgaggcagccaaatatcttcataaagtggttgatcgtcccaatgtgtacattaagatccctgcaacagcaccatgcattccttcaatcaaggaagttattgcgaatggcataagtgtgaatgtcactctcatattttcgcttgctagatacgaggctgttattgatgcttacttggacggccttgaggcttctgggttgagtgatctctccagggttactagtgtagcttccttctttgtcagtagggtagcataccctcattgacaaaatgcttgaaatgattggaacaccagaagcccttgatctccgaggaaaggctgctgtagctcaagcagccctggcatataggctctaccagaagaaattctccggtccaagatgggaagctttggtgaagaagggtgccaagaaacagaggttgctctgggcctcaactagtgtcaagaaccctgcctaccctgacaccctatatgttgctcctctcattggacctgacacggtctcaaccatgcctgaccaagcactccaagcctttatagaccacggcacagtt

SEQ ID NO: 10005 - DNA, 614 bp, Gossypium hirsutum
  unsure (1)..(614): unsure at all n locations; Clone ID: LIB3828-030-Q6-K6-H7
ttgaactcgagaaactacaagcaagcagattgctgctctaaagaaagattggaggaaaaatcagaagcgttgaaagattggaaaacaaacagttgtctaacggtgaaacaagtcctaactaatcaagagctgcanagatgctcgaaaagaatccatacgtggcttgaacgattttctgaataaccagacaaatcttaagagtgaacagaatgggagagattgatcaaaaagcattcaaagttgcttgctcgttgaagttccaggacgaagattggcgagaaccgtgtgctaaagcatgttcattatggcaacataatgtgcaggatccgaaatggcacccgtttaagatgatcaacatccgaggcaacttgcatacaccgattgctcagaaaaccgaaataatagacaaggatgacgagaagctgaaggagttgagaaatgaatatggtgacacggcgtacgaggctgtcagcactgcactgatggaaatgaacgaatataatgccagcggaaggtatttggtcccggaagtttggaacagaaaggagggaaggaccgctaccatgaaagaaatcgttcagtacgtaatcgagcaactgaagattcacaagtgt

SEQ ID NO: 10006 - DNA, 509 bp, Gossypium hirsutum
  unsure (1)..(509): unsure at all n locations; Clone ID: LIB3828-030-Q6-K6-H8
taaaacaggcaccacaccttatattgttccttcctgtttgtgcttttattattattcatttcagcctctaaagttcaatcaggcgctattgatgttgttgccaagtttggcgcaaanagctgacgggaaaacggatctgagtaagccatttttggatgcttggaaagaagcatgtgcctctgtaaccccatcaacagttgtgattcctaaagggacatatttattatcaaaagtaaacttagaaggtccatgcaaggctcctattgagattaatgttcagggcactataaaggctccggctgatcctggtgctttcaaggaccctaattgggttagattctatagtattgaaaatttcaaaatgtccggcggaggaattttcgatggtcagggaagcattgcttatgagaagaataaagatccccacaatcgtgcattttcgtgtcaaactccccgttaatataaggtttgactttgtgaccaacgcattgatacaagatataactagc

SEQ ID NO: 10007 - DNA, 575 bp, Gossypium hirsutum
  Clone ID: LIB3828-030-Q6-K6-H9
ttgcttgtgtactatagacatatttttgaacacttcaagtggattgaagaagtacgcacagaacgaggcaccgatgtcattattgtccttgttgggaacaaaaccgatctggttgataaaaggcaggtttctatagaggaaggagatagcaaggctcgtgaacttggagtcatgttcatagaaaccagtgcaaaagcaggattcaacattaagcctctattccgcaagatagctgctgccttaccaggaacgggatctctttcttcaacaaaacaggacgatatggttgatgtaaacctgaaatccagtggaaattcatatcaaaatccagatcagcaaggaggtggttgtgcttgttaaaacaaatactgtatttactacaagcttagcttaagagatagggaaaaagagatccaaattaagtttccgaacttccttcacgttacttagttagataacttcgtcagttggatgaaggggagcaagacctgcaagcaatgaattaataaggtaaggggaataccggaaatagatttttgagacattttctgatacgtaagtcaacaaaaatttaa

SEQ ID NO: 10008 - DNA, 525 bp, Gossypium hirsutum
  Clone ID: LIB3828-031-Q6-K6-A4
tttcgctttctcgcctccgagaagaagccgacgccgccatggttcacgtcagtttctaccgcaattatgggaagacatttaagaagccaaggcgtccatacgagaaggaacgtttggatgctgagttgaggcttgtaggagaatatggtctccgatgtaagagggagttgtggagggttcaatatgctttgagtcgaatcagaaatgctgctagggatcttcttactcttgatgagaagaaccctcgtcgtattttcgaaggtgaagctcttcttcgtaggatgaacaggtatggacttttggatgagagtcagaacaagctcgattatgtcttggctttgaccgttgagaacttccttgaacgccgcttgcaaacacttgtgttcaagactggtatggccaagtcaattcaccatgctcgtgtgttgattaggcaacgtcacatcagagtcggaaggcaggtggttaacatcccatcctttatggtgagggttgactcccagaaacatatcgacttctctctga

SEQ ID NO: 10009 - DNA, 530 bp, Gossypium hirsutum
  Clone ID: LIB3828-031-Q6-K6-A5
catctcaataacaacagactcttcccaagtttcccaacgtccaaacatttctcaacctgatgaagttctttacaagtatggaagtttctgcagatccactttcccaaataatgtttcgagcgtacccttgaataaaaaccacacaaaaaccatccctacaagaaaatctgttgatttttctttgagaagaaaaagaagaggttggtgctttatggctgaaaatgaaagaagaagcaaggttagatgctgagcaagaacccatcttatccaattattattatagctcaatcttttctcataattcatttgaaagtgctttagccaatcatttgtctatcaaattaggcaatccaagtcttcctagcagtactttatttgatattatcatggccgtgcttgtggaagatcaaggaatcatgatagctattaaggaagatttgaaagctgctaaagaaagagaccctgcatgtataagttatgtacattgctttttgaattttaaagggttcctagcatgtcaatcacatagg

SEQ ID NO: 10010 - DNA, 521 bp, Gossypium hirsutum
  Clone ID: LIB3828-031-Q6-K6-A6
aattcgttttcagcgaccttgcagaattcaaacacgatgagccagattgcataaataaagatcatccttcaatttgtactgaaagtgaagaagtaaatggtttgtgtaatgtgaatagtgagtcattagattctgacaagtttgttcaggagagtccagcagctaatatggagaattccatagaaaagtcagggattatctctgatcctattagtatttttggaaatcatggagtagttggtgaaaaagatgggctgcaagtggaatcacttcctattatgcagtctcctattgccaagcttgattcaagcaacaacaaccctgtaagccattgtttagactcgagttctgaagccattaggtggaaatcgatcaggaaggatgattcaaacgagataaggtccaatgcagatgaggaacagcaattggcacatgaaagctctagtagagaggagagtgagacttcggggaagctgaaaaatattattcacatttctgctgttgagatatctttttgcaag

SEQ ID NO: 10011 - DNA, 389 bp, Gossypium hirsutum
  Clone ID: LIB3828-031-Q6-K6-A7
ataggtattggttatgaaagaagcccttactgtatcgactgcgacgatgtggatatcatgggcggcagcttttgcggcacctgcaattacggatgcccttaccgcaggttcaataatgggtgtggtggtggtatcgcttatatggatgaactcaaacgaacgattaaggaccttaccatgaaacttgatgccaatggtcttttaggtgataatgaaggccatgaatatacaagctatggcgccagaatcttcatagatttatatatagattatagaaactacggattctatacaaagagaaagaaaataaagaataaccaagcagcttgatatatgattgaattacaatgtgctagctgtttttttttatctttaattattatatgaat

SEQ ID NO: 10012 - DNA, 548 bp, Gossypium hirsutum
  Clone ID: LIB3828-031-Q6-K6-A8
cgggtcgacctcgcgtccgccttcacctcccaaaaaaaaaaatagggggtaggtgattacctatctctctgcgaggctctttggagccattgcatgagattgattatgtttaaacacaaaaaaaaactctaaagcttttcttcacaccggcagagagagagagaaagagagatcaagcattttatattcaaataggtggggggggcaaaaggaagaataatggcagtagttcccatgggttgtttagtcgttatattcgttgctattgtttgctgtgctattatcaccttgcctgcttccattcaagcccagtcctcttccccaacaagcgacggagggaattcgatagaccaagggattgcatgcatgttgatggtggtggcattgttgctcacttacctcattcatgctattggaaaaatagggttttgtgctggcttctattttttaatttaattattttattttagttaaagctaagggtatttttttttgagggttgatgtgtttctttcttcaatctgatttgaggactaaatgatttgtaa

SEQ ID NO: 10013 - DNA, 519 bp, Gossypium hirsutum
  Clone ID: LIB3828-031-Q6-K6-A9
gggataattaataaattactggcgggcgaaaagaggggtaagagatggctcgattaatgttaatatcgatgctatttctcttggcaggatcaatgcttatggtccagggcggagatcccaccctttttttcgaatggaacgtcacctatggcaccattgctcccttgggagtgccaggggggggtattcttattaacgggcaattcccgggaccaaatcttaactctaccaccaacaacaatatcgtggtcaatgtgttcaataaccttgatgagccattccttgtaacatgggacggcgtgcagcataggaagaactcttggcaagatggtgttctgggaaccaactgtcctatcccccctgggaagaattacacctataaattccaggtgaaggatcagattggcagctacatgtactatccggtgacggctatgcacaaggcggttggtggtttcggtggcctccgtgttaacagccgtctactcatccctgttccctacgctgatccggctgatg

SEQ ID NO: 10014 - DNA, 532 bp, Gossypium hirsutum
  Clone ID: LIB3828-031-Q6-K6-B4
caaaattttgacaagtctaagcgacatgtggacgactcgaatcctgaatggacaacctctacgatcaaatgaaccaattagtggcaatgttacaaaagcaaaatggatagtctccctagaaacacaaagaacaacccttggaaagatgggaaggagcaagtaaaatcactttctttgcgatggggaaaagaattgaactcgccaagtaagcccatccttgaagaggatgagattccaaaagagtttgatgaacccacggaagaggagaaagccaatcaccatcaaccgatcaaggggatagctgaatcagtatctggtctggttatcacaagaccgagcacaacgaaggtactcataatgcaagagaaatggataaatggcgagatcctggaataaatagaattaactggaaggccaacaatggtcgagagtgatgaatgaagtcaatggtgaagttcaagaaattgtcagacaagtctggtagcacaacatagattttaacccatcaaaattcaattaatttgtacatatc

SEQ ID NO: 10015 - DNA, 350 bp, Gossypium hirsutum
  Clone ID: LIB3828-031-Q6-K6-B5
gtccttcttatgttggttcttctagcaacagagatgggatctatgacagtggaaggtagaacatgtgagaccaaaagtagtgaatacaaggggatatgcttatttgatgctaattgtgatagtatttgcaaagtagagccaggtttcgatggtgggcattgccatggcttctttcgcagatgctattgcactaaaccttgttagatgagcaatctattaagatttcattatacttaaaagattgcctcatttccgcttgttatgtgtgtgcttgagagttgagagaataagatcaacaacatattggtgtacattgaattatattactattaaatatatctataattttt

SEQ ID NO: 10016 - DNA, 525 bp, Gossypium hirsutum
  Clone ID: LIB3828-031-Q6-K6-B6
atttgcatttgttttattagtaattcatttttcaaacaaaaacaaatatcaatggccaagattgctttgcttctggtattctcattggtcctgattctatcaatcaacagcgccgtaggtcacgacgcccccgcaccttcccccgaacagacaaaccaggaaacttcagagtatgcagacgccaccgggcagaatgaagagggtcttgacgagattgtggacgcaatgtcaccggaaatggcaccagcaagttcacccacaatggcatttgaagggtcttttggacccggaccagctatgaccattgaagacggtgcggcggagggagagggagaggcagaggcagagggagcaacagaaagttagatacgcagtaccagtaaatttaaataaggatctcgatccatatgttcgttatcttactattttggtatttcatccctcataaaagaaaagtgaaccataactgtaaagttcacgaccataagtaatatatttatttatttacctgcccacccacccaca

SEQ ID NO: 10017 - DNA, 532 bp, Gossypium hirsutum
  Clone ID: LIB3828-031-Q6-K6-B7
gccggaaataacatgggatatggcataggatatggcactggaaatgggaaccagttaggaactggtatcggatatggtattggaaatgggaaccagttaggaaccggtattggatttggtaccggaaatggaggtcagtcaggaaatagtgttggatatggcgtcggaattggatcaggtggaaacaactggaatggacctgggactggagttggaatcgggtcaggatcaggcggactagggtcagggattggcgtgggatacggctcaggaggtgttcctgcatgtactaccggcaattgcaatctagtgaatggccctgggagctgtgtaccagttggtccagctcattatgaacttcaaggacgatctgctgctggagctgccaaagagatgtcgaagattatgagtacagttactcagccctagacaccacataactgttgttctaatataaagagctaatgatgtttcagaggtttacaatcaagccttgttgaatcaaatcaatcagataataaaaccccaaata

SEQ ID NO: 10018 - DNA, 528 bp, Gossypium hirsutum
  Clone ID: LIB3828-031-Q6-K6-B8
gacgtgctagatggaaaacaaagcaattggaaagagattatggagttcttaagaccagttatgaatctcttaagctcaattatagtaacctccgccatgaaaatgaagatcttctcaaacagattagtgagctgaaggcaaaactcatcgagccgccgccgggttcatctttgggtacctcattggagccggcggaagtgaactgcgagagcttcaacgacggcggcggcaatggatcagttggtggtggtggcgacaccgttttcccggacttgaaagacggatcatcagatagtgattcgagcgctatcttgaatgaagaaaacaacagcggcggagacatggaggggggcagcccaaacaacggggcagcttcttcaccgtcctccatgaataactgcttccagttgttcaaaacaacgtatcaaaccccgcaatttgtgaagatggaagagcatgatttcatcagtagtactgcagatgaagtctgcaatttcttttcagatgaacaagctccaagtcttcaat

SEQ ID NO: 10019 - DNA, 523 bp, Gossypium hirsutum
  Clone ID: LIB3828-031-Q6-K6-B9
cttctgcttaactctcaaacgcgatggggaaggggggaacgaaataaaggcgtcgttaggttggagagtggtgtacgcttgggtcggtgacgatccttgcggcgatggaaatctgccgccgtggtccggtatcacctgcaccctcatgggtgactacagagttgtcaccgaattagaaggggatgcagtgtcaatcgtggggccgtttcccgttccggtgacaaatttgttcgatcttacaagacttgatatgcataataacaagctgaccggacccattccgcctcaaatcgagcggcttaaacgtcttaaaatacttaatttgagatggaataagctacaagatgttcttccttctgaaattggtgaacttaagagtctaacacatctgtatctgagcttcaataactttaaaggggaaatcccgaaggagctagcgagtctaccggagcttcgttacttacatctgcatcaaaaccggttttcaggccggattccagcagagttaggtactttggagaaa

SEQ ID NO: 10020 - DNA, 234 bp, Gossypium hirsutum
  Clone ID: LIB3828-031-Q6-K6-C4
gcttgaattatagtcggatatggatgcggagatgtgaacctatccttcatccaacgactccaaatgcatcaaaaacatatgaaccttcatccaagggctccaaattcactatagtctttaaacaattgaatataaccccataccccaatgtgggacacttcttgaatgtacctcatatgggacacttgtatgttcacccaccggttaattgaattcacagtattgagtttttct

SEQ ID NO: 10021 - DNA, 528 bp, Gossypium hirsutum
  Clone ID: LIB3828-031-Q6-K6-C5
aaaagagttataaacatggtgcctgacaacaataggaatgaggttgaggattataagttaactgttcaagtccctgaaactgcccatcaagttagcactgattcatggctccaggccggttttgtcttgacaactggtgttaacagtgtatttgtgttgggatattctgggacaatcatgggccctcttggctggataggaggcatagtcggtttgcttttagccaccgtgctgtcgctgaacgccaacatgcttgttgccaagctccatgaacatgggggaaagaggcatatcagatacagagatcttgcagcacaaatatacggtaggagagcctatacaattacatgggcaatgcaatatatcaatctgttcatgattaacattgggtttctcattttgggtggttctgctttaaaggcttgttttgcccttttcaattatgagcacaccatgaagcttccatactgtattgccataactgggtttgcttgtactttgtttgccatatcgacaccacatctgtca

SEQ ID NO: 10022 - DNA, 420 bp, Gossypium hirsutum
  Clone ID: LIB3828-031-Q6-K6-C6
gcttcatcacgctggtggtgtgttctttcttagttaaagccagcaacgccggtcaaaacgatcatgggtgcaaccatggcggtgctcagcctggcgatagccaacgttgcgaagatacccccgaagatgaagacgacttcgatgacacttttaagctcgtcaacaacatcaagataaagatctagttgggcgccgcccggactccatttctttggttcttcactcaataaaaatgggtcgttgcgaagctctatctctgtcttccatgctttctgagatctttcagtttggcatcctttaatttaccagttgttgcaatttctttcttttttttgttgttctcgtgtttggatttggaagggtttagcatttgctgttgttgttgcatgcttttttataaaactgcatttctcgtttctc

SEQ ID NO: 10023 - DNA, 521 bp, Gossypium hirsutum
  Clone ID: LIB3828-031-Q6-K6-C7
ccatacacgggaagagatgacacctgcaagcggacacaagctaaaaaccatgcagtaacaattagtgggtataagagattacctaccaacaatgagacagctctgcaaatagcagtttcccagcaacctgtatcggtcgccatcgatgcagcagggctcgaatttcaattctatttcggaggtgtgttcactggagattgtggaaatgaactcaaccatggagttgcaatagttggctatggagaagttcttaataaaaagtactggatagtgaaaaattcatggggtactgaatggggtgaagctggctatgtaaggatggaacgtggagtctctgataaaaggggtctttgtggtattgcaatggatactagttaccctgttaacaagtgaacagctttttcagtgaaattggcctaggaattctgtttgcttattgaaatatttcacttccttttatatgttttataattataatttaagaatacatgttgaagaaaaatatgtgtggacctgcaaaa

SEQ ID NO: 10024 - DNA, 528 bp, Gossypium hirsutum
  Clone ID: LIB3828-031-Q6-K6-C8
ctaaaggacaagaagttgaaggggcgtgtctctggggttagttgcattgctctagatgcaagtgagagctggttggcatgtggcagtggccgaagtttgtcagtttggaatctcactgcttctgaatgcatttcaagtatttccaacagtgcatccatacaggacgtggtgtttgataacgggcaaatattagctgttggtgcagaccctgtgttgaaccgtttcgatatgaatggaatgatactttcccagatacaatgtgctcctcaatcagcgttttcggtctctttgcacccgtctggtgtcactgcaatcgggggttacgggggtcttgtagatgtgatatcacagtttggaagtcatttgtgcactttccgtagccattgtgtttgaactataatgaaaatggagatggagatgtaaaagagcatacatattattgttaaatttgagatgtagggcttcactataatcatttttaattctcttatttgtatgataaatttacatagaaatggatggaaatgg

SEQ ID NO: 10025 - DNA, 526 bp, Gossypium hirsutum
  Clone ID: LIB3828-031-Q6-K6-C9
caataactgagtccaatccactttctccctctcccctcttttacccttttgagttcttcaaatgaaggacccaatcctctttcctttctctcgcttcctctaatattatagaacaaggagaaggggatatacaaaactacaaaaggctcgttgctttgttcaagtgtttgacaatgtggggggacaaaaacgtgttgtccaaggtggtcaacatgttcatgttatggctgttgttttcttcttgggttttttccttagtttcagccactgtttcttatgatagcaaagctatcatcattaatggcaggagaaggattcttctttctggttctatccattaccccagaagtactcctcagatgtggcctgatcttatagcaaaggccaaagaaggaggcttggatgttatacagacttatgttttctggaatggacatgagccttctcctggaaattattattttgaggatagatatgatctggttcgatttattaagctggtccaacaagctggcctttatgttca

SEQ ID NO: 10026 - DNA, 529 bp, Gossypium hirsutum
  Clone ID: LIB3828-031-Q6-K6-D5
cggacgcgtgggtttgaaccggttgggcttagagctggtttcctccttttctcgcaatcctgctttcagcttttctgggttggtggttcagttgaatattgagagattggatttggcatgcttataaaagatgtcattgaagagtattatgcgagagttaaaggaaatgaaggaggggggggggagcatatcaaagagaggaggggaaagcaaggtttggcgtagtaggactcgatcccatgttgctcctgatcgagcaccaactgaatctgaatccgtagaacaaagcccttgggcgaacctaccgcctgaattgctcttggatatcatccagagggttgaagagagcgagacagcttggcctgctcgagccgttgtagtattttgtgctgcagtttgtaggtcttggagagagattacaaaggagattgtgcagactccagagcaatgtggaaggctcacatttcccatttcgttgaagcagcctggtccccatgagtccccgattcaatgctatattagaagagac

SEQ ID NO: 10027 - DNA, 543 bp, Gossypium hirsutum
  Clone ID: LIB3828-031-Q6-K6-D6
cgggtcgacctcgcgtccgcttccttttcctttcacccaattttctgaccaaccaaacatgtttgatcctaccaaagaactgcccaaatcttatgtcagtttatcggatcacttaactggaggattcagtgattgtaatgacagttatgatcgtgccatgaactacggtcccaaagtgcaaaaaattgctcaaaactggggggattacagcagttggaacaccttggaagggaggttcgaagttgaaacattgatggcggacgatgagtccggaatttccagtcctcctttatggaaatctagtcctcaacatgaaaacaacgttaattaccggtgtctatcgccatcgtcgagagctcaagccatagctagaggccaaaaggagcttatggaaatggttagtaaaatgcccgagtcttgttacgaactttcgttgaaagatctcgtggaacatcagcctgtcgttgttgtggaaccgaagcaggagagtttcgcccaagggagaggttcaaattcgatcgatgaacgcaagtacaagaacga

SEQ ID NO: 10028 - DNA, 528 bp, Gossypium hirsutum
  Clone ID: LIB3828-031-Q6-K6-D7
cgccaccttcctgcaaaatttggttcatttgtggggggcaactcgtccatcgaaggccacttgttgaaaatggacaatcaaacctgagcagctctgcttcaagttctagttattggacaggctctaacaaagtggctagcagttctgacccatctgtgtctgggacactaggggagagtgcagactggcttgagttcaatgaaggaagcggtgatgataaagtctttgaaaatctagaacaggccctattcaccgctgaaaaatcaaatcaagaagcatttgagaagttggaccggcttctgaaagctgaaaaagatgctctcaatgcagtagtaagccaggcaaatgaaatgaaaagttcatacattggagagttaagacgcaggaaggaaattgaagcaatgcttagaaaacagaacgaggagcttgaacaagtcacgcagcaaagagatcaagcacgcaaaatcgccagaactcataagttattattggagagtcgaggtgccaaatccgatcatgttaaagtat

SEQ ID NO: 10029 - DNA, 526 bp, Gossypium hirsutum
  Clone ID: LIB3828-031-Q6-K6-D8
cccacgcttccggtctaaaccaactgactgcgggggggtaaaatctatgaatcaaccaaaagggtgacacattccaccattttttggttttattgaatccattggttggaggggggaaagtagttgcagtggcagccatgagtcttgttgtttcagctgggggtcattccttctgttaggggcaggtaaagggtttcctatatccaaacccaagggctacaaattcggtcctcgagctgctttggtcgaagcgacacccagagtcaacggttcgccatcgtccacctctatacaggttttagcaactgaccgagccgaggaactaaaggcggaggctcgagccttggctcgtgctgccgatgcctccgtttacagcccccaattgcttgccaaaaagtatgggtctcgtcccgtcaaggcagtgaaaaggactttggaaatcttggtagcactgggtacttttgctttgaaactgtttttggaccaaaagaatggaaccttagatcaaaacaagaggaaacgagca

SEQ ID NO: 10030 - DNA, 527 bp, Gossypium hirsutum
  Clone ID: LIB3828-031-Q6-K6-D9
ggtttttctccttctcagccttcaaatggaggagggagaggaacatatccctggtttccctgttatgcttcattattttcaatgggtgtttggtgttggaggcggatgctgtgaaaagccaacgcagcgaaaagctcaagctgattcacaggcattcacctgagctagggcacaatcctggggcgacccttggacccccaaaaaaattcagaggaacgattaaaacagctggtgcagagcgacaaggctagacttcatgccattaaacggaggctaggcgtagtggggaaggcgaacgatagggtggagttcccattccgatcggcggcagatttgggattcgggcaatactttgtttccttgaggatggggacccctgcccacacctttactctgctggtggatacgggtagctgtcttacatggcttaaatgcaaatatacgtgcattgattgttccgcagcgtggtatggcagaaggtttttttccgctaatgaatcaagcagctttaagagcattccatgtta

SEQ ID NO: 10031 - DNA, 525 bp, Gossypium hirsutum
  Clone ID: LIB3828-031-Q6-K6-E4
atcgtggaccacctatcttagaggatgcactgcatctttcgcatcccacggaactcatactgggaggcatggttccattaaaagatgaaatctcaaccatggatggcacactacatacaccagtcaatggagtccctggtctgatcagcaccaggcttaaagatttcctatcattgataagagcaacaacccaaaacagacctaatgcttcaatttcatgagtgaacaatcacaaaattgcctaaaatattcagccctcattttaaacacatttctatcgagctacaaacatcaagctactgctaagctatccagtgacaaattcacaactaactctttacaccatacgcccactttcactgctctaaaagctcacccattcttagccgagaccaatattttacgtctaccttatggaaagaggactccacatgcctcaaatggctcaacaagaaacaagctaactcagtcttgtacaatagctattgcagcataactgtgatgacagaccaactgttcgaagaa

SEQ ID NO: 10032 - DNA, 305 bp, Gossypium hirsutum
  Clone ID: LIB3828-031-Q6-K6-E5
ggatctacctacctgagagagcttttgcagattttgttctttgcaacttggtgctccatttggtgatcatgaatttccttggataaaatcataatttccaggttttgctggactgctgttttctcagtttccggccgtgattcataattttagcatgaaatgaagttcttagatcatcattgtgagcttgagcatagatccagaactgtagtaggaatttgatattttatctttggctaaaagagtttcaagatcacttgatgagaaacaaaagacatttgagtacagatttgatcgttctgatt

SEQ ID NO: 10033 - DNA, 525 bp, Gossypium hirsutum
  Clone ID: LIB3828-031-Q6-K6-E6
cactttgtctgttcaccaattggttgaaaatgctgatgagtgtatggttctggacaatgaggccttgtatgacatctgtttccgcacacttaagctaaccactcccagctttggtgatttgaaccatttgatatctgcaacaatgtctggagttacatgctgcttgcgattccctggtcagctcaactccgatctcaggaaacttgccgtgaatctcatcccctttcctcgtcttcactttttcatggtgggttttgctccactcacttctagggggtctcaacagtaccgagctctaacagtacctgagctcacccagcaaatgtgggacgcaaagaacatgatgtgtgctgctgatcctcgtcacggtcgatacttgactgcatctgctatgttccgtggtaaaatgagcaccaaggaagtggatgagcagatgttgaatgtccagaacaagaactcctcatactttgttgagtggatcccgaacaatgtgaaatcgactgtttgtgacatcccacccactgg

SEQ ID NO: 10034 - DNA, 527 bp, Gossypium hirsutum
  Clone ID: LIB3828-031-Q6-K6-E9
ctgatgcaaagtgatcatttcctcttgcctagttcaatagaatactatgaaggtagagattttgggtctgtgcaagatgaacaaaaggaaagcctaatccgtttgcctcaaccctcaagcattgatgtcaatggggttcttggtcaaatactttttgatgtctgtgtccccaaggatgtcgaaggttgggatatgaagtcatcagattcctcgagccgacacccttatacttctctgtggcggaattcccatttcaatccaatcaaatgcattcgtcggtccagactataacataccttactgactactttcagcacaggcttgttcctgaatttgcagaacccgtaattttaccggcatgagaattaaatggagcctaacccatagcaaaatgggaccgccaaaggttcaagaaggggcaatgtgaatggatggcgagatgtgatctctaattctgtttcgtaggccactaatgattacttgccatgatttgagctgataagacctctgttccaagttccaacata

SEQ ID NO: 10035 - DNA, 529 bp, Gossypium hirsutum
  Clone ID: LIB3828-031-Q6-K6-F4
cgaaagaaatggcaaatattcccataatcgctattttctgcttaccatttttgtttcgtcctcactcaatttcgtctatggggctgaaaatatgacctacattgttgtaggccatgtttactgtgacacttgtcgtgttgagtttgagaccaaactcagtgaacccatcggtggagcagtagtgaaattggaatgcaggaatcgtacagacaatcagcttaccttccagagccaagaaatagtgactgacgaacatggagactatcacattgcagtggaaggcgattatgaggaatcagactgcgacgtcgccttggtgaggagtcccaacccggattgcaatgatccctcagaaatatggaggatatctagggtagttctcaccacacttgacggcgttagcggtgagcttcggtttgccaacaatcttgggtttaagaagaaggttgctcttcctcaatgtactcaagttcttcaagagataggctattatgagcttaaccaagaagctggaggctataatgagctt

SEQ ID NO: 10036 - DNA, 545 bp, Gossypium hirsutum
  unsure (1)..(545): unsure at all n locations; Clone ID: LIB3828-031-Q6-K6-F5
ccgggtcgacctcgcgnccgcggacgcttgggctggattgcccgcgggacttggggccatggttgtcggaccaagacgccgattgctacgctaaccagttccaggaaaccggcattaccggtgccctcaattattaccgcaacatagatacatatgtttttcttcccgctaccagtcacctaatatttttatttgctggggtggttatgaaaagttataaaatgattatttaattatttgtaaatttgtttagtcacttaattatgaaaagtcataaatttgtcactcaactattccaatttgtcttcttctttttttgtcaactatcttggatttctaggtgtttccatttttacgttaatcagtcgaagaccaaaaaagacaaaattaaataactatgagataattttataacttttcatagttggatgatcaaaaggaaaaaaaatagttgggtgactactaatgtagattacccaattattaattatgggtttttcatgttagttaaaatacgctctaagtccctttactttttgtaaatt

SEQ ID NO: 10037 - DNA, 507 bp, Gossypium hirsutum
  Clone ID: LIB3828-031-Q6-K6-F6
ctccgtggtatcatggtgctttcaaggttccaccgcattaccatttccaactgcccttcactgaccacaacgatgtgatgctgtttggagcaagcgacagctacagtgctgatgagaagatgcaaatcaccgttgctttcacccgcttcggtaaaaattgggggcaaaggatgcctagggtccgatttggtttcgtccatgttgtgaacaacgattaccgtcattggatcatgtccgctattggaggcagcagtcaccctacaattatcagccatggcaaccgatttagagccccacgtaacattgcagctaaacaggtttgcaagagggaatatgcaactgagcaagagtggaagaactgggattggagatcagagggtgatttgatgttgaacggtgccattttcacacaatcaggagacccgaaggccgccaagaaattcggaggctacaagatgatagcgtataagccggctcacatggtgccactcctggtgaggtggtcag

SEQ ID NO: 10038 - DNA, 534 bp, Gossypium hirsutum
  Clone ID: LIB3828-031-Q6-K6-F7
gccgatggtaagatgcagcagtggttccgggaaggagtggcaggaccgatgttgagttcgggcatgtgcaccgaagtgttccagtttgatgcctctgctccaggagccattgttccagcatcctcagttacccctgaatctgccaaaagtcgtcagaatgctacccagcttaacaagggtagaaacagaaggattctccatggtcatcctgttcctctttctcgatctgatctgaacataacccaagagcatgttggaagaaattccggaaagcaaaattttcaaggtaacaaaacagcttcttctatggtagtttctgtgcttattgatcccagagaggctggtgatggcgatatggatgacatgattgtaccaaaatcgctctctcggatctttgttgttgtgctcttagatagcgtcaagtatgttacgtattcttgtgggcttccgagatctggtcttcatctggtgactgcttaaagggataagagaaaaaggactgctacttcggcttgtagtgtttatatatatata

SEQ ID NO: 10039 - DNA, 547 bp, Gossypium hirsutum
  Clone ID: LIB3828-031-Q6-K6-F8
cccgggtcgacctcgcgtccgctttctttcaatagcacccccctctggggtcagggggcaccaaaatggcgaactcagcatccggaatggcagttaacgatgaatgcaagatgcgattcttggaactaaaggccaaaagaagctacaggttcatcgttttcaaaatagaagagaacattcaacaggtcatggttgaaaaaggggggggacctaaagaaaaatacgacgacttcagtgcttgtttgcctcataacgagtgtcgttacgctgtctttgatttcgacttcactaccgacgaaaatgtccagaaaagcaaaatcttcttcattgcatggtctcctgatacatcaagggtgaggagcaaaatgttatatgcgagctctaaagatagattcagaagagagttggatggtgttcaagttgaattgcaagcaaccgatgcaagtgaaatgagtattgatattgtcaaagagcgagctttctaaactcttctttttttatcatcgttctaatctttctgcactttgctttggggagcctttttttt

SEQ ID NO: 10040 - DNA, 536 bp, Gossypium hirsutum
  unsure (1)..(536): unsure at all n locations; Clone ID: LIB3828-031-Q6-K6-F9
tcttgcgtccggtttttgttctcaaaaacaatttaaaatgtgtgcgttgttaagttaaaaaaaaaaaaaaaaaaaaaaaaaaaaaaaaaaaaaaaaaaaaaaaaaaaaaaaaaaaaaaaaaaaaaaaaaaataaaataaaaaaaaaataaaaataaaaaactattatataaaaaaaaatttttttttttacaggggggggtgtattaaaaaatcttttttttaaaaaaaaaaacacttcaaaaaaaaatctttttccaacaaatttaactttcctcaaattacttttttttcaacaggccttattttataaaacttcccaacaattccccttccttaaaatttattcnccctcactctgtagcggaccatccatcccttggggttttttttttacccgcagggtttcttttccccttcccagccccttaacttcccttccttttactttcttccctttttttttggttcccttctttttttttccccgtcaagctctttttcccgcgctttttttattgttgcgttttttttattt

SEQ ID NO: 10041 - DNA, 529 bp, Gossypium hirsutum
  Clone ID: LIB3828-031-Q6-K6-G4
gcacagtctccgccttgcttcttccgctcattcccagtcgctcttcacaatgtccgccgcctccgcttccctcgctctcccttctcccctttcttcgtttcgctccaatggacctcttccttctagatgcttcctccgcctcaacaacccctcaagatctagggttttcatgagtgtctccggtgaatcccaaactgtcgtcaatgatgccttgttcgctgattacaagcccacctccgccttcctctttcccggtcagggcgctcaagccgttggaatgggaaaagaagctcaggctgtgcctgctgctgcagaattgtataagaaggcaaataatatattaggttttgatcttctagatctttgcatcaatggtcccaaggaaaagttagattcaactgtcataagccagcctgctatttatgtcacaagtctagctgctgtggagctgcttcgtgcccgtgatggaggcccgcagattattgattctgttgatgtcacttgtggtctcagcttgggtgaatatact

SEQ ID NO: 10042 - DNA, 525 bp, Gossypium hirsutum
  Clone ID: LIB3828-031-Q6-K6-G5
gggaaatcatgaaagtcgccagatcactcaagtttacgggttttacgacgaatgtctgagaaagtatggtagtgctaatgtttggaagatctttacagacctttttgactattttccattaactgctttggtggagtcagaaatattttgtctgcatggtgggttgtccccgtcaattgaaaccttggataatgtaagaaactttgatcgtgttcaagaggttcctcatgaagggcccatgtgtgatttattgtggtctgatccagatgatcgatgcggttggggtatctcgccacgtggcgctggatatacttttggtcaggatatatctgaacagttcaaccatacaaacagcttaaagttgattgctagagctcatcaactggttatggatggatttaactgggcgcatgaacaaaaggtagttactatatttagcgccccaaattattgttatcgctgtgggaacatggcatcaatcttggaagttgatgattgcaagaatcagtcattcatccagtttga

SEQ ID NO: 10043 - DNA, 528 bp, Gossypium hirsutum
  Clone ID: LIB3828-031-Q6-K6-G6
gaatttttcaattgaaaatggtttctgggttttgcttgaaaatggattctgtagttttcaatttgtgagtgctcactctttagcaaagaaagatgacattctaaaccactttcttaaaaacaaatctttcttactttaatattcataataattaaatagcaccaaatgatgatttttccagtgggggtttttgtagaatcccgtgcaatcataaggtactatgcagaaaaataaaaatcacaagggactaatctactgggaaagacagtagaggaaaggggtcaagtggaaaattggctagaggttgaggcacacaatttcaacccaccaatttatgccttgaccctacatctgatgtttgcttccaagatggggttccctcctgatgaaaatttgatcaaggaaagcgaggaaaagctaggcaaagttctggatatttatgaggagaggttgccaaagaataagtacttggccggtgatttcttcagccttgctgacctgagtcacctgccatttactcagtacttg

SEQ ID NO: 10044 - DNA, 531 bp, Gossypium hirsutum
  Clone ID: LIB3828-031-Q6-K6-G7
caaaatctcgtttccagctccactgattttctgtctataacatctgatgaattggctacccaaatcaaacgccagagagaagagctagaccaatttcttcatgcccagggggaggcattgcggcgtacgttagcggagaaaaggcataggcacttccgtgcgctactgggggcagcggaagaatcggtggcgaggagattaagggataaagaagcggaagttgagaaagcaaagcggcggaacgcagagctgcccccgggcctgaaccctctttcatcaccttggatacccatgtggcaaaaccggtttccataatgccaggcacgcgtggcgcaacttaacgtggaggcgcaggtttggcaggcgaaagccagggcacaggaggctacggcggcttcattacaagcgcagcttcaacaggctataatgagcggaggggctgccgcctcgatgcacgacagcaggagaggggaggagggggtgaagtgcggtgaagggcaagcggtggacgccgagtcggcttacgtggac

SEQ ID NO: 10045 - DNA, 526 bp, Gossypium hirsutum
  Clone ID: LIB3828-031-Q6-K6-G8
attttggtccacctcggcttgtggggggaatgggtgtttgcatttcagggaactcatcgagggaggcattgttccatttaaagatgaaaacttcaccaaggatggcacactagatacaccagtcaatggagtccctggtatgagcagcatgaggcttaaggatttcccaacattgataggggggacaaaccaaaacgacataatgttgaatttcatgagtgaagaagcacagaattgcctaaaatcttcagcaatcattttaaacacattcgatgagctagaacatgaagtactgcaagcaatcgctgcaaagtccactaacctttacaccataggcccactttcgttgctcgaaaagctcacccttcttagccgagaccgctattttaggtctagcttatggaaagaggactccaaatgcctcgaatggctcgacaagagacaagctaactcggtcttgttcgttagctatggcagcataactgtgatgacagaccaactgttcgaagaatttgcgtgggggctc

SEQ ID NO: 10046 - DNA, 528 bp, Gossypium hirsutum
  Clone ID: LIB3828-031-Q6-K6-G9
ataaaatctgcaatcttaattctgtcggtgtgggggtctgtacgcttcagttcgggtgttaggttgctccaggaacagcccaatgatgaccccaaaaacatggacgctattcctcccattgatgcactcaaccctaccgagttgaatggacccggtgttggcattcacgaagatcatggggtcccaaaaggtgctgaaattggtactcttggttttggttttgaaggtggtcctgataaatgttgttcttctggatgttccggtaattgtaatcctggtggtttcgttctaccatttcctcaaattccagaaatcccaagaattccagaaatcccacaaatcccacagatcccacaaatcccacaaattccactaatcccacagatcccacaagtcccacagatcccacaagtcccaaaaatcccactaatgccaggacagtcgggatgtgagagtggagagtgttgccgtcagggttgtggtgggacttgtgctgagtgtggtcagcccaggtgcgcatcaggatgt

SEQ ID NO: 10047 - DNA, 546 bp, Gossypium hirsutum
  Clone ID: LIB3828-031-Q6-K6-H4
cgggtcgacctcgcgtccgcggacgcttgggagcaaattgggttgggataagcgttactgttatcagtatgtttatcggcgtgctatggtaagaggaccggaatcgtgaccatggctgacggagccgatgggtttcaaccaagcaacggttttccgcatgaagctgatcctgattcttcaacctctattgatcctgaggggggcggattcggtgctggcataggtataggttatgaaagaagcccttactgtatcgactgcgacgatgtggatatcatgggcggcagcttttgcggcacctgcaattacggatgcccttaccgcaggttcaataatgggtgtggtggtggtatcgcttatatggatgaactcaaacgaacgattaaggaccttaccatgaaacttgatgccaatggtcttttagggaaaaagaaggccatgaatatacaagctatggcgccagaatcttcatagatttatatatagattatagaaactacggattctatacaaagagaaagaaaataaagaataaccaagcagctt

SEQ ID NO: 10048 - DNA, 532 bp, Gossypium hirsutum
  Clone ID: LIB3828-031-Q6-K6-H5
cgtccggaaaaaaatagatgatacgaacggctcacatctgaatggttctgtggactcaaatggaagtatcctctcgagcagcagctctgagaagaaggagaaaccttggaccaaggaagagattgagcttttgagaaaaggaacccagaaatatccaaaagggacatctcgtaggtgggaggttatttcagagtacattggtacgggtcggtctgtggaagagattctaaaagctaccaaaacagtacttctccagaagcctgatgctacaaaagcatttggctcttttctcgagaagaggaaaccagcggcaactattgcatctccactttccactagggaggaagtagaaggggtttctatgccttcaaggactgaaaacacaactgcgaagacaagcagccctgaagactctggtaaagctgcaagtaatcctgtcgatgtggtttctggcaatggtgtttcatcaagttcagaacaagatgtatggtctgctgtacaagaaagagcactgattcaggctctgaagaca

SEQ ID NO: 10049 - DNA, 528 bp, Gossypium hirsutum
  Clone ID: LIB3828-031-Q6-K6-H6
tcttcatttttgagtgggaactcaaaggcttcaatcatattggtgattgatgatcttcctgtgactaatggaagatcagcttttgaaagacttcagaggtgcttggttctgcttgtgagatcgacaagggtaccaacagctatattggtcactgactatggtaatgcatattcatcaggcgtgactgcaagatggttggaagaactacagttgacacttgagagtgctggggctagtaaggttgcttttaatcctataacaaataattccataaagaaaacactctctagaatatgcagacaggagctatgtaatgtggctgctgaagagattgatttgattgcaagagccagtggaggtgacatcagacatgcaattacttctttacagctcttctgtctgaaaccaaatgtggaacttgatttatcatcatccaattctactcccagttgcccaaaagaaaatgcaaatgtgctcaataagttcagcggtggattttcttcacaatatggcagatatgaaaccctg

SEQ ID NO: 10050 - DNA, 532 bp, Gossypium hirsutum
  Clone ID: LIB3828-031-Q6-K6-H7
cccacgcgtccgaaagatggcaggcgcagcaaattgggtttccataaccttactgttttcagtatgtttatcggcgtcctatggtaagaggaccggaatctccaccatggctgacggagccgatgggtttcaaccaagcaacggttttccgcatgaagctgatcctgattcttcaacctctatcgatcctgatcctaccggattcggtgctgggataggtataggttatgaaagaagcccttactgtatcgactgcgacgatgtggatatcatgggcggcagcttttgcggcgcctgcaattacggatgcccttaccgcaggttcaataatgggtgtggtggtggtattgcttatatggatgaactcaaacgaacgattaaggaccttaccatgaaacttgatgccaatggtcttttagggaaaaagaaggccatgaatatacaagctatggcgccagaatcttcatagaaatcttcatagatttatatatagattatagaaactacggattctatacaaagagaaagaaaa

SEQ ID NO: 10051 - DNA, 527 bp, Gossypium hirsutum
  Clone ID: LIB3828-031-Q6-K6-H8
cttgagtgggtccaccatgagatggagatctatcccatttggctctgcccgcaccgactgttcaagcttcctgtcaagacaatggtgtatcctgaaccaggctttgagcagcagcacagacaaggcgacacaccatacgctcagatgttcaccgatgttggggtgtattatgctccaggccctgtattgaggggtgaagtatttgatggtgctgaggcagttcgtaaaatggagcaatggctgatcaaaaaccatagttttcagccacagtatgcagtgtcggagctgaacgagaaggatttctggaggatgttcgatgctgacctgtatgagcatgtgcgtaggaagtacggagctgtgggaacattcatgagtgtgtactacaaatccaagaaaggaaggaagaccgaaaaagaggtccaagaagcggagcaagcccaccttgaaactgcctatgcagaggctgattagtgagcatgggggagtttggtagattttatgtgagaggaatctttgcattctctttg

SEQ ID NO: 10052 - DNA, 531 bp, Gossypium hirsutum
  Clone ID: LIB3828-031-Q6-K6-H9
ctgcaatcttaattctgtcggtgtgggtgtggcgaggcttcagttcgggtgttaggttgctccaggaacagcccaatgatgaccccaaaaacatggacgctattcctcccattgatgcactcaaccctaccgagttgaatggacccggtgttggcattcacgaagatcatgttgtcccggggggggctgaaattggtactcttggttttggttttgaaggtggtcctgataaatgttgttcttctggatgttccggtaattgtaatcctggtggtttcgttctaccatttcctcaaattccagaaatcccaagaattccagaaatcccacaaatcccacagatcccacaaatcccacaaattccactaatcccacagatcccacaagtcccacagatcccacaagtcccaaaaatcccactaatgccaggacagtcgggatgtgagagtggagagtgttgccgtcagggttgtggtgggacttgtgctgagtgtggtcagcccaggtgcgcatcaggatgttgccaggcta

SEQ ID NO: 10053 - DNA, 530 bp, Gossypium hirsutum
  Clone ID: LIB3828-032-Q6-K6-A4
gctgttgttcaggtttttgaaggaacatccggaattgacaacaaatatacaactgtgcaatttacaggcgaggtgttgaaaactcctgtctctttggatatgcttgggcgcatttttaatggctctggaaagccaatagataatggtccacctatcttgcctgaggcatatttggatatctctgggagttctattaatcctagtgagagaacctatcctgaggaaatgatacagacggggatttcaacaattgatgtcatgaattcaattgctagagggcaaaaaatccctctcttctcagctgctggtcttccccataatgaaatcgctgctcagatttgtcgtcaggctggtttggtgaaacgtttggagaagactggagatctgcttgaggatggtgaagaagataattttgcaattgtgtttgcggctatgggtgtaaacatggagactgcacagtttttcaaacgtgactttgaggaaaatggctcaatggagagggtgacccttttcctaaacctggctaatga

SEQ ID NO: 10054 - DNA, 543 bp, Gossypium hirsutum
  unsure (1)..(543): unsure at all n locations; Clone ID: LIB3828-032-Q6-K6-A5
ggtcgacctcgcgnccgcagaaattttcaaatcccacaaatccggcatatgccacaaattccactaatcccacagatcccacaagtcccacagatcccacaagggccaaaaatcccactaatgccaggacagtcgggatgtgagagtggagagtgttgccgtcagggttgtggtgggacttttttttattgtggtggggccaggtgcgcatcaggatgttgccaggctaaaactgtaaagagcaaagggatagaagaggttatggacagtgaacccagtccaccaaagtagagagatgataccatattaagatgaaataacgaggaagagttggttgtcgtcttattaattatacaaaataagaagtaatgatgttgcagaagggtttgctataaaatcctcttggacaaaaagagtaattatgaagaataaatagctcaaaacaatattcgatttgcaatatcctaaagttccttgaatcttgttttgtagccatatgtaattaatgcatgtgcatgctaatatatatgattttctttgtta

SEQ ID NO: 10055 - DNA, 252 bp, Gossypium hirsutum
  Clone ID: LIB3828-032-Q6-K6-A6
cctcaattatgggttaccaattcgagtataagaacctctccgtccctaaagatacagcaacacaacacatatacgaatataggtataactgtgccgtctggttttaagcacatgcatgtctttgaacactcattttcgaattccagtaacatataataggttaaaatgggtcttcaaccgcatgtaggccttgagcccttgacccgtaatagatttttgtttatggatcacactatatagatgtcaatttat

SEQ ID NO: 10056 - DNA, 532 bp, Gossypium hirsutum
  Clone ID: LIB3828-032-Q6-K6-A7
agatgtctttccctttttctcatgaatgcaacgtggtgcatacgctgaaaaaaacccaatctttggatagtaacaataaataaaagggggagaagctgcctcctccatggcttcagctccttccaagctctatgcagatgatgttagccttgtggtagttttgctggacactaacccatgggggtggagctcctcctcactctctttctctcagtttctctcccatgttcttgcgtttttgaatgcgatattgactctgaatcagctaaaccaagtcgtggttattgctactggatataattcctgtgactatgtctttgattcgtcttcagatttgaaccggagttttgagaatgggagaatgcctgttatgtgctccagtttgttgcagaagttggaagaatttcttattaaagatgagcagttgagcaaggaggaacctgaaggaaagattaagtcttcccttttctcggggtcattgtcaatggctctttgttatatacagagagtgtttcgttcaggagccctccat

SEQ ID NO: 10057 - DNA, 523 bp, Gossypium hirsutum
  Clone ID: LIB3828-032-Q6-K6-A8
caaattttatctccctcagtccctccctttctgggggttcttttttcttttttattggttcttgagaagattcaactgctgaagggaaggtagatcaaaggttggaataaattagtggcattcaagtgtttggttatctgctttattttcttttcaaggtgtggggttatgagaagatgggggaagatcaaagggttcttttttaaatcatggatcaacgggaaaaaacacagcagcagcagcaacagcctgtgatgggagttgtacctggtgctgggcagataggctattctactgcttaccaaactgcttccatggtcgcttctggcactacaggagtagctgtccctatacaaactcagcctcctgctactttctctagttctccacatcaacttgcctaccaacaagctcagcacttccaccaccaacagcagcagcttcaaatgttctgggctaaccaaatgcatgaaattgagcaaacagcagatttcaagaatcacagtctcccacttgctcggat

SEQ ID NO: 10058 - DNA, 521 bp, Gossypium hirsutum
  Clone ID: LIB3828-032-Q6-K6-A9
gttaatccgtacttcaatcgtgtagggggagccctaaaatccttgaatcacgtctgagcttccggattgttatgcctctttgcatcaaactaagtttcatgtctgatcttgacgttcaaattcctactgcctttgatccctttcctgatgcaaatgctcttggtctcaggtgcgggtgcaaatgagtctctgcatattcttattcagcaaatgaatgatctcataaccctgacaactgtacaacctttgaagaaacatttcagctctaacaagatacttaaagacctgaagaagactttttctccaatgggaccgctgtccaacaccctcaattaggacaggtaattcaacttcatggtgaccagcataagaatctatcatccttccttgttcaggctggcatatcagaagaaggaaaacatcaaaatccactgtttctaagcctccactgtgcaagcatgatatactatctgattaggacatattttatgttacttggatgacaaattatgcatgtagct

SEQ ID NO: 10059 - DNA, 518 bp, Gossypium hirsutum
  Clone ID: LIB3828-032-Q6-K6-B5
cgcgcactgggctgttcgctcttagtaagcttggcttctcttgtttgcctggttattttacccgtgatatttatacaaggaaaaccttccaaggcagttgttgattcattggctttatttggggcaggagctatgttgggagatgcttttctgcaccagttgccgcattcttttggcggtgcacactcccactcacatgatgaccacggggatcatgcacatcatactcatactgggcatgataatacgcatgcacactctttaagggatctttctgtgggcttgtctgttcttgcggggatagtactatttcttattgtcgaaaagttggtcagatatgttgaagaaaactctggaggggctagtggatggagccatggtcatcaccaccatcatcacaaaagcaataaaaatttgaagaaaaaggatgaagatgctgctcacagaaacagttcgcaaccggtaggtgacacaccagacaactctttgaatgcagataatgcaactcagcctgaaat

SEQ ID NO: 10060 - DNA, 549 bp, Gossypium hirsutum
  Clone ID: LIB3828-032-Q6-K6-B6
ccgggtcgaccttgcgtccgatgggtttttttgaggctgtaattcatggaaaagggggacatgctgcaattcctcagcatacaggagaccccattttagcagcttccaatgtgattgttagcttgcaacatctagtttcacgtgaagctgatcccttggattctcaggtggtcagcattgcgaattttcaagggggtggggcattcaatgtcattccggattctgtcaccattggtggcactttcagggcattttcaaaagaaagctttcttcaactcagacaaaggattgaggaggttatatcgaaacaagcaagcgtgcaaagatgcaatgcgacagtgatcttcgacgaaaggtccatgtaccctgtgaactcaaacaacaaagagttgcatgagcatttcagaaaggttgcaggggagattttgggctttgagaacattatagaaatgcagccgcagatgggaggagaggattttgcattcttttctgagtcgatccctggactttttttctttcttgggatgaaggagacggaaggagcagttc

SEQ ID NO: 10061 - DNA, 533 bp, Gossypium hirsutum
  Clone ID: LIB3828-032-Q6-K6-B7
cttcagagtgcaaatcttcaaggcaaatacttgccatctttctatagatagtagatttcttactaaaagtctatattcttgaagtaccgatgtccaatacctatgttagacgcatgtctggatatagatatagagacatggtcctataaagactcttcaaatacatggaactcctgaaacagaaaaattgaacatatccatatcggacattcacaccagtgcccaagtaacttagctaaatgctactatttactgttaaggtttaaatattgatgtatcatcatcaattacattgttgcagatgcttctttgatagattgtagcttctgcggggctgatcttcgttctgcacacttacagtggattcactaaattaaaatcaacaagcaaaggtggttcattgaattgaatagaatgtacatatataaagtaggaaattacaagatcttaggttactataaattccttaagcttgttggaataatattttcagattcgtgattgtttgagctataatggtttggttgaatgaa

SEQ ID NO: 10062 - DNA, 514 bp, Gossypium hirsutum
  Clone ID: LIB3828-032-Q6-K6-B8
gagagtctaaatgtggaaccaattgctgacttggacttgtttttcgagcggctctatagctactattgtgaaaaggggctttggtgcataattataaaatggatagttgaacttctgagtgtgggctttaccatatgtttctcagggtttttcttattgtttgttgattggaatggtctccacaatgcaaaatgtgggatggatgcggttgagtctggaactaaaccgtgtgatcttgctaaggaagcacttcaagagcacccattaactcccttaacactttcaaaagctattgttgttggatatttggtgcttttttccgtctattgggtattctgttttttgaggttttttgcacaattaaaggataccctcggtatgcaacatttcttttataacagtctccatattaccgacagtgagattcagaccatgccttgggcaacgatacttgaaagggttgtccgattacaaagttcttcacaactctgtgtggtcaaggatctttctactc

SEQ ID NO: 10063 - DNA, 527 bp, Gossypium hirsutum
  Clone ID: LIB3828-032-Q6-K6-B9
aaaaatattcggaatcctctgaaagaggattcgggagctgattccagtgctgttgaacctccgttcaggagttttctcattcgctcatgcgccaccacgcacggtggtcggagggtcaaaaccttcccccttttcagcgaaagtcaggtaatctcttttacttttcactatttggaggggggggtaaaatattcacctttgtattcgattggctactggtattgtaagtcgatattactgtgctctgttgaatttgtttgtatatttctctcttcgtaaatcgtgtgtatattattgtctttgtaaaaaatcgggatcccttttacaatgaaggtattcgggctttatagccactgtttacagtgtatttacatctttattttacttccttgccatatttgttggttctgctccctcttgtttccttttgcaggcgatcgaagagaagaaagggcactgatcacggcgtcgatttgcgtctcaacgagatacagggcctggaatcacggcacctatgaagggtagct

SEQ ID NO: 10064 - DNA, 547 bp, Gossypium hirsutum
  Clone ID: LIB3828-032-Q6-K6-C4
ccgggtcgacctcgcgtccgatcactttttcacctttcaaagatgaagaatttgattgtaataatatttgcgttccttgtgtgtcaagctaacgctttccgcccaatccttcttctaggcaaccagaatctgatagagagaacttgcaagcaaacacccttctatgatctttgcatttggtccctcatttcaaaccccgaggggcgtgacgccagcgtgaagaagctagctcagatcatggtggattcactcaaaactaaagcaaccgagacgcttgatctaatcgacgagctactacaggatggacttgcccttgaccctgaaatgcagaaggccttaacatcttgcgctgaacgctataacgtgattataaggggagatgtacctgagatcaacgaagctctcaagacgggtgactacaagtttgcagcgaaaggcgccaatgatgcagccatagaggccaattcttgtgaaatagagttccctactaaatcaccgctgactgatatgaacaaagtggtgcatgatgtatccgtcgttgcggctt

SEQ ID NO: 10065 - DNA, 546 bp, Gossypium hirsutum
  unsure (1)..(546): unsure at all n locations; Clone ID: LIB3828-032-Q6-K6-C5
cgggtcgacctcgcgnccggaaagacctcagccaggaacgaacctgggtttgttttctgacagacttgctgctaaattcgcatgatgtcttggtgcacaattgagtgcgatccaggtgtttttacggaacttatacagcagatgcaagttaaaggcgtacaagtagaggaattgtattcattggatctcgattctctggggagtcttaggcctgtgtatgggttgattttccttttcaaatggcacccaggggagaaggatgaacgtcttgtaatcaaggacccgaaccctgatctgttctttgctagtcaggtcatcaataatgcttgtgctacacaagctatattgtctattctcttgaactgccctgatattgacattggcccagaactatcaaagttgaaagaattcactaaaaacttccctccagagctcaagggtctagctataaataacagtgaagctatacgtacagcccataatagttttgcaaggcctgagccttttgttccagaggagcagaaagctgctgggaaagatgacgat

SEQ ID NO: 10066 - DNA, 526 bp, Gossypium hirsutum
  Clone ID: LIB3828-032-Q6-K6-C7
aagagatttgcgtctgtaataaaatgggcaatggggattctatcggtgtttttatctgtacgcttcagttcgggtgttaggttgctccaggaacagcccaatgatgaccccaaaaacatggacgctattcctcccattgatgcactcaaccctaccgagttgaatttacccggtgtgggggttcacgaagatcatgttgtcccaaaaggtgctgaaattggtactcttggttttggttttgaaggtggtcctgataaatgttgttcttctggatgttccggtaattgtaatcctggtggtttcgttctaccatttcctcaaattccagaaatcccaagaattccagaaatcccacaaatcccacagatcccacaaatcccacaaattccactaatcccacagatcccacaagtcccacagatcccacaagtcccaaaaatcccactaatgccaggacagtcgggatgtgagagtggagagtgttgccgtcagggttgtggtgggacttgtgctgagtgtggtcagc

SEQ ID NO: 10067 - DNA, 518 bp, Gossypium hirsutum
  unsure (1)..(518): unsure at all n locations; Clone ID: LIB3828-032-Q6-K6-C8
aaagatggttgctttgggttctgagttttaaaacttaaaacancancantttctggggttacaacaataataccaatcccaagaagcagcaagtgaaggtataaggttttaataatggcagattgtgattctactcttcaatctcccacggataaggttcaaaagaagccggggtcattccctaaattgcttactggttttactttaaaagcgttttctgataatactgagtctattatgagtccaaaatctatacttgatagcaagccctgttcagctttgaaaaaccctttttggtctgaatcaagtactcctaaaaccccagaacctgaagccaaacacaagcttgattccaaagggattggtcttgccattgttgattctttcaaagatgattactttgatcccaacttaccaaaacctgtcctttttggttcacaacttaggatccaaatcccatctttgcctcatgttttttcaccagcagaatctccaagaacaccacctgagtttagtac

SEQ ID NO: 10068 - DNA, 364 bp, Gossypium hirsutum
  unsure (1)..(364): unsure at all n locations; Clone ID: LIB3828-032-Q6-K6-C9
cccccccccncccccccccccccccccccccgcccngnngagagaagaaggagggggccccccccccccccccccccccccccaaaccccccnnnnccnnggggggcccagacgggcnncccccccccccccccccccccccccccccccccttatcccctngngtntnnnncccccccccccggggggggcggtnccccccccccccccccccccccttntttttttttaaaaggggggggacaacacccaccaccccccccncccccncccntccccccnccttctccccaaaaaaaccanaaaaaaaaaaaaaaaaaatttttttttacactctccccccccccccaaacgcccccccccc

SEQ ID NO: 10069 - DNA, 546 bp, Gossypium hirsutum
  Clone ID: LIB3828-032-Q6-K6-D4
cccgggtcgacctcgcgtccgcttatgattacatcagctgatgaaggggaattcttgaacatgcttcttaagctgatcaatgcgaagaataccatggaaattggggtttatactggttattctttgttagccaccgccctcgctttacccgatgacggaaagatcttggccatggatatcaacagagaaaactatgaggggggattgcctgtaatccaaaaagctggcgttgcacacaaaattgaattcaaagaaggccctgccatgcctgttcttgataaattggtggaagatgaaaagaatcatgggtcgtatgatttcatctttgtggatgctgataaagacaactacctcaactaccacaagaggttgatagagttggtgaaggttggtggtttgattggctacgacaacacactgtggaacgggtcggtggtggcaccgcccgatgctccgcttaggaagtatgttaggtactacagagacttcgttttggaactcaacaaggctcttgctgttgaccccaggattgagatttgcatgctc

SEQ ID NO: 10070 - DNA, 527 bp, Gossypium hirsutum
  Clone ID: LIB3828-032-Q6-K6-D5
cccacgctttcgatttagggggattgggagagtgcaaccttctgaaaaaaaaaactcagttcgccctggtgcaatgacagtcttcccatcggctactcattttatgaattttaagatgccgtcctgtatttacatacaaatgctccaatgatgtcttaggtcggccatcgaaaacaatatggggttacagtgacacgacacgttgcgatcaaccttaatgtgggataagattaatttggacaaaacaaagtgggggtctctcttcttatcctcttgtggttgttttgaggtcaacctctttatcaatttaaatatgcctttcttgttccattggagagtgtgagttctacacgttttcaaagggccaaatggaagctgggaaaccccatgctgtctgtattcctctaccagctcaagggcacattaaccctatcttattatttgccaaactcctccacttccatggcttccatatcactttcatccataccgagttcaactactatcgcttgattcagtcgagagga

SEQ ID NO: 10071 - DNA, 524 bp, Gossypium hirsutum
  Clone ID: LIB3828-032-Q6-K6-D7
ctcttttgtagggacctcttacttggggtgcggggggggtaacggtcatctcttgaattttcaagtgaacatgagtaatggtgagggaacagatagaaaaaaggtttctcttgggactcaacccataacgcttcgtactttctcctccaagaataccacccatgtttttgcctcttcaggggggccaactgtcatttatagtagtaacaagaaattactctacagcaatgtcaatttgaaggaagtcggtcatatgtgcccttttaactctgctgcttttccagacagcctcgcaattgcaaaagaaggtgaacttactataggcacgattgatgatattcagaagcttcatatccgcactatcccacttggggagcatgcgcgtcgcatctgccatcaagaacagtctcgtacctttgcaatatgttgtttgaaaaaccagtctagtgctgacgaatctgaaatgcattttattcgcctgttagatgatcaaaccttggaatgtatctcgacttaccctcttg

SEQ ID NO: 10072 - DNA, 520 bp, Gossypium hirsutum
  unsure (1)..(520): unsure at all n locations; Clone ID: LIB3828-032-Q6-K6-D8
aatattttctctagcatgggcaagctggggtacaggccgaaaaaacagcgcaaagaagcattaagggatgctgatacaggagagaaaatcgacgagttaatcaccgagtttctaaagaatttcaaggagggttcattagaaagcaagggttggccaacctttctctttgcctatacaatgggggaagtagctatgaatgcctatacaaggattttggccaanaagcatccaaatttctgcatcaactgtgtttgccctggttttgtcaaaacagatataaataacaatgccggtcattcaacccccgaagaaggtgcagcgattccagtcaagttagcactttggccgaacggtggtgccccttccggcctctttttcgttcagggtgaacctgtaccatttgaatgaaactaaaaaaaaaagaaacaataaaatcccatcaaagtggtcgggaacttagttcacannnnaaaaaaaaaaaaaaaaaaaataaaaaaaaaaaaaaaaaaaaagggcggcc

SEQ ID NO: 10073 - DNA, 533 bp, Gossypium hirsutum
  Clone ID: LIB3828-032-Q6-K6-E4
gccaatggaaggcctgatagagattatcagaaactgaaatggaagcctaaaggctgcactttaccaagattgaatggtggtcacatgttggagttattgaggggtaagaggcttgtttttgtcggggattctttaaataggaatatgtgggaatctctagtttgcattctgagaaatgctgcaaaaaaccccgaaaatgtttatgaagcacatggaagacattattttcgaggggaagcttcgtattctttcatattcaaagattataatttcactatagagttcttcgtatctccgttcttggtccgagaatgggaaatgccagacaaaactggagcaaagaaggagacattgcggcttgatcttgttggaaaatcatcagatcaatataaatcggcagatatccttatcttcaatacaggtcattggtggactcatgagaaaacttccaaagggaaagattattaccaggaaggtagccatgtttataatgaattgaatgttctcgaggcctttcggaaagctttgacaac

SEQ ID NO: 10074 - DNA, 419 bp, Gossypium hirsutum
  Clone ID: LIB3828-032-Q6-K6-E5
ccgggtcgacctcgcgtccggcgaaaccttaagtcgagatccccaaatgttggttacagtgaaatccgaagatccatcggttcaatggcgcaacttgaagaaatagatgaatcgaagaataagaacaataagcagcagaaacgaaatcatggatcaaccatgtttttcgtaatggtggactaccttttcctgctcatcggggggggtttcctcgttttcattctctttaagatacttcatttcttctgattattcttcttcaggttactcttttatttcttttatcaattacccttgtttttcgccatttcaattcaacaaaaaatgtattgtacttcttttcgtgatctttttgcctgcacattcaattaactgcaactctttcactctttcaaaatctgagacattgatttttttct

SEQ ID NO: 10075 - DNA, 546 bp, Gossypium hirsutum
  unsure (1)..(546): unsure at all n locations; Clone ID: LIB3828-032-Q6-K6-E6
cgggnncgacccacgcgnncggcgatttatgtcccaccagctcaacagggtaatgtagattagcagagtggaatcctccatgcagaggagaaagactataaaactgcttatagttatttcttcgaagcatttgaagctttcaatgctcttgaagatcctcgagctgtctttagcctcaagtatatgctgttgtgcaaaaggggggtgagccaggctgatgatgttgctggtataatatcatcaaaagctgggcttcaatacgtggggcctgaacttgatgccatgaaagctgtcgctgatgcccatgcaaaacgttccctgaagcttttcgagattgctcttcgtgatttcaaggctcaactagaggaagatcctattgtccacaggcacctttcttccctctatgacactctactggagcagaatctctgcagattgattgagccattctcaagggttgagatcgctcatattgccgaactcattgaactgcctgtagaccatgtggagaagaaactttctcagatgattttagataagaagttt

SEQ ID NO: 10076 - DNA, 416 bp, Gossypium hirsutum
  Clone ID: LIB3828-032-Q6-K6-E7
gtgaaatacggtcagaaatttacagtgcaaatccgtggaaatgtcgaaattgaccaacaaaagcttcaagtgacgatttactcaccgccatttgtgacgcacggggttgctatgaatcaaagattgattcaattgggaattgtggaatttaacaaaaatgttgccataaatacaaacaacattgttcttcaagctcccgttaatagcaacattgcaccacctggttattacatgctctttgtgaactacaatggagtaccttgccgtcgatcaatgtgggttcgaattttaccttagatctttcacaacaagcattgaattgtcagagccactatatgtaatacgaatcattgttcacgttttgtttcacaagttgttatttgaagatcttatataaaatgtggataattagattt

SEQ ID NO: 10077 - DNA, 525 bp, Gossypium hirsutum
  Clone ID: LIB3828-032-Q6-K6-E8
caagcttctcgaggaaccaaaaggaaatgggttccagaagaagatgtggcattggtttcctgcatggtggacttgcacaatgttggaacatttaatgctgatatcgggttcaaagccggttatttaaacgagttggaaaaaatgctagaaaaggctttacccaatgcaatgttgaaggctagacctaatattgaatcgaggattaggttactaaaaagagattggtcaatcgtgtatgacatgcttaatggccaaaacaatagcggttttggttgggatgagcataggcagctcgttgttgctgaagatgcggtttgagactcttatttaaatagtcataaggaagtcggtcaattcagacatcgtagtttcccttactacgaccaacttactgtcatatacgcaagagattgagcgactgggaaagatgctcaaacagccgctgatgttattgaagaaataaatgttctattaatgaagagagaaacagattctatgactgcgaagctgatgtctctttggatg

SEQ ID NO: 10078 - DNA, 526 bp, Gossypium hirsutum
  Clone ID: LIB3828-032-Q6-K6-E9
cggacgcgtgggcggacgcgtgggttgaaaaatacgattatgcatggaatataggttctaatggcgcacgtcgccccaatgatatccttcggaaactagataaacatgtatccaacaaaagacatttgcccatcaaaatcaaatcaaacaagcaagtaaatggaagatgccggaggcacttagatcaccgtggtggtggtggtgatattacatacatttgtggagcagccacttccgatggtgctccttgtgagagaccggttagtggaaatggaagatgttggcaacattcgaattatggtcgcagtagtagttccaacaaaagacatgtgcccgtcaaaatcaaatcaaacaagcaagtaaatggaagatgccggaggcacttaaattatggcggggacggcggtagcagttttacttcacggaacttaaattatggctgctatgacagcagttttactccgcggtggttggaccatggtggtgatgatattatattaatttgtggagcaaccaccgacaatgg

SEQ ID NO: 10079 - DNA, 385 bp, Gossypium hirsutum
  Clone ID: LIB3828-032-Q6-K6-F4
tgagcctagacggtaaacgattatacatgacgaactctctattcagcgcatgggatcgacaattctatccagaactcttggagaaaggttcccacatgttgcagatcgatgtcaacaccgaggaaggcggtcttaaaacaaacccaaacttctttgtcgattttggagccgaacctgatggaccttccctggctcatgagatgagatatccaggtggtgactgcacttcagatatatggacttaaacatctcaaaaaccagtttcagccatgaagaaaatcatccttctaattttgtaggacaaaaataaaaatcagtgcaatttgtatgtgagacatattgatagataatgtaatgttaaggggttaatttagcaatatatctt

SEQ ID NO: 10080 - DNA, 460 bp, Gossypium hirsutum
  unsure (1)..(460): unsure at all n locations; Clone ID: LIB3828-032-Q6-K6-F5
ccgggtcgaccttgcgtccggcgtactttaangggggcgcagtcgggggtccggcaccaagactccggtaatggcacgattgctgttggtgagtatctgcataggggtattggcaaatgcggcatcagcccaagtgaatcccccaaatgcgttggcctcaaaactggggggctattgcggcatgtttctcatgtgcggcggggtgaaatgcggttatctcggctgccttaaaagctgcgtgacatctccctcgataggatgcggctataagtgctttttcgaaaacaccagttgccaatttggctgcaccccctttgatattcgaggccaatcagcccgtgttaagacctagagggatatatatatatgtgagcgcgcgctttgtttgtttattattaagtgtttggtattattattacaaaacaaaaaacatgatgatacacaatgaataatgtcttcg

SEQ ID NO: 10081 - DNA, 542 bp, Gossypium hirsutum
  Clone ID: LIB3828-032-Q6-K6-F7
cccgggtcgacctcgcgtccgctttatatgaggaatggcgaagaggagtgaaaggggtgagagctgacactgtaagtaaattaaggaaggccctgccagagctagagaaagaggtcaagagaccagcaaactttgaggatttctattcctattcattctgctattgcctgacagaggagaaacaaaagagtatagatatagggagcatatgtcaattgctggatcttgttttaggatcccatttccgagcgcaagttgactattttattgagtatttgaagattcagagtgattataaggtcataaacatggatcaatggatgggtttttttcggttctgcaatgagtggttaaaatttccagttcttgcaacaacactttctctggcagaaaaaattgaagaatacaaatgataagtttcccggacttcagtagttataatccggaccttgcttggccattgatcctggataatttcgtagagtggatgcagtcgaagcagacctgaaattatttggtttggtcaacttctcagctgtaac

SEQ ID NO: 10082 - DNA, 528 bp, Gossypium hirsutum
  Clone ID: LIB3828-032-Q6-K6-F8
caaaactccttcttccccccttttcctctccaacgatcgagttccccggaggctcaccctaccgccgccatggccaatggctggcgctgcaggaaatgggctcgcttagctccgttttggagcgcctctgaaggccgatactaccaacacccgaagatgcggaaaagatgagactctcagccccctttttgagcccgacctcggtgacggagaagggctctccgatgtcacgaccgtggggaatttcaggtgtcagacggccctcagaggcgtgtgaagcggccatgacagaggcgtggtggccgatgggaggtgaaaagtttggcagtagcatgcttgggggctggctgttgctgttttcttttctttgtaatgggctagggtttcatttgggttgttgggttaggtaacttgggtttggtattgggccatttgttatttatgtttgggttttattttgctttattgaattgagtttttttgggccaaaattggctattacaacttgatgaagaggctgattactaa

SEQ ID NO: 10083 - DNA, 553 bp, Gossypium hirsutum
  Clone ID: LIB3828-032-Q6-K6-G4
ccgggtcgacctcgcgtccggcggccgattgtgctggaaaatctgctggatgaggggtagagttttatgatgcatgggacgagctaagctccaataatgcaccacatacttttgttcgcgacattgaagctgaactgcgtgaaataagattgaatttactcgtagagatcgaaaagaggaagaaggctttaagaaactttgggggaaatgcgatgcaagtggcaaagaatcagccaagagtttgctgtagcaggattggcattgccagtagatccggttgatgcgacagatgatgaactggtgaaaccagttgaagaactgaggcagcaagagagtgttgcacgacttgtatctttatctgtgggaagaggcgttgcaagggctgagatgcagatggagatggaatctcaaattaaattgaagaactttgaagtcgcccgattgttggaccggttgcactattacaaggctgtaaatcaggaaatgtctcagaggaaccaagaggctatagagatggcacggcgtgatagacaaaggaaaaaaagaagacaaa

SEQ ID NO: 10084 - DNA, 525 bp, Gossypium hirsutum
  Clone ID: LIB3828-032-Q6-K6-G5
ggaaactgtgtcaagttctgcagtaggcaccagaggaagtactgtttttattagtagtgaggtttcaagggcaatcctaaagcttgatgatcctcaaactggtggctttgaagagttccctcgatcttctgagcatacaagtgctcagagcatttttcagtcgttcatggcttcttctgggcgaagcatgaatgcacaacaggattcatatccaaatacgaacatccaccaaagttcctatcagaaaatgagtgctcaatatagcccctatcaaaatgtgagtgctcaacagaactattcaaacaggcaagctcatcaaggcccatatcataatttgactgtgcagcaaatcccctatccacttaattctcagcaagggccttacgccaacttcaatgctccaccaagtgcttaccacaattacagtgcacagcaaggctctaacccgtattaaattcaataggctcatttttgtactatatttcaactttccgaatattagagattacataggccgtcacatta

SEQ ID NO: 10085 - DNA, 526 bp, Gossypium hirsutum
  Clone ID: LIB3828-032-Q6-K6-G6
gccgcttctgcagccaccatctctcccactactgctcacgccgccaacaccatacgccgcgcctttcacagtaatcctttcaattctctctcttcttttcatcactctattctctgcgctcgctttcgttgcctctcgctacgctctttcaccgctgtttccaccaaagccatgtctcaccctcagaccctcgatgctcctcaccctcaatcctctgctgctggcaataagcaagcactaatatctttgtctgacaagaaagacctggctttgcttggcagtggccttcaagaactggggtatactattgtttcaactggaggaactgcatctgccttagaaaatgctggtgtatctgtaaccaaagtggagcaacttacttgtttccccgaaatgcttgacggtcgtgtgaaaacactacatcccaacatacatggtggtattcttgctagaagagaccaaaaacatcatatggaagctcttaataagtacggcattggtacatttgatgtggtggttgtgaact

SEQ ID NO: 10086 - DNA, 531 bp, Gossypium hirsutum
  Clone ID: LIB3828-032-Q6-K6-G7
gctgttggtgctactacgccgtttttcacggcggtttttgcggtggttatgacttctaaaagggaaggttggattacgtatgttacactcgtgcctgttgtcgctggtgttattattgccagtgggggagaaccattgtttcatctgtttggatttatgatgtgtattggtgccacagcagcaagagctcttaaatcagtgcttcaaggccttttgctgtcttccgaaggggaaaagctcaacgccatgaacctattaatgtacatggcacctatagctgtcctggcccttttcccagcagctctttacatggaaaaaggtgtagttggcatcaccattgcacttgcaagagatgattggaagttcttaatatatctcctcttcaattcagcacttgcttattttgtcaacttagccaatttcttggtcaccaagcataccagtcccttgactctccaggtgttgggaaacgcgaaaggcgcggtggccgtggttatatcgatcttgatattcaaaaatccagtatcaatt

SEQ ID NO: 10087 - DNA, 527 bp, Gossypium hirsutum
  Clone ID: LIB3828-032-Q6-K6-G8
ctggattttcactcaatttctcccctggttcaggggggtttgaagcacaaccaggtacctcttcatgggatctctaatgtcaacttacttagtctcccatctcttagaatccgaccgggacctatgcgcctccgggtttcttgtgcggccaaacctgagacggtggacaaagtttgggggggagggaggaagcaactagcactaccagaagattcttctgttaccggagaatctaagtttgctgcactcggagccgattctcttgacacggtcgagattgtgatgggactcgaggaggagttcggaatcagtgtggaagaagaaagtgcccaaagcattgtcactgttcaagatgcagcggatctgatcgagaagctcgtggagaagaaagatgcttaaaacaccattgaaaacggctggctgtccggcaacgagtccttaaaaaatatatcccctgtttttttctttttggcctctcctatgttgttttaatggtagttttgtttttgttgcttatggaacatgta

SEQ ID NO: 10088 - DNA, 528 bp, Gossypium hirsutum
  Clone ID: LIB3828-032-Q6-K6-G9
cgaaatctgtgagtgagacggtgaacgggtcacgggaattcacgatcaagggttactcgttggcgaaagggatgggtgccgggaaatgtatacaaagcgatatttttacggttggaggctacgattgggcgatttatttttaccccgacggtaaaaatccggaggatagtgcgatgtatgggtgggttttcattgccttggctagcgaaggtacggatgttcgagcgcttttcgagctcacccttgttgaccagagcgggaaagggaagcataaggttcatagtcactttgacagagcgttggagagtgggccttatacgttgaagtacagaggaagcatgtggggctacaaacgattctttagaagaacaactttagaaagttctgactacattaaggatgattgcctaatcatgaactgcactgttggagtagtcagaactcgccttgagggaccaaaactgtcttctattcctgtaccgccatcagacatgggtcagaatcttagagctttgttagaatccgaag

SEQ ID NO: 10089 - DNA, 277 bp, Gossypium hirsutum
  Clone ID: LIB3828-032-Q6-K6-H4
ccgggtcgacctcgcgtccggtgcaatgttgccattcatgggagcttgaagaacctggttattacatgctctttgtgaactacaatggggtgccttgccttcgatcgatgtgggtacaaattttgccataaatatttcattggaagcattgaatcgtcgaagacactatatataattattttattttttatatatatataaatatatgaagtactctgtttacattttttttgcacccactattgttttgaagatcatttgaagaattgaatttatt

SEQ ID NO: 10090 - DNA, 521 bp, Gossypium hirsutum
  Clone ID: LIB3828-032-Q6-K6-H5
cggacgcttgggcggacgcgtgggcggcaacggatatctcggctctcgcatcgatgaagaacgtagcgaaatgcgatacttggcccctcttaaccctaaagcaaatcgtgagaagatgacccaaattatgtttgagaccttcaacgcacctgctatgtatgtcgccattcaggccgtgctgtgtctttatgccagtggtcgtaccaccggtattgtgttggattccggagacggtgttagccacacggtccctatatacgaaggttacgccctcccgcatgctattcttcgtatcgacttggctggccgtgacctcaccgataaccttatgaaaattttgaccgaacgtggatattcattcacaaccacagccgagcgggaaatcgttagggacgtgaaggaaaagctatcatacattgctctggatttcgagcaggaattagagacctctaaaacaaactcatcggtagagaagacttacgagttaccagacggtcagattattaccatcggggccgagc

SEQ ID NO: 10091 - DNA, 518 bp, Gossypium hirsutum
  Clone ID: LIB3828-032-Q6-K6-H7
ctgaactttcccttttcattttcagggggctccggtgcgataaattcctaagaaaattttcaacgttatttcaaaaagcagagaaaagaacgttaaggaggaaagatgttgggaatagtaaggcaaaaaatgttagggcagtcattgctgaagattcgtcctgcattatcggtgttacgggggtgctcatcagcagcaaaacagatgacagtgagagaggcattgaactctgctcttgatgaggaaatgtcagctgatccgaaagtctttttaatgggtgaagaggttggagaatatcagggtgcatacaagatatccaaggggcttttggagaagtatggacctgagagggttcttgatactccaattactgaggctggttttgctgggattggggttggtgcggcttactatggtctgaagcccgtagttgagtttatgacatttaacttctccatgcaggcgattgaccacattattaactctgctgcaaagtccaactacatgtctgctggcca

SEQ ID NO: 10092 - DNA, 522 bp, Gossypium hirsutum
  Clone ID: LIB3828-032-Q6-K6-H8
aaactttgtttatcttcaatttatactgcctgggggaggatgaggaagggaaggatttcaggttttactttgattttgagcatctgaaggaggccgcatcagttttggatcacgagcagttttggcaagactggaataaatggcaaaagaaagatggcttgagtcttcatcttgttgaggattttagggtgacgccaatgaagctttctgaggtaaaggattctttgattatgagaaagtttggattggtggagcctgataattactggtacagggtttgtgaaggagagactgagtctgttgttcaaaggccatggcatctggtatggaaatcaaggaggttgatggatatagtgtcggcaattgcgtcaaagttgaactgggattatgactctgttcacattgtgagaggggagaaggcgaggaacagggacctgtggcctaatcttgcccaagatacctcacctgatgcccttatctcaaccttgcagaataagattgaagatgggaggaatgtttata

SEQ ID NO: 10093 - DNA, 519 bp, Gossypium hirsutum
  Clone ID: LIB3828-033-Q6-K6-A4
ccccgctttcgaaaagagcctacaaaggttagtggagtagcagtgtgtaagccagcattgaagtagggaaaatagattaggtggcgtataaacacttgttaagttagtatttaaacaaatatctccacgtttaaggcagtagtaagttgtgagtgtgaagcttttttgatgcattaaaggggggaaaacatttctttaaataaaaagatggtgttccgtagctaaaggctcagtgaaaagagcctacaaagtttattcgagtagtcaagtgtctgccagcattgaagtacgtcaattgttaatttttgttattaccaataatgaaatcgttgatcacatttgtcgtctggctggtttggtgaaacgtttggagaagactggatatctgattgcggatggtgaagaagataatttagcaattgtggtcgcggctgtgggtgtaacacatgctgactgcgcaggttttcaaacgtgattttgttgaatatgggtcactggagaggcttaccctttacctaa

SEQ ID NO: 10094 - DNA, 526 bp, Gossypium hirsutum
  unsure (1)..(526): unsure at all n locations; Clone ID: LIB3828-033-Q6-K6-A6
cagacacattatacaggtattccccagctgctggtgagcaatcctattgacattcgacaactgcgggatgtggaacctgaggtcggagacatgggacaggcattaccttgggcaacagctttatgctagtgttatttcccctaaccgatccctcaaggatgagtacaacttaccggaagggggattgacttgcggcatcgtgcaaggcatgccaaggcctccacctttcagcagttaatttaattaagcttataaatctgtatccaattatagaatatggggagagagagggtgagaaaagctgagttctgtataatatttaatgaaataaaagcttttggatcactttattattactaanaaaaaaaaaaaaaaaaaaaaaaaaaaaaaaaaaaaaaaaaaaaaaaaaaaaanaaaaaanaaaaaaannaaaaaannaaaannnnnnaannnnaannnnnaaaaaaaaaaaaaaaaaaaaaaaaaggggggcccgttttgggggaccaagttttccttaccggtt

SEQ ID NO: 10095 - DNA, 514 bp, Gossypium hirsutum
  Clone ID: LIB3828-033-Q6-K6-A9
ctgacacttagatcaacgctcaggggggggaggagagttcctataaaaacgagtgcctgccaagcccgtacaactgctacttggtctggtttcctacatgcaatagcgtccgcagcaaagactgatggtactccattgagcattgctgatcagaataaaaaaattcctccttccgaggcggggggcgcaacaccttgaggctgatccggggctgaatcttattatccgcaccatcaatactaaactttacggcttcccactgtggcgctcacacaataatgctactgtgttcaaaatctaactgctctaacgcccaaccacagaataaccgattcatagcccaaactccttctgcactcacatgacaccttgagacgactgctaatttacggggtgggagatttaccttggtaagcatatagttcctatatagcctgcatatagagatctttacttatgatatgttactcaggctccaaaacgtggtgtaaaattctctggacagggtaatata

SEQ ID NO: 10096 - DNA, 532 bp, Gossypium hirsutum
  Clone ID: LIB3828-033-Q6-K6-B4
taagaacaatgaacaacaattcagcaaagagccctatgatcgtctcgttcggcgagatgctaatagacttcgttcctgatgttgccggcgtttccttggctgaatcctacgctttcatcaaagctcccggcggcgcacctgctaacgttgcatgtgccatcgctaagctcggaggcaacgctgccttcattggcaaagtaggagacgatgagttcggtcacatgttggcgaatctgttgaataagagcggagtgaacagcgacgggatctgctttgacaaagatgcgaggactgcgttggcattcgttacgctgaaggcggatgggcaaagggaattcatgttttatcgatcccctagtgcggatatgttgttgaaagaatcggagttgaaattggatctcattaagcaagccaagatattccattatggatccataagtttgatatcggaaccctgcaaatcagctcacatggccgccatgaaagcggctaaacaggctggggttttgctttcttatgaccctaatgttcg

SEQ ID NO: 10097 - DNA, 524 bp, Gossypium hirsutum
  Clone ID: LIB3828-033-Q6-K6-B5
gcgaaagtttaggttgtaattgttctgtgtttggggttggtgataacagtggttgatgggttgggagggaggatgaggataaacgatgtgaagaacaacaaagaggtgcaagagcttgggaggttctcggtggaggagtataacaggcggagccaagggcggttgcttttcattttggcgggtggtgggccgtcgacggcgttggttttctctcaagtggtgggagctgagaaacaggtggttgctgggatcaagtattatctcaagattaaagccatgcaaggtggggtaaccaagacctttgagtcagtggttttggttaaaccttgggttcaatccaaggacttgcttaatttttccccttctactcattaaaaagagaagtctttttcccttgtaatcttaattaataaagcgattgaataagaaagtatggtaattaactgcttgttataccagaaattctggggttatggtgaagattattgattcaaagcacaaaaaatttaacatcatgtaaacat

SEQ ID NO: 10098 - DNA, 542 bp, Gossypium hirsutum
  Clone ID: LIB3828-033-Q6-K6-B6
cgggtcgacctcgcgtccgcttgaaattttcatagttaaaaggaatggtaaatgggaacaagtattcgaattagaagaaaaagtggaagtggtagctgaagagaagatgaaatttgataacttaaaagggttattacttgaagaactacctggcctcattcagttttgtcccaaaggatatcattttgtattcccaaaaggggtgcagttgaaagtaagagattgccctaagttgactactggtttcttcattgattcacagagatttgtacattgcaaaacaaaggtacctcagttggttgagcaagatgcggttgaagagtctaccactattcgaaatgcaattttcaatgagaatatatattggagcctattttggggtgagggtcaactaccacacattgcatgaaagaatggatggttttagggcagccttcaaagccatgttacatcagtaggtagagcaatgttgctcagttgtttttagttaagtgtctgatataatttgtgtctgatagaacatgaccattaacggtgctttt

SEQ ID NO: 10099 - DNA, 532 bp, Gossypium hirsutum
  Clone ID: LIB3828-033-Q6-K6-B7
gcccctctttctcctccaacaccaccggggaaagggggcggaatacatctggaagcatctccatctttggaggaaaatttgagggccacaactcctgccacacctatacctccacctcccccttctcctgcacctattagagctggatctcctgtaaccccaccaccttcacctcctcggggggggccacttttgaaggtaaattcagcatctaaatctgcacctcctccacctccaccacctcctcttcatgccaggcaagtggcatcttcagtaccaccgccaccgccaccacccacccctgccttggcatcaaaatctcaagttcctgctgccccaccaccccctgctccttttggtaaaaagacaaatggcaattttccagaacctcaagcggtaggtagtagtggatcttctgctcctggacgaccatcttttacttctcctacaaattcaaaaaacagacttctttcacgtactattagttcaaagagtcatcagacaaagaaattaaagccgttgcattggttga

SEQ ID NO: 10100 - DNA, 372 bp, Gossypium hirsutum
  unsure (1)..(372): unsure at all n locations; Clone ID: LIB3828-033-Q6-K6-B8
atccgggggtggggggngnngnnnngggggggngnggggggggggggtgttttggggccttggcgcnnaagggtaaaagtcccccccgggcccccaaatgaaggcgggaccttttggggctcgggggttgccttattgtgtgttgttaaaaatgggggggggggggcccacngtntttaaaaagcaaaaaaaaaaaagaaacgaaaccgggtgagcttgctaaggaagccctcgcacgagcacccnttaactcccttaacactttcaacagctattcggggttggagagggggggcgggggcccgtctcttgggcggccggctctgggcgggggtctgccctttttagggagaccccccgtatccaacattt

SEQ ID NO: 10101 - DNA, 525 bp, Gossypium hirsutum
  Clone ID: LIB3828-033-Q6-K6-B9
cttgatctttatgcatggctctatgagagatggagattggcactccaattagttgtagatctttttgtgaatttttataataccgggcatccacttttgaggaaggttctctctttgctcataagttttatcaagcgtccccaccaaagcctagccggtattggaactgctgcatttgggcggttgatgagcaatgcaggagatcttttttctgaggagaagtggctggaagtaggttattcattaaaagaagcagctaatgcaacacttcctgatttttcatgcgttgttagtggggataatatggctggaaccaatgagcatgctttgaatagccaaggtaatgaggcttctgctggttctgacacatctcatggcggttcagagagcctgagaacacagcatatttatgcttctttatcagaagcaaaatgccgagctgctgttcagcttttattgattcaggcgatgatggaaatctacaacatgtatcgaactcatctttcagctaagaacaccttagtc

SEQ ID NO: 10102 - DNA, 58 bp, Gossypium hirsutum
  Clone ID: LIB3828-033-Q6-K6-C4
attttattttttaaaatttgagctgcatttaagaaaaaataatcggatcactttaatt

SEQ ID NO: 10103 - DNA, 545 bp, Gossypium hirsutum
  Clone ID: LIB3828-033-Q6-K6-C5
ccgggtcgaccctgcgtccggttgggctttgagtattacgttgggatggtatcgtttgtggataaggatcagttggagcctggatgcgctattttgatgcacaacaaggttctttctgttgttggccttctgcaagatgaagttgatcccatggtatcagttatgaaggttgaaaaggctccattggattcttatgccggtgggggaggtttggatgctcaaatacaggagattaaagaggcagttgagctccctctgactcatcctgaactgtatgaagacatcggtatcaaacctccaaaaggagttatcttgtatggagaacctggcactggcaagaccttgcttgcaaaggcggtggctaattctacatcagcaactttcttacgtgttgttggcagtgaattgattcagaagtacttgggagatggtcccaagttagttagggaactcttcagagttgctgatgacctttccccttcaatcgtcttcattgatgaaattgatgcagttggtactaagaggtatgatgcccattctggtgg

SEQ ID NO: 10104 - DNA, 569 bp, Gossypium hirsutum
  unsure (1)..(569): unsure at all n locations; Clone ID: LIB3828-033-Q6-K6-C6
cgggtcgaccctacgcgnccgggaacagtctttcgcaatcgggggcactactgggagtagtcactctcgaattagtccagtaacatcagcataagtctcataccaactatcaccagctcgcctaatccatgaattctacctcattcgcatcaatacttgtccaagctaaccgactctcctttatcatactgggaacctgccattataacttctcaacatacgtgacggtaatgaattccggttcttctagggatgctgattcaccatactatgtttccttaacctgcgcacgggttcataccgaacgctgagtatagactactgaaaaggactatctatactccggatccttaatattatgacaaatacttaatagcatcttaacatttacaatggttcaatatctttattcattgataaaatttaactacttaccatttaaaccacatacaattcatattgtatacacaatagcctagtaggtcaatccttaactaattccattattatttactctattgttttatttactactcggattatctatacttaatttactcacaaggcaa

SEQ ID NO: 10105 - DNA, 523 bp, Gossypium hirsutum
  Clone ID: LIB3828-033-Q6-K6-C7
gtcctggtaggctgttgtttcttctgggcaacagggatcaaggcttttcccagctaatcattctctggaattaaggtcagcaccaggggtacataatgcaaattctgaaaacccgaatgtcataagtcatgttccatctttgctgcaaaatggaggttctggtccaagaacgggcagtgggtgaaattctaatccttttgctgatagagatgtaccacgtgcaagacacaaatcaagaagcatggctagaaacatattacatcatcctatgtttgttcctgcaccagaattaagaactttggttagaaatccaattttaagcagtggaaatataagttctcctggaaatgttgcctctacatctcatgcaggctcaaataatggtgccaatgtgatgtctgcatccacctgggttcctcatcccaacccctcttcacaatacccacgaaggttgtctgaacttgttcgtcaatcattaatgtcttcccttggcactgaatctggaggccagagcaatcattct

SEQ ID NO: 10106 - DNA, 524 bp, Gossypium hirsutum
  Clone ID: LIB3828-033-Q6-K6-C8
cggacgcgtgggcggacgcgtgggcggacgcgtgggcggacgcgtgggggctttcgcgtttctttctgaaactagagctgagaaaataaaacccaaagccttaaaaactatcaaaaatggttcaaaggctcacttaccgtactcgccatagctatgctaccaaatccaatcaacaccgtgtcgttaagacccccggtgggaaattgatctatcagactactaagaagagagcgagtgggcctaagtgtcctgttactggaaagcgaattcagggtattcctcacttgagacctgctgaatacaagcggtctcggttgcctaggaaccgtaggacggtgaatcgtgcctatggtggtgttttgtctggaagtgctgttagagaaaggataattcgagccttcttagtggaagagcaaaagattgtgaagaaggttctgaaaatccagaagactaaggaaaagcaatcctcaaagagctaggaattttaaatgctgatgaagctgaattgtgtttggcttgttaga

SEQ ID NO: 10107 - DNA, 525 bp, Gossypium hirsutum
  Clone ID: LIB3828-033-Q6-K6-C9
ggcatacttgaagccaaagaacctgggggtgcgcgtggaggaagaaggaggcaatcctaaagatgtccatatagtaacagtcaacagggatacaatctgcagtgctgtgagtgaaattcacccaccatccccgagattgttcgaaaccaaaaatggtagtctccaagccaaagtgaatgaggggaaaccaagggctgaattgaaatgtccaggcaagaagcaaatcgtggcagtggagtttgcgagctatggtgatccatttggcgcttgcggagcctactttattggaaattgcacagcgccagaatccaagcaagtcgttgagaagtattgcttggggaagcccagctgccaaatcccactagatagcattcctttcagtaaccaaaatgacgcatgtacccatctcaggaagactttggccgtccaactcaaatgtgcctaaacaaatgcgtgcttcgacacagcttggattaagcttcacattttattttttttaattgagctaagacggtgcatggagga

SEQ ID NO: 10108 - DNA, 523 bp, Gossypium hirsutum
  Clone ID: LIB3828-033-Q6-K6-D4
gttgtcttttgctgtgaaagcagctcatgagttcgggggcaagttttccttctgcttggagaatcattggatcataaaatcggagagcagctacctcgtctttggtgcagaagatcaagtgccaaacatgcaattcacagatctgttaaccgaagaatcaaaaatgacctcactttatcctataaaggtcaccggtatctcagttaatggcacgatgctggatattccatcatatgtatgggatatgactgacagaggagccggtgggatgattgtggactcaggtagtaccgtaacgcatctggtggaacaggtgttcgaaaaagtcattgctgctttcgaaccttctttaagcatgtataacaagacgaaagggaatttggattattgcttcaatgctccaccagctggagagtttgatgagacgcgcgttccccgagtggccctccatttcgaggggggagctaagctcgagccggcggtcaacggttatatcttcgacgattctaaaggagtgaaatgc

SEQ ID NO: 10109 - DNA, 534 bp, Gossypium hirsutum
  Clone ID: LIB3828-033-Q6-K6-D5
ccgggtcgacctcgcgtccgaaaaatttttgatttctttccaaaggggtttgtgggttgctgttggttctctcttcctttttgcaggtatctagcgaggaaatgagggggccaagatgattaggccctgatgatgacggtgctggcgctgatatgcgttttattcgacttcaactacggccagattttagacctggagggggggcgtcgatgagggtagatggaacgatcgaggttgaagaggtgtgactgatggggtgcttacggcgcgaagcttctagaaaccctagggtttccagattctgtttaggcattgggccttatttaggttgggtcttgtttgggtttgggtgtaacgggttaatagattttgggccaaaagtttaggctaattgggttgtaactaggtactgcgttttgggtagtttagctaggttacgggttaatggattttgggctatagtattgggtttgtaaactggactgtacaaaagctattttatttttatttttttgtttttatttgttaatgtat

SEQ ID NO: 10110 - DNA, 524 bp, Gossypium hirsutum
  Clone ID: LIB3828-033-Q6-K6-D7
cccacgctttcggttcactaacttgagggtgcggggggcacaatggatagcaaacattgtccttggatctgtatcatttattgcacgcattttacctctaccttctaacacccaaagtggatcaaactggaaacttcttgagcctgcacttaatcctttacagtattttaggctgagaagtgttcagcaaagattggtaatcccctatgatggatctcgcctggagcatcaagaagctcttaagcaattatggaaattggcttaccctgacagggagcttccatctcttaaatcagagctttggaaggacatgggatggcaaggtccagatccttcaacagattttcggggcggaggattcatatcattagagaatctcatcttttttgccaagaaatatccgcaatctttccagaggttgttgcacaaacaagatgggaatagatctgaatgggaatatccatttgctgtagctggcatcaatatttcatttatgttggtacagatgttggatctgcaatcaa

SEQ ID NO: 10111 - DNA, 516 bp, Gossypium hirsutum
  Clone ID: LIB3828-033-Q6-K6-D8
tcttatccctctcgtctgaccttaggggccgggtgagcgccgatctacgtctatcagcagagacgaacagccccgggcttcaaaggatgaccatttcagtcgtgggatcccttctaaaccccgatttcgacgaaatgaaggggatacgacggccaactcgcaaggtaaacctctcggggggtttctttttttgtttttgagatagatttcaaaataaaaagaaaatagaggcgtaaaaatgaaaacagggaacaacctttgcagaatattcaacttctttgtatttgattcctcttttttttgtgtaatctgttcgtagtcgtattacaatcgaaaatcaaaggcttcatagccgaataactaaagaaaacaacaatttttgtcctctgcttttgtattggcttgttgctgctttcgtttgttttcttttgcaggtacggagcacggggctgtgcgttggcgctcgggtacgggtctaggctagggtacggaggtggtacggtcgttgcgaggctg

SEQ ID NO: 10112 - DNA, 530 bp, Gossypium hirsutum
  Clone ID: LIB3828-033-Q6-K6-E4
gccactctttcaactgcagattcaaagggtgcaggtgctgaagatgacgacgatgatgatgtagacttgtttggtgaagagactgaggaggaaaagaaggcagctgaagaacgtgcagctgcagttaaggcctcttccaagaagaaagaatccggaaagtcctcggtattattggatattaggccatgggacgatgagacagacatgaaaaagcttgaagaagcagtaagaagtgttcaaatggaaggactactttggggagcttctaagcttgtgcctgttggttacggaatcaagaaattgcaaattatgatgacaattgtggatgatttagtgtcggttgatactctgattgaggaacatcttacagtggaaccaattaatgaatacgttcagagctgtgatattgttgcatttaacaaaatataaactattttgggatgctgcaatagtagtttcttgaggagtccttcaaatttaagattttcatgttttcttgttctgctagaactttaatttattgtgttggt

SEQ ID NO: 10113 - DNA, 536 bp, Gossypium hirsutum
  unsure (1)..(536): unsure at all n locations; Clone ID: LIB3828-033-Q6-K6-E6
gggtcgaccagcgccggtagctttgctgcataagctgcagtcattgggtgtgccaaatatacctttaagacaggatgcttaaatgatgnngccataaatgagacaggggtnntaaatggnggatngnggaccaaccaaactnaacgcatgcgaacatatacaaaggngcaaaagcgtggttctgtgggaagatgaattgatgtgacccgctacaaagggtatgatgaactccggcatgatctagcccgcatgttcggtatcgaggggcagttggaggatccacaaagttctgactggaaattagtttatgtggatcatgaaaatgacatattacttgttggtgacgatccttgggaagaatttgtaagttgtgttcaaagcataaagatactgtcgtcagcagaagtacagcagatgagcttggatggtaatcttggaaatgtgtcagttcccaatcaagcttgcagtgggactgaaaacggaaatgcatggagaggacattatgatgatacctcagcagtctcatttaacagatg

SEQ ID NO: 10114 - DNA, 517 bp, Gossypium hirsutum
  Clone ID: LIB3828-033-Q6-K6-E7
ggccgtcctagtcaaatgtgcctaaacgaatgcgggcttcgacacagcttgggttaagcttcacattttatttttttttttaattgagctaagacggtgcatggaggagtgcttgaactatttatttgtatttcttaaatattaaatgaagatctgcgaattccagatttaaaaaaaaaggggggaaaaaaaaaaaaaaaaaaaaaaaaaaaaaaaaaaaaaaaaaaaaaaaaaaaaaaaaaaaaaaaaaaaaaaaaaaaaaaaaaaaaaaaaaaaaaaaaaaaaaaaaaaaaaaaaaaaaaaaaaaaaaaaaaaaaaaaaaaaaaaaaaaaaaaaaaaaaaaaaaaaaaaaaaaaaaaaaaaaaaaaaaaaaaaaaaaaaaaagggggggggggttttatttaaaaaaaaaatatttttggggggggatgaaaaaaaaatttttttttttttgggaaaaaaaaaaaaatttttggggggggttttaaaaaaagggggggggaaaaaaaaatggggg

SEQ ID NO: 10115 - DNA, 528 bp, Gossypium hirsutum
  Clone ID: LIB3828-033-Q6-K6-E8
ctacaagcaccattatgagaaccaaggggtggggggatcttctgagggcactgctttggaagagaatttgcttgagtcggttctatcaacgttgatttctaaagatgaagttatgtgtggacgagcattcttggaggcaaataattcacttgaaccatgtcaaaagatgcttaaactggggggtaggttgaggccttcaactcgaaaaattttgtcactggctgtggaagtaaagacccttgagaaagacaaagaacatctcagaatgaacctttgtaaagctgaagatgaggtcaaagttctgtttgaagaaaacaacatattggatgaagcgaacaaaagattattgaggcaataccacaaagaaaaaaacctccatggttctgatgggaagcattctggtagcgcatctacgaagacaaacaagcgaaaatcaagtcccaagatatgcagtccaattgagaagaagattgatttcactgatccagattcagcaaggaagcctctctcacccttgcggcataacta

SEQ ID NO: 10116 - DNA, 525 bp, Gossypium hirsutum
  Clone ID: LIB3828-033-Q6-K6-E9
cggacgcgtgggcggacgcgtgggttttgatgtggcatttcaaagaaacttccagaactaaatgatttaattttttatcttttgctacagagttctggatgggccccttacatctgttgccttcctcagcatggggaaattcatagcacgattttctggagtgaatacgagttgaatatgatttgccaaagttcagtatcaagaaacagttaatcaaaaggctaaaatagaaaaagattttgctgcagttgtgcctgcccttcagcaattccctgatcttgaaagcatcacacttcaggatttcatgtgtgcatatttctcagtaacatctcgagcctgggaaagcacaaagggcctatctctgattccatttacagattttatgaatcatgacgggggttcaaaatcaattgtattattcgatgatgataaaatgttttcagaggttattgctgatcgtaactatgctcctggtgaagaggtactgataaattacggaaaatttccaaatgccatgctactgct

SEQ ID NO: 10117 - DNA, 522 bp, Gossypium hirsutum
  Clone ID: LIB3828-033-Q6-K6-F5
gcgctattgatgttgttgccaagtttggcgcaaaagctgacgggaaaacggatctgagtaagccatttttggatgcttggaaagaagcatgtgcctctgtaaccccatcaacagttgtgattcctaaagggacatatttattatcaaaagtaaacttagaaggtccatgcaaggctcctattgagattaatgttcagggcactataaaggctccggctgatcctggtgctttcaaggaccctaattgggttagattctatagtattgaaaatttcaaaatgtccggcggaggaattttcgatggtcagggaagcattgcttatgagaagaataaagatccccacaatcgtgcatttcgtgtcaaactccccgttaatataaggtttgactttgtgaccaacgcattgatacaagatataactagcaaagacagtaaactattccacgttaatgtttttgcatgcaaaaacattaccctcgaacgtttcacggtagaggcaccggcagatagcccaaacacag

SEQ ID NO: 10118 - DNA, 524 bp, Gossypium hirsutum
  Clone ID: LIB3828-033-Q6-K6-F8
cactatctgcatggttcctatgcatttttcttctctctattgatgattgataaaaattgtagattgatatatatcaaaattgacaatctcttctggtttttgtggcccgagtgcaggtatgatagctgtctggttcaagactaacacttagttacttattcaagggttctatttgatcaagttttctaggactttttacattgcattatattgttcagtgctttggagctttgcatcaggatttgtcatctgattttctttgtacaagttaacaagtgacgattctatagttttcagttcgcgtctcacagagatacagattacagaagactgcggtaggaaatatattcaaagttcagtgtcctgcatgttcaagatggctggtgttaaacgaagaataattactgatttggatgtacgtgctctccataaagaactggatgaagtctcatgtccaatctgcatggaccatccacataatgctgttctgctgctgtgcagctcgcacgacaagggttgcagaa

SEQ ID NO: 10119 - DNA, 364 bp, Gossypium hirsutum
  Clone ID: LIB3828-033-Q6-K6-G4
ccattagcagcaagttcaagggaaaatgaaaaactgctttgttctgtcgaacttgggtatttcatctgtctttcaacagtattattatgcatctgcatatcttaaagagttgtttttcataaaaatgatgcggttgaaaatatgaagttttaagctcttctattttgaacaaaataaattatttgtctctagctagtgagcaaaacatattagttaaaaataatagcttctgcaaacaatggggttcgcatgtttctgctgaattccatgattttggtcatggttagtccaaaaataaagtctctgtattcttttttttttactttgttttataaacccaaagtaaattctacgatggttgtgg

SEQ ID NO: 10120 - DNA, 523 bp, Gossypium hirsutum
  Clone ID: LIB3828-033-Q6-K6-G5
tgaaaatgcaagtcagaacgaaaacaatgcttctcagagctacaccgacaccaccaccaacgagagcaacgatgccattcagaccaataccaacagcaacgaaaactcaagtccaaatgagaacaatgccgttcaggcctccaataacgaaaatgcaggtcagaacgagaacgagaacaatgctactcacagcttcaacgacagcaacgggagcagcaattacgacacaaatacagatggaaacacccagaataatcccgacacttcttcaacgaatcaagaagtaaaagaaggtgaaaccggtttgggaactttgccaggtaccacaacaagtgagggaaataaaagtgagaatgcagctgcagaatgaaatttataatggtttgtgatttcagtatatgaactaattactgtcactaaatttttgtttttcttctttcctgatatgggatcgggaaactgtatgttcctggttacttgtgcctttgttgtcatattagtgctgaaaatttttatattattt

SEQ ID NO: 10121 - DNA, 551 bp, Gossypium hirsutum
  Clone ID: LIB3828-033-Q6-K6-G7
cccgggtcgaccctgcgtccgggaatatttgttatactattcaccaaagcaaaccgggtccacttcctttgtcttgatctgaatcttttgttctcctaattttgattctttttaaagtatttcatttttagttcaagatatatgatttccattgggcttttctttgtctgattctattgcatgttcgattgaacagatgagggggtctcttcttgttctttgactatttttcgaatggcttgtgattttgactagttgagttttctttatttgcatttcttgaattttttttaatgataaaattgtgggttttaatattaagaggatattaacatgaagtttatgttttggtttctatattgaattaagttgaggtttttctttagaggatttttttatttctctggtttgttttacaggaaaaagagaccagcactgaccatttgttttcagatacaattcttctttcttggatttatagtgaatcatttctggacaaattttccagtttttatatcaatcaatgaagttatttactgatatttctgttt

SEQ ID NO: 10122 - DNA, 523 bp, Gossypium hirsutum
  Clone ID: LIB3828-033-Q6-K6-G8
aaaagttccttggtttcagtttctccgggcgggggggttctagtgataaaaaaacaagttcactcgtcgcaaattataagcacattcgatcttgatctggatctgactcttcaatttattcatttgtcgaaaatttcttctccaatttcgttttatttccaattaaggtcggtctggtaggggggggtctgggttccagatctctccgtttcaagtaagaatctccgtcaatatttttctacttttttagttgcaaagggaatcgaagaattattgggaatcgaatgttagtttagggattttcaattttgggagtttcgattttaagaccaaggaggttaaccaaaaagaaaagaaaagaaaagatgcatgcaaaagtggcacaatcatcatttagagatcggacgcaagaatttcagagcgtagcagataggttaagaaagtcaatctcgtctgggcagggccaaaatgggccgagtagtagtacgtcgagagcggaggaaaagagatctatggttgcgca

SEQ ID NO: 10123 - DNA, 548 bp, Gossypium hirsutum
  Clone ID: LIB3828-033-Q6-K6-H4
cgggtcgaccatgcgtccgggccgatctataatgtcgaagcgaggggggggaggtagtgcggggaacaagttcagaatgtcgctgggtttaccggtggcggctacggtgaactgcgcggacaacactggggccaagaacctctacatcatctctgtcaaaggaatcaaagggcgtctcaacaggctcctatcggcttgggtgggtgacatggtcatggccaccgtaaaaaaaggaaagcccgatttgaggaagaaggtgttgcccgccgtcatcgtccgacaacgcaaaccttggcgtagaaaggacggcgtctacatgtacttcgaagataatgctggtgtcattgtcaatcccaagggagaaatgaaaggatctgctatcactggtcccattggaaaggagtgtgctgacctgtggcctagaattgcaagtgctgccaatgctattgtttgaaaggtttccatggttttgtttgctactgtagctttgatgttatctttcaattacttacaacatgttttgtgagattttgatcagacaatgttac

SEQ ID NO: 10124 - DNA, 525 bp, Gossypium hirsutum
  Clone ID: LIB3828-033-Q6-K6-H5
gtgatatcaatattccaaggaatgtatcttgccctgtttcacccataggaagccctcttctacattcaaggtcaccgcaacatctaaacggaagaatgtctccttctcccatatctagccctcggaccacttcaggctcgtctacacccttgacaggtggcagtggtgctataccttatggttatcttaaacaatcgccttactttcaggagggtcttggtagcatgccaaagccctcaaatggactttatgtcagtggctcttcctgtcatgataataatcctgacatttttcgaggcctgcaagcaggttctcacatcttttctgaactggtgccatcagaaaatgacattttaggagctggaagatcagtccatggggaatcttatgatggacagtctgtattagctgatcgtgtttctcgacagcttctgaaggatcacgcagcaatgagcccatccctggatctaagtcccagctctcctttaccttaccggagtgttattatctaaactcagctttgaa

SEQ ID NO: 10125 - DNA, 529 bp, Gossypium hirsutum
  Clone ID: LIB3828-033-Q6-K6-H7
accgcacctaaccactcactcttcccggggaaggagagcattcattgctcgaagatctgcagaacaaaactcttctatttcatttttggcattagcaaaaaaagcctatcttaaatcaaagcgatggccgaccccatagaaccatcaacgtcatcgagcgacccgaattctattccaagggggggcgctatcttacacccgcgacgcgagcctttcgagcacggtctcctaacaatccagaagctcatattcaacgaccccgtccaagcactaacccctctaaagcaaaaattcgcatccccctcaactcaacgagtcgactcggcggccctcgctgaattgctacagatctcattcgaccattcgcgtctcgtccttgaaactctcgcttctgtcctccactcggaacccgacccgctcgtaaccgccctgccggatgatgtcgactccattggtgccgatttgcgtgatctgatcctgtttttgtatattcaatcgtataagaggcttttgccgcgctcgcacaagg

SEQ ID NO: 10126 - DNA, 544 bp, Gossypium hirsutum
  unsure (1)..(544): unsure at all n locations; Clone ID: LIB3828-033-Q6-K6-H8
cccgggtcgatcttgcgtccggggngatttcnancnccccaaanccgggggctaagagagccacacacaaaggggagataaagctgaagaaacataaacacaagaaaaagaagcaccatggaaaagggaagaagcaccgngggaaagggaagaagaaagggaagaaatccaagaagcaccatggaaatttttttttgaaatggtgttccangcttaatttctaaattatattatacatttctataatatttttatatattatatattaatttactgatgcagcaaaggtatcagctccttccagggacaactatctcattttgttttttttttgtttttggttaatatataaattaattaattaaaataatttggtngattaaaaaaantatttttaaaaaaaaaaaaaaaaaaaaaaaaaaaaaaaaaaaaaacccccnnnaagaaaaaaananaaannntaaaaaaaaatnnnnnaaaanaaaaatnaaaannntnnnnntntnnaaaaaaaaaaaaaaaaaaaaaaaggggcccccctttt

SEQ ID NO: 10127 - DNA, 519 bp, Gossypium hirsutum
  Clone ID: LIB3828-034-Q6-K6-A4
gaaccccctaaaagaaaaccagacgcaggtaaaagaagcttctatcaaagtgccattaacaatggccactctctcaattggcatcgcctcctccgcccccgccgccaccaccttcttttcgacaaaaacaaaacgaacccacttcaagctcaacatctcctgcgtccaatgggacccagaagggattttaggaaagccggggtcaggacacttagctcgtcttgaattcaaaaggcggctagagagggacgcagaggctcgagaagcatttgagcaacatttacgtgaagagaaggaacgtcgccgagctcttcgccaatccagggaattacccgatactgctgaggagacgatcgagtattttcttgacaccgaagctcaagagatcgagtttgagattgcaagattgaggcatagattagatgaggacttcttctcccacctgaaatttgagatcgggcagattcgatttgctgtttcgaagactgaggatatggaggacagattgattgaactgga

SEQ ID NO: 10128 - DNA, 529 bp, Gossypium hirsutum
  Clone ID: LIB3828-034-Q6-K6-A5
atggcggatattagtcaggatgaagaggttcctgccaatatgacattatacatcaacaatctcaacgagaagatcaaaatcgaccaggtgaagaaatcgttgcacgctgtcttttcacaatttgggaagatattggatgtgttagcatttaaaactctgaaacataaaggtcaagcttggggggttttcgaggatgttaactccgctaccaatgctcttaggcgaatgcagggctttcctttttacgacaaggaaatgagaatacaatatgcaaagactaaatctgacataatagcaaaagcagatggcacttttgtcccccgagagaagcgaaagaggcatgacgaaaagggagggaaaaaacggaaagaacaacttgatcctaatcaagctgcagcaggtttgaatccatcttatgcgggtgcttacggtgcaacacctcctctatcacaaataccctacctgggtgctagacctatagtcccagaagcacctgcaccaccaaataacattctatttgttcagaatc

SEQ ID NO: 10129 - DNA, 517 bp, Gossypium hirsutum
  Clone ID: LIB3828-034-Q6-K6-A6
cgaataaagtgttggttaaatgtctgggaatgaatgggaaattgcttgttgatgctttagctcatggcagttctcagcctgttcatcttgaaatagatattagtaactatgttggagagaatggaaatggaaattactctgctcagtataagaatttagataagttggtgagtaattggggtgaagaagttatatccaagttatatggttcggtttcgacttcgggttcatcaagcaatccatctagcttagaaacagggtcaaggcgcaatgtgaacggtgatggtgttagaataaatgaaccgacaggccctcagcctcatccgtcaggggtagttattcctcccgttaatccggtaggtggtagatatttgtttcctgggcctggtgctggaatgtatcctaccaggggtgatttcggtggcggcgacatgcttctaggaccaaatgatcctcgttggttcggtggacttggtggagatcacggtttccctggcgcacaaccgggtgttcctcc

SEQ ID NO: 10130 - DNA, 522 bp, Gossypium hirsutum
  Clone ID: LIB3828-034-Q6-K6-A7
aaaaaacagtaaggattctctgaaagggggccgagggcgaaccctcggagctctgtcgagcctccgtcatcgggttcccatgcgctcacgcgccaccgctgacttcgccgagtacggcggtcagaatacgaagcgtttcgccttttctacaggaaaaaaaggtaatctcttttatttattgggatagtattttgcatgcatgaaacgttgatatctaagaaaagaaaaaggatcacctttgttttctgacaaagtgaagaaatctgtaatattctcttgtgctctttttatttctttttcgtgtgtctttacagattacaaagaagcgcttttatagccctgtgtaaatcattacaatttgggaaagaaatctttgatttctttccatattttgcttctcttttttgctgcggttcttttcattttgcagatatcaatgagggtctggtagtaaacgggaactgacaacggcacaccggcgttgattcaggcgtcaatcctggcgtgatacggaacatggaa

SEQ ID NO: 10131 - DNA, 96 bp, Gossypium hirsutum
  Clone ID: LIB3828-034-Q6-K6-A8
tcgccgtccgcccacgccgttcgcgagatcagaagaagcagaaacagccaactcagaagctgcttcagcagcgttgccttctagcatcatgtcatc

SEQ ID NO: 10132 - DNA, 538 bp, Gossypium hirsutum
  Clone ID: LIB3828-034-Q6-K6-A9
ccgggttgttcttgctttcgtctcgagttcgagagctccgatacgagggacagggagaaggccaaaatccaagataaggaaggcgtccctccagaccagcagcgtctgatcttcgccggaaaacagctcgaagacggccggaccttggccgattacaacatccaaaaggagtcaactctccacctcgttctccgtctggggggggggatgcaaatcttcgtgaaaaccttgactggcaagacaatcactctcgaggtcgagagctccgacacgatcgacaacgttaaagcgaagatccaagacaaggaaggcatccccccagaccagcaacgtctcatctttgccggaaaacaactcgaagacggccgtaccttggccgactacaacatccagaaggagtcaactctccaccttgtccttcgtttgcgcggcgggatgcaaatcttcgttaagacgcttaccggaaagacgatcactctcgaggtcgagagctctgacacgatcgacaacgtgaaagccaaaatccaagacaaggaag

SEQ ID NO: 10133 - DNA, 423 bp, Gossypium hirsutum
  unsure (1)..(423): unsure at all n locations; Clone ID: LIB3828-034-Q6-K6-B5
cacaggggccgacagcagcaggaacaacaggaggacaacagaaaaaacgcaaggagcaaaaccagaaagggaggccgaccaggggaaagcgaagcacanccccgttattttcnacccggggggggcttcttgatcctattggagcaggaaatgcccctgatggaggcgtcctttcacaattggctcaagggaagtccattgaggattgcgtaagagctggttgctatgcatccaacgttatcatccaaagcgtctggctgcacatacccagaaaagcccgaacttaaataaagctagaccactttcctgatctcctctccgctgccgttttcaagttcccgatcgttaagaaccctctcgctagcattcgacctccgaatcctgcttccatgtcccctatttgctggtgtcattcctatgcct

SEQ ID NO: 10134 - DNA, 544 bp, Gossypium hirsutum
  Clone ID: LIB3828-034-Q6-K6-B6
ccgggtcgacctcgcgtccggcaagccttgcacaatggccaccatcagggctggggctgtcactatcccatctttcaccggccttaaagccggtgcaaccgcagctgaagttagcgccacagccaaggttgcagcctctccagtcccaaggggcagcatcaaggcctccctcaaagacgttggtgtttttgttggggcgaggggtgcaagcgtaatccttgccagcaatgccatggccattgaagtcttgctcggcagtgacgatgggggtctggctttcattcccaaagaattcagcgtaagcccaggggagaagattgtgttcaagaacaatgccggattcccacacaatgttgtgttcgatgaggacgaaatcccaagcggcgtcgacgtatccaaaatctccatgcctgaagaagagctactcaatgccaaagacgagacttacgctgttaccttgactgagaaaggaacctacagtttctactgttctcctcaccagggtgcaggtatggttggaaaagtcacagttaactgagttata

SEQ ID NO: 10135 - DNA, 525 bp, Gossypium hirsutum
  Clone ID: LIB3828-034-Q6-K6-B7
cacgtttgtagcaatactatcggcttgtgctcatttaggtttggtcaatgacggagagcggctgttttggttaatgagaaagaagtatgggattgattcgagaatggagcactacgcttgcatggtaaatctttacgagagtgcagggctgatagatgaggctttcaacatgatagtggagagaatggagtttaaggcagggctaactgtgtggggagcaatgctatatgcctgttcggttcatggaaacatacaaataggagatattgcaggtcaaaaacttttcgagctagagccagataaccaacataattttgagttattgatgaagatatatagcgatgcagagagggtgaaggatgtggaaagagttggaaaattgatgttggatagaggattataatatagagttgtctgctagtggtaaatagttaaaggtggaaagctcacctcaagaaacttgattggtgaatcttttatgccagagggccttaaaagcaaatcagtgtggggcttgtggatgtg

SEQ ID NO: 10136 - DNA, 488 bp, Gossypium hirsutum
  Clone ID: LIB3828-034-Q6-K6-B8
cgcccagctagctaaatttttatttaaaaaaacatgaagagggtttcccttattggtttgtgcgtggtgactctagtggtggtgttattttgcgggtgcacgaggcatgcagccagcgccagaaatgtgataacccctgggagtatagctcatgcttgaatgcgtacaagaagccacctccatcagctggttgttgccaaaagatgaaggaacaagcaccatgctattgcgagtacatgaagatagaagatgtcaaacgtgtttttgacagatttgagattgcgaaaatggctaaattgtgtggagtttcatattcttccacctgctagaataccgttgggtttcatttgactatctctggctggaataacctatcatctcaataaatgaaattttattcgaaaactatttttttactcataatttcgactataatgtacttgagttctttttttttttagaatgatactggcggatcgctattattt

SEQ ID NO: 10137 - DNA, 523 bp, Gossypium hirsutum
  Clone ID: LIB3828-034-Q6-K6-B9
aaaaaatttttatggcgtctgtaatcgggtctgggggttaattctgtcggtgtttttatctgtacgcttcagttcgggtgttagggtgctccaggaacagcccaatgatgaccccaaaaacatggacgctattcctcccattgatgcactcaaccctaccgatttttatggacccggggggggcattcacgaagatcatgttgtcccaaaaggtgctgaaattggtactcttggttttggttttgaaggtggtcctgataaatgttgttcttctggatgttccggtaattgtaatcctggtggtttcgttctaccatttcctcaaattccagaaatcccaagaattccagaaatcccacaaatcccacagatcccacaaatcccacaaattccactaatcccacagatcccacaagtcccacagatcccacaagtcccaaaaatcccactaatgccaggacagtcgggatgtgagagtggagagtgttgccgtcagggttgtggtgggacttgtgctgagtgt

SEQ ID NO: 10138 - DNA, 526 bp, Gossypium hirsutum
  Clone ID: LIB3828-034-Q6-K6-C4
gttgactggtgtgttggtgaagtgcgaaaactagcagctgggggtggtcattccgctgtattgactgatgcatgttctttgaaagaactttgcgagtttaggcttgcagagtgtgtgaccttatcaaatgctgcacggataggggatgttgcttctcgaactggagcagatgctttagcacgtctttgcgagagactgagggaacatcatcttcatggtggtggtttcgacgatcaggatgacatcagcaatatgaagagctgactggtcgctacgaatttcgtgttgtgaccttcattaccaaccttagaattgtaggataattgtgaatcaattcaaaatccatccactgtattggttagaacagtatagcagaaactcaaattaaaacatgaactcaaataacaggcttgtttagtatgagttggtggaacttgaaagtttgtatggcttgataattggaaggcttacaaacaaacattcacccctaacaaaatcattctgtttctttttgtattttgagctg

SEQ ID NO: 10139 - DNA, 547 bp, Gossypium hirsutum
  unsure (1)..(547): unsure at all n locations; Clone ID: LIB3828-034-Q6-K6-C6
ccgggtcgaccttgcgtccgatgatatttggaaangncnntgaggggctatctgaagcttaatttgttgcttttgtcctcttcaggtaaggaggggttaatcagttgggtatgatccatctagaagcaaatgatcatataaaggacatgttaaattgtcaataatgcatttaatggtaaatggaccatacaaatgactgggggcttatatcaatggagttcacaagtttgctttttaacatgtgctttttttaacatttttggtggataaacaggacaccgtgcgaaactagatcattattaatttatgatacttcgttgtctttatttttactttggtgctagaggctatatgggaagttaaagaattgttagtttctgcatttttgtttcgatgaggaaattttacaagatttagattttagagaattagtcctccttaccctaaagaaagaccaactgttcatcaaagtcaattttatatgtcatgtaaaggagcaacatgcaaaggatacatgtattcagtaacccaggaaaacatttcataa

SEQ ID NO: 10140 - DNA, 527 bp, Gossypium hirsutum
  Clone ID: LIB3828-034-Q6-K6-C7
acaaggcctatcactccaacccggaggaggtggtgcgccattacaatgaccacttctctaggaccatgctcgagttttatatcaccaaaagggtgttggcagaatcaaaaaagggtccctgtgaggttaccaaccacgttgacagttgctggcgatgtgatcctgactgggaaaagaataggaagaagttggccaactgtgcccctggatttgctcgaggtactacccgtggaaaggatggtgagttttacgtggtcactgaccctattgataatgctgctgaccccaagcctggaactctgcgtcatgctgtcacccaaactggaccactttggatcactttcaaagggtccatgaccatcaagctgcaacaggagctcattgttacaagtgataagaccattgatgcgaggggagccaatgtggaaatttgtaatggtgctggtatcactatccaatttgtgaagaatatcattatccatggccttcaaatccatcacattattcccgccaagggtggcaagatc

SEQ ID NO: 10141 - DNA, 531 bp, Gossypium hirsutum
  Clone ID: LIB3828-034-Q6-K6-C8
gtggaaagttaccaatcaatgataccagacgcaaagcctgggaaaagccccaaaatcagggtcaaagtggtgaaacaatcaggagagaaaacatataaatatgggaaagtgttgactttgcaagggcatatcccggagcttatcgagcatgtcactaagggcgatactgaactctttccggtcatcgttgctgcaagggatgtcagtattcaaggaatttgcaacgggaagtgtgccgatcatttacttactgaggatccccatccgcgaccatacattatagtcggtaacccagaaacggagtgccccggagaatgcggatggcctttcttcccggctgacatgggtccaaagggaccagtccttaaaccaccaagcggaaacatggcagcagatgctatggttgttgccttcgcgggtgcattggttgatgcaatcaccaacccaatgaacgatgcactctaccattcaaacaaagctaagaaacttggcccggccaccgtttgcaaaggcattttcggtcgtggcgct

SEQ ID NO: 10142 - DNA, 549 bp, Gossypium hirsutum
  unsure (1)..(549): unsure at all n locations; Clone ID: LIB3828-034-Q6-K6-C9
cccgggttgatcttgcgttcgcggacgcgtgggnacaccgaaaaagagggggggtgagctctaaccagccgcaaccatggtgaacgtgcctaagacgaagaagacttatggcaagagcaaggagtgcaggaagcacactttgcacaaggttacacagtataagaagggtaaggatagtttggctgctcatgggaagcgacggggggatcgcaaacaatcaggttatggtggtcagaccaaaccagtcttccacaagaaggcaaagaccaccaagaagattgtgctacggctgcaatgccagggttgcaagcatgtctcacagcatccgatcaagaggtgcaagcactttgaaattggtggagacaagaaggggaaaggaacatctcttttctagatgtgatgatattcatgtcaaattttatgttatgggtttttacttggaacttcaggcagaatggagttttgttaagtttgatattagtattctaatgttgtttttaagaggatattgtgttttttaaggttaatggcatcggtcacactcattga

SEQ ID NO: 10143 - DNA, 523 bp, Gossypium hirsutum
  Clone ID: LIB3828-034-Q6-K6-D4
cggacgcttgggctttcactttctcccaatagcacccccctcttgcctcatttgacaccaaaatggcgaactcagcatccggaatggcagctaacgatgaatgcaagatgcgattcttggaactaaaggccaaaagaagctacaggttcatcgttttcaaaatagaagagaacattcaacaggtcatggttgaaaaactcggtggacctaaagaaaaatacgacgacttcagtgcttgtttgcctcataacgagtgtcgttacgctgtctttgatttcgacttcactaccgacgaaaatgtccagaaaagcaaaatcttcttcattgcatggtctcctgatacatcaagggtgaggagcaaaatgttatatgcgagctctaaagatagattcagaagagagttggatggtgttcaagttgaattgcaagcaaccgatgcaagtgaaatgagtattgatattgtcaaagagcgagctttctaaactcttctttttttatcatcgttctaatctttctgcacttt

SEQ ID NO: 10144 - DNA, 548 bp, Gossypium hirsutum
  unsure (1)..(548): unsure at all n locations; Clone ID: LIB3828-034-Q6-K6-D5
ccgggtcgaccttgcgtccggaagacattatgntgggctgctggacggtgagatggcattaaatgaggctatcattgacgaaagagaacaaggaattcaagaaattcgggggcaaattggtgaggtgaacgagatcttcaaagatcttgctgtgctagttcatgagcagggaactatgattgatgtcttttggacccatgggggaaattcccaggctgccacttcacaggcaaaatcccatctcgtgaaagctgcaaagagccagagatcaaattcttctctggcatgcttgctcctggtgatattcggaattgtgcttctgatagtgatcatagtactggcagcctaatcagaaagtcgtccaagatgatcaagggcaaactcaaaagatcttcccagcagcaagaatgtggtcttctgagtaatgtgtgttgacgtttctttgcaagacatgatggctgactcgagttcacttaatagtttttcaagtatatagcatgtgattatcagtaaatgataatgatatttttggttaatctttggcggaa

SEQ ID NO: 10145 - DNA, 532 bp, Gossypium hirsutum
  Clone ID: LIB3828-034-Q6-K6-D6
cgtccgtttcatttttttttccttttctcggggaatgaagttctttaaccatcagtgaccgtagcagcatactaaaatatgggtcgtggtgggggatccaacaccaagtctccggtaatggcacgattgctgttgttgagtatctgcataggaatattggcgaaggctttttcagctcaagtggggcccccaaatgcgttggcctcaaaactggggggctattgcggaaagagtacaatgtcctgctccatgaaatgcggttatctcggctgccttgcaggctgtgtgacatctccctcgatcggatgcggcactaagtgctttttcgaaaacaccagttgccaatttggctgcaccccctttgatattcgaggccaatcagcccgtgttaagacctagagggatatatatatatgtgtgtgagcgcgcgcgttgtttatttattattaagtgtttgttattattattacaaaacaaaaaaatatgatgatacacaatgaataatgtctttgaaataaataaacaagtaaac

SEQ ID NO: 10146 - DNA, 285 bp, Gossypium hirsutum
  unsure (1)..(285): unsure at all n locations; Clone ID: LIB3828-034-Q6-K6-D7
ggtcgacctcgcgtccgaaatctttaacacagtaggatgaggcgggggggggagcaccgaacagatctagacagaaaacaataaaaccagaataaaacctagggacgcataccagaggcggcagacagaaacgtgctagggtagcagactttaccattagtctacaactatatttaaaaacttgcttaatgcgcgggggagttattgaagtatactacttttttcactttantccttacaatttcttttagtccactttaatatttaacgttatctgatttttcc

SEQ ID NO: 10147 - DNA, 463 bp, Gossypium hirsutum
  Clone ID: LIB3828-034-Q6-K6-D9
ccatcattttatgttttggcaagtctggaaggggggggtcttaaggattgaggatcgcagattggtgatttgtttattgtacctctttttaatacggcgaaggtacgtattgcccacaatgcgtgctctgtataggtattcagatatgtatttaatgtcaacctgctttaaaatggtgcggggcgagagatccatacagggatatgccgattctttcctttggtttatgattattttcatctgctcttggtttgttgtctttagctgatcagtgttaaggtaaaatctaataaaaccaaaatttacaagtacaaaaattatatatatattttttcaaaaccagaggtggagagctgatatgaaattgtttatgttaactaatgatacggtaatttgtgtattcttgtgtttgttttaactatgatattttatgtacaaataatggacatgttataattatttt

SEQ ID NO: 10148 - DNA, 526 bp, Gossypium hirsutum
  Clone ID: LIB3828-034-Q6-K6-E4
gcgattttctcgccggaaatggcaccgggggtgagtcgatatacggagccaagttcgaggacgagaacttcatcaagaaacacaccggaccggggatcctctcgatggcgaacgccggaccgggaaccaacgggtcgcagttcttcatttgcacgactaagactgagtggctcgatgggagggacgtggtgtttggacaagttgttgaaggaatggatgtggttcgagacattgagaaagttgggtctagtggtggaagaacttctaagccagttgttattgccgattgcggacaactctaaaattaaaaagacagccacggtggttcatgtctgaagttttaagcttcattttatttttgttttaaatggttagtggttttggtggttctttaagaactaaccatggaataagataggctttttcattagtttccgtcattaatgaactgaaatttcagtttaaggcaatttatggatttggattattataattacatgattttggatatttattatatttgatg

SEQ ID NO: 10149 - DNA, 557 bp, Gossypium hirsutum
  Clone ID: LIB3828-034-Q6-K6-E5
acgacgcgttctgtcttttatactggggtgcactgtgaaaaacttaaacttagatgagttgctgaggacagctgaaaattacatatttccggggaaaactctagttaaggatatcgcctacatatcgcataatatattcttgtacaagctctatgcttgatctcatttttcaaattttggcgcaccaggggagatctcccttcatactcgattgacagtatctatacactaatactaagatacacccttttactagcaaaaaaataaatcattcttcgacaagggatatgaattattattggactaaagcattatatcaatgctgttaaaaaacccactgaatacaagttgtgctgggatataattcataattcactttgcaatgataactgaagaactttactgaaaggtccaaaaacgctcggatacaaactacatcacttatgggcaaattatctggaccgctgacactattcttaagaatcttgtacgatcaaaggggatgaaaaagtacagtgcctccagaagattaccattctcaggataaatgatgaaag

SEQ ID NO: 10150 - DNA, 372 bp, Gossypium hirsutum
  unsure (1)..(372): unsure at all n locations; Clone ID: LIB3828-034-Q6-K6-E6
ccgagaaattttagngcaaanccgagggagggtggggattgaccaacaaaagcttcaagtgacgatttactcaccgccatttgtgacgcggggggttgctatgaatcaaagattgattcaattgggaattgtggaatttaacaaaaatgttgccataaatacaaacatctttgttcttcaagggggggttaatagcaacattgcaccacctggttattacatgctctttgtgaactacaatggagtaccttgccgtcgatcaatgtgggttcgaattttaccttagatctttcacaacaagcattgaattgtcagagccactatatgtaatacgaatcattgttcacgttttgtttcacaagttgttatttg

SEQ ID NO: 10151 - DNA, 527 bp, Gossypium hirsutum
  Clone ID: LIB3828-034-Q6-K6-E7
gcctactgcagatgtagctgagattcacctcccttgtatcaatcttgagaaagcagaaattgtcgttgatgtcctcataaagaacccaaaccctgttccaatccccctcgtcgacattgactacctcattgaaagtgatggtagaaaactcctttcaggcttgattccagatgctggaaccatccatgctcatggtgaggagactgtcaaaataccagttactttgatatatgatgatatcaaaagtacatatgatgacattaagcctggcagcatcattccatataggctgaaagttgatctcattgttgatgttcctgtttttgggaggttaactttacctcttgagaaaactggagagatccctataccttacaagccggatatcgatatggagaagatacactttgagagattctcttgggaggaaactatagcagttcttcatttgaaattggagaatatgaatgactttgacttgggactcaatgcccttgactatgaggtctggctatctgaggtcagca

SEQ ID NO: 10152 - DNA, 558 bp, Gossypium hirsutum
  unsure (1)..(558): unsure at all n locations; Clone ID: LIB3828-034-Q6-K6-E8
ccgggntcgacccatcgcgtccggaaaagatttgggtgatgaatggataggtggccagggggtgttaaaagccaaaagcagagattccaatggatcgaaaacgaaatcaggataaccacacaaggcagaataaggaattatattacttatgctactactctactcttagagaaagggtccaatgagatagttcttaaagcaatgggggggggtattaataagactgtgatgattgcagagctaatcaagacgagagttgctgatcttcatcaaattacttcaattggttcgactgatattacagatatgtgggaacccctagaagaaggcttgctccctctagagattacccgtcatgtatcgatgatcactgttacgttatcgaagaaggagctggatatgtcttccactggatatcaaccacctcttcaggctgatcaagtgaaacccttaaatgaatacgaagatgatggagctcctgagccttcaccaaagacacgaggaagaggacgaggtggtcgaggaaggattagggctaaaggggaatataatggtgat

SEQ ID NO: 10153 - DNA, 524 bp, Gossypium hirsutum
  Clone ID: LIB3828-034-Q6-K6-E9
aaatccatgtatgaaacagcctcttagaggtagagcgttgaatgaaagacaagccaatgtatccaagcattctgaaaaaccagatgcaggcaatgcggagaaactgaagctaaagcctctgaataaagttgaaggagacacagaatcatccccgacggcagctgatgctaaagttcataaggggggtactcttccaaattatggtttcagtttcaagtgcgatgaacgggctgagaaaaggaaagagttctataataaactcgaggaaaaaattcatgcaagggaagtagaaaagagcaatttgcaagccaagtctaaggaaactcaagaagcagaaattaagatgcttaggaagactttgaaattcaaagcgactccaatgccaagcttctatcaggaacctacacctccaaaggtggaattaaagaagataccacctacaagagctaaatctccaaagtttggtcggaggaaaagctcaactccttcagacattgatggtaacagcaataacagtcaccaat

SEQ ID NO: 10154 - DNA, 504 bp, Gossypium hirsutum
  Clone ID: LIB3828-034-Q6-K6-F4
ccaaatgctgcccatcttccaaacaaagaaccacaatcccaaaattaaaattgctagggttctttacatctgccagattcaccattttgtttggcaatcgacagtataccaccatgaagagatccatgccacgtccatgaaaatattatttggccgtacagtggaggtgtgcgcgggaggaatcactcgtgggagttccaatttttggcctattctggtacattccagaagctcctagtgctgctgagaattttgggtgtattaggcctcgagttttagggctaattcttattgggtttggggacttagaatttgggcatctgttatgtaattggggctaaaattttggagtatttggttagaaaatgagtttattagaattgggttttaattttatgtaaagggttttggggtatttgtttaattgggttaggtgttttgtaaatgggcccgggcaaaatgggcctattataaacaggtgatctctcgataagtgattagttt

SEQ ID NO: 10155 - DNA, 545 bp, Gossypium hirsutum
  unsure (1)..(545): unsure at all n locations; Clone ID: LIB3828-034-Q6-K6-F5
ggtcgaccttgcgnccggaagattttttnccaggagcttaacggggaaggagtttataagatcatcctgatcagagaaatcagctgagacagaatggaggtgggggttttctcgagctgagccaaggcacaagcaggaaatagtgaggttgctgaagcaggatggtgaagtggttgcaatgttttttgatggagtgggtgatgctcctgccttaaatttggctgatattggagtagcaatgggcatcaccgggacagaggttgcaaaggaggcctctgacatggtgctagcagatgataacttcagcactatagttgctgcagttggtgaaggcagatccatttacgacaatatgaaggcttttataaggtacatgatctcctccaacattggtgaggttgcttccatattcttaacagctgctttgggtattccagaaggcatgatcccagttcaacttctctgggttaatcttgttactgatggacctccagcaactgctcttggattcaatccccaagacacagatataatgaagaagccta

SEQ ID NO: 10156 - DNA, 527 bp, Gossypium hirsutum
  Clone ID: LIB3828-034-Q6-K6-F6
gaaaaagtcagaaagagagcatgagctaaaatctcgttttgagcaaactgtgaaggaagctgctgataaacttaagggtatgaatttatatgttaaaaacttggatgatagtattgatgatgaaaagctgaaggaactgttttcggagtatggcaaaattatttcgtgcaaggtcatgcgtgaccctagtggagttagtaaaggctctgggtttgttgcattttctacacctgaagaagcatcacgagcccttgctgagatgaatcataaattggttgttagcaaaccactttatgttgcacttgctcaaaagcaagaagagagaagagcaaggctacaggctcagttttcacaaatgagacctcttgctatcccctcggttgctcctcatatgcccatgtaccctgctggtgcaccaggtcttggccaacaatttttatatgggcaagcacctccagctatcattcctcaagctggttttggttatcaacagcaactggttcctggaatgaggcccggtggcccta

SEQ ID NO: 10157 - DNA, 529 bp, Gossypium hirsutum
  Clone ID: LIB3828-034-Q6-K6-F7
gcgagggtggcattacgttgctttctcttatctgattctttgcgtctacatcatatctttcagtgcctgagccaagcgccgatcacctcttttccctgccatcaatccattccattgccttccatcctaaaacaaaacaaaaataaatggagtcttgtccttctataaaaaatatcctcctgctggattccgaggggaaccgtgttgctgtcaaatattattccgatgagtggcccaataacagtgttaaggaagcctttgagaagtctttattttcaaagactcaaaagaccaatgctcgaactgaagcggagatagcaatgttcgagagtcatatcattgtgtacaagtttgttcaagaccttcacttttttgttactggggctgaaaatgaaaatgagctcattctggtaactgttcttcaagggttttttgatgcagttggccttcttctaagagggactgtggacaagaaagaggcactggagaacttagatctcattttgttatgccttgatgagattgtcga

SEQ ID NO: 10158 - DNA, 525 bp, Gossypium hirsutum
  Clone ID: LIB3828-034-Q6-K6-F8
gggccaccccgacaagatttgcgaccaggtttcagatgctattcttgatgcatgcctagaacaagatccagaaagcaaagtagcttgtgaaacttgtaccaagacaaacatggttatggtctttggcgagatcacaaccaacgctaaagttgactatgagaaaatcgttcgtgatacttgcagaggtatagggtttacatcagctgatgttggccttgatgctgacaactgcaaagttctagttaacattgagcaacagagccctgatattgctcaaggagttcatggccacctcaccaagaagcctgaggaaattggggctggtgaccagggtcacatgttcggttatgcaactgatgaaacccctgagtttatgcctctaacccatgtgcttgcaaccaagctcggcgccaggctcactgaagtgaggaagaacaagacatgcccatggctgaggcctgacggtaaaacccaagtgactgtcgagtatcgtaatgagggtggagccatggtccctattcgtgt

SEQ ID NO: 10159 - DNA, 526 bp, Gossypium hirsutum
  Clone ID: LIB3828-034-Q6-K6-F9
ccttcccgtcttcagccggaggtaagggatgggggagcataacaacgttgtgccaaatgggcacttcaaaaagcactggcagaactatgtgaaaacctggttcaatcagccagcaagaaaggctagaagaaggattgcaaggcaaaagaaggcggtaaggatctttccaagaccaacttggggacctcttcgcccaatcgtccatggccaaactttgaagtacaacatgaagttgagagctggcaagggtttcactcttgaagagcttaaggctgctggtatttcaaagaaacttgcacctaccattggtattgcagtcgatcaccgtcgtaagaacaagtcccttgaaggtcttcaagccaatgttcagaggcttaaaacttacaaggccaaacttgttgtcttcccaagacgagctcgcaagtttaaggctggtgattcaattgctgaggagcttgcaactgcaacccaagtccagggatcatacatgcctatttctcgtgagaagccttccgtggagcttgtg

SEQ ID NO: 10160 - DNA, 75 bp, Gossypium hirsutum
  Clone ID: LIB3828-034-Q6-K6-G4
aaaaaaatttaaaaaaaaaaaaaaaaagaggaaaaagaaaaaaaaaaaaaaaaaaaaaaaaaaaaaaaaaaaaaa

SEQ ID NO: 10161 - DNA, 527 bp, Gossypium hirsutum
  Clone ID: LIB3828-034-Q6-K6-G5
cccacgcgtccgctctttcatttcgtcttcgtcacagaagcaattagacataaagagtgtagaggaaagcaaaagtaacatttcccaaaccaaactagggttagggttatccctaatccgcataaagatttttttacacgctctattcttgctacttaattatcaaatatgggcgcaccaacagactcagccctcgatctcgatgaacagatctcgcagctcatgcaatgtaagccactttcggagcagcaggtcagagcattatgcgacaaggcaaaggaaatattaatggaagaaagcaatgtccagcctgtaaaagcccctgttacaatttgtggtgatattcatgggcagtttcatgatcttcaagaactttttcgaattggggggaagtgtccggatacaaactacttgtttatgggagattatgtggaccgtgggtactattctgttgaaactgttacgctgttggtggctttaaaagtccgctacccccagcggattaccattctcaggggaaatcatga

SEQ ID NO: 10162 - DNA, 528 bp, Gossypium hirsutum
  Clone ID: LIB3828-034-Q6-K6-G6
gcccctttttctcgtacgatcttagcgtgactgggtgatcacaaattccaaccagtggcagagatgaactttccggaaactcctgtagattatcatgttaacggagttctagcaggtcctagagctggatatgacccaaaccaaggtagttgggcttccacttctggcccttgtgctggggcgatgtttgatgagccattatatactggacaactaaactgagatgcagaagagtgatgctacaattcatttcatccactaagcaaactatggagaactatactatacaatgcggaattaaccgaaaatcctcaaaaattgcctagacattttgttatcaccaagtaaaactcgtactcggatgatgtgatgatagctcgactgcacgacatatggttaccttaatagtggtaaaatgcagaccaaatgctgctaactccaatcaaatgaggcaccacatttctgtatactaatatatttagtagtagattttctttttaacttatttttgttttcaccttttgatta

SEQ ID NO: 10163 - DNA, 367 bp, Gossypium hirsutum
  Clone ID: LIB3828-034-Q6-K6-G7
cggacgctgtgggaaaaatcccactagtgcgaggggggtcgggatgtgagagtggagagtgttgccgtcagggttgtggtgggacttgtgctgagtgtggtcagcccaggtgcgcatcaggatgttgccaggctgaaactgtaaagagcaaagggatagaagaggttatggacagtgaacgggggccaccaaagtagagagatgataccatattaagatgaaataacgaggaagagttggttgtcgtcttattaattatacaaaataagaagtaatgatgttgcagaagggtttgctataaaatcctcttggacaaaaagagtaattatgaagaataaatagctcaaaacaatattcgatttgcaat

SEQ ID NO: 10164 - DNA, 527 bp, Gossypium hirsutum
  Clone ID: LIB3828-034-Q6-K6-G9
cttttccttacaagttgggtcaacagggagtgtgaggaactcgatttcggatggggcaacccgcaatgggttgctccgttcggggaagccgggtctgagttcaataacaatgtggttttcattgaaacaaagtgtggcaaaggcatcgaagcttggataacattggatgaaaagagggtgggggtgttggaaaaagatgcagagttcctcaaatttgcaactccaaaccccgagatttcaagcctttgatgtgattgtgttcaatttctaatgcttatcaaatcttaaatctgtcgaaataaatggtttaattttaaatctaaatattttatgtttcgttgggagtttttttttaatcaatcattgttatgttccatggcgtggttcttatattacatttacgcttcactaaaaagtggactatttaatggttaaaatatactattagtccttacatttctatagaatttgagatttattccatgtgctttaaaagttaaaatttcaatcatcctgcttttttattt

SEQ ID NO: 10165 - DNA, 527 bp, Gossypium hirsutum
  Clone ID: LIB3828-034-Q6-K6-H4
cagaagttttaaaaatggaatgtgttgttcaaggaattatagagacacagtatgttgaagcactcgaaattctacttcagggtctttgtggggttaataaagaacgcttaagagtccatgaaatttgccttaaaagtggcccaaatcttggatttgttgcttcagaggtcagattattgggggatcttgagcagtctgaacctacatggactgttaaacatgttgggggtgcattgaggggtgctggggtagagcaaatttctgttctggttaggagtatggtagaaagcaaagcaagcaagaatgtgcttcgattattttatgcactcggatacaagttggatcatgagctgctgagagtgggaatcacctttcatttccaaaggggtgctcagataacagtaactgtttcatctgttaataagatgctaaaactgcacgcaaccgatgaggctgtgccagtaacacctggtatacagctggtagaagtgaccgcccctgcaacatcggaaaattataatgaagta

SEQ ID NO: 10166 - DNA, 543 bp, Gossypium hirsutum
  Clone ID: LIB3828-034-Q6-K6-H5
gggtcgacctcgcgtccgggagacctttgcatgaagatggggtgggaatatggctaaataatttgggtttaggaaggtacgctccactgttcgagatccatgaaggggatgatgaggttttgccattgttaacattggaagatttgaaagatatgggaataaatgcagttggttctagaaggattttgttttgtgctgtggggaagcttagtaaagggttttcataacgtttttgcagtgatggagatatttatccgccattgcaatgtaagtttaagcttgtattagctctttctctgtttacattaacatttggtggagtgaagtaggagaatcattagggttttttttgtaaaagtatcattgacgagtctgattgtattttgacgttttcactcatagcaaattaatccctatacattatatcaaagagtaaattgtccaattctatggtaaaaaattggtctttgttctgtggcaccaatttttaataataaatattgatgaaaattttattagaagagactaatttgctctttaatc

SEQ ID NO: 10167 - DNA, 531 bp, Gossypium hirsutum
  Clone ID: LIB3828-034-Q6-K6-H6
ttgcgtccggtgttacctcactgtgagcgaggaatgccagaggtcagttgaaaaggccaagaggaagctctagaggtctcatcgctgagaagaactgtgctccactcatgctccgtttagcgtggcactcagctggaacttttgatgttaagaccaagaccggaggtccattcggaaccatgaagcatgcgggtgagctcgcacatgctgctaacaacggcctagatatcgccgctagacttctcgagccgatcaaggagcagttccctaacctcacctacgctgacttctatcagcttgctggtgtcgttgccgttgagattactggtggacctgaaattcccttccatcccggaagagaggacaagcctcacccccctcctgagggccgtcttcctgatgctaccaagggttctgatcacttgaggcaggtgtttagtgctcaaatgggtctcagtgaccagcacattgttgctctttctggtggccacactctgggaaggtgccacaaggagaggtccgggtttgagg

SEQ ID NO: 10168 - DNA, 412 bp, Gossypium hirsutum
  Clone ID: LIB3828-034-Q6-K6-H7
cacaaattcacaaattccactaatccggggagcgacaagtcccacagatcccacaagtcccaaaaatcccactaatgccaggacaggcgggatgtgagagtggagagtgttgccgtcagggttgtggtgggacttgtgctgagtgtggtcagcccaggtgcgctttaggatgttgcgggggtgaaactgtaaagagcaaagggatagaagaggttatggacagtgaacccagtccaccaaagtagagagatgataccatattaagatgaaataacgaggaagagttggttgtcgtcttattaattatacaaaataagaagtaatgatgttgcagaagggtttgctataaaatcctcttggacaaaaagagtaattatgaagaataaatagctcaaaacaatattcgatttgc

SEQ ID NO: 10169 - DNA, 544 bp, Gossypium hirsutum
  Clone ID: LIB3828-034-Q6-K6-H8
cgggtcgacccttgcgtccgctgattttttccaatccggtattgagggagagtgggggagcaggagcagaagtgcgagtcctaagaggaccatgagtaagagtatgagtattagtccatggaggactcatagccggagcccaagtcttagccgaagccgaagtgtgagcaggagcccagtagcattgttgaatcccggggggtttctagaaagaagtttaagcaggagtcctgctagaagcatcagaataagcccatcgaggacgagaaaagatagaagcatcagtaggagcccagttagaggacattctagaagaagcattagcaggagccctgtaaggtccctgttgcggtcccgaagaagcccaagtaggagtccactcaagtcaacaagaaaatcaattagtagaagcccggttagactttcaaaaagaagcacaagtggaagtcctgcaagatctcggagaagcattagcagaagccccagaagatctaggagaagcattagcggaagtcctgtaagatcttctaggagaagcataagt

SEQ ID NO: 10170 - DNA, 535 bp, Gossypium hirsutum
  Clone ID: LIB3828-034-Q6-K6-H9
ggtcgacctgcgtccgaaaaaatttggcgtctgaataaaggggcgtgttgattatgtcggtgtttttatctctaagcttcagttcgggtgttaggttgctccaggaacagcccaatgatgacctcaaaaacatggacgctattcctcccattgatgcactcaaccctaccgagttctatggacccggtgggggggttcacgaagatcatgttgtcccaaaaggttccgaaattggtactcttggttttggttttgaaggtggtcctgaaaaatgttgttcttctggatgttccggtaattgtaatcctggtggtttcgttctaccatttcctcaaattccagaaatcccaagaattccacagatcccacagatcccacaaatcccacaaattccactaatcccacagatcccacaagtcccacaaatcccactaatgccaggacagtcgggatgtgagagtggggagtgttgccgtcagggttgcggtgggacttgtgctgagtgtggtcagcccaggtgcgcatcaggatgttg

SEQ ID NO: 10171 - DNA, 515 bp, Gossypium hirsutum
  Clone ID: LIB3828-023-Q6-N6-A1
atgtgaatattctttatcgatggtagatggattacttagggtccaagtaagcttgaaatggtaaacttgacatttaaggttcaaaaaggtacacacagcctgggacacacctatgtcacttggccgtgtgcctcacatggtttgaggcacggctgtgtgttttaactcagtgtgttacaaagcctcgcacatggcctgcaacacgaccgtgcgtcacaagttagagagttacacggtctggcacacggcctacgacatggtcttgtagcccaactcaatgagttacaggggtagggacacagctgagacattattgtgcgttcctatttcaaatgttacacgggctggccacaatgtcgtgtgtcctctattttgaattttttcatatttttcttaaaacttctatttttgtttcaaattggtcccaaattgcctcaaatgttagggcttgaaaggctcgatttagtgatggtatgcttatgtttggtatgttttgaatgtgatttatttaatta

SEQ ID NO: 10172 - DNA, 529 bp, Gossypium hirsutum
  Clone ID: LIB3828-023-Q6-N6-A10
aataataatgactcaattcttattatgggctaatgccgagcttttaaagaagttgaagtgaaaaacatattatagttctgacgaatgggtaaagtctccatcttcttgactaagctcaaagtctccatcttcttgactaagctcataatagcccatctctttaagaattcgagtgcactgaggaagagctatgtccttcttaaacccaagattgttggcaaaacgcagtttattgctgagaccatcaaatgtggtgagaaccaccctggattttctccacgcttcggtgggatcactgcaatcagcccttggactcctcacaaagcaatgtcgcagtctgattcctcataatcgccttccactatgatgtggtagtctccgtgactgtcagccactatttctgggctctggaatgtaatcgcttcgttggtacggttcctacattccaatttcactactgctccactaatgggttcgctaagtttagtctcgaattcaacacggcaagtgtcgccggacgcgtgggtcc

SEQ ID NO: 10173 - DNA, 503 bp, Gossypium hirsutum
  Clone ID: LIB3828-023-Q6-N6-A11
accaaaacgcaaaaaaacagcatgatttcataataaataattccgcagcttcaacgaaaatcataaaagtttcgagccaccttgggaaaaccaaagggggcacccttttgacaatggcaagatacagtagtaaattaaacaaaaccagataacgctagagaccacctgccatagctatgccaccggctgtcaagcacccaatactgagaacaggtaccagacaacaatggccccacactttaacatgcaaaaccaagcaaaagaccaactatttcataaatgataaaggctatcaaactattattatcataataaaatactccatctgcggaaacttcattaggtttagccagcacgggtcacttcttcttagcagcagacttggggaccttggcaccggttgggtccttcttctcaacattcttgataacaccaacagccacggtctgacgcatgtccctcacagcaaaacgacccaagggggggtactcgggaaaggtctc

SEQ ID NO: 10174 - DNA, 528 bp, Gossypium hirsutum
  Clone ID: LIB3828-023-Q6-N6-A12
attctaaagcataaaaattcatcatagatttagatgtgagtatcaaaaactgagcatgagcatgacattggtatgtatgtgtgtgtatatatatcgaatgcaagagactaaacatcaacaatttgacaaaaacaactttcaactttatctacctaaacaaactagaatttaacagtcattgccaagaattttccctaccaagttcagagacgggtaataaaacggtacccgactactgctgtttgacttcggctttcttcttctgccaaagcctgtcaagagcgctatcagcatcgccctgagcacggacaaagccgcaaagagcaaaggtggagaatgtgccagtgtatctgccaagctcatccaaatgaccgacattgatctgcacggatgcgtgatcctttgaggtgatgagcctgttagtggccgagcattttcggggaatgtaaagatccatattttgaccttcttcgttctgcatctttgcaatttgctaaaccgaacaagaaacgcaaaaagctcaaatca

SEQ ID NO: 10175 - DNA, 549 bp, Gossypium hirsutum
  Clone ID: LIB3828-023-Q6-N6-A2
ctctaaacggccgggggggggttgttttttttataaaaccaagcaagaccattggtgatttttaatgtagttagtagcacaccatttttgacacttcaacgaaccttatatttcaggttaaaaccttttcaagttcataacatgtttcctttttttcaagctacggggggggggggccaccaagtaacttgcaagacaagaaatgagaaggaatgggttagggcgaggggtttgtttccaaaagacaagcttcaatacaactttaccggtagcttcgataggcagggttgtacatgcagctctctgcatacttcacaagatccttaggccgaggctggcgagtagccaaaccaagttcatatgctttagctgcaacatttgcggcaatattggctgaaatctgtctgatgtttttgaatggtgggtaaatgagtcccttgtcgaagttctcttgcgtcacttgtgcagccaaagcttccgaggctgccagaagcatgtcatcatgaacacggatggcaccagacattatcaaaccgagaccaaagccag

SEQ ID NO: 10176 - DNA, 547 bp, Gossypium hirsutum
  Clone ID: LIB3828-023-Q6-N6-A3
gcgggggggtggtttttttaaaacaatctccatcaatcatcttaatatgaactcattgcatagcttcaaaagattcaattcaatatttaaatcacacacaccacacagtaaccctcctttaactgtataagggaaaagacagttccacaacgaaacggggggggggttcaaactccatattgttcgatcgggttttgacttgggacttttgagaaaacacagcaccaacagacttagatgattgaatatccaaaaaaaaaaaggcctttattacagaagagttcccttttcaatcaggacgaccaacaaatatagagcatttaaagtttccttaatacttttttcttggttctgtatacaaagaccataaatcaagagaaagcaagagagtatatgacgtggcaagtaccgagagagatatttaggagtaggtgagagggcggtccttggcctcgttgggattgtcgtcatcgtcagggtcgttggtggagaggttaacgcaggagaagcgctcgagagaggagaaaaggcggagaccacagtggcg

SEQ ID NO: 10177 - DNA, 518 bp, Gossypium hirsutum
  Clone ID: LIB3828-023-Q6-N6-A7
aaacacaaacttagctaagctcgatttaagtataacacagtaataatgtttgaacatcaaactttattcgatacagtaactaaagatgtggttcactgaccatttcagcaccacaaaacacagggttcattatataacacccacagttccatagaaatgaaaattacgacaagaagcagaagacacccaattagaaaccaccacggaggcgaaggacaagatgcagagtggactccttctggatattgtagtctgctaaagttcgaccatcctccaactgcttcccagcaaagatcaacctctgctggtctggaggaatcccctccttgtcctgaatcttagctttcacattgtcaatcgtgtccgagctctccacctccagggtgatggttttcccagtcaaagtcttcacgaatatctgcatccctcctctaaggcgcaaaaccaaatgcagggtggattccttttgaatgttatagtccgcaagtgtcctcccatcctcaagctgctttccggcc

SEQ ID NO: 10178 - DNA, 525 bp, Gossypium hirsutum
  Clone ID: LIB3828-023-Q6-N6-A8
gtgaaataattccatttaaatctactatataatcacatcaggatcgagtaaatccatcttccaatacacaatctccaaacatcaacttaaagcaaaccctaactaaaaagacaaacgtacaaatccccttcttcaaggacgagaggaaacttagtcacagctttagtcccttcagaaacggcatgcttcgctagctcaccgggaagtacaagcctaacagcggtctggatttccctagaagtaatagtaggtttcttgttgtacctcgcgagtctcgaagcttcttgagcaagtttctcaaagatgtcattgatgaaactgttcataatgcccatagctttgcttgagataccgatatctggatgaacttgtttaaggaccttgaagatgtagatcttgtaggtttcggtactcttcttggtcctcttcttctttttgtctccggcagctgctccgccttccttcggtagctttttacctgcctttggcttcttctccggcggagctttctcagctactgttttc

SEQ ID NO: 10179 - DNA, 525 bp, Gossypium hirsutum
  Clone ID: LIB3828-023-Q6-N6-A9
caagcataattcaaactaaataaaattcatgataatgggccggtacgtacaactgtacacaagttcacccagtacagcacacaccgctgataaatcattcgaagcatatttacagaaatttgattattcttctttcatctaaaaaccgcagcccttaaagaaagtgaccatttcagcccctccctttaaatttactaaagtaaattaagctgcttcattaactagctttcaatcaccccatatgtacaaatatgtcccaacatctgctcaactttttcacatatacagatagcagcgttcccctccctccccaataaaagctatctacagaacatatcaacgccaccataaacataattactactcagggcggaagtttaccagattagggagaccagctgactgaagcctccttatgtcatttgctgtgaccttgcaagcctccaaggtcagagatcttaagttcttcaggggctttagatgtctcaatcctgcacttgtcacacgggaatttgaaacgttcaa

SEQ ID NO: 10180 - DNA, 434 bp, Gossypium hirsutum
  Clone ID: LIB3828-023-Q6-N6-B1
gaaaaaaaaggggaggttaaattttttttttggaacaaagtccattttaaaaaaggggggggggggctttaaaggaaaaaccttttttttaagggggagaaataaacccctatttttttaccttttacgggaatttctttccaaaaatacctttttacaatatttttacattttttttttttgggggggttgaaaattctattaaaaaaaaatttaagggccccattttgagaggggcctttttttttaattattttcccttaccccgacctttggttacaaaagagattatttttgaaaaattgggacatgaagggcccccttttttttttttttgctaatagggggggaaatataggatgggttgggggggattaataccctttttttttggtttttagaattttggggggggattttttttgggcttgccc

SEQ ID NO: 10181 - DNA, 518 bp, Gossypium hirsutum
  Clone ID: LIB3828-023-Q6-N6-B11
gagttgattcaatattacatctcgtcataatgattcttttggctcattactcgttcgttacacaatttttgaagaaaagaatcacaaagttgcggctcccactaattattttatttaagtgggattaatcacataaaaaaaggaggggggccacttgaattggactccagtaaagcctctgccagatggaggtggtcaatgtctaagatttcacatcaaagaggaggtccttgcacttacacctttgagttcagcagggactctgcatttcttgctgaaccagagaatagaacagatcatgtcgtcactttggcccctctactatagggaaaatttctagttgattttatatcttccatcatttttatttttggtctcttcactcttgctcaatgaatgccatattttgatttgttgctttttatgaaatattgctatgctgaccgatttatgaaagaactgatttttgatatacaaaaatggataaatgggaatcgactaaaaactatttaatgcca

SEQ ID NO: 10182 - DNA, 534 bp, Gossypium hirsutum
  Clone ID: LIB3828-023-Q6-N6-B12
ggtgaaaaaccgtgttggcacgaatctattctcaaaaacattaagcgtacaacaaaatttatatattatacaaactcgggataattgaaacagtgttggaatgatctcaacctgcggattgagcaataaataagtggaaaatgtgaagccgtgttaatggtgcaatctcaggcatcaccaaaaccaactgtagcggctatccacagccttcataacagtcggaactaagggcattcgtccaaactcatccacaaacttgttgacacattctgttcttctttcactatgacctcccaggctgctaatgccagttgaaccgatctcaaatattttccctttcacccaaatgggaggagcatctgtggcatttgcaacaagaaatgacatcgcaatatcttcacaattcctgttcttggttatgtattctttaagtgatgcaggcatctcatcagtgtaaagtttgagatacttcttgtggaagaaggcagcctttgagagtaccatgctgtatgtaccagtccaccaaaccgacca

SEQ ID NO: 10183 - DNA, 546 bp, Gossypium hirsutum
  Clone ID: LIB3828-023-Q6-N6-B2
gcgggggtttttttttttttatgactaacctatcatatcttcatcattttcatttcaccatctcaaaaaatacggacatgcagtaattcatgttagcgaaacattggcatgcaggcgagctcagagatcaaatcccgtgttacccgaaacagggggcgggacagcaccaatatcttcttccaacttagaaccataaacaagccaatgatgtcctagtttgcttaaaagcaggccagtgccttgatcatccaagctcctatccctcccctgtctcggctaaattcatcacttttaatgcatcctcagcttttattttctgagggacataatctgatagaaagtcatatctcttctgttcatggacaactgttgataggtgcttgtaactaagtgatttcttgcgatctttaatggagcatttgtatccatcttcgcagaacttttcaagaaacaattccgcggctttgttaacaagaaaaacaacatcttggagaaacagccatatgtgaatcttcagtcttgattatcctcttgattctggtcatt

SEQ ID NO: 10184 - DNA, 515 bp, Gossypium hirsutum
  Clone ID: LIB3828-023-Q6-N6-B3
gttacaagacatgaaggacgtgatagtttattgatcaaaaaaagtctaggaagtttattaagatatctgacattaatataaaactaagtaaatgggaatccttaattataccttgtctatcaggtattggcataacggggattaggctattctcaagcccggctttcgttatactatataattaagaatataaagctaaaatatgttatcgctctccacttcatcaatttaccgtaacttcctcataatgctactaaacttgcgatcaatcctataaccggtgcaacgcctacccttaaccacactactctagaagaagctgaaggcgtaggctcttcagcgtcatcgtcgtcgtcggaatcgggctcaggaggcgatttcgacctggacttcgccttcgccttcccgggagattcagccggcgattctgatggtgaaggggactccgcttcatcttcatcctcctcttcctccgatggaccaggggaactgggggactttttgggagcagcggc

SEQ ID NO: 10185 - DNA, 487 bp, Gossypium hirsutum
  Clone ID: LIB3828-023-Q6-N6-B7
ccacaaccacaaccattgtagaatttacttggggtttataaaacaaagtaaaaaaaaaagggatccagagactttatttttggactaaccatgaccaaaatcagggaattcagcaaaaacatgcgaagcccattgtttgcaaaagctattattttaaactaatatgtttggctcactagctagggacaaataatttattttgttcaaaataaaaaagcttaaaacttcatattttcaaccgcatcattttttttgaaaaacaactttttaaaatatgcagatgcataataataccgttgaaagacaaatgaaatacccgagttcgacagaacaaagcagttttaattttcccttgaacttgctgctaagggaatcgaatcttggtacgttaatgacattcccataaaatgccattgggagattagaaaataaaagcttttcggctaccgaaaaaaatcctttggggtaattttatcaacgaccttca

SEQ ID NO: 10186 - DNA, 474 bp, Gossypium hirsutum
  Clone ID: LIB3828-023-Q6-N6-B8
aatacaaaaattttcagtttgatttgggcctcatggacttgttccggagtgagcggactaaggggactttccttcttgatgcttgaaaaaaacctattggtacgaccatcgggggggacctttcgatccctttaccatgggtctcttagcaacaaatggcagactttaataggcactacgtcgcacatgacttcgtcttgatacttgccgatagaaaaggcgatgcccacttgttgagggaccttaaattggccttcgttgctaagcccttggagttgataagggcgttgataccagtcataaaggcccaatccaagttcaaggagcgtgatgggctcaaattccacaaggcccaataacgagatcaaagggccgacaaatgcgggccaaactaaatgggaccattcaagagcttgttagcaaggccttaaatgcatacacgaggagaacaggaaaatcaagattcactttctt

SEQ ID NO: 10187 - DNA, 407 bp, Gossypium hirsutum
  Clone ID: LIB3828-023-Q6-N6-B9
acaaacaaatggtccaaaatattttatttcattaaatacatttggaactcaagcttttctcaccctctctctccccatacaccagaattggatacagatttataagcttatttaaattaactgctgaaaggtggaggccttggcatgccttgcacgatgccgcaagtcaatacaccttccggcaagttgtactcatccttgagggatcggttaggggaaataacactagcataaagctgttgcccaaggtaatgcctgtcccatatctccgacctcaggttccacatcccgcagttgtcgaatgtcaataggattgctgaccaggagttggggaatacctgtatggtgtgtctgctcacggcgtcgagaagattgtagttcatcctcttctcaggactccatttccc

SEQ ID NO: 10188 - DNA, 407 bp, Gossypium hirsutum
  unsure (1)..(407): unsure at all n locations; Clone ID: LIB3828-023-Q6-N6-C1
aaaataaaaatgaaacaaaantttattaatnaaatnaacagaaaccagnaacacataccataccaaacagcatattgtgtttncatggtagtctaatagtctttcacttattttaaagaaaagtactcttttatttttgcatttgatcaagacaggatcttcctttgcctacattgttcacaaattacaaccaaaaagcattaagcaaatcgaattgttactggataaaaccgagaagggcacaacaacgatccaaaccatctttaaagctagatgggattaatgatgaccgtgttgctcagcatgcttnttgtgctcgaggtggcgtcgctcgttgggaagagcaacaaggtaagaaaagatcattccaccgaaacagacatggtagagaggttcgatagaatcag

SEQ ID NO: 10189 - DNA, 499 bp, Gossypium hirsutum
  Clone ID: LIB3828-023-Q6-N6-C10
tttttttttttttttttttttttttttttttttttttttttttttttttttttttttttttttttttttttttttttttttttttttttttttttttttttttttttttttttttttttatttattttttattttttttttttttttttttttttttttttttttaaaaaaaaaaaaaaaaaaaaaatttttttttttaaaaaaaaaaaaaaaaaaaaaaaaaaaaaaaaaaaaaaaaaaaggggggaaaaaaaaaaaaaaaaaaaaaaaaaaaaaaaaaaaaaaaagaaaaaaaaaaaaaaaaaaaaaaaaaaagggaaaaataaatttaaaaaaaaaggggaaaaaaaaaaaaaaaaaaaaggggggggccatttttttttttttttaaaaaaaaaaaaaaaaaaatttttatatggagaggggaaaaaaaaaaaaaggggggaaaaaaaaaaaaaaaaagggaaggtgataaaataaaaaaaaaagaatggggggg

SEQ ID NO: 10190 - DNA, 440 bp, Gossypium hirsutum
  Clone ID: LIB3828-023-Q6-N6-C11
tttttttttttttttttttttttttttttttttttttttttttttttttttttttttttttttttttttttttttttttttttttttttttttttaatttttttttttttatattttttttttttaaaaaaaaaaaattggggggggggggaaaaaaaaaaaaaaaaaaaattggggggaaaaaaaaaaaaaaaaagggggggaaaaaggggaaaaaaaaaaaaattcctggggtaaggaaaaaaagggggggggaaatttttgggggaaaaggggaaaaaaaaaaaggggaatttggggggaaaaaaaaaaaggggttaaaaaaaaaaaaaggggaaaggggggggcaaaggggaaaaaaatgagaagggggggggaaaaatggaaaaattgggggggggattaaaaggggaaaaaatttttttaaaaggggggttttt

SEQ ID NO: 10191 - DNA, 541 bp, Gossypium hirsutum
  Clone ID: LIB3828-023-Q6-N6-C12
gggagaaataaaattataaaacattatttaattagaatttaatactcaaatataccaacactcatatagcatataagatacgtaaaatggggtagtaaatacagcgttttagattttcagctgtggggactatgaagttccatctctcgttcattgggtgtctgcactggtcttgcattttgttctgcataatcatgaacagcctctcggattgcatgtacttgttccttcgaaacaggtgctatcttcttgttaataatccaaatgacaccttcagtgcaaggagggacaggcaaagaaccaatgtatctataatactccacgccatcaatttctataagggttggatcagtcacccccattgatctttcttgggacctcatcagtcatatctgtaatgttgcttatgagctgggataggaaatcattaggtgaaccatgttcgtaaagtagtgcagaaacagctaatccggtcttcacattagggggccgcggctttatgcaccatatgtgcctccacccacgcgtccgcggacgcgtg

SEQ ID NO: 10192 - DNA, 511 bp, Gossypium hirsutum
  unsure (1)..(511): unsure at all n locations; Clone ID: LIB3828-023-Q6-N6-C2
aattgttcatttaaaagttgatgaaatttactaaatttctcatacatttattctaatcaagtgctgcaaaaccatgtgaattttgcacagtccaagagaatgtcctcttagtaatgaattacgggcacggtgtattcaataataacagtggtgccatcgaaaagtaattcttgagtcgtgcatacccttctgccatcctgaattctcctcttcctcccaccaccgaaagctcacgttccatctttattaacggattccttngaaaatatgctaatagagctgcccttaaactttccggcagtaaatccaaaatctaagtacatcaccacggtcgttgaatttttgccggacaagatcccaagtcccagagcattcccaatcacctttgagttgtccccaggacctatcttgaggggatcatcaatggcatatagggtgccaaatggcactgatgagtagttgtcgttgcttgtgttgttagcttgggctaccatgactactgttgggttct

SEQ ID NO: 10193 - DNA, 527 bp, Gossypium hirsutum
  Clone ID: LIB3828-023-Q6-N6-C3
aaaaaataaatttactgattaaaagtcaacttcaaacacaaactttcccacaaacagaactgaaaaatttacaaaattacaaacccacacacacaaacccaaaaacccaaatttaattcgacacatggggggtaaattcaccgtccgattcaatagctgccatagtttccggcgccaaaaccacctctaaatcaacgctaccgttcccttcccgccctggaaaggcggagatcttcccatcaaatttattagctccgccactcctaactgccaacggccgtccccacccaaaatcattgtcatacatcggaaacctcggtgaactccccatcgtcatcgacgctccgtcgaaattcccgaacggaaaacaccgtggatccttttcccattctttaataaaacgacgcaccgtttcatcatcgtgggcattcacgttctcattcaatcgttgcgcacaccagcgtagatcacgtgacgtgacgtcacctgctgacgcgtatgttgggatgctttgaatagcgttacca

SEQ ID NO: 10194 - DNA, 513 bp, Gossypium hirsutum
  unsure (1)..(513): unsure at all n locations; Clone ID: LIB3828-023-Q6-N6-C7
aacaaaacgcattggcctactattctttactgtatccgattcatagctagttgcaacctcaaaacactgtaggacaccctngattacggttaagtttacaacttgaaagtactctttaccttgaaaactaaaatgaaatcatctctccaaactacgaatcctgcctggaatgaaaaaaaaggagagaaatgaaaacaaaatcttatcttgggcttgggccccaggcaacaattcctttctatcttcctcgcgttagcattatcatctagaagcaaatggtctgcctgccatgatcctaccaaatgcactgccattttctccatcatataatttgcaatctctcacattcacatgacgttatgtatataaagcacctaatcttttaaacctttgcgaggatggaaaaagcgggtgctaaatctttctacaccttcccaaatagagatagtttgtgaaggcaacatggttgagagtcttgtagtggcttctctttgaaggtcggagaggtgagga

SEQ ID NO: 10195 - DNA, 521 bp, Gossypium hirsutum
  Clone ID: LIB3828-023-Q6-N6-C8
tatctgacagttatgggtagaagttcatttgcttaatacattagaagttcttgtactacacatcaatttagtatgattgtgtaggtacatattttttctttctacaaatactacattttctctaaaagagaaagcttagaaatgaggtagaaatggctatttaccaaccccattttctttatctaattaattaattagtctattaagagttaacccttaatttttcacctgcccttgctcattgtcaatacacaaaatctatacatacacatataattaattagattattcactaataatcaccataagttttcaatttcttccaatccttaatgaagaatcaactcctttatttgatcctgcaaagagcctagcaatttccaattgagtgttggcaatgatctcagttcttttgaggtccatttctcctcttttagcctcagcttcaaccctcattttttcgatttctttcattgtttccatccttgcttgttctgattttaaaactacttgtgctagcc

SEQ ID NO: 10196 - DNA, 536 bp, Gossypium hirsutum
  Clone ID: LIB3828-023-Q6-N6-C9
ttttttttttttttttttttttttttttttttttttttttttttttttttttttttttttttttttttttttttttaaaagggaaaaaaaagcaaaccaccagtttcattctaaaaaaaaaaacccaagtcccttataggcgaaattgggagaaaaaaaaagttttaaaaaaaaatttcatttatggaaaggctggggtaccccaccccgagataggcaaaagaaaccaaacgggattctagcagggggaaaaatataaaaccccacacaatttacccattttcgcaatctaaactctggaaaaaacacgttggacatcttctatcttaaaggacccccaaaaacagggggcttggcccttcatctttgggcaacaaccagctgagggagggggctttttgtccccattcaagcatgagctataccccaaggggttaaaaaatttcggggctggcgctgcctttgcccccgaaaaaacaccccccctagagtccccccccacaaaacaaaaaggggaaaaccccttcatggttttt

SEQ ID NO: 10197 - DNA, 525 bp, Gossypium hirsutum
  unsure (1)..(525): unsure at all n locations; Clone ID: LIB3828-023-Q6-N6-D1
taaaaattagaataattagttgacacgagnatattattaagtatatgcaaaatgcaagtagacgattacaaaatagggtgtagcttttgatcaactaattatttgatcctactgcaggttctatctataatctggttgggtggacatacaaacataagacactaatacttttttaaaatatctaaaagtcaacctgaattcggattcatagcacatacggtgtcaactgcatgttatcatccttattcgctgctgcaatgcctcccacaagcattcgtagaggtaggagctagtcattatgtgcctcctgcaaattgttcttggaccgcaatctagtgtagttgatttttccgctgttcttagatcccacaacattactttcccatcataagatgaagaaagtaaatgaagaggagacgtaaatgatttataacttggccagaatcctgttgtgagaacagtcactgtcaaatcaatcccaggatgtgcagctgagtttagatattagaacagtcacttgtggaa

SEQ ID NO: 10198 - DNA, 418 bp, Gossypium hirsutum
  Clone ID: LIB3828-023-Q6-N6-D10
ggggaaaaaaaacgggggggggggcccgatttaaagggggaaaccgggggtttaaaaaaagccggggaaaaacggaaaaaagaattccgaaaaaaaaaaaaccatggaaatttaaaaaaaaaaaaggggccattttaaaagggggggaaaaaaaaacggaattaaaaccaattattttaaaaagaagttttttaatggggggggttaagggaagggaatcgaaaaaaaataaaataaaaaaatggttaaggagggaaaaaaaaatcccaccccacctttatgtttttaaaaaaaatattaaaaaggtttaaaaaaaggggcaggtacttaaagggaccttttaaaaagggggggggggaattttttttaagaaaaaaggggtcccaaacaacaaataaaaggggaggggaaacggaaa

SEQ ID NO: 10199 - DNA, 542 bp, Gossypium hirsutum
  Clone ID: LIB3828-023-Q6-N6-D12
gtaatataaaaaacaaaacccatgcatccttaataacataaaaaaacacattccataatcaacatctgagaatttaaaacttaattgtaatgttggctgaacaagactcaaaaaggggagaaaagaaaataagtccgaacctgaaaaagtgaccgtataaaaaaccctcacaggcagaacagtagcaagcaacataaaaccaagacatattatcacttaaagcacttggcatccaagagaggctctccctcaaatggctcgcagtcttcaatcatctgattcacccgttccttctgggctgcatctgacaggtcaaccttcttccactcgtagagttccatgtcatagcactcgtcaatcacaaattgaggaatctcttgcccacggaaaagccatagtcctttcaccttgaatggagggttagcaccgatcaccaacatcttcccaaatgcatacttgcgggccaaatccattctctgcaggaatcctccaaccttgttcattgtgacaaatgaaactgtattctcctcattgtacttgta

SEQ ID NO: 10200 - DNA, 517 bp, Gossypium hirsutum
  unsure (1)..(517): unsure at all n locations; Clone ID: LIB3828-023-Q6-N6-D2
ccaaaggagatttatttttttaatgcgtcnaaaggaaaacaaattgtcgtgagcttcagtagaatctagagttatttctagcacttaactccttccttacatttaagagtcccagaaaaatttagtgagtcttgccaacaaatattgcaggcttaggtttaattatatctttctttttgaatttcagtcggggtggtgagggtggcccagatgttacaaaaaatgctccattcatgaaccggtctccttctgatctccatacccaatgcctccattcagactctgatgcatagttcctattggttatctgtttagttagggggtcatctggagctatgaacctattgccttggctaataatggtgggatgtgtgctaccaccaatggcatacaatttccaatgagtgtagtcattgttgacgacatgaaagtatccccatctgcatctaggcattctttgtatcaattccttgccaaaatggttgaatgcaagtgtgacttgcataaattgatcttt

SEQ ID NO: 10201 - DNA, 534 bp, Gossypium hirsutum
  Clone ID: LIB3828-023-Q6-N6-D3
atagcaaagaaaacatatatattagcatgtacatgcattaattacatatggctacaaaacaagattcaaggaactttaggatattgtaaatcaaatattgttttgagctatttattcttcataattactctttttatccagcaggattttatagcaagcccttctgcaacatcattacttcttattttgtataattaatacgacgacaaccaactcttcctcattatttcatcttaatatggtatcatctccctactttggtggactgggttcactgtccataacctcttctatccctttgctctttacagtttcagcctggcaacatcctgatgcgcacctgggctgaccacactcagcacaagtcccaccgcaaccctgacggcaacactccccactctcacatcccgactgtcctggcattagtgggatttgtgggacttgtgggatctgtgggattagtggaatttgtgggatttgtgggatctgtgggatctgtggaattcttgggatttctggaatttgaggaaatgg

SEQ ID NO: 10202 - DNA, 501 bp, Gossypium hirsutum
  Clone ID: LIB3828-023-Q6-N6-D7
accaataaatgttaaggtaactttttttatttttaaaattaaattattgcattacatactttacaaaaactatggatgttgcttttattattttttgcattgtttttattatttttaacagttttagccacctctttaaaaaaattaggtatgatgtatctttctaaacatcataggggtctattatgccattttacgcttcatcccaccagcagattcaatagcaacttctacttccgattctggagaagctgcaatctcatcagttaagccagaagttggcccatccacactctgggaattatctccagcagagcttttaaagttttcaacgagattagttgcccctgaactcaaaagtacatcatcggcttcctgggatacttcctcatctatagcctcctcatcctgtcccactactaattggattgagagtaccaaagccaataagaacacaacaaaaggaacctttaccatcttttatgttttttaaaaggttaa

SEQ ID NO: 10203 - DNA, 455 bp, Gossypium hirsutum
  Clone ID: LIB3828-023-Q6-N6-D8
gggccaaccccgggggccaaaaaaaggggggggaaaaaataccccccccaaaccagataatgaacccaggcccaaaaaacatggccccccaaccaggccgggggggaaaccggaaacaaatcccttggaaaaaacaaaagtttaaaaaaggaaccacaatattttaaaggggaaaccatttttcaacaaaaaaacctttcaaaacctggggggattttagcccccaaaaaaggccaacaaggccccaattctaaaggggggggagccccccaccccaggggaaggggcatcaccgcaatcaaaaaagggacaatttccaaccattggcctcttttttttttaaggggaaaaccggaagggtccacctgcgaaaaaaaaaaacgcagggccgggaagccccccaagcccccaaaaacaaaaaaaacccggaccccaacaaaaaaggcccccaaagc

SEQ ID NO: 10204 - DNA, 523 bp, Gossypium hirsutum
  Clone ID: LIB3828-023-Q6-N6-D9
aaaaaaacccattcatgcatataaataacaagcttgttccaacatgatgagcagacaggaaacaaaatcaagtcccccactaagggttaactaccaaaggtaaatgtgtggtttgaaagagccgcactcacctgaaattatcaacctaccttagcagcaagcaatttggagttaatccacttgcctctataaaacattgaggcaaattcaatcaatgcgacaactagaaagaaagaacccccaggctaacactagacaaaggaggaaaaggagaaaaaggggtattgcccagacaagtgaacaacctacctcttagtctcctgttcaagaacactcccttcaatacaacacaactagaacccttagaccacattcttagtgcataaaatacttgaagctgagagcctctcagtatgggcgcgaacgatttccgccatggtgatgcctatctggaccagaaccaccatctctgtaactatccctgcgcctgtcgccaccacctccgtagccacctttaccacct

SEQ ID NO: 10205 - DNA, 476 bp, Gossypium hirsutum
  Clone ID: LIB3828-023-Q6-N6-E1
aagcgaggaaactaaaatattactaaaatttaaatttaatcaacagggttaagtttaaattacaaatagacgggagatgggtaaataaatggcgtattattaccattaagaacttatttttcaggcttaaaactaaatctagaccacatgtttatttatgtaattacccccaaaaaaaaaaacgaatatgtccacgtgatgtatacggggccaaaacgaaccggttcggggggtttttatttatttaatttttactacaagggggaaagggattcaggccgccacgtcagctccgaaaatcagccgccggttcaaacaaccctcctaacgccacaaaatcaccggtattattactatggatattggtattgggatctgagtcaaccccgattcccaattcaaacggttcgtaaatcggaatcgggaactcactccccatcatttccccaaatccaacgccgcctgacccttcacct

SEQ ID NO: 10206 - DNA, 469 bp, Gossypium hirsutum
  Clone ID: LIB3828-023-Q6-N6-E11
gcactataagttatgaaaagaacatttttataaataccccaacatatcttaaactgatacttgggaaccgttataacatgaaatcggggggcaaaacaaaggccccttatttctgaacgggttctatatacaaaatctctttattgggactaaaaaagggggcgacttcaattctggacctggatcgaatataaacaaatgaactgaacttggcaaccatagggggaaaaaagctatccaatcaaatcagggtctcatggccaggggagagaaccgattataggaccagctcagtcttttctgttttgcaacacctttaaatgcacaatgatgtatatattttacatggctttagctggtgccgatgaaccacacggggaagcactcatttatttgctattgaaatggatcggcccaacatttatcggtcttggacagctttttcccatcgttttctgaaaatatccaa

SEQ ID NO: 10207 - DNA, 179 bp, Gossypium hirsutum
  Clone ID: LIB3828-023-Q6-N6-E12
accacaacaaacaatgaaattattcatatttcatacccatttaaatccgaaacaaaaactggaagttccaaatgatacaggaagtacaggccccatgcaaagtaataaaaaccccatgaacttttataaacaaaagcttttcttaacaatctccatctacatgggatttcaccaaaaag

SEQ ID NO: 10208 - DNA, 486 bp, Gossypium hirsutum
  Clone ID: LIB3828-023-Q6-N6-E2
aaaataaaaagggcccagatcaatcaaacaaatacgtgcccagactcaacgtcagcttttacaatttgaattggcaaaaaataataaaccaatagaaacatatcacaatcggggatcgatgtatgcaaatatatatatatcatatatatatatatgaagggggggaaatgaattgaatttacaacaaccaatgaatcggcaagggtatctaagtccacattggtgaccttgactcgataacgacgggaagcatgcatctaagctccctaggccttactcgggtaaaaattggaagggtggattctcaagaagttcctctggtggtttgacttccaagaagtcttttttttgaagcgaattggaaaggtcatccacagaaaaggggatgctggaattgtcgtccaataaaaaggaactgctagcagcatcattggaatcctctgtcattagtaccctcatgctggaaaaaacatttggagcaacact

SEQ ID NO: 10209 - DNA, 296 bp, Gossypium hirsutum
  Clone ID: LIB3828-023-Q6-N6-E3
aacaaagaaaacatatatattagcatgcacatgcattaattacatatggctacaaaacaagattcaaggaactttaggatattgcaaatcgaatattgttttgagctatttattcttcataattactctttttgtccaagaggattttatagcaaacccttctgcaacatcattacttcttattttggataattaataagacgacaaccaactcttcctcgttattacagcttaatatgggatcatctctctactttggtggactgggttcactgtccataacctcttctatccct

SEQ ID NO: 10210 - DNA, 503 bp, Gossypium hirsutum
  Clone ID: LIB3828-023-Q6-N6-E7
atgaatcatgcttgtatgtaatttcttatttgcaacgttattacatttggcatttacttttctaaattttcccccccaaaaaaaggaatgctaataataataacgataaaatcaaacccccaattaaaaattacaacaaaaaatttctacttacgtttcactaccaatggacttctcacataatgatacccatcacaccatctcaataccccaaatacataccctacacctcccttcgcatccacttttttactactcggttttaacctcacttcgaatttcttctcttcaccgatctttgtaaatttcaatgttgatggatggaccgtaaccataactccgaccggggatcgaacatgagctttatatgtccctggggtgcccacattcttaactttccttgtaatgatggttgtgccattgagttcagggactgttatggaagggtagttcaagtccgcaacgttgtatgattttggacaaacgtatggcttgttcgaaaa

SEQ ID NO: 10211 - DNA, 517 bp, Gossypium hirsutum
  Clone ID: LIB3828-023-Q6-N6-E8
aattaattatttaaataatttattttttgataaaatatgaaaataacttaaatttacagtaaaagttggtgaagccaaagtgtttgacgctatcaacatgccacatcagcaatctttttgtataaatattcgggttactgaatgaagagccgtgaacatcttcaacctccttcgggccttcatcatcgatattgtccgaaagctcatcaacatcgaggtcactaaaatcttcaacgttctgattagaatcttcaccattattggtcatttctctaacatatgcctctgtacttattatcacctccggatgtatttgtagatgagaaccgagagtaggattattatacgaactcccaccataatttggattttcaggtatttgcaatgtcgctctgcattctaaacattgatttccttcacctgaatttattcattgctccatcctttgacaaatgacaagccattttcaatggaagtggtgggtcagaaaaggagccactggcgatttgttgaaata

SEQ ID NO: 10212 - DNA, 407 bp, Gossypium hirsutum
  Clone ID: LIB3828-023-Q6-N6-E9
ccccaaaaaaaaattggttttttttttttttttagggggaaaatgggggggggggggggaattttcccaactttaaaaaaaaagggccccttttttacccccaaaaatttaaaaaaacgaaaaatttgggggaaaatttttttttgggggcaaatttaaggggaaaaaaaaaaaaaattttggccgaaaaaaaaaaaaaaggcaaaaagggcccccccccccccaaaatataaaaaaaaaaaaaaaaaaaaaaaagggggcccccggggggggggaatttgggaaaaaaacgggggggttttattttggcaacccccaggggtccctaaagggaattgggggcccctggggtttaaccccggtttggggcccccaccggggggttgaaaacacaaaaaaaggggggg

SEQ ID NO: 10213 - DNA, 521 bp, Gossypium hirsutum
  unsure (1)..(521): unsure at all n locations; Clone ID: LIB3828-023-Q6-N6-F1
caaagaaggagagagagnaagctagctcccttgtgcacattaatattgatttttttttcatttacatggctaaacttaataataaaaacaaactaaaagattaaaaaagaaaaagcaaaagaaagccctaagatatcctctaacttaagtaggttgatgaaacccagtatatataataatatattttttgcatggaaagctttcatcgtggaaattacagggttttgattgctttaacatcatatgagtagctgcctgctgggaatccccccccccctccccaacccttttttcttttcttcttaaatcaaaagtttgagaaatgattctgtgagggttggaccatttgcagctctgttgttgtttggcatgagtgatcttcactcatcatgctctctcgaggacgagaggcccaaagagaactgagtgctcgtaaacgtccataatactctccgatcatcagaaaacaccgtgctgcttgtctcaccgttaatatccgagacaattgatgaagggtttgc

SEQ ID NO: 10214 - DNA, 524 bp, Gossypium hirsutum
  Clone ID: LIB3828-023-Q6-N6-F10
gaactaaaaatgcatttcatttaaatcacagaaactagtacagtaaaggagagaacaagatgagctaaaactatgcttcataaaaaagtcaaatatagcattgagtcattacaatgtacaaaaggtacttacattccaatggaacagaacatcctattccacccaacatcgaacataagatcaattgcagaattcacccaaggtaacttgtccctgattcaagcttgtcggcactgtagaaatgcagcaattttagaggcattactttctcctgaatcatctctgcagactgagaaggaaaatgaaagcctgttgaacagttctccaaaatttcagggtttttcatccatgctctacgagcatcacttactttaatcttatatctaaacatctgagaaagagagacatcgggcttctccagctcatctccctcaacctcaataccggtaccttggcactctgggcagagtacagaattaatcagggtccctgtaggtttagtctctccttccttccccatcttc

SEQ ID NO: 10215 - DNA, 533 bp, Gossypium hirsutum
  Clone ID: LIB3828-023-Q6-N6-F11
aatcacagcaaaagttaatcattcatacatttcaaggccagggttttaatagatattgacactttcgaagagttggaaacatatgaatggcttgaatctgacaattgattcagtgtttaccagacttgactccaagaaacgtcgagtcatattcaagctctgatatcgtatgcaagtgagaacgatggacggaaactcattccattagccaccacagaactaacatacggtttcaacaaacttgacaggacatacaacaaaaaaccatattttcttccttacttcttaactaagaagtccatgattagttgtccgaattgctcatacctcgtgatccatggccatgaatgcagggtgtgccgggtgcatatactaactaacaggcagatgctgaaagttattatccttatttaatcttattttcatcatttgccatatcgggtctcatttctaacatatcttccatttttccattaacagaagctagagattcagagattagagggcataaatcctatcgacttcaacttccg

SEQ ID NO: 10216 - DNA, 504 bp, Gossypium hirsutum
  Clone ID: LIB3828-023-Q6-N6-F12
atccatgattcttttaccatcattctgtcaagttcctttcctttggatccatattcaaaccacaacattttgtaaatatatattggtgggagactatttctttttgaaattgaaggagggggaaaaaaaaaaaaaaaaaaaaaaaaaaaggaaaaaaaaaaaaaaaaaaaaaaaaaaaaaaaaaaaaaaaaaaaaaacgaaaaaaaaaaagaaaacaaaataaaaaaaaaaaaaaaaagggggccccctctcggcggaacccgggggcaacccgggaatattgggccaaggtcttggggggtcacaattttccctttatgggggcccttaaaaaacgggggaaaaaccgggggaaccttttttctggggaaaaatgtattaagggcaaaaggcccccaaaacaaattgcccggagggaaaaaatggaaagcccggggggtccaaaaggggggccaccccccaataaagggggggggcctattggcccctttgggggggggaaaa

SEQ ID NO: 10217 - DNA, 410 bp, Gossypium hirsutum
  unsure (1)..(410): unsure at all n locations; Clone ID: LIB3828-023-Q6-N6-F2
agaaaacaaacaatatgtgaacccaaaaanaattaaatcattcaccattgtcgttcctcacaagtacatagtaacccaaaaggcacaaacaacaggcacgacgttcccttccgtcaacaaagtcttaaaaacggggggggggggctctttagtaatcttcttcccttcagccaccaacgtccgttttggtttcccaaagaaagcaagcaaaacgaccaccggtatccacgtcaccatagtagccggcaccgccacagccaccgtcgcagtcatagaaatcaacccaaaaaccccaccgagaaggacggaagcatacagggcaggccaaccgggtgattgataccgggcttggttttggtggtaccaagaaagtatggatttgaggaaattccatgaagaatctaaaagga

SEQ ID NO: 10218 - DNA, 541 bp, Gossypium hirsutum
  Clone ID: LIB3828-023-Q6-N6-F3
aaaaaaacacagttttaaatgtttatataacattggggaatcttgaagctgatgatggtttacaatctggaccaagaatctgtcagctttttttttctcaaacaaaggccaaaaccccatttttacccatcaaggggggggatctgtaaagaattcacatttaacaaaagccataatacaaaaggatagggatgggctacaagtgaactaatgaaaacaagaaacacaaagctgttgatgccatgagtgcaaatggtactagaaaagtgggagatggtattgttcttggtgaatctcccattgccaaaccagctaaccatgatccatctgtcaacatggtttgcccagatcctgacccagtacttgaacccgaaccagggtatccgtaccctgaaaccgaatatccatatccattaccagaataagtaaacccgggctgtgtccctgacccttgtgacgttgagcctgtcactggggtagcttctgtagctggcgttgcatttctcgaagatttttgactaggagaagagggacaaaaggt

SEQ ID NO: 10219 - DNA, 522 bp, Gossypium hirsutum
  Clone ID: LIB3828-023-Q6-N6-F7
atataacaaagaaaacatatatattagcatgcacatgcattaattacatatggctacaaaacaagattcaaggaactttaggatattgcaaatcgaatattgttttgagctatttattcttcataattactctttttgtccaagaggattttatagcaaacccttctgcaacatcattacttcttattttgtataattaataagacgacaaccaactcttcctcgttatttcatcttaatatggtatcatctctctactttggtggactgggttcactgtccataacctcttctatccctttgctctttacagtttcagcctggcaacatcctgatgcgcacctgggctgaccacactcagcacaagtcccaccacaaccctgacggcaacactctccactctcacatcccgactgtcctggcattagtgggatttttgggacttgtgggatctgtgggacttgtgggatctgtgggattagtggaatttgtgggatttgtgggatctgtgggatttgtggg

SEQ ID NO: 10220 - DNA, 530 bp, Gossypium hirsutum
  Clone ID: LIB3828-023-Q6-N6-F8
gagtataaacatatggtccaaaacattttatttcattaaataccatttggaactcaagcttttctcaccctctctctcctcatataccataattggatacagatttataagcttaattaaattaactgctgaaaggtggaggccttggcatgccttgcacgatgccgcaagtcaatacaccttccggcaagttgtactcatccttgagggatcggttaggggaaataacactagcataaagctgttgcccaaggtaatgcctgtcccatatctccgacctcaggttccacatcccgcagttgtcgaatgtcaataggattgctgaccaggagttggggaatacctgtatggtgtgtctgctcacggcgtcaagaagattgtagttcatcctcttctcggggctccatttcccaacgtccatgcccacagcaaagaatgagtagccagacaagtggtaagactgaatggcgctctcgtgattctcgaagattatttccacaaagtttctgtgtgtcatgttcagcacaata

SEQ ID NO: 10221 - DNA, 528 bp, Gossypium hirsutum
  unsure (1)..(528): unsure at all n locations; Clone ID: LIB3828-023-Q6-N6-F9
aatattactatngatgcaattaatttttattacataggcaaaggttttaagaagtgagatcatggggcagtagaatgaccttcaacttcctccccaatttcatcttgaagttcaaaatatcccatttctgtgagaacttttttgcattcaggaagagcttccttcttcatgtacccaagattgttggcgaatcgataagtcccactgacaccatctgcctttgtcaagaccaccctggctttcctccatacttcagtaggttcattgcaatcagctcttggactcttcactaggctcacttcacagatctcatcttcgtgatcacctttcacctcgatcttgtatcctccggcttcgtcggtaaccacgtcttggctgtgcgacgcgattttctcgttggtaatgttccggcattctaatttcactgatgcgcccttaattggttggctgattttggtctcaaattcaacgcggcaagtgtcgcagtaaactcggccttcaacgatgaacttctcttcagggttggcg

SEQ ID NO: 10222 - DNA, 482 bp, Gossypium hirsutum
  Clone ID: LIB3828-023-Q6-N6-G1
agcataaccataatttttaattgcaaaatataagaaggaattcaaattctcacattacaaaacaagtgaagaaaaagaaatcttcaatcagtagaagtcaaaataagggaatggaatgtgagccttcttgaatacaaatggggtgcaagttatatataatctcttcaaatactgcaggttacccataatttaagcaaagaaagagacaatgaaggctccaaccaaggacccaagaacaggcaaggttgaggttgcaacgctggagtctgggcctggtgcagaagctggtgcagcgccaactgaggcggagctaagtgtggcgccatctggtgaggaagctggggcggtgcttgctgccatgactgcgctcattgaggcagcggcgaatatgacagcgcaagtgatcttcttcttcatgtccatggtgttggagagacctgccttaatttgttgcagaaaaatttattctttttatttttctt

SEQ ID NO: 10223 - DNA, 530 bp, Gossypium hirsutum
  Clone ID: LIB3828-023-Q6-N6-G10
aataaattcttttcttttgaagattaatatgaataaatcgaattgatgagctcaagattttaagcggtgctatgttacacgggaaatcacgtttcatatgaaatatcaatatcaaactgaaatgaagtttatataattattctaccagaaaactgggagggaataaacgcgctgtggttagagatttgggagatggagtgtataaacaaaagaaccagatcagcagcaagcgcctgtagcagcattggcttccggtgtcttctggttaaacatgttctttttcacacctttggccccctcagccaaaaggctaggtgtatcaacaatctttagaacaagctcatcaaagcactgttgtacgttgacatgtgttttagcactgcattcaatgaaaaggcaaccattttctcttgcaaactctattccctctttctttgtcacaaccctctggctttccttgtcaactttgtttccaacaagcatcttgatgcagtcttgatttgtggagtagagttcgaattccttagccc

SEQ ID NO: 10224 - DNA, 327 bp, Gossypium hirsutum
  Clone ID: LIB3828-023-Q6-N6-G11
gatccaaaacatagcatctgcattcttacaagtttcacgtgttctactaatacaatccccggctccagagcgagctggcatgttgcagcggattagcttacagagggtagctggaataataggtttctttattgcgaggtaccctctgctgccccaaagtgaaatttacccattccataagagttaacgattgaactaaaacaggaaactgagaagtgcgaaataaacatcgaggaagccatcatcaaactgttttcataatctctgatgagcccgtagcaatgcgtccacgtgtcagcttggtattgtatgagctgcatatcgggc

SEQ ID NO: 10225 - DNA, 540 bp, Gossypium hirsutum
  Clone ID: LIB3828-023-Q6-N6-G12
gacgagtaatatgttcaaactgccttccatttttggcaacaaaactagcaagtttgtcggcaactttcttcacagtgagatcgcttggggaagttggtgctgcatatcacttataaaactgattaataccaagagcatgaagaagagaatgcaaattactcttgtagcaggcgtgccacatattccaaatctttcattgaacatctctttccaccaatgttgattggtaattaagatataagctgcattcatgagacaagaaatattcaagaatgttttgccctcttcatccaccactttaagatcagagaagatggccagatgacttcataaatcacagcagtttatgaaggggactattttaacctagacaactataaaaaatttctttatgataagagaaaggaggaatttttgtctagacctctatttaagtcggtgagaacttaaccgcaggcacaataaactagtaattcaaacattcataaatcataaactcattctagttggaaatgtatctgacatgcaacctaagcatgt

SEQ ID NO: 10226 - DNA, 514 bp, Gossypium hirsutum
  unsure (1)..(514): unsure at all n locations; Clone ID: LIB3828-023-Q6-N6-G2
gcaanatcgatattgttttgagctatttattcttcataattactctttttgtccaagaggattttatagcaaacccttctgcaacatcattacttcttattttgtataattaataagacgacaaccaactcttcctgggtatttcatcttaatatggtatcatctctctactttggtggactgggttcactgtccataacctcttctatccctttgctctttacagtttcagcctggcaacatcctgatgcgcacctgggctgaccacactcagcacaagtcccaccacaaccctgacgggaacactctccactctcacatcccgactgtcctggcattagtgggatttttgggacttgtgggatctgtgggacttgtgggatctgtgggattagtggaatttgtgggatttgtgggatctgtgggatttgtgggatttctggaattcttgggatttttggaatttgaggaaatggtagaacgaaaccaccaggattacaattaccggaacatc

SEQ ID NO: 10227 - DNA, 448 bp, Gossypium hirsutum
  Clone ID: LIB3828-023-Q6-N6-G3
accggaagttccaaggccttttggccatttgaaaaaagcatttttaaccacatgggggggggggggccatggcattcacattacaacctttattttcatcaggagcctaagcccacccccccctaatataaaacaaattaccctttaacatttgaaaaacaaccttttgggaacatggggggaggggaggctttgaaactaaaaaagaaacttttggggaggggggccccatgggggaagggttttttttttagcttaattttcccccggaaaagctccaaaaaccctaagctaaaatgggggaaattggggaggggaaagggtttaggggggagtttccataaagatttttttaaaattttaaaagggggaggggaaaattttgagaaaaaatggggtaaagggggcaaaaaaatggaaaaaagggggggaacttttaatttttttt

SEQ ID NO: 10228 - DNA, 525 bp, Gossypium hirsutum
  unsure (1)..(525): unsure at all n locations; Clone ID: LIB3828-023-Q6-N6-G7
aataaaaagatgaacatcagntgatgttattggctggttgcagaagagctccacccatcaacatgtttacatgcaacatgcaacagcaaaagggtaaatacaaagtagaagaaaagaattgagccaccacaaatcagattttcaaagagctgtttacatcatttaacacctatgtagtagtagggaggacaatcctctaccagctccatgtaaactacttaatttggaggcttggcttcttttgtgcttcgatgtgcaccctccaccagctcgatgctatacaaaggggtaacggaacaaccgcgaacacatcatatcttgcatatgattattaaaaacaccatctgatgctttggagtgtcctaggcttccattaagtttctagctagatcttttcttgtatcgactctgcacaaggctcaagaggaagtctgtaaatatatgttcataccccggcattttcccatacccaggaaagtagtttatgtcaatcacataaaaatgatctctagttccatgctcccg

SEQ ID NO: 10229 - DNA, 436 bp, Gossypium hirsutum
  Clone ID: LIB3828-023-Q6-N6-G8
gggaaaaaacaggggacggaattttaaaaaatttggggggggggggggggaaaaaccaaataaaaaaaaaaggtttaaaggtccctattaaaaaaattaaagggaaaaaatgggaaaaacaaaggggggaaaaaaggagttttttttggaacacgaaaaaaaaagatttgaaaaaaaaacctttctgggggagggagatttaaaaaattatttcaaaaaactatgggtggaaaaaaaaaagaggggaaaaaataaaaaaaaatagtgaaaatttgggggggaacgtaaacggaaaagcatgaaaaaaatggcctacaggaaaaagggggggatggtgataaaaaccaaaaccgggaaaaaaaaaaattgaaatccccaaaaatggggtttgggagggggggttaaaaatgaggcggagggggaaaaaatatggggg

SEQ ID NO: 10230 - DNA, 536 bp, Gossypium hirsutum
  Clone ID: LIB3828-023-Q6-N6-G9
aaacgttaaacacaccatctctttctaatgtacacacctcagtggcacgagacggctaaatgcaaataaattttaactcaaatccatcacttccgacaatctcatctaacttgtatccaaatgaaagttttccccaattcccggaactatacaactcttaacaaattggcccgagacaaaagaatgaatgttgaagttgatcatagaggagaggaggagaggaatttacatgttgatacgaggcaccttttcaccttccagtaaattaacagaacgaaaccacaatacttttaaatggactgcagaaccaatcatctctcgagctttgcaaatagatttgagagagcttgataaagagtggaagcagcaggaggcataggcagtgaaccgagaagaatatctgaagcagtgatagatggattaccataaaatctagaattttcttggtttctggttgtcactacacttccttcaagtgagcaccccaaaaatgcacctttactacagctgtatgtataacaagcagcataacctcc

SEQ ID NO: 10231 - DNA, 542 bp, Gossypium hirsutum
  unsure (1)..(542): unsure at all n locations; Clone ID: LIB3828-023-Q6-N6-H1
tgggtggttttttttttaaaatgaatctaattatgcacattttgtattatataagatcttgaaataacaacgtgtgaaacaaaacgtgaacaatgattcgtattacatatagtggctttgacatttcaatgcttgttgtgaaagatctaaggggggggggggacccacattgatcgacggcaaggtactccattgtagttcacaaagagcatgtaataaccaggtggtgcaatgttgctattaatgggagtttgaagaacaatgttgtttgtatttagggcaacatatttgttaaattccacaattcccaattgaatcaatctctgattcatagcaaccccgtgggtcacaaatggcggcgagtaaatcgtnacttgaagcttttgttggtcaatttcgacgtttccacggatctgcgttgtaaatttctgaccgtatttcacctggttattggacttttcaacaatgatctcttgttgaaacatacccaagttcgggtccaagtaatgtggtgagaacttctcaacccgaacttcggtggg

SEQ ID NO: 10232 - DNA, 240 bp, Gossypium hirsutum
  Clone ID: LIB3828-023-Q6-N6-H10
aaaaaaagggggggcaaattttaaaggaaaaaaaaaaatttggggggaaaactaaaataaataatccatttggaaaaaaagacgggctgggggaacttgcctaagactatccccagggggggggaaaaaaaaaacaagggtttttttaaaaaaagaaaatttggggaaaaaaaaaacaagggaaacaacatttaccacattccgggggaaccaaatttaaaggcccccgctaaaagggga

SEQ ID NO: 10233 - DNA, 173 bp, Gossypium hirsutum
  Clone ID: LIB3828-023-Q6-N6-H11
tagtcaaactcaagttctacattgtcggtagtgattaattttttcgtataactgcttgtcacgagtgctttttagagtggagttagcaaaattcgattcaattcaaaaaattaataaaaaatttaaattttaaattaaaaaaaaaaaaaaaaagggcggcccggacgcgtggg

SEQ ID NO: 10234 - DNA, 526 bp, Gossypium hirsutum
  Clone ID: LIB3828-023-Q6-N6-H12
aaacgaaatagagcttcttctcattcattaggaatctgactcacttccttacattaattatgtaatagtcacaatatatcctgagatagcagagatgctcacactggacagaaaaacagtaaatattagtacttcactctatctattggcaagcaccaagtaaccgtggcggcaacaggcaaaacctacgacaagccatggctactttattctaaaaacacataaacaacaaaacatattatttcttaaagacaaaggcgtctctgcttccagggagctttggctttggtctctaatcatttacaattgcaagggttgcaggtgcagttgtctccacacttgcagccgttctcagccccgaattccatctcagctccctcaaagtgtgctttctggggtgctacaccaagaaccagagtctcagttgtggtcatctcggcaacgttcaggtctgggtacatcttgcatcctccacagccactgccacacttgcagccagaaccgcagccacagtttccaccacagc

SEQ ID NO: 10235 - DNA, 434 bp, Gossypium hirsutum
  unsure (1)..(434): unsure at all n locations; Clone ID: LIB3828-023-Q6-N6-H2
gttagatggtanaaaacaccacttctcattaaaaagaatgaaagattggtccacacaaattccaattctctttctctaatgtttgatcgttctatccgacaagagaataaacatatgttgatagaacaaagctcatgtggaaaaacatttagaagcatttcctgtggacaattgatggacccgattcatcgtactctgccttggcgatccacatttgttggaatgtgctaagggaagccaagatcgaaccgccaatccagacactatacttcctctcaggtggagcaacaaccttaatcttcatgctgctaggagctaaagccgagatctccttggtcattctatcagcgataccggggaacatagttgtaccaccactgagtacaatgttaccgtacaagtctttcctaatatcgacgtcacatttcattatc

SEQ ID NO: 10236 - DNA, 474 bp, Gossypium hirsutum
  Clone ID: LIB3828-023-Q6-N6-H3
gacaacattaaggcataaagacttaatataagagatacccatgcatgcatataaataacaagcttgttccaccatgatgagcagacaggaaacaaaatgaggggcagcatcaagggttaactaccaaacaaaagggtaaatgggtgatttgaaagagccgcactcacctgaaattatcaacctaccttagcagcaagcaatttggagttaatccacttgcctctcttagtctactggtcaagaacaatgccgtcaatgcaacacaactagaacccttaaaccacattcctagggcataaaaaacttgaagctgagagcctttcagtatgggcgcgagcgatttccgccatggggatgcctatctggcccaaaaccaccatttttgtaactatccctgcgcctgtcgccaccacctccgtagccacctttaccacctccatgatcatgtactttgagcgcagttttttttgccat

SEQ ID NO: 10237 - DNA, 525 bp, Gossypium hirsutum
  Clone ID: LIB3828-023-Q6-N6-H7
gttgaatataagggaaattctaatatccaaaagttaaaaaccaagtttcagctacaaagggaaaaccacctaaaagcccaaaaatcagccacaattggaactgatgatcaccgaccactctgttttaaagacttttttcctttttatattatgtttcacgcctccttcgtcgtgcagcagcagcagcttcatttttctctgccttttcaaccttttctccatcgcttccttgatcatctgatgtttcagcgaccacgggtactggtttcgtttctattcttgggcattgctgattcttgccaccaaaaatgagcttcaagaaaatcgtgaggataatggcgacagtagagactaggactcccatggtgaggtttggttgtttctcagccttcttaatgtgatcgagaatttgaggcttgtagttgcttaagaaaggaatatcagcaatctggtatagggcattaaacaccttcctcttgatgcttgcaaggaagtctaaaccagaagcttcttcctcagcctgct

SEQ ID NO: 10238 - DNA, 516 bp, Gossypium hirsutum
  Clone ID: LIB3828-023-Q6-N6-H8
gccttcaataagagttgaatatattattaatattataaaagtaggaaaaagttgttcaaattaatcaataatcaacaacattatttcaaataataatgatataaaagaatattaatggcgatggttttggaagtttaaactccaggggtcatatcgggatcaaaaggaacgccagtttgtgccagccattcgtcagattgcaaaaatacgcgaggagtccatttcatggcttcatccatatcgattttcttgatagctctccatgtgaccctgccctcggtgttggcaccgggtcccctattttggaactcggcaaagtaaccagtgtccagtcctacggtgccttccatgggggagtaaccctctggtgtaatgatgtcatcgatttgacattgcattatgacagttgtcgcaaattgtttccagggacgaccaaggtacgtcttgttcttgtccttcaccggaaggtagtcaggggcgcccgagatggtacaattttgaagcacaatggctgtg

SEQ ID NO: 10239 - DNA, 520 bp, Gossypium hirsutum
  Clone ID: LIB3828-023-Q6-N6-H9
gaatgttccaaaatataaaaaagtgttattaatgtatcaaaattcatataaatataaaatactttacacaattaggaaacggtaaaatacatgaacacgacaagaaaatacaaattgctagttctatcggagaagatcaacatggcttattattggatttagatggtgaagatggcatggctttggcaaaatcaagaaggtctctgaagaaagcatcttctgggtttacttcttgggttgggatcttagaattaatggagagattttgagtttgtccaacaagactgtcataagaggaatcaaaaccattaatggaatgagaagaactaccggtataaccatgttgttgctcaaagaattgatgtctttgattgaacatagaagacggtgggtagtttccagcaggattgtccaactgaaccggaggcagctgctcagcatcggcaggtttgactaaggaagccagtttaggttgttcactgaacacaggtgcagatccagtgtcaaccgaacgggaagg

SEQ ID NO: 10240 - DNA, 517 bp, Gossypium hirsutum
  Clone ID: LIB3828-024-Q6-N6-A1
ggaaaaaataccgccaccacagtaaataaaagttctttgatggcttttttgataaagtagctacagcagcatttacttctcttcactggctcgaagccacttaggtacctgttcatgacaagtcatctcctgggggggggccagttcttcatccatttgatcaaacagctcaacttcttcctcacttcttgctatcatgcgatttacctgatgcaatgagggaacatcatggacagtttcttgatacctctcctcatcatgcaacaatgtttccaaagtcatgcgtctctcttcatgtgttgttctctggtcaaaacgtccagcattgattacttcatcggccatgtcgattttatactgttgaatgttattccttatgaggctctcaatggatcccatatatctatccttaccagcaaaatcatcctcaaaatcaactgtacctccactccttaattcatcctccttctgctgactagagattttgtcaacaactgcttccatgtaaattactttg

SEQ ID NO: 10241 - DNA, 525 bp, Gossypium hirsutum
  Clone ID: LIB3828-024-Q6-N6-A10
aagaagcaaaaatatatattttaatatatatttcaaatccccctcatttgacacccaaatttactaattaaatttaccattttatggcaattgaggaaaaaaaaaaggctccccaaagcaaagtgcagaaagattagaacgatgataaaaaaagagagtttagaaagctcgctctttgacaatatcaatactcatttcacttgcatcggttgcttgcaattcaacttgaacaccatccaactctcttctgaatctatctttagagctcgcatataacattttgctcctcacccttgatgtatcaggagaccatgcaatgaagaagattttgcttttctggacattttcgtcggtagtgaagtcgaaatcaaagacagcgtaacgacactcgttatgaggcaaacaagcactgaagtcgtcgtatttttctttaggtccaccgagtttttcaaccatgacctgttgaatgttctcttctattttgaaaacgatgaacctgtagcttcttttggcctttagttccaa

SEQ ID NO: 10242 - DNA, 483 bp, Gossypium hirsutum
  Clone ID: LIB3828-024-Q6-N6-A11
attggaaatatctccttaatcataccacaaagcgcttactaacattcttaaataaccaaaaacaaaaaaatcaaccaaaagggggaaattaaaagagcatggaaaaaactaaaggaaaatacaaaaggaaaaaatagggggaaaaataaaaaaaaatggggtttgaatcaaaatcgttcaagaactgctaaagggcataaaaaaggaatttgaaatctaccataatctcttgggggtcatttttttcggctatgatcatcaagaaaatcttagaaatagaaggaaatgaaaaagaaaaaattttaagagaaaacagcaatgggttaagaacttaggagcctgaaatcgtttagccaaaaaaaaaaaaaccaagacattaattacttttaggcctttttgcattctgaagcattaaaagcatttcctgggcacgatagatgggccaaattcatcatactctgccttcgcaatccacatctgctg

SEQ ID NO: 10243 - DNA, 502 bp, Gossypium hirsutum
  Clone ID: LIB3828-024-Q6-N6-A12
gtggaaacattgcaatagcatgccatgcatttattcataaggacttaatttagaagagtatttaatccaactatttatggattatagtgaaaactaatcattaatgttttagtcatatttgtgtatttcgagaggtaatcaattccggtaggcatcaccacccgaacagggccctccgcagcttcctccacaactaatgccgcagccaccaccacacccggcgcaattgctactcttaacctcatcttcaccggcaggaggtgagtatttgattccattagtaatggcttcaccaccacccttcccttcattattgcagcttttctcacaggtgcttgaactttcagaaactagaaaagccaatataatcatagggactacaagcggttcttcttcactgatctctataatagcagatttaaggttgaacaaagctatagcttttccataaggatattccatggagaattcaacagccgtcatgaaatgctcttcatttttc

SEQ ID NO: 10244 - DNA, 197 bp, Gossypium hirsutum
  unsure (1)..(197): unsure at all n locations; Clone ID: LIB3828-024-Q6-N6-A2
ggggttttgtttttttttttttttttttttttttttttttttttttttttttttttttttttttttttttttttttttttttttttttttttttgggccccgtgggtcgccccggttttttttttcctttcccttaaggcttccctgttgggggggggggggttcttttttaaatttggnttatttttgggcttggg

SEQ ID NO: 10245 - DNA, 540 bp, Gossypium hirsutum
  Clone ID: LIB3828-024-Q6-N6-A3
tttttttttttttttttttttttttttttttttttttttttttttttttttttttttttttttttttttttttttttttttttttttttttttttttttttttttttttttttttttttttttttttttttttttttttttggggggggggggggaaaataaaaaatttttaaaaaaaaaaaaaacaagggggcaaaaagggggggttttcccaaaaaaattaaaaaaaaggcccccccttttttttattttggggggggggtttttttttaaaaaaccccccctttttttttttaccccccgggcccaaaaaaaaaaaaaaaaaaaggaaaatttttttaaaaaaaatggaaaaaaaaaaaaaaaaaaaaagttttttaatcccccaaaaaaaaaaaaaaaaaaaggggggggcccttgaaaaaaaaggggcccggggggccccccgggaatttcgggacggggccctgggggggaaacttttttcttttttgggggggtttaaaaggtggggggagaaaaaggcaaaacggttccccg

SEQ ID NO: 10246 - DNA, 501 bp, Gossypium hirsutum
  unsure (1)..(501): unsure at all n locations; Clone ID: LIB3828-024-Q6-N6-A7
aaaaaaggcattcttttctcattacaaaaaagggaacccatttgctattgatcttattatctacaaaactcctccaaaagggacccgaattatcgtaacgtgngaaaaaaaaaagaacgaattaaaattaaaagataaaaaatggttttgagattaacccccgtcgcatcatttgtcattagcatcgccaccgctggcttttatggggtttaacctttgaaagtccagttctacggcccgtctctctctgaatcgatggcgtaagtgcgttaacctccgccccatcatttgtcattatcatcgctttcgccatcatcagatttatggtcatttaccttacaaactcctattccacgcccagccgctgtttgaaccgatggcgtaagtgcatcaactacggtcgcagacgacatctccatcttactaactctaaccgcaccgattaatttttccggcaactcatcctcggtctgtccttccacaacaaatcccatatcgatt

SEQ ID NO: 10247 - DNA, 525 bp, Gossypium hirsutum
  Clone ID: LIB3828-024-Q6-N6-A8
aattgagcaacataataatataattagatgctaaagacaaaattcctggtgagtggttacatcaactctaccatcaaatgtttttcttttatcaaagtttcagatttaacttctttcggttccctcgagaccgaaactcaaaaaaccatattaccgaaggcttcacccattttataactcatccttgagatcagaagactctgcatctgcaccatccttacctgcttttgtctcgggctctgtctcagtttcttccacatcatcttcctcttcaattgttgcatcaggactgatatttaggctagatttaactgagctgtagatgcgtgaggcgaaatccttgggatcggttaaaatgaagccactctccattagagctgtctggtaaataagctgagccgtttgcttcacgccctcatcctcggggtccttaacaactctctcacgaagctccttgatgattgggtgccttgggtttatctcaaggatcctcctgccacgcatgtatgcttgcttgctagcatc

SEQ ID NO: 10248 - DNA, 530 bp, Gossypium hirsutum
  Clone ID: LIB3828-024-Q6-N6-A9
aagaaaaaataattcatatttgtgtatttcatcccataatcttaaattaacagagaaacaaaatggacaaattcttagtttcaccaatggataagttatcttagccaatggtttcttcttaactaaatttagtaaattttacccatccagaagcttttctagtttaagaatcagagatggtccaagtcatgtcattctcgaaaatccagtggcacacctcgatccgacccggacccgaacccaatgccaagaacgctccatgattcgaactccaactggatgtgtccaaatgacagatggcaacaccatgattgatcttctccagtgacttcggatccagaatatccgcttcatagacccggacctcggggaccgagtggcaatagtaaagcaaatacgggtacaaactctgatggcaagaaaccgatttcgttactttcccaccgttgattcctttaacgcttccgatctttatgttctgctttgacccttttacgttctccgtcgtgcgaacctccacgttcctcccc

SEQ ID NO: 10249 - DNA, 517 bp, Gossypium hirsutum
  Clone ID: LIB3828-024-Q6-N6-B1
gtgtgtggttttttttttataataaatattttttttttttgttttttatgtttttttgcttttattgtttgatgatgtttagggtatgaaactatgaaaatacagtcccaccatttgggctaaaaaacgagacaggggaacacaaactgaggggggggcggaaaatttggttttgaagagcaagaaaacaagggcagactagtggctggttgtgccaatgaaaaatgggggtttagggggagtgtagactatgccgtttgaatgcaagggacgattttatccacagaaagaaactagagggaaactgtgcttgaatattgaaaaacacctgaaatcagctctaagagtttgaacactgaaaagactgcagttttttgaagtgatataaggaggtttgctggaccattaaatacaaaaggtatggacccatttttattaaggggacaaaagagtgacctagggacacgaaagtgaaacacatagtctaagccaaagcccaaaggaaaaacttgggccc

SEQ ID NO: 10250 - DNA, 468 bp, Gossypium hirsutum
  Clone ID: LIB3828-024-Q6-N6-B11
ctcggctattcttgctctcttcctctgcaaagttaatggagtgaccaatctctggatcttgggagctttactggctttctttcctgattttgtcgtgaaagatcgacggtaagtgttgacgtacttccggacatcatcctcctttgagagattgaagagtttacgaatctttgatgccctcttgggacccctcattcttggtttctcagtatcagtgagcccaggaagatcattttcaccctttttcacaattaccaagttgagaacagagagatcttgactcacaatgcatcctcgaacagacttcctcctcctctctccgttgcgcctaccatatccttggaagcaaggggtccctctgtggagcaagagacggacacgaccaggagttaacactccctgtttcattgggaatccctgcttgtcacatcctcccttgattttgaaaacatagcccttgaattcctc

SEQ ID NO: 10251 - DNA, 544 bp, Gossypium hirsutum
  Clone ID: LIB3828-024-Q6-N6-B12
actaaagggcatctacttccatgcgagcacaatcaagaatgcatataaaagagctagagccttgaggctttgggtgagttttcaaacagtgacatgactccacccataaacatctccagctttagtattggccttggtattggattaaatagttgtcaaagcagttggttttcaagaagttcaacccaacgcaataaaaaaaaaaagctgatgtgcattatacaaaggccagaacggctaaattcattaagggcaaataaaaaggttcagcagtgacttccttcatgggacaacactgaagtgagtcaatgaaaatctcacataaaactagggcagactggtcccttggagaggccgagacgaacttccatgctgtggtgcaagtccagtggccgaacagtctccgaatctcgaggatcattcagataatcctcgaagccaaaattatctaaagttcctgtcatcgcttccaaccctagcatcgaagatggtagcaatggcctctgaaaccgcgagagaatttgcctatcgagatccattttgg

SEQ ID NO: 10252 - DNA, 517 bp, Gossypium hirsutum
  Clone ID: LIB3828-024-Q6-N6-B2
aacctatcctaattctcacaaatgattccgccattggaaaaacagtcattcaggcatttcttctaatggcaaacctaaacaaaaaccaagaacaatcatacaagtataacggttctttccttttggggagaataagatctaaatagagaagggccgccggttacgaggctatgaaactacctcggtgccttcagtacaaactatatatgtataattcagagttaaattttcaaaaattaatgaaaactaaaacaagagcgagtaaaggctcagactcgggctcacctcgatcccttttgttcccttctttttccggagagcataaatatgggatcgaagttcacactaagagggcagtgattttttttctcacacggacttttatctagtcttggaactgccaagagtgagttctagatcatctgatccacattcttcatgaatcctctctccttcccatggctttactagccctgttgcattgcttccgaatgcaaactcatcggaaataacttcc

SEQ ID NO: 10253 - DNA, 434 bp, Gossypium hirsutum
  Clone ID: LIB3828-024-Q6-N6-B3
ataaagaaagatatattgtttagtacctgaactcaattgaatgtctataatacattgtgttttgttaggtaatgcctcataactctaatttggcgacgggttcaggttaaggggtgttacaagagaaatccatgagggatggctaattcccaggaccagctgaatagcaggtagaagcaaacaggaagcaactttaagatgggaacaaacctaattgttcaacaattgttaagaaatgaccccaacaagtataccgccacggaacaagaccgaatctgttcccatgtatatcaagcaatgcaactactagcactagaagttgtgtaaccaaaaaatagatcacagtgggagatctccaagactagattatcataaaaccaattagcttaagccaccaagtatcctctacactttgtttatagcctccaacagcc

SEQ ID NO: 10254 - DNA, 475 bp, Gossypium hirsutum
  Clone ID: LIB3828-024-Q6-N6-B7
gtataaaaaattgaaatagaaaccccctaatgacatgaaactacaaccaccatttaagtctcgataataatcaaatcaagcattgatcattataacattattatctctttccccgaaaattattagctaaatttaacaaattaacaatgtactcaaaaaataagattgaaaagaatttcgttccaagtatctggaacaccagctaaacaccaatggctacaatccaatcctgttgaccctccaaatccatacaccgagggatgcccatctttgcgtagcaacgacaacaccgttatatcaagcaatttaaccttctttctcactgtgctcaacactcttttcagtacacctaaagcttgtggaacacctcctggatagcttgaccctaacaatggctgctcttgccctaaacacccttttgcctttgggtcattccataaagatgagttgtaatgtgatggagaaattccctgga

SEQ ID NO: 10255 - DNA, 520 bp, Gossypium hirsutum
  Clone ID: LIB3828-024-Q6-N6-B8
aaaacaacatctcaacaccaacaaatcattgcaaatatacattttcacccaattttttcaataaaatttagtattgaaacatcatcatatcacttgatgccataatgggttggttcataataacaaaaggattgttgttgtggttgctgataatggtggtgaagctttcatcacttgttgtttcaaatccctcactcgtttcaaacccatcgttgctgttgttgctattggtaccactattaagataattgaggatttcattgagtgactccagtctttgactcagttccatcatctgagctctcaaaaccgagttctcagcttccatgttgatgtagtgttgagtggtgaagttgatggtggttaagatttgattattatctttaaccaactgagtcacttgtgccattaactcgtccaagtgcttttgtttcctcatcctagaccgcctcgctgattctcggttggattccatccttttccgtttcctttgattgtgcaaatcctcttcggatcctga

SEQ ID NO: 10256 - DNA, 416 bp, Gossypium hirsutum
  Clone ID: LIB3828-024-Q6-N6-B9
aaaggccaaacccaaggggggggaaattaaaaaaaaaaattgggggggcctggaaaaaaatttttttttaaaaatggccaaaaagggggaaaaaaaaaaccttgggaaaaagggccttttttttaaaaaaaccccccggtttttttaaaataaaaaagcaaaaaaacccctcccccttttttttaaaggaaactaccccgggcccccttttcggggccgggggggccccccggaaattcgggcccggacccgggggggaaccaaattttcctaaaagggggggaaaaaaaaggtggggaaaaaaagggaaaaaggggtttccggggaaaaaatgttatcccctaaaaatcccaaaaaaaaaaaaggcgggaaaaaaaaagggaaaaaccggggggcccaaagggggggcccaaccc

SEQ ID NO: 10257 - DNA, 525 bp, Gossypium hirsutum
  unsure (1)..(525): unsure at all n locations; Clone ID: LIB3828-024-Q6-N6-C1
cacaaaagttttgatccttggtttttgttcaataagtaattccgtcgttcctccttttacaattttcatggattttatcttccttgttgatatcatttttcttagagtaggtgaaaaaaaggggncggagggtaaatggggagaagaaagccaaagagcttatttaagatcaagacccaaaaaaaccatagatttagaaagcttttcacagacgctaaacatggaatctaataacctagacttgatagcatagtagggcagatcttattcactactgcaaaaccatctgcgaatggattaagactaaatcaaccacactttcttcgcagcccttcttcggttagggccctcgtcgccaccttcttccgtttctttttcctctggttgtcctctttgtttctccctctccctccaaccctttgctgcggcttcttctgctctcctttgcctttcttcttcctgtttccaagcttcctcttgctctctccttgcttcttcttctcttctcttctttgcctcccttct

SEQ ID NO: 10258 - DNA, 527 bp, Gossypium hirsutum
  unsure (1)..(527): unsure at all n locations; Clone ID: LIB3828-024-Q6-N6-C10
gttaaaacatagcaatgaaaaagncattaaagattgaatgctacaaaacttgngaagaatacaagtcataaggagaccccctttttattaaaaggaaagaaggaggaggaggaaatggatggaaaaagaacgagggcaatgaagtttatgctctagcaatgtgtgtaagtattctcctctttgctccgattgttgtgtcacaaccaataccggcagataaatcccaagtggaagcttggtttaatggcattatcaagccggtgaaggaaaggggtacaaccttagaccctgaattggttcaagccgagacagaacctagaatcataaaggtgatgcaaggtgggggtggagaattcgataccataaccaaagccatcgagagcgttccatcagggaacgccaaacgcgtgattatatccatcggacctggatcttacaaagagaaaattagaattgaaagaaataagcctttcattacattgttaggagatcctaaaaacatgccaaatttgacatttgacggcacc

SEQ ID NO: 10259 - DNA, 540 bp, Gossypium hirsutum
  unsure (1)..(540): unsure at all n locations; Clone ID: LIB3828-024-Q6-N6-C11
gaaaagcacacatcttcaaattccnacattgacttgaaaaaagccagcaaatgttacatccataccaaattctcaaaacattcataaagagaggaccatagcctcaaaacaatattactatccaaacaaaaccactaaagtagagatgcaatattttacatccaactaatgccctcactgcacctgtgagcactaatggaggaaaatttttatatcagtctactggaatcagtacacaacttttaagacctacagtcataacaacataagctgattcattcacatgaagtgccatctcaggaaagtttccccattcgttcaggagctgtgcaagaaacacaacttacagtacgataccgcttcgttttggaaggctaatgtaatgacgatcgagacccttcgatcagccgccttgcaggcaaggattctcagcaacccagttccaaagaacttagtgttggaagcagtaaaaactcatggttgagatggaacttcatgtgaatgaatcagcttatgttgttatgactgtaggtcttaaaa

SEQ ID NO: 10260 - DNA, 547 bp, Gossypium hirsutum
  Clone ID: LIB3828-024-Q6-N6-C12
gcgcctctcaaaggaaatgttgtatcaatattaaatgattaaaactccttgcaagggagaatgaaaacaataaagaaagaaacatttcctcaatatccccaaacatctcgctcatatcttgaagttgaaatgcggttacatgaggagagttaattgcgagtggtctaacaaggcttgtttgggcggcactcgagtgttcctgaccacctcaccaggagtggcaccatgtgagccggcttatacgctatcatcttgtagcctccgaatttcttggcggccttcgggtctcctgattgtgtgaaaatggcaccgttcaacatcaaatcaccctctgatctccaatcccagttcttccactcttgctcagttgcatattccctcttgcaaacctgtttagctgcaatgttacgtggggctctaaatcggttgccatggctgataattgtagggtgactgctgcctccaatagcggacatgatccaatgacggtaatcgttgttcacaacatggacgaaaccaaatcggaccctaggcatcctttgtacca

SEQ ID NO: 10261 - DNA, 574 bp, Gossypium hirsutum
  unsure (1)..(574): unsure at all n locations; Clone ID: LIB3828-024-Q6-N6-C2
tcgctgccgcgtacttttctgntcctctanacggccgccttgggtttttttttttttttttttttaaccaaaagttaatgcattaactaaaatttctcaaacaaaaccgagaagattaaaaccatgtccacctacagaatccaaaacattgaaaattacgtacgaaggaccctaaaaaggcgggggggggggtttgcttgattaatcgaagaggctgaaacccaattcatcgtcggattcttccttctcctcgaccttctcttctttcttggcctcggctgcaggtgcagcaccaccaccaccacctgcaggagcggcaaccgcaacagcaccaccaccagaaggaacggaagccaacttctcccttccaatagcaattagctcggtaatatctttgcctttaacttcggataatagcaactctatcctatcatcatcagcctcagcaccaactgatccgagaataaccttcaagtcatcggcggaaggggaagcgtttcctccgagtacggcgagcaagtaagcggcgaccaccttcatttttactttgatattgagggaacgagaaaggagc

SEQ ID NO: 10262 - DNA, 541 bp, Gossypium hirsutum
  Clone ID: LIB3828-024-Q6-N6-C3
aagggattaaaagtgaaaatttcattaattagaagaaaaaaccttgattttttaaggtctttaatagttaaaccaattttttattggttcaacgtagcagattgatcacccatttgtggttcgggtttttattcgatacatagttccattcattaggtggtgagtataggtgggagataatcagatttggcaccaagaatacgagccttagtgtcagggaagttctcaaaatttggcagctcagatacatttccatcattagaaatggcaatggggtagcttagtaggtgaccaggcaagtcctggtcaaggtcgtcctttgagaataggtcccaatatttgtcagccatttggttcactttcttcacgcattccttgctttctggggtcaagaagccgtcatgtaggatgccgaggtgctcgtaccatagcgccagacggaaaccgtggacttgaccccttgctggttgcctaatcgataaatgatatggttggtacgcccccattgctatctcggagtctctcgcaccgtccattgatc

SEQ ID NO: 10263 - DNA, 515 bp, Gossypium hirsutum
  Clone ID: LIB3828-024-Q6-N6-C7
tttttttttttttttttttttttttttttttttttttttttttttttttttttttttttttttttttttttttttttttttttttttttttttttttggggggataaaaaaggacaaaaatttattctcaaataaaataaaattaaagggggggaaaaaacaaaaaaaacttttaccaaaaaacaccaaaaacaaccccttttttaacttttttttttaaattttcccgcataaaaaaaaaaagaggaaccaaatttttgggcaagccttaaaattaattccaggcccccgatactttaagggggaggaaaagtaaaaccatgagggaaaaactaaacactggcgctggtggtggtgttttaaaggccaatttaaagccttttcttccccttttttttttttttttccccctcgggaccatgttaaaaaccccgtttgaaaacttggaaaaaaaaggatttcccggggggcaaaaatttttcaaaaaaaaataaaatgcccggggcttttattgg

SEQ ID NO: 10264 - DNA, 501 bp, Gossypium hirsutum
  Clone ID: LIB3828-024-Q6-N6-C8
gaagccagaaaaaactcggaatcgtcagtaaataggaggtttaaaaagataacatgaatgccatgtctaaaactccgacacgaccctttaaaccatcttaacctaaaccggaacaaaactgatgccgctactttttggttgtaataatgaaacttgggttctaattttaaccaaaaacagtaatacaaaagaaattaataagaaaaacaaagtatgcatgcatgcatgtcaggaaatgggcaaagtatctaaaatttacactcaaaaacagaaaagcttgtagactcctgactattgaatagatcacaatgcattcccatgaaaatgaaaaccattgtgcaaattgcagcgggggggtctcacttgccacccaatgaagggaagtgcccaggatcttcgattgagggagctaacacactgctagctgtattgcctccatatccacctttaggaccacggccacggcctcgaccacccccgggtccgtagtacctttcccct

SEQ ID NO: 10265 - DNA, 531 bp, Gossypium hirsutum
  Clone ID: LIB3828-024-Q6-N6-C9
atgacagatttcactttactaaggattttcatggactaaatagcattttaaacatacataacttcaaatatgacttagattggccattccaatggctaatcatttacaaacccttttcttaccaaaccatagccatatcataagatcatttacacaaagtgagtattttgccatacatgccacattcaaaacacacaagccattttaccaatttaggccttcggatagtgtgaacgagtcttcgacctatcccaattctcaagccagcttgttaaaactacaatgaatgaaaaggagggagtaagcataaatgcttagtaagttcatatgcaaataacaagtaacataaccatacaaatataccaaacaaccttagcatggtatcaccaaaacatatatcacatttctaaacatcattcatcatcttaccaccttatcgttgttgtatctattttcaacccgagggctaagtacatacctgtccaaagtgtccatttcacaacacttaccaaaacgtcacttgcatcttaa

SEQ ID NO: 10266 - DNA, 511 bp, Gossypium hirsutum
  Clone ID: LIB3828-024-Q6-N6-D10
cttgttgttgccagccgtactcttatcacaaccttcaaaaacatccttcacaaaaagtttaacctccatagggtggattcactctgagcatcaatgtcgatctccacctcttcagccattgcttgaagccctggattactttgagcaataatctccaatgccttattaagatcctctgtagacaatctggctatggcagtccccagatttcttttatctttggttgacattttcctcattagatattgcctgaacccttttggcatgagaagcctctcgtacaagctgtatatttaactgtgcttctgcctcctcctcttcacgtcttttctcctcttcggtaactttaggaagaagaagctgccacttctcctcaaatttttccagcaaagttttggccattagatgaacatcacttccttcctcgttgtatttcattgcattatcgaaaaccaatcttacatcagcacatatagctcgaacattcttatatccgttaccatccttagcc

SEQ ID NO: 10267 - DNA, 387 bp, Gossypium hirsutum
  Clone ID: LIB3828-024-Q6-N6-D11
gggggggggggggaattttggggaatttttaaaaaaaaaaaggccatgggaaaagggggcgggatattttaaaaaaaaaaaaaaagggggggggggggaaaaaaaaaaaaaaattgggggggaaaaaaaaaaagggtttaaaaaaaaaaaaggggggggggggccaaaacaaattttaggggggggggaaaaatgggggcccaaacctaaaaaaaaaaaaaaggggggccaaaaaaaaaaagggggaagggggttttggaaaaaaaaaaagcggggggccccccaaaccctttttgggggaaaaaaaccccaaaaaaagggggggaaacccgggggcccccccggaaattcggagcggggcccggggggggccccagtttcccaaaa

SEQ ID NO: 10268 - DNA, 517 bp, Gossypium hirsutum
  Clone ID: LIB3828-024-Q6-N6-D2
cacgtaagaagacaccttagtagaagttgaacattttatcttatttcacattgctcactactcataaaaccatgcaggagaaaactgattctctttttaagttcttgacaacattactaacacccattagctgctataactatggatatatatcatactatctcctgacttttcaccctcaaaaaagcactactgacttcacgtatggcaggtcagtttgttttccgccggtcaagccaatggctatcgagagtagacaggtacttggacttggttgtctaagaaaacaggttactaagctttatccatagttgccttctgattatgctcagggtgtggcaacattttccttggcaagaggagcaacctcctctccttcaatgccaggttcactgccagccaccccgaggctcaacaacatcttctcccacaaccttgatggtcccttccatgaaaaatcttgtgccatacaattctggatcatttctttcagtgcttgagtcccatatgttgcaag

SEQ ID NO: 10269 - DNA, 540 bp, Gossypium hirsutum
  Clone ID: LIB3828-024-Q6-N6-D3
aaatcaaccccataaggaaatcaaattacagatgttactaattacaagaagcacatacagcacaactacagggtaaatgggcaaatcaaagttacaaactatgtcaagatgctggctatttatacaacaaattcaggaaactgtgaaattaggtttaaaaaaggtgagggggggggatactatgggaaataggaaagatcgtcgctttccatatcataaccatcagttatagaagttgatgttgttggttcatttgtattaacaagtttagccttagcttggcgatacttttcaagcatccggcgatattgttgacgtgcatctggagaatcaaccatagacaacacacgtgagactgcctcatcgattgctacatccactttctgtttgcggaacactttgagaatgtcctcttcttcatcatcaatgcaatccgactcactgcgaaaacctcgcaagcctacacctttccggcgccatcgaagtacaaccttgtctagaacaccaacagcccaacagataaccttgtagtttttcctt

SEQ ID NO: 10270 - DNA, 512 bp, Gossypium hirsutum
  Clone ID: LIB3828-024-Q6-N6-D7
gaacataattccaataatatcattcaagggtcaagacatttaaccaaaaatactaaaaactaagcattcaagcatatgtgtttaaagtcattactcattaattattccaagtaaatacgaaggtttaagccggaagcaagatactggaagttcgaacacgggagtaaatataggtaggtagtctctcctctactcattaaacttattccatcatgccttcatatcatccaagccaaacttggccagatatttgggattctcctcaagaaatggggggaaagtcgaacaaaatttctccatgtcagcattaacatctccagtcatggaactttttcagggttttgccataggagtcggtacaagattcagtcatagtccaatctggatgtgcaagtaagttgcggaacaattctacgaggaaatccattgctcgtgtcaaccagagaagaccattggtacaactagatgaatctgttgctgttttacaatcaacctcttctttcaccatactg

SEQ ID NO: 10271 - DNA, 503 bp, Gossypium hirsutum
  Clone ID: LIB3828-024-Q6-N6-D8
aactgaaaaattaggcatgtgtaatcttggctgtaataagcccaatttgcccgggcccaaaaacacatacacaaataaataaaataaaataatataacagtccttttttaaatgtttagtattacaaagcccagatctaacataaacctaattctaaacccaatggcccaaacccgaatagcctgaataccctcacaacccactaagcctaatgcccgatggcccaacaccaagcagcacccagcaaccctaggcagcaaactaacagtcgccgccgctctccattcgcatgcgcgccacgaaccacgccccgagccactcctcacacgcatcaccgtacggcctccgtacgcctgcaatacacaaagcaacaaaagacagacacaaacaaagggcaaacaagagcaggaaaatagaaaaagagagaaacggattgttttttttagagggggcgatttttatttctattttcttctatgaatctagctatagaagagccatta

SEQ ID NO: 10272 - DNA, 498 bp, Gossypium hirsutum
  Clone ID: LIB3828-024-Q6-N6-D9
attcatataataattaaagataaaaaaaacagctagcacattgtaattcaatcatatatcaagctgcttggttattctttattttctttctctttggatagaatccgtagtttctataatctatatataaatctatgaagattctggcgccatagcttggatattcatggccttctttttccctaaaagaccattggcatcaagtttcatgggaagggccttaatcgttcgtttgagttcatccatataagcgataccaccaccacacccattattgaacctgcggtaagggcatccgtaattgcaggtgccgcaaaagctgccgcccatgatatccacatcgtcgcagtcgatacagtaagggcttctttcataacctatacctatgccagcaccgaatccggtaggatcaggatcgatagaggttgaagaatcaggatcagcttcatgcggaaaaccgttgcttggttgaaacccatcggctccgtcagccatggg

SEQ ID NO: 10273 - DNA, 504 bp, Gossypium hirsutum
  Clone ID: LIB3828-024-Q6-N6-E1
aaaaggaaaggattgaaaccaatccatcatccatcagtttgtatttatatgatatcgatataaacacttgatgacagggagttttaacatcattttcttcttcattgttgttttcccatcgacactaatggccaccctcactgtaagactactacgaaagcacccattacaaccatttgccaacttcaaaatccaaaaagacaaaaacagcaaactgactaagagaaatcgtcctgcataaactggaaaaggaaaacataaaaagcaaaccatacaataataaccaaaccgacagaaacagtagcggaagaggaaaaaaagatggatcggaggagatgcgagtgacacatttaaatccctcctcaaaattagcgaccactgttggggcactccctagcgaaatgcccagagcctccacagttgtaacaagcaccggcgcccccgccttcgcctccgccatatttgccttcaccggcaccgccaccctgcccacagtcccgtgct

SEQ ID NO: 10274 - DNA, 405 bp, Gossypium hirsutum
  Clone ID: LIB3828-024-Q6-N6-E10
ggttaagggggggggggggggggggggggtccgggccggggccgggggggggccccatttttccggggggggggggggtaaaggggggggggggaaaaagaaaaaaattggttgagggaaaaaaaagaagaagggcaaaaagaaaaaaaaaaaaaggcggggaggaaaaaaggggggggggggggggggaaaagggggggaaaaaaaaaaggggtggggggggggaaaaggggcgggttggaaaaggaaaaaagggggggccaaggggaaaaaagaaaggggaaaaaggggggggggggggggtttgtttttggggccaaggggggttttttttttaaaaaagggaaaagggaaaagggttataacctttaaacacggggccacagagaaaatcccccccccccc

SEQ ID NO: 10275 - DNA, 528 bp, Gossypium hirsutum
  Clone ID: LIB3828-024-Q6-N6-E11
aacaaatgagcataaacccagacgatacatagattttaaaatacaagatattgcccaacaatgttttctcacaaaagacaattcccctactcttggccataaataagaaaaaaagaaaaaaagcagtctcgatgggctcatacaaagcttcaattatcattatttctagaattgcattctcaggtacctgattcttccctggatatgcaatcgacaagaaagaaaaaaccacttcggggtacaatcgaatttatgcctactcattgaaacaaacatctacgataaaattgtggtgtcactcaattggaacagcatagctctaaaatattcagtcgcgagttgctcctactagtgcaatgtgctcgattaggtcaagtactcggttactgtaaccccattcattgtcataccatgaaacaagcttcatgaaagatttacttaaccctattccggctttcgcatcaaaaatgcttgacctcgaatcaccaacaaaatcattagagacaacatcttcatctgtgtatccaa

SEQ ID NO: 10276 - DNA, 520 bp, Gossypium hirsutum
  Clone ID: LIB3828-024-Q6-N6-E12
cagagcatcctgatcctgcaccacaggcaatggtattaatctttgaaggacaattgaaaacggaagttcagttttgttttaattcaaaaattcatccggacgtaaatccaacactttggtggacagatactaccacgggattaaaacccggtatggcataaaaattcactgggaaactaccaaataatagttgcagtagcgccatgggataaccataagtcaaggaactatcaatcatgtttggcatcagcatccccaccatcaacaattgatgcttcattgaacatgtattctttttggtactccatcaagtactgcgttgatctccttacatccagaaatagactgtaaacacgagtgatgtcctgcacttccacaaccatcccctttcgtttccggcaattcaatgcaaaagccgtgatcagatggatagcatatttcaaggaggtctcgtgcccaattttggtcaacagttgttttgcattttcagacatttttacatcttcctcttggcacctga

SEQ ID NO: 10277 - DNA, 522 bp, Gossypium hirsutum
  Clone ID: LIB3828-024-Q6-N6-E2
ccctaaactttaaatcaagctttgggtttaaatctctgttcaggtacaaagtatttttaagaacaatttttgtcgcatttcattggattacaatactttggtttcagtagtttcctcgatcaactcaaatttctgctagactaagttcccccctaattgaagacaaaaattgaatcatatttccatatttattagaaaccgactaatcgaaaaggaaacctttcaaaccatgtctgcccaaatccccattgttgacagacttgctatagcacaataaccagttcataagaagacatataatccagcggagtcctcatctaacttatccactgaagagacagattgaagcatccatttcggttctcagcattttccagtgaagtcctgctgctactaactttgcatatcaaatctgccatatagtgagccaactagaacaaaagcctccattcgtagatgccgcgcatgatgcatattgtttgacatataaataagagtggttctgcactacataaaaactta

SEQ ID NO: 10278 - DNA, 551 bp, Gossypium hirsutum
  Clone ID: LIB3828-024-Q6-N6-E3
caaataataacatttcttgataatcattcccaataaatcccaaatgtacaatgcacgggtatcaaatgttgtacataccaaaaagagaggatgtatgcatatcaaaataatgtttttaacaagggcgaccaattctgcagtggagtgttccggcataccttgtgagtctggggaccaatcgaccgggttggaaagacattattttgtcagcatcgaatagcttgctggcattaggatcaccggatgtagtaaaataggcaccgttcatgaagtggtcaccctgtgatacccagttccaattcttccactgttccggtgataagtagcccctactggtcgcttgcttagttacatagatgcttgacgcaatatacctattgccctggctgataattgtagggtggctactaccgccaatggcatacatgaaccaatgagtgtagtcattgttgacgacatgaaaaaaacctaatcgacacctaggcatcctgtccaccaatcctttaccgaagcggttcaaagcaacagtgatctgcatcttctcgtcggca

SEQ ID NO: 10279 - DNA, 514 bp, Gossypium hirsutum
  Clone ID: LIB3828-024-Q6-N6-E7
actcaaacttttatactttataatatttggagatagctatgactttacttgaaaggaaagatcgcattccatagttgttgtctcaagactttacgagcatgacttctctattaaaaatccaactgaggggaagactggacgcttgctttgctcttaattgaaatctttattacaattaggtaagtttgggagcaagagtacatacaaaatcctgagctttacgcccatcagctgaaagttcagttaattccttcacggtccatcgatccaccgagaactccacaatatcagcatagtcggaagcaggggaaaccccaagtctttgtgcaacagccgaaaagtgggcgaaaaggttatcgtcttgcccatcgtacatcacagtaagcaggcactccgattttcttcctcatcatgggggcaaaggctcgaacgggttcgtcaggatccacctcaaacagattgatagtgagtttggaataggctgtatggagccggttttcatccctgggaatga

SEQ ID NO: 10280 - DNA, 463 bp, Gossypium hirsutum
  Clone ID: LIB3828-024-Q6-N6-E8
ggtaataatatttctttggtaacaacattgaagatgaacaatcaaatttcttctccttcctttcttcgagctgagttgtggctccaaggcaagaaggcttacacacagccttacactgcaaatcacaaagttcaatagccccttactactcccaacccattcctgtattattttattgtgcagccaaaaggtgatcaccctgatcacagatggcatattaaacaaactctttcacattcatcctcaataataatagtatataattatcacttctcttctctttctttttcctttttgtaaccaaagtcagttgccaatgctcctctcttataaaaaccagaagctctacttctccccaggcatcaaatcaggttcgcatatatccccacgacaaagagggcagaccctgtgaatctccttgagccacttgtctatacatgttctatgaaatcggacgcgtggg

SEQ ID NO: 10281 - DNA, 551 bp, Gossypium hirsutum
  Clone ID: LIB3828-024-Q6-N6-E9
caccatgctcacaaaaactgaaaccttttataaccataattaatgtaagaaaaaaaaacaccagtggtatgaatacagacatgaaatagacattaaactaaggattgttactgttctgacaagtcattaagcttgtctttgatagtttgcaatgctccatcaatggcagtatcaaatgcatcttttttagtcctcaatccaagtgaactaccgtgccttctatatataactctagggattaattcaataacagattctctcatcttccttacttcactccttggaatccccattaacacatctaaaatcttcaaccctttgaaaaccacttcttctttaggtataaacacagagaattctgggtatttctcctccggtaaatgccaccggtactgtgatctcgccgacatttcctcgaagaaaaccgggatacacccggtagtgatagcatcaaaagtcgacctcctagttggtgtatcccctggtggttgtaaacaaaaggttgcttgtaacataggtctcatatacctaataggatcatgttcacatat

SEQ ID NO: 10282 - DNA, 518 bp, Gossypium hirsutum
  unsure (1)..(518): unsure at all n locations; Clone ID: LIB3828-024-Q6-N6-F1
aaaaaaaacagatctgttctcaagttcgttcanatagatacacttgcanagacttgaaaactnnggaaaaccttgaaaaagtaggggngaaaaagaaagaaatgatcactaaatccctacttaaagcacaaagtgaggggggggcggtgccatattgaagaggcagggaaagaaaaaacaatagggaagaaagggccgttgtttcaaatgctctgtacatcgatttgcccggtactcacccgacagaagagccattaattggggccatattacgttagtcatgctttccagccataaccaatattatcatcgagttcgttgttaaaaaacccattgtcgaggaactcttgagctatatccgaaactatatggtcctgcaaatgaagagtctgagacaaatcaggtgctctgtggttgaatccagtgttgccacctgctgctgaggaatcactgttcgaagcacctttaaaactgttgctttgactcnggacaggccctgttacacttccgggtacatt

SEQ ID NO: 10283 - DNA, 520 bp, Gossypium hirsutum
  Clone ID: LIB3828-024-Q6-N6-F10
attcaaaaatagaatataaatactttattaaatagaaatataaatattttattttggcaaggcaagggaatattattttaagttgattcatttaaaagtatgatgaaatttactaaatttctcatacatttattctaatcaagtgctgcaaaaccatgtgaattttgcacagtccaagagaatgtcctcttagtaatgaattacggtcacgttatattcaataataacagtggtgccatcgaaaaagtaattcttgagtcgtgcatacccttctgccatcctgaattctcctcttcctcccaccaccgaaagctcacgttccatctttattaacggattccttgaaaatatgctaatagagctgcccttaaactttccggcagtaaatccaaaatctaagtacatcaccacggtcgttgaatttttgccggacaagatcccaagtcccagagcattcccaatcacctctgagttgtccccaggacctatcttgaggggatcatcaatggcatatagggtg

SEQ ID NO: 10284 - DNA, 537 bp, Gossypium hirsutum
  Clone ID: LIB3828-024-Q6-N6-F11
gaactctatttcattaaaatttgtttttttttggggttaagttataagaggagagcaaagtcctaatagtaacacgattagcacaactcaaactcaaatcacgcctagagcgataaacaccttgaccatcaagacaaattgattatcggagacccacaaaaaaaagcttacacctttgatataaaatagacttaaaatacgattatgacacaacaaaattcacaaacacgaaagtctgcttaggttataatcatcgtactaaaataatcccaacaagaagatgaaatcgaaaatctcatttctaaattgtaaccatagaaccttgaattatgccctcaatcagttcatacaaacagcacacttttgataattataggtttttactagaatttgttgttatatcgggcagctaacaatcacatcatgtgcttgcatcggtttccttcttttccatagtcccggcaccttgctcctccggcttagcatttccatctgccttgttcatgtcttgctcagctggcttcgtcacttcttgct

SEQ ID NO: 10285 - DNA, 505 bp, Gossypium hirsutum
  Clone ID: LIB3828-024-Q6-N6-F12
aatcaaatgaaaaatcttcattatttaactgaaacttaatgaaaaaaattggggcaacttaacaagggtgtacacgggtggtgaatctattctctttgatctatgcggggggggaaaaaaaactgcaaaaaatgagtgcaactggggaagactgaacttagaaaggtgaaaacaaaaaaacaaaatttgggggggtcaaacaaatctgctattggacttttggtttatttttcccttaagaaagcttgggtctttctagatgaggaaaggccctcaaaatgttgtaagcccgcaagtcttgcctgggcaaaatcccaactacaggagccacccctgcaccttgatactttggcacgatgagcaaatgccggagtccgacttgcctgaacagcaccaaggctttagccactgacaagctttccaccacagtgaaaggggttgtgttggtgagaggatgtaaatcaacatacatttccatttcatcacgggtcacggccacctgctc

SEQ ID NO: 10286 - DNA, 391 bp, Gossypium hirsutum
  Clone ID: LIB3828-024-Q6-N6-F2
atatagcaaagaaaacatatatattagcatgtacatgcattaattacatatgggtacaaaacaagattcaagggaactttaggatattggaaatcaaatatgggggggggggagttattcttcataattactctttttatccaacaggattttatagcaagcccttctgcaacatcattacttcttattttggataattaatacgacgacaaccaactcttcctcattatttcatcttaatatgggatcatctccctactttggggggcggggttcactggccataaccttttctatccctttgctctttacagtttcagcctggcaacatcctgatgcgcacctggggtgaccacactcagaacaagtccctggcaacatcctgatgcgc

SEQ ID NO: 10287 - DNA, 532 bp, Gossypium hirsutum
  Clone ID: LIB3828-024-Q6-N6-F3
cacaaccctaacaaatacagatgcatataaaataaacaagacaaattcacagtttgccttatagatagcaaaattcatagcttcaactacacctctcaacagttttcatcaacctgaagaagatgatgccccccgattagtgttgtacaaccgttagcaataggaggagaagaacagaaaccaaaggcaatggcatctggccacacccaaacctccgtcctgcagattcataatagggctggatcattattggaaatttgcaatttcccaccgtaggggtgggatccgttttcgttataactgaaacatttggaaattcgcaggctttttcaaactggttattcttctgaaaataactgttaaaggcataagaaatgtttcccctagcatctaggtttccacaagatgtcccataaccgaggctagtgcagtcagcaaggccacatgcatagctcacactttgtgccacttgtgggtcatcaagtggggctgaaggcttcatcacgcaccacttcctttccaagtactgtac

SEQ ID NO: 10288 - DNA, 522 bp, Gossypium hirsutum
  Clone ID: LIB3828-024-Q6-N6-F7
cagaaaagaaccaaagtactatgcttgggtatcaaatattgtacgtaaaaagggaggacaaatgcatataaaaatagcatttttagcaaggacggccgattgtgcagcttagtggtccggcatactttgtgagctcggggaccatttgaccaggtttgaaaggaatcattttgtcggcgccaaattgcttgctggcacttggattacctgatggtgtaaaaaaggcaccgttctcgaagtggtcaccttgtgatacccaattccaattcttccactgtcccggctttaagaggcccctacaggtcacctctttagccccaaagcctggcgctgaatacctatttccctggctgataattgtagggttgctggtgccgccaatggcatacaggaaccaatgattgtagtcattgttgacgacatgaataaaaccaaatcggcacctaggcatcctctctaccaatcctttaccgaagtggttcaaagcaacagtgacctgcatcttcttgtcggcactgtaag

SEQ ID NO: 10289 - DNA, 503 bp, Gossypium hirsutum
  Clone ID: LIB3828-024-Q6-N6-F8
agattaaatttaattggaattattatttaattaatcataacttaagggcaatacaagggggtggttacagatcaatttatgaaaaggtctgcccatttttttaggcggggggcatgctcttcattttcacattccccccacttcactcttcacaccttggggcaatcaggaggggcagaaattgggggaattaaagtattggtaccacatttctgggcaataagagggaatcttttaggggcatatgggcctatttttggcaatacacctttaaggcactcgcatattccttgcctatctagtttggggttagcttgcttagcaagccctttagcacccgaacaacatcctggggccggatcgggttggccttttatgaagctcaagcaaggggtaatcgacacgataacctcctggcacggaggggcggcatctgcaatttccgaactaaatgtaagtagcacaagggatggttaggatgttgattaatttaaacatggggg

SEQ ID NO: 10290 - DNA, 537 bp, Gossypium hirsutum
  Clone ID: LIB3828-024-Q6-N6-F9
ggtaatatagtgacgtgtcattcatttaaatcattattaactcaatacttcagtacatttggctaagtagcagctattttttatccaaagtagggcagttaaaaagtagatcttgaggaggtttgttccatatttcaacttacaaatggagggttaaaagaggaaaaccaaaaggagtgggtaaaaagaagaaaacagaggagaacaaatatttaaaatgagtagctaacggccgtttgctagtgggctgacggctgattccttgcaggggcttggggggaggctggtttttccggaagcaacaaggcgttgcacaaagctttcaattctatttccgttagtctctgtcagtaacctcttcccgccaaacggtaacgactcgacccctctttccttcagtacctcctccattctcatccttccactccccagtccgtttgcctgaattcgaacatagtcagtacggttccaacagaaagcgttccccaacatctggtccaccgtctccgagacaccgtcaagcacaatgtcaacgac

SEQ ID NO: 10291 - DNA, 529 bp, Gossypium hirsutum
  unsure (1)..(529): unsure at all n locations; Clone ID: LIB3828-024-Q6-N6-G10
gccacaaattgtttcatgtaatatanataataaaaataatggagaagctccacattctgccgtacaaatggcagtatcaagtccaggtttgctggcatagcgattgacttgataaaagacaaaaaaagtctagaatagaaacacacaccatgctttatcaccaggcaatgcctgggtagcaatttatttaatagttataacataagaaaataagccgttttaattataataatactcttcctcctcttcccagaggcaactcagagttgatctaggtgatccacatcccccaatgccgttgaagctctggtaaatgatggaaccgcctgaaccaagctcttcgatgctactctcccggcaatggtatccttcaacagccagcagacaggtctgttcaaatgagtgacaatcaacatccacatgcacggcaacagagaaattacttggtttgaagcaaactaaaaccctttgcaccaactgctccagattcaactctttcagatcatagcccacagcttcgaagcttgca

SEQ ID NO: 10292 - DNA, 373 bp, Gossypium hirsutum
  unsure (1)..(373): unsure at all n locations; Clone ID: LIB3828-024-Q6-N6-G11
gggggggggtttttttttaaataaataaattttagtggttatggtcgtggaattgtacatttttgagtggagttttttttatgagggatgaaatactggttgggtaagaaacttatatatgggtcgcgatccttatttaaatttaatgggggtttgtantgggggatttgtgatgctnccttctggtngtgantttaagtttgtcggacctttttataatggttatagattggttctgttttgatagagnttttagatgcgattgtgggtgaattgggtggggggattgttggtggcattgttgttgcacttatttggaggggggtattgattttggtgggtggggtgtgtattctgtggggtttattggatt

SEQ ID NO: 10293 - DNA, 520 bp, Gossypium hirsutum
  Clone ID: LIB3828-024-Q6-N6-G2
gtaaataacatcacatatattctcaatcaagtacagagtacataagactatgaaaataaacaaagaactgtagacaatgcggattggcatagtaggtacttgtgaatactgtaagataaaatctgggggtgagcggaaaataaatggcggagccaaccggtgcaagtctttctaattgaaactgggtttctcaggatatgtgcagccagacctttggatgataacatttgctgcatagcaaccggctctgacacattcttcgataggcttctcttggactagctgtgacaaaaatccaccaacaaatgcatcccctgctccattggtatcaaccaacttctctttcggtaacaagataaccgggaattttttcacttttccatcctcagcgaccacaacagggtcagctccctgagtgataacagtaattctcttatgtgttcccgaagccttgggccattggagaaatctttagagcaaccttctcaacattatcggtcttcccaaccatagaaccttt

SEQ ID NO: 10294 - DNA, 325 bp, Gossypium hirsutum
  Clone ID: LIB3828-024-Q6-N6-G3
gatctataaaataataataataaaccagccaaatattttcaccccaaatccggtgactggatgggttaccataatatagcccacttaaatgatggattataatcctaaaataagattatatatacaatgaaaggggggggggggggacagtctaacatgaggatccatgcttcataccaacaaaaaaagagtcaaatttggcttattacacacttaaaaccctggtatcctcctctcctaaggaaacaccacaaactacaaaactaaagtttcccacagggttgtttatgttgaactgggagttttttttaacaggggctgtttt

SEQ ID NO: 10295 - DNA, 52 bp, Gossypium hirsutum
  Clone ID: LIB3828-024-Q6-N6-G6
tgcacctacgacacgtgcccttgggggccagaggcccctactgcgggtcggc

SEQ ID NO: 10296 - DNA, 526 bp, Gossypium hirsutum
  Clone ID: LIB3828-024-Q6-N6-G7
accataaatatgcataaaatttatacattacaatccatagcatgaaggcatttgaaacatccaaagaaaagctcagttattagaattacaactctaaactgtgaaatctgaatgcaaataaagtaaaagtcttgggtggccttgcttcattcatccatctccatcttcacagttcatacatgcaatgtttccaaacacaatgagtacttaacgaacattaagcatataaaagggaaagataaaatgaaatcaaatctgatagagaaattaaaattttaccacatacttcattcttcattagtaaatatcaaccttttggatgtgagcaattttgtgccaatcttcacccccattttcactatatcttttgctcaacttcggacatccgagaattctcaattctctaaggttggtgaggcggtctattccctccggtagagctgacaaatttctacaattaacaatctcaagtttttgaagagaagtgagattcggtagccatgccggtagaatggacaagtttgga

SEQ ID NO: 10297 - DNA, 529 bp, Gossypium hirsutum
  Clone ID: LIB3828-024-Q6-N6-G8
aacaaaacctaactatacgtgtaaattttcattataagttgggtctccaaaattgtctgctaaaagcagtatacataggactaatgttttctaactgtgaaactaaaaaataaaaataaaaagctgaagattccgaccaccaaaacatgactcgatatgccacctgatttgatggataatgttcgtctcggagtagaaacctttgcagggttcatttggtgctcatgaactctaatccggttgccgtgggcatcaatccatactgcgccaaatatttgggatcatagaatttgcttagatgtctcatcccgttgtcgcatagaatggttacgatagtgtggccagggccaagagcctttgccactcgaacagctccaacacagttcatggctgaagaactcccgagaaagagcccgtcattcttcaaaaggaacctcgacatttcaacagcttccttatccgtgccttgaaaagctccatcgagctttgccatcataaaatttttagtcaatctgttgattccgatccc

SEQ ID NO: 10298 - DNA, 178 bp, Gossypium hirsutum
  Clone ID: LIB3828-024-Q6-N6-G9
gggcaagccaaaaagggtttatttgggtggggggttaaacaatgggttatgaaaaatgggtaggcatgggatggggggggggcggcctatcctacaaaaaaattattttatctaaattaaacccatggggcggttttttttttacataaaaaggggtttctacataaaacgggcccgg

SEQ ID NO: 10299 - DNA, 518 bp, Gossypium hirsutum
  unsure (1)..(518): unsure at all n locations; Clone ID: LIB3828-024-Q6-N6-H1
aaacaaaccatactattaccagcacatttaaatattcaagtaaaaacactcaacacagcattgtcctaaaaacactgcaaaaacaagaccacaaattcaaaattataaaaccatcgtaacgccaaatcaagtggggggggatgccttggcaactccaccctgttcaacagttttagatgctggtgcagcctcgtaatttccattagtgctcccaccagcaatgttgtcggcaggatatgttggaggctgtgagtaactaccaccataagaggtgttataaggtgctccataaccagctccataggttggggctccatatccaggctgggcagatgtggcaccataacttggtggttgtgcaagttgtgaacctgtctttggttgaccataaccagaagatggcggttgtgaatgatatnctggctggccataacttcctggggtgctaggcgactgttgagcctgcccatacatttgcggattggccaaaggtttntgcgtttgtggttgtccatatc

SEQ ID NO: 10300 - DNA, 480 bp, Gossypium hirsutum
  Clone ID: LIB3828-024-Q6-N6-H10
aaggttaatatttaatttattttttggttcatattacctataaattaaacaaacttttttaggaaatttaataaaggatagggggggggggggggaaaaaacccaagaagaaagcctaggacgggaaaaaaaaaaacgcggaaaaatgaaaggacaatatagctgaaacttggactaaagaattatataggaacaaaattatgaaaccaaaaaaaatttttttttttggaaaaaaaaaaaaaaaacctagggggggatttaaaaaaaaaaaaaaagggggaaggacttttttttaaaaataaaataaaagggaaaaaaaaaggtgaattgaaaaaaaaaaaaaaaaaaaaataggggaaaaaaaaaaaaaaattaaaaaaaaaaaaaaaggatggaagaaaaaaaaatggggaaatgactggaaaatataaaaaggaaaaaccaaaagggaaaaaactaaaaaaaacccccccccccccc

SEQ ID NO: 10301 - DNA, 539 bp, Gossypium hirsutum
  Clone ID: LIB3828-024-Q6-N6-H11
ctaaccttaaatttctaaacttaaaaaaaacgtttaaaacaagagaaccaacaattagaaagccaccaccgcatgcaggtttgagtcaataagtccactcctgcggtaaaagaacttcatgactcatctcttgctgggggctcaaactccgcggcttttgatttcccacaaaatttcccccacttcgaagcctcaaagcagcagcatcagaagtgaagcttgggttgaaccgagggtgctgaagctggggttgagccccaatctcatccagattcaagttcaaggcctgagccactctagctggaaccaaaacagtaggacaagctgtcttcttgcgaggatcagaaaagcttccaacgcgacgaggcaagaaaacaccagttccagcacattcccttttcccatttggattgcccaagaaaacagcccgcatacccgatccgttcagtggctggggttgctgttgctgctgctgctgctgctgctgcagagggggccacgcagatggggccaaacccaaagtcctattggcatacctt

SEQ ID NO: 10302 - DNA, 528 bp, Gossypium hirsutum
  Clone ID: LIB3828-024-Q6-N6-H12
gcctataatatttcatcattcagttcatttgctttcataaaactcaagacaatatttagaaagaaacttcaaagaaagaaaaatcaagtctgcaaatatccagaaatgcaacagcagttacagcaaaagtaaatgactaattctttcacatccaaaacaggaaaaaaaagcaccagcaactgggagttgagattttgaattgccaaaatggcaataactttccttctccttagtcctcatattcgggttcctcttcttcttcttcgtactcttcatcatcagctgttgcatcttggtactgctgatactctgagaccagatcattcatgttgctctcagcttcagtgaactccatctcatccatgccttcccctgtgtaccaatgcaagaaggccttcctcttaaacatagctgtgaactgctcactcacacgcctgaacatctcctgtatggatgttgaattgccaataaatgttgatgccatcttcagcccagtgggtgggatgtcacaaacagtcgatttcacat

SEQ ID NO: 10303 - DNA, 534 bp, Gossypium hirsutum
  Clone ID: LIB3828-024-Q6-N6-H2
aaaaaacaaaatatacattattgtacctttcaagaaaacctgagagctgaaccttacaaacaaagctgaataaaaacaataaataaagataaccagacatgagtaaaagacaaaatatccctaaatctactagagggggggtgagccccatgaatgtttattgatttttgcttataggttctttaatgggagattaaagcatatatcccccttgctggtttaaccacaaaagattcatgctttaattcccactctggtcatccatgtaaataccaatttccttcggaatgtattggattcgggttccatttcagcccaatgtcgcaaacaataacaatctgatggatcatctatttcatgacagtttgctgcttttggggaaggtcttggtgccgcttgacggaatcttggttctcaccctctacacttgtgtccttatcttccttagtcaggtatttgtcgacttgtgcagcagcttgccttccttctgagattgcccacacgactaacgactgaccgcgtcgacaatctccc

SEQ ID NO: 10304 - DNA, 531 bp, Gossypium hirsutum
  Clone ID: LIB3828-024-Q6-N6-H3
aatgcaatgcctggtaattatttataaacatgtgaatacacattaaacttgttctcttcaaaacaacatgaagctcccatatccataaactaacaactgtaagtacaaatggtggtaagaataagaacccaccaagcgagaatctagattaacaaggaaattgatcttaatataggaattctctaggataagtcaccaaggtcataatcacatgcacacaaaaaagtttctagaaaaaatattaaaagcttcaaaatcacttgcgataattgaccaattattccagataaccagttttcagcgtttcctctttgaatgagcggcgatgaagttggcgtgtgaaactagttgttgtgtccaagaaataaagaacacatgacatgatgcagcagcacaaaaagaagggtatgggaccaaagatccaaagcaatagggggaaggataagtaaaaggctcgtagcccgagcgaccaggaataacttcctctgtttaagtttcttgcagcatattcaacagattccacattgtcta

SEQ ID NO: 10305 - DNA, 501 bp, Gossypium hirsutum
  Clone ID: LIB3828-024-Q6-N6-H7
atctaaataagcttttgtttgtttatatgagaaattaatatacatgatctataatgatttaagaggaaaaaaacaggatctaatcaaagcttgaacgagagaaattaaaggaagagaaaaaaagttccaaatctaatctgcaagagatctttcagcttcttatgttaaacatgaaagacgttagatcggggattttaaaaactaacttgggggcaatatatatatatatataaggatgaaagaggggaaaggaaaggggtgataaaaccaaagagatcaaagaaggaagagaagaaattagagggggaatatatatatacacaagagagggatgttggcttttgatgatttaaaattgcagatctaacatcaagaagaagaggaaaaacacacaggcaaacgccaatacattcaccaaaacgggaaaactcaaacatagctttatattataaattttcactcttttctcaaaattttctcccataacttgaataccccaaa

SEQ ID NO: 10306 - DNA, 528 bp, Gossypium hirsutum
  Clone ID: LIB3828-024-Q6-N6-H8
aaccaaataatgaatacattaacatatatatgtaatattaataataaattttttttctatacatccgataataaaaaaaaccatcaatttaagcactaatccgactttttttagaacacccaacgcccgctatattattccattgaagtagctccttcaattacatttggctcagacacaataaaaaataataaaccggagttgttggaccgccatgaagagataagagttaagcgcagggcggtggcagctgctcgccgatgtagttaactttgacgttggtgcagttagaactgaagggagtgtcttcattatgatcgggatcaccggtatactctaagtgaatgtccttgagggtaatgcctttgcatggaaatgattggctgcaagctaggactacagcaattttgcttattgttgttcctctgatgtttgagaattcaacgtcggagatgagcacttttgagtccacactgcctggaatcgttgcatattcttgatcgatgagaatagggttcttaacatggt

SEQ ID NO: 10307 - DNA, 525 bp, Gossypium hirsutum
  Clone ID: LIB3828-024-Q6-N6-H9
gaagggacactagcaaaatctgggaatcatttgaggcgaataaagatgacatagcaattgatttggtgtgccaattgttctgaaaatttgttttaaatgaaaaaacaaagacagatcaactgtatgaaatgatgaggtcatacagcacaactataatcactgacatcctaaaaccaattagggaattaccggtaacacaatccagtcaccggtaagaaaatagcctcccaaaatttagtaaccatttatctgaggccttggagttgaacccatcagccgagaaaagggcatttgaggacggccaggaagacccctttgccccgcatatcgatcatctgttttctgatctgagaatgatttggaaaaggcttgagcaagctccaaagctgatgctgcttttccatagcgaacaccagcagcttcaggagagactggtttaggctgctccgcaggcttacgccaggtctcaggtgatggctgcctctcctgccgctgctgcctctcaatttccttgtcattccgcca

SEQ ID NO: 10308 - DNA, 529 bp, Gossypium hirsutum
  Clone ID: LIB3828-025-Q6-N6-A10
aaaaatcatgtagaaccatcttttactatcaaatgaaataaaaataagactagtttttttttcccccaactacatgcaacaaataacacaaaaggacaaatatcatcacatggaccaactaaaactaaattttcatttaagaagagcagcaaccagagttctggttaacaggctgtcctttgatattcaccggtggaggtctcgcattgttcatgcctggttggctagccatcctgtatacaatcattgcatggattgaaaaataaaatacaataatttaactaaacaaatattaatagtaaaaaaagttataatggtaaaagtactatggagaccctatactaggaatgtaattgcattttgctttactcaaaaactcaaattaatccttttgttaaaaattccaaccatttctattgttaaaaattggcctctatacgctagcatgatgtacatgtggcatgccacgtaccactgtttgattattccatcaaaccatattagtttttaactgtacaaatggatgaaa

SEQ ID NO: 10309 - DNA, 377 bp, Gossypium hirsutum
  Clone ID: LIB3828-025-Q6-N6-A11
ggggggggggggggggggtcccccccggaaattcgggccggggcccggggggggacccactttcccttttgggggggggaaaaaaggtggggggaaaaaagggaaaaaaggggttcccggggaaaaaaggtaatccgtaaaaaatccccaaaaaaaaaaaccccggaggaaaaaagggaaaagcgggggggcccaaagggggggccaaacaaaaaaaattgggggggggtaaaaggcccgtttccaaagggaaaaacctgggggccccctttaaaaaaaaaaacgcccaaccccggggaagggggggtttggaattgggcccccgggggggttttttttttccccaggagaaagggaaaaagtttttcccctttaac

SEQ ID NO: 10310 - DNA, 473 bp, Gossypium hirsutum
  Clone ID: LIB3828-025-Q6-N6-A12
agtggtaaaaatttacattctattagcaaaattaaaccaaagttggttgagatgttacacatgtttcatgttctaggccaagaaggtagcatccttccatttatattgacctctacctgcgggcggttctctttcgattcaacgtcatatacataatcaaggtcatcaaaatccaggtcattctcatcagcagggtattgatgattattatcactggtaccatctttgtcctgcctttccactgtccttctcttggaccgaccagtgcttctactgaagtcgtcattgttgtctatgtttgcgtttgtgtttcttctcctctttgcagaatcattactgtcattgctgctgccactattgattttgtctgttttgtagtgttccttgatggtagcttcaatggtttccaacaaccgatctccgtatttgagtatcttagccttcccaatgccattgatctcgaggagttcttc

SEQ ID NO: 10311 - DNA, 534 bp, Gossypium hirsutum
  Clone ID: LIB3828-025-Q6-N6-A2
gccgggggtttttttttttttttttttttttttttttttttttttttttttttttaacaaggggctgttggcattataaagattagaaaacaaagtaacaacttcccaatatgaatgtcatgtttttacaggctgcgaaaaaaaagcctttgggggggggggcaggaccaaatgctaaggcaagcccccattcttttgctcctcctcttttcaactcttccctcatgtattccatcacataaaaaatgggattggtgctcacatttccgaagtccttcaaagctttcctgctacattctagtttccccttgttcagtttaagagtgctttccaagcggttaagtatcgccggtcctccaggatgaactgcccaaaacatttcattgaagtctgtcaaactagcctttgacatgagtttcctgcaaaattcctcaatggtgtcttcgatcttctggggaagggctctgccaagtttgaagtttatgccttctttagtaaggcacccatggatgacactctgggttcctggcaaaa

SEQ ID NO: 10312 - DNA, 307 bp, Gossypium hirsutum
  Clone ID: LIB3828-025-Q6-N6-A3
ggccaaaaaagggcacccctcaaaaaaagggggaaaaaaaaagaaaaagaccaaagcccccggggaaaaaggacaagaaaaacaacccaagggggggggacaaaaaaaaccccctaaaagggcgggggagccaaaaaaaaaaagggggggaggaaaaaagggggaaggggggaccctttcacccgggggaaaaaagggaaacaccgccagaccacattttaaatttacaagggccaaaaacccccaattaaagccccccaacccacaaaaaaaataataagtattccggacccgggggcggaccccg

SEQ ID NO: 10313 - DNA, 398 bp, Gossypium hirsutum
  Clone ID: LIB3828-025-Q6-N6-A7
aacatcataaaagattaatttaattctaataaaaaaatactggtttacaaaacaagttggagatatcttatttctctcaactctcaagcatataatgcatgataagcaaaaaaagggccatcttggtgacaatgaaatataatagattactgatctaacaaagcttagtggtttaacaaggcttagtgcacaagcatcggcgacgaaagccttggcaatgtccaccatcaaaatcaggctctgatttgcaaacactagcacagttggtagaactcatgcacatccccttgaatttaccgctttcagccacgcatgttttagcctccgctgacataggccccatccctgtggctagaagaaatgataaaagaagaagagcaactaaaactgaacgatcc

SEQ ID NO: 10314 - DNA, 511 bp, Gossypium hirsutum
  Clone ID: LIB3828-025-Q6-N6-A8
caaggaactttagatattgcaaatcgaatattgttttgagctatttattcttcataattactctttttgtccaagaggattttatagcaaacccttctgcaacatcattacttcttattttgtataattaataagacgacaaccaactcttcctcgttatttcatcttaatatggtatcatctctctactttggtggactgggttcactgtccataacctcttctatccctttgctctttacagtttcagcctggcaacatcctgatgcgcacctgggctgaccacactcagcacaagtcccaccacaaccctgacggcaacactctccactctcacatcccgactgtcctggcattagtgggatttttgggacttgtgggatctgtgggacttgtgggatctgtgggattagtggaatttgtgggatttgtgggatctgtgggatttgtgggatttctggaattcttgggatttctggaatttgaggaaatggtagaacgaaaccaccag

SEQ ID NO: 10315 - DNA, 531 bp, Gossypium hirsutum
  Clone ID: LIB3828-025-Q6-N6-A9
aagagttgaatatagtattattattattataaaaataggacaaagttgttcagattaatcaataatcgacaacattatttcaaataatgataataaaagaagactaatggcgatggttttggaagattaaactccaggggtcatatcgggatcaaagggaacaccagtttgtgccagccattcgtcggattgcaaaaatacgcgaggagtccatttcatggcttcatccatatcgattttcttgatagctttccatgtgaccctgccctcggtgttggcaccgggtcccctattttggaactcggcaaagtaaccagtgtccagtcctacagtgccttccatgggggagtaaccctctggtgtaatgatgtcatcgatttgacattgcattatgatagttgtcgcaaattgtttccagggacgaccaaggtacgtcttattcttgtccttcaccgggaggtagtcaggggcgcccgagatggtacaattttgaagcacaatggctgtgttagtttcttcttctttctttcc

SEQ ID NO: 10316 - DNA, 529 bp, Gossypium hirsutum
  unsure (1)..(529): unsure at all n locations; Clone ID: LIB3828-025-Q6-N6-B1
gatctgcatatataaattcatttgatcaagtcagaaggaattatctacactcacatgtactgacatcgtcacactcacatgtnnactgacacgtgtgggtgggttttattggggttattannttcttagcttctataggagggggggaggaaaattgaattgcaaaaaataaatttgggagataatgtaccaactctattctggtgggagaagagcaatctctatttcttgaagtgattttcctttggtctccattacgttctttttaacaaagatcacagccattatgcaaacgctggcgaaaattgagtataagagctgtggaccgagttgctccagcaagcgcaggaagagcaaaccaacgaagaaattgattacccagtgcactgacatacagaacgccatagcttttgcccggattcgattagggaaaattttaggtaggaggagacctggaacaggaccagtttccagtgcaaatgttaagacgaacattagcatgccaccaactgataggtataaagatcca

SEQ ID NO: 10317 - DNA, 532 bp, Gossypium hirsutum
  Clone ID: LIB3828-025-Q6-N6-B10
aaaatgaaaaagactgtttttatgtaatatgaataaatatattaattacaattgcactgaatctgttggtatggtttaagcggtggcacttagggtttttgggacagggctggaacatggagtcgggtttaatttgccactagttttaggcttgacattcaaacattgggatgttgcgggttcaggtccggtgtgcttaatatcaatgtctgcaagttccacattttgacatggcgaagaaccgctgcaaataaacttgacagcttctggaagcgcagatgtgccacggatgttcttgaagctaatgttgcttagtttaactttcgattcttcatttatcttgcatttactccatgggcaatatttttgatcaattaggataggggaagagacattattcacgataatatcctcaaaatgtacatctgatactatcccaggagattcgcctggccaagttttgattcgagctccattcgaagtattagtgatggtgcagtttgtgactttaactccctcaactggctcttca

SEQ ID NO: 10318 - DNA, 506 bp, Gossypium hirsutum
  Clone ID: LIB3828-025-Q6-N6-B11
gtaaatgctggctcaacctttcacatttaataatttatgatgtacagattccgcatatcaaatggttgcgcaaggagaaatttttgttctctcaagaaacaaaattgttaagcaagaaagacttgcccaaatttagtagattataaaacttctctaacctccttaattaactttatgtctcaggagtctttctctttttgtcagatgctgaagccgcctcaaattgagcttgaccaaatacagacccgcaggtggaacatttcttgtgatgcttgcagaaaattgacaaacatacagaacatatgtagcccatgtcaatagtgtttttatggcaaaaacatgaggcgcgaaaatcaacaccaacaggctttggaagatgtatgaaactgcgagaatgcaagtcagtagcaaaaatagtcatgagatactgaaacagcccatccaaattttgcggtttatgatgtacaccaccagttatgtaagaagcctgctgcaggaaggctgaa

SEQ ID NO: 10319 - DNA, 523 bp, Gossypium hirsutum
  Clone ID: LIB3828-025-Q6-N6-B3
gttgaaagctagaatactttcattacaaggcaaatagataaattcattgcaaccattattttttatacaggcttttggcaaagcaaccatgatgacatctcagtcatcaaattattctatatgtataagaacgctagctagttgaccgccttagagcccagctgccgaggaattgaagtggcgagtgagaaagaacaaggattcaccatcttagttttgctgggaagtacttttctatgagggagagatagtatggcttcaccttttcgacatcgatccgaactttgctcttgctgtaaagatcatatttgttgaatatttcgagccacttgagattctcgacatcctccccgttcatcagttgcttgtatgaccctgacctatgcaaggcataaaatgaatggtatctgataatgaaaagagctgctgatggcagagttgtattgttctctttagccaccagatacatgtagtcatcatgcccccatgacatcataacactgttaagtccacagccctctga

SEQ ID NO: 10320 - DNA, 526 bp, Gossypium hirsutum
  Clone ID: LIB3828-025-Q6-N6-B7
ttttttttttttttttttttttttttttttttttttttttttttttttttatttttttttatttttaaattttattaaaaaaaaaaaaaaaaaaaaaaaaaaaaaaaaaaaaagaaaaaaaaaaaaaaaaaaaaaaggaaagggggggggggggaagggttaaaaaaaagaaaaaaaaaaaaaaaaaaaaaaaaaaaaaaaaaaaaaaagaaaaaaaaaaaaaaaaaaaaaaaaaaaaaaaaaaaaaaaaaaaaaaaagaaaaaaaaaaaaaaaaaaaaagaaaaacaaaaaaaaaacaagggaaaaaaagcaaaaaaaaaaaaaggaaaaaaataaaaaaaagagggaaaaaggaaagggaaaaaagggttaaaaaagataaaaaaaaaagggaaaaaaagggtaaaaaaagaaaaaaaggggacggaaaggggaggagaaacaaaagaaaacaaagaggaagccgaaaagggaaaagggggaaaaaaagaaaaagctaataagggggaaaaaaggggggggggt

SEQ ID NO: 10321 - DNA, 530 bp, Gossypium hirsutum
  Clone ID: LIB3828-025-Q6-N6-B9
aaatataaggtaacattttaattcccctttgataaagtttttcacataatttaaaacaacaattagtttttaataaaatatcaaacaacacttttagaccccacattgaacatcttcatgggactaaatcaagacacatgcatatatctatatataaatatcaaacaccaaaattatactgagattttaaaccacaaatattgtcccatgaaggttcaaatcaaagtattttccttcatggatcaggttgagcttcggttccggttctgttatattccgatttcggttccgaatcagattcggcatcgaatttcccgccagaggggcttctcttcatcgaagatgtcttagttagatgactgtaactgcctttttccttaaacaattgagcgaaatggtgcttgcaatacaggaaaccgtccaatgcggcatatgacgatgttgtaagaaaacaacctccatgtgcacacctaaagcagtttttatggtatatttcaccttccacagtcaccttttctaaaggataacaa

SEQ ID NO: 10322 - DNA, 467 bp, Gossypium hirsutum
  unsure (1)..(467): unsure at all n locations; Clone ID: LIB3828-025-Q6-N6-C1
aattccaaatccaaaaaggataaaaatgaacaggtgaaaaaccaagttcagtcacaactataaccccataacagtgacagtatttttcaagttccaaaacagtactgaatcaataaaaaagaacccagctatgatgggtgtaaccaatcaaactcattttcagcacattaaaggccaacactactaccanactcatgaaacaaggttgtcatttaaagacaatgaagccagctgatcagcagctccaccagcttgctgctgttgctgtgctacagtcctcagaacctccattgcttctgcaactttggcttttagagcttctggtgactcgagcaagtgtaaaacctccgtctggtccatctccagaagcatccctgttactttggctgctgcatcgggttccagctgctcaacgagtggatagagattctcccccagcatcgttctttgctgttctggagtagcat

SEQ ID NO: 10323 - DNA, 525 bp, Gossypium hirsutum
  Clone ID: LIB3828-025-Q6-N6-C10
aagcagttaacttgtcagcaggctttaaaagtaggtaaaaattacatacaacagtgagcatttattgggttttttttagttataagaatagaaagtttttgcctggcatacagataagaatcaggattttaatcaaggaattccaattcatcctctttaagatgggctaagaacttgacaggtcctcgctcttcaatctcagtgacgaactccaccttgaaaggtagattagctgaaatccttttccctttccacacccccacgaattgtttaatcactccttccatgccgttcagatccacctcagggacgcgaggcacgtggtaaactttgagaggcacttttaccctaacctttgccccaactttagccgcctctgggtcttcctccgatcccgaaatcgacgcgtctttctcgtccttgtcgacggaagcggtggagacagcttggcaggaaacaactctcgtcctcacctttatagaaacggcggttaaacgggaaggaaacgacgacgatttcaacgta

SEQ ID NO: 10324 - DNA, 528 bp, Gossypium hirsutum
  Clone ID: LIB3828-025-Q6-N6-C11
aaacgaaatagagcttcttctcattcattaggaatctgactcacttccttacattaattatgtaatagtcacaatatatcctgagatagcagagatgctcacactggacagaaaaacagtaaatattagtactggactctatctattggcaagcaccaagtaaccgtggcggcaacaggcaaaacctacgacaagccatggctactttattctaaaaacacataaacaacaaaacatattatttcttaaagacaaaggcgtctctgcttccagggagctttggctttggtctctaatcatttacaattgcaagggttgcaggtgcagttgtctccacacttgcagccgttctcagccccgaattccatctcagctccctcaaagtgtgctttctggggtgctacaccaagaaccagagtctcagttgtggtcatctcggcaacgtccaggtctgggtacatcttgcatcctccacagccactgccacacttgcagccagaaccgcagccacagtttccaccacagcaa

SEQ ID NO: 10325 - DNA, 541 bp, Gossypium hirsutum
  Clone ID: LIB3828-025-Q6-N6-C12
caatcaagcttactttaaatctcttttattcatgtaataataataaataaataaaaaacagctagcacattgtaattcaatcatatatcaagctgcttgggtattctttattttctttctctttgtatagaatccgtggtttctataatctatatataaatctatgaagatttctatgaagattctggcgccatagcttgtatattcatggccttctttttccctaaaagaccattggcatcaagtttcatgggaagggccttaatcgttcgtttgagttcatccatataagcaataccaccaccacacccattattgaacctgcggtaagggcatccgtaattgcaggcgccgcaaaagctgccgcccatgatatccacatcgtcgcagtcgatacagtaagggcttctttcataacctatacctatcccagcaccgaatccggtaggatcaggatcgatagaggttgaagaatcaggatcagcttcatgcggaaaaccggtgcttggttgaaacccatcggctccgtcagccatggggg

SEQ ID NO: 10326 - DNA, 505 bp, Gossypium hirsutum
  Clone ID: LIB3828-025-Q6-N6-C2
accgcagcaacacttatctctcgtattattgggaaatatatccacaaacacatcatctttgaacgttctaacacggaagcagcggcatacaaaagccatgttcacacaaccgcgggggggggagacataactcacacctcaaattgcaaactaaattttcataccaacaactcaatataggaaagcagctcagacgtctccagctccaatcaacgcaagcagcattttctcatagtctccaaaggtattttcagcaatcgctttttccagggtcacactggttcttcgctgatattcctccttaatacgcaccatgtttacctccgcccgagtggcgaccactctagtaagagcccattcatctgttcccaggttattgattgcttgacgtagcacctttttaaaatattttttagggacagtcaagcacttgattggagctttcagcaatttggaggaattttctttaaggtcggccttcaaatccttgttgtatagcttccca

SEQ ID NO: 10327 - DNA, 332 bp, Gossypium hirsutum
  Clone ID: LIB3828-025-Q6-N6-C3
cctggttcccccgggccctcccggggggggggggggggggcccccgggggggggcccttggggggcgcgggggtgcctggtaaagggtttttccggggggggcctgttacccgtcaaaatttaccccgaggagacaagcgggaggcctaaagggaaaaaccgggggagcatagggggggaataaaccaaagggaagaggggggccacccatgggcgtaattccaaaggaaaaaatgggggacccggcggctttagagaagggagaaacggggggggaggggggggtaggggaaaggccccaaagggggtaggagttggccccctggccccgg

SEQ ID NO: 10328 - DNA, 525 bp, Gossypium hirsutum
  Clone ID: LIB3828-025-Q6-N6-C7
gaaaaaacttctcaattttccttactcgtctcataattttgatttccactacaatttaactgcaaaaattaataattcccatgaaaaaaaaacataaactccaataactaatggcatccgaaggacctgaccattgccaaaacctacaactttgctaactcttaagcttctgttttctctaccctttttcccccaatttttctcataacaatctctctctattatttaaacatattggtcatctattgctctattccccccatttcaaccctgtacaagaaaaagaacaaagaacgaagagataataaaataacaaagctatactactcggactcgggtgtaaatcagataaaagtatgtatccgacatactaccttcgatttttccaacactttccatactcatgattggttgtgtgtcgtatacagtgtaagacactcatatataatccaatgctgggttgcttttatttggaatcaactctggtaaattgttggcaaccattgttgtggtgggcgctagtgc

SEQ ID NO: 10329 - DNA, 516 bp, Gossypium hirsutum
  Clone ID: LIB3828-025-Q6-N6-C8
gggggcatgcataagttcctaactgttacctggaaaacaatcttgacatccctaaataatctcttcaaaacagagtttacacacaggggaaactaatggaacatgtttctcgaatcaaatcgacatgttgtagaaacagagcagtatcagcccaccatttagcaaaagtttgaaagtgcataaaagcatctctggttttatagaggttcaaagttgcctgtttcacaggcaatctattggcattaaaaacatgtggaacatccttacttataattagaggactttagctatataacattgtacatgcacaagatgtatgcttgcagcaattagccaccgcagcaggagccacaggcaggaagggaactatggtcaattccccgaacattgtccattccccgtgggggtcgtcgggggccaccaccaccaccatatgggtccacttccaggtcctcctggaccaccatcccatttcttgcttgaaccaaagccttttctgtaggcatcggacttttc

SEQ ID NO: 10330 - DNA, 455 bp, Gossypium hirsutum
  Clone ID: LIB3828-025-Q6-N6-C9
aaagcataaacacaacatactttccaaagctccatttcaattttttcattattcatcacatgtttctttcaaaaaataaaaaatataatataaaatataatattcgttcacatgttgatttttcatacatgtagcatgtaagaaaacaaagaaacaatggaagccccaaccaatgatccaaggaccggcaaggctgcggcagccacgctggaatctggtcctgatgctggggcggaaccgggagaggagctaggaatagaaccaccggcggaaggggagggagcaggtgcatcggcagccatgacgacgctaattgaggcggcagcaacaatgatggcggtggagaccttcttcatgtccatggcgtataaagggattattaaacgcaccagaaatgaacgagacctgcgtttaattgctggagaatggggatccgccggtgattgttattattt

SEQ ID NO: 10331 - DNA, 388 bp, Gossypium hirsutum
  Clone ID: LIB3828-025-Q6-N6-D1
tgttttttttttttttttttttttttttttattttttttttttttttttttttttttttttttttttttttttttttttttttttttttttttttttttttttttttgtttttttttttttttattttttttttttttggggggtggggtggtgatgttttttttttaatttttttttttttttttttgggggaggaggggataagggaatttaggtagggggggaaagagtaggaaaaatttggggggggaaaagaaaaagggtttttataaaaaaagagattaaattttaggtttattttaaaaatttagtttttgtgtaggttagggaaaaaaaaaaattgtttttttgttgtgagtgtataaattttttaaaagggggatgtgt

SEQ ID NO: 10332 - DNA, 534 bp, Gossypium hirsutum
  Clone ID: LIB3828-025-Q6-N6-D10
agttgaaatgcgaagatggttgcaaggtgtgttcagcgccataatatttgaaatacaagctcagaaacagtagagaaaactacttaaaatgtgggaaaggttatgttccaatgacaaataagtcaaaatttccaggcatttctaacaatttctgtgttattaagttaaagcacttcttcctgcacccaagtgtcgacaaaggcaaaaatcagtatccctctaattcctggattggttcaattaggcagtagcagccaatggtacagatcggtagcatgctctctttgcagcacggacaatatcttcaacctgcggcacagccattctctcaagatttgctgcatatggcatgggaacatcagctccagcgattctctcaactggtgcatcaagatatgaaaaactctcctccacaacagatgcacagatttcagcaccgacaccgtgctggggaaacccttcttcaactgttattagtctgttggttttcctgactgatgtgtttattgtggatctatctagcggcctaataga

SEQ ID NO: 10333 - DNA, 528 bp, Gossypium hirsutum
  Clone ID: LIB3828-025-Q6-N6-D11
gaagaaaaaggagagtatatattatttatatatataaaagagtaagaaaaaactatcccagaataactataacaatcaacaccttgtactatttctctaggtttgtttcgagtttttcaacatagacgaaaactaaatgcaggtattagtttttccggttaaaagtaacggtggtgtacatcaaagaatcgaaggcttgttccggtttttatcgcttttcggaagctaccaggtattcacataagaaaatgatgcaacaacgaaaaaaaaaacacgacatagatatatatatgatcaggtgccgccgggttcggttggcgtggcacacggggctagtatattcggagggaagttaactccgccccctctaacggatagattagggccctttgctgagctagccctgctcatgaggtttgagttgagaaacaccacgattaccgtgatatcgtcgtggaaatgccggcggacaccacggtcaatcttcttcaagtcagaatatctcatttctctcttctttgctgcttc

SEQ ID NO: 10334 - DNA, 504 bp, Gossypium hirsutum
  Clone ID: LIB3828-025-Q6-N6-D12
gggctgtaatgtatttgataaaatttatgcttaaaaaacgtaagagaaaagaaacacgaagatgggactggtaaccaatttcttacccatttacgttacagcatactgggagatatttgaagccgtaacaaggggaacagatttcatctactaattcctctggtcaattaactggtaatgggggagggacatgagtttacagagataatcaagcaacatcacccccaaataaagtcaactttctgctgatgaaggggtagatccatcttccatggatccattttctgccagggaacttttccattgccacaaaacttgcatcaacccaccattcgcaacatgcaaaaggaacacccttgttcctattccaaaccatgcgcacaccaacttgataacaacaaacaacccacccatccataacacctgccatttcatttccaagtccttccccttggagcttcaaaatgcttcttgggatgtctgttttaggaaatcagacatcaa

SEQ ID NO: 10335 - DNA, 514 bp, Gossypium hirsutum
  Clone ID: LIB3828-025-Q6-N6-D2
caaataacccaggaagacttgagatcattgccaagaatccaagatgttggccttgtgtgagcgacccttaaaaaggcagtgaactaaaaagaatgggcaaaatacttgacacaactgagttgggggggggacaaatgcagaagaccttagacagagcaatccaagcttcttattatattatataccaaatgaaatcgatttcctggcgaagtggtagcgagttagaatgcgaacctcgaaggaagtgcgcaaaccagtggaggttaatgctcattctcattctgctctgtctcgtccttcggttttcaatcttccttgttggttttagcaacctcttgagaatcatcagctccagaagggttcgcttcactcaagtcttccttattggttttggcaacccctacagaatcatcagcttcagaagggttcacttcacttgagtctgcatcagtaggtggggaggttactgcaggagtgccgctagtggatattgaaggtgatacatcaggcgatt

SEQ ID NO: 10336 - DNA, 529 bp, Gossypium hirsutum
  Clone ID: LIB3828-025-Q6-N6-D3
ggggtgttttttttttttttttttttttttttggttttttttttttttttttttttggtgttttttttttttttttttttttaaggcccaaaaaagaaggcattttttccccaacctttaaaaacaaagggttttaacaaaaacaaaaggggggggggggggcccattacacacagtccccccccagattcattttgggagcaaaaaaaaaacccccaacccccattaactaaaaaaaaattttttttaaaaaaaaataaacccccaaaggatttaaatttaaaaaaaaaatttttccaataaagaaaaaaacaaaatccacccccatgggtcatttcaaagcttcaatcaaaaaaagggtggggcttggcccggaaaaggggtttcttcttcttgggggggagagtatcaagggggaaaacaacctttccaggctcaccggtcttgaagctatcggagaaaacgggttcatgggccgaagaaactttccttggtttgggtgcgatcaggggttacccattttgggggg

SEQ ID NO: 10337 - DNA, 536 bp, Gossypium hirsutum
  unsure (1)..(536): unsure at all n locations; Clone ID: LIB3828-025-Q6-N6-D7
aataaaataaaacaanaccatgcatcaatagtcgccaacataagaaaaagtattggacaattcaatccatcattagccaatggacttttcgttatttttgcctaattgagtcacgttcggatgtttggttttctaggcttggacactactgcaaagttacaagtaaaccacaaatttgggttatatgaaagacctgtatggcttggaaactgaatgaagcagtttgccatcagctgataatcaacttcttaaaaaattcagcttgttcaggaaaatactccaagagttcatctttggtcacccaaacgaaatcctcgcacttctggatattgaacttgttggtatcaatcacttgagacttgaaaaaaaatcgcttaaatggttcaggcacattctccatctgctgtataaccatgtgccccatgggagcatttccgacaaaataagtgtgagagaggtctccgagtacgaatgctaaggcagactctgcacacttgcgcaacgtctcctctgaatcataaactttttctggaaac

SEQ ID NO: 10338 - DNA, 517 bp, Gossypium hirsutum
  Clone ID: LIB3828-025-Q6-N6-D8
aataccacgtttaactcctccaagaagaccaacaggaagagatttctcatattattttcatcaaccacagcaagattttcattgcccctagtttttgcaactcctccagacatacttgaaataggggggtgtaaatttaagttttcttcactcagttttgctgatgtggtaacagaaaaagcacccctttcctgtgagcccaccaactgtctatcagaaaaagagctgtactggaacttattgcagaactctgtaacatttttcgattagagcctccaagcagagactccaatttagaagtaatacctgttaaggtttcagtaccgtcccctccttgcatatgatgcaaatgtgtatcatgttgaactgtttccagaagaggattgaatggaggtgtatccatgcacctagacttcagcagttggtgttcagtttgaagacatttttgacgtaagtttaggctgcataaagtctttttcaactttgtccgttgcatactgccaaaatctccaccctg

SEQ ID NO: 10339 - DNA, 542 bp, Gossypium hirsutum
  unsure (1)..(542): unsure at all n locations; Clone ID: LIB3828-025-Q6-N6-D9
actcaaactttntatactttataatattttgaatagctatngactttacttgaaagataagatcgcattccatagttgttgtttcaagactttagagcatgacttctctattaaaaatccaactgaagggaagacttgacgcttgctttgctcttaattgaaatctctcttccaattttctaatttttggagcaagattacatacaaaatcctgagctttacgcccatcagctgaaagtccagttaattccttcacgttccatcgatccaccaagaactccacaatatcagcatagtcggaagcagtgtaaaccccaagtctttgtgcaacagccgagaagtggtcgaaaaggttttcgtcttgcccatcgtacatcaagtaagcaggcatcgtgattttcttcctcatcatgttggcaaaggctcgaacggtttcgtcaggatccacctcaaacagcttgttagtgagtttggtataggctgtctcgtgccgcttttcatccgcggcaatgaaaccacatattttagccaactcagtgtct

SEQ ID NO: 10340 - DNA, 512 bp, Gossypium hirsutum
  unsure (1)..(512): unsure at all n locations; Clone ID: LIB3828-025-Q6-N6-E1
gcacatacaaagtcgtgattgtactaccaggaagggatagtccgtgtaccccacaacagggtcttgcgtataaaatgtcttcctaatgtatcgatttaatggcgcattgatcctcaacctaaaaaccaggtctgggtggggtgtaaaaagacggncatacgataccagatcggnatcaccctcagccactgcttgcatcccgagctcccttgtgaatccaccactgcacatgaaagttncctcgtaactccttttcaaagtcctcattaaatgagcttcctgattttcactaccgtgcctgcctgattcagtttgcccataggcatgataacgaggctgagtcacatgaagataagcgagtttggaccccaatttcagctgaagctcattaagcctgtttatcacggttaagcctaggttgagcggattagagtcagtggcgttgaggtgatcaattgcgggagaaattcggactgtgattttatttggacctacagtttcggctacggatc

SEQ ID NO: 10341 - DNA, 520 bp, Gossypium hirsutum
  Clone ID: LIB3828-025-Q6-N6-E10
gcaagggatattattttaagttgatttatttaaaagtatgatgaaatttactaaatttctcatacatttattctaatcaagtgctgcaaaaccatgtgaattttgcacagtccaagagaatgtcctcttagtaatgaattatggtcacgttatattcaataataacagtggtgccatcgaaaaataattcttgagtcgtgcatgcccttctgccatcctgaattctcctcttcctcccaccaccgaaagttcacgttccgtctctattaacggattccttgaaaatatgctaatagagctgcccttaaactttccggtagtaaatccaaaatctaagtacatcaccacggtcgttgaatttttgccggccaagatcccaagtcccagagcattcccaatcacctctgagttgtccccaggacctatcttgaggggatcatcaatggcatatagggtgccaaatggcactgatgagtagttgtcgttgcttgtgttgttagcttgggctaccatgactact

SEQ ID NO: 10342 - DNA, 529 bp, Gossypium hirsutum
  Clone ID: LIB3828-025-Q6-N6-E11
gaaagcaactatatatacttcattatatatccctcaaactttaactacacttctcttctacatagtgacccaaagactgtttggggaatgactatagggaaaactaaacattttccattggcaagaaaaacataggcaagatgtcttcttgaacctcgcaaagcatgtataaaaaaaccaccctaaaatgaaaaacccaaaagcaaagaagggagaaaatggcactaaaatggggaaaattttacatgatactacagctgtttgcgttttcatcactgaagtaatgagcataagattcagatgggggtggatgcatgggtggaggtccataatttggttggggatatggttgatgagcatacatcatgggtggatacatccctccatttgcacgttgttggttcatcatcatggctgccatatattgaggctgattataaggatttcctggtcccatcccttgataatacccaccaccattattcattgctgctggtagtccttgcactgcagcaaaattactcatctg

SEQ ID NO: 10343 - DNA, 537 bp, Gossypium hirsutum
  Clone ID: LIB3828-025-Q6-N6-E12
aaaaaacaaatgagataataccatcttattattccaagtaatcctatctttgaaaagttcaatcatgaatgatgaaacacacagaaaaagaaaaaattatataagttaatgggtgagctatccgagctcgccgggggacttgaccaataaaatcaaatttgagttcaaagatacaaaatcaatcttttgaaccactttgctacaaatatgaacaagattatcatcggatgctttttgcagccgagacaaaatcatttgtaaggtagaatccaaagccaatatttaggttccacctcatgcacatgcatacacgaacgaatatgattttcttctcctaatgctaacaactaattcagactctccctactgtcctataccaaacatgtatgatgaatcggtgactcgaatagataatgaactgtaaacagttagtggagcgagctttacatctaaaatgcccgttccatgaatgaacaacaatcccctactaaaattctttcagttccatgtcttgttatgctaggtggtcgggcatga

SEQ ID NO: 10344 - DNA, 510 bp, Gossypium hirsutum
  Clone ID: LIB3828-025-Q6-N6-E2
cattctcaatgtgggtgcgagcatcgatattcatatttatgtccgacacataggtgtaaatatcggatccatctgaaagttagaacaacaaagttttcaagcatgcatgtgactgccatacattgcctgcttaggggggggggcggaaaacaaagtcccagattttgaaaggaaacttgaaattcatacaagatccatgaaatggcagaacttcatttttttgcacacccaacctgacacgtccccattcaatatctctcattgcttggccattagatctttgatcaaccccagtatttgttggctgatttgaccaaccaccgacggagtcacctgctcctttagagcagaaaaccacaaatcagggccatgtttgttttcactggtttcataccatgagcatatggtttttgaagtagttgtaacgtgtaaggcacaaatgaagccattaacttgctgaggtgtgtggatgcattcttgatactttgttattactggggtgaactttgg

SEQ ID NO: 10345 - DNA, 537 bp, Gossypium hirsutum
  Clone ID: LIB3828-025-Q6-N6-E3
gggtgtttttttttttttttttttttttttttttggcattaccgaaaaaaaaacaatataaaggacaaacagaggatataactaaacatcacatatatagccataaagatgacccacaaatgttaacatcatctaaaattaacctcaaaaacagggggggggagaaaatatccgtaaattctccaaaaccatacagataaacaaaattaaacaagatatgatcttaaaagtaataaaggaagtttactcactcgagaggaacatcaacatcaccatcatcaatctcctgctgcaaatctttagggtctttaccatcgacggtacacccaacggaaacacaggtgcccaaaatctccttcaccgtccctttcaaatccttagccatggacctcggcctcattactttagcgatctctatgacgtcatcgagtccgatgttcccgttatgcttgatgttcttggtcttcttcctatccctctccggttccttcaatgccttgattaccagcgctgccgccgacggtaccaccatgacct

SEQ ID NO: 10346 - DNA, 518 bp, Gossypium hirsutum
  Clone ID: LIB3828-025-Q6-N6-E7
aaacttgataagcttaatttagtagggatgtagataaaaatatcttcaataaacaaatttgaaagttaacaaggctgagctataataatatgagataacgttacacgttcatgagaaccctgaaagtaatactaatcgccacactatgttgaagacaatttcttaattaagatcacctattcggctttggtggcctgagaacattccagtccagtttctcacgctttgactgctttttggatgaggctttaccgctgctaggggtagattgaatgtcagattgttttctcttaaggtctccattaccttcatgtttatcagtgccaacttttgagtgagttgcttcagatgcagatccattttcactagacaaagttcttccaccagaggcatccggccgagacacatttgatgcttcttcattcagtttatcaatagaaggattgaaacttcgaaatgacatccgcccaacagttgctccaggatgaggatccccttctataatcaccacacatttt

SEQ ID NO: 10347 - DNA, 524 bp, Gossypium hirsutum
  Clone ID: LIB3828-025-Q6-N6-E8
caaactcacaaacctacataattaaatgccattacccaatagtgaaatatacgttcataacaaagaaataaattcaccatgacacaaagaaaataatgtcgatgtcaaaattttaaataccctcacaaaagagagagtttcaagggtaaaaggaccagacagaaggtgtcatatcttttaaaaaggccttctttatgcctctgtaactgggaactcaaacacaacatccttccctgcgagcttccggtaaactgctgaaaggtttcgagcttgtattctgtgttgtttcgttctttggggtccaaaaagaccttcattatcttcgatccatcgattctatatctagtacgcttcccgacaatctcagcaggtaaaacaacatcttcgagcattgcctcgtgtacggcagtcagtgtacggctgcgtggcctctgaacagctgagcccttctttggaggcctcaatatccttcgagttgcaataagaatcacatccttgccactgaacttcttttcgagttccct

SEQ ID NO: 10348 - DNA, 536 bp, Gossypium hirsutum
  Clone ID: LIB3828-025-Q6-N6-E9
gactcaaatataattgaattttatttacttcagatgaaatcatttattttgcatttactagattctccctcaacactcaataaggaaaaaaaaagaccaaagggggctatggacaaaaattaaaaatgctaaactatcctaaaagttcaataaagtgatagcctccttcaactttggagtggtgtcagaacatacatcttgcaagcatgaggagctacggatgccgtcaatctatcgcgcttattcatggaaacatatttgtgcttccacaagtctctaacaatggctggtgtgttgggagagagtccaaaatccctccacgcagcagttataagagccctcaattcgcttcggttccataacactaccacaaccctgttgtctgataatggccctgcccatacttctaggccatctttggatcgtagtttcctcccttgaactcctagtgagtcttgatttacttcaatcacttctttgttcccaaggatccttagggtcctgttgcttgcagatcgaaggtcgcatccaatgag

SEQ ID NO: 10349 - DNA, 394 bp, Gossypium hirsutum
  unsure (1)..(394): unsure at all n locations; Clone ID: LIB3828-025-Q6-N6-F1
ccttgtaaaaagtggtgcaaacatgttatntaaagaatagggnaaacaatanatggtacaggtttactggacatgaactgtgaatactttgtaaaattaaattggtaaagataaaatgcattacactgggggggggggtttttatntgaaggaagattgaatttnttncagacttgtccatttggttttagggaccaaaagtgggataaaaacaaccgtgaatgcagttacaagtggataaatagtgaatgttaatgaaatagttaaggttagaaggaagtttgttgaaatggtaatgatttatgatgttagtaaatttggtaatgttggtaaatttgtagttaggtccttaatatttaatggaagtatgttgtacattataaccaatggaatt

SEQ ID NO: 10350 - DNA, 514 bp, Gossypium hirsutum
  unsure (1)..(514): unsure at all n locations; Clone ID: LIB3828-025-Q6-N6-F10
atatgttatatgttggttttttggtgtttttattgccatattttttgaaatacaagctctagaacagttgatgaaaactacttaaaatgtgggaaaggttatgttccaatgacaaataatttaaatttgggggggggggtaacaatttctgtgttattaagtgaaaggacttatttctgcacccaagtgttgacaaaggcaaaaatcagtatccctctaattcctggattggttcaattaggaagtagcaggcaatggtacagatagggagaatgctatatttgcagtacggacaatatgttnaacctgcggaacagacattctttaaagatttgctgtatatggaatgggaacataagttacagagattttgtgaactggtggataaaagaatgaaaaaatgtgttaaacaacagatgcacagattttagaaccgacaccgtgctggggaaaccctttttgaactgttattagtatgatggttttactgactgatgtgtttattggggatctt

SEQ ID NO: 10351 - DNA, 500 bp, Gossypium hirsutum
  Clone ID: LIB3828-025-Q6-N6-F11
agctgaaaaccgaggcttaggaccatcataacaataagaaaacaggaaatatcaaattagcattctttgaaggaattcaactaaaattgacacgggaaaaagcaaacacacaatccgtatgcagatgacagtctcaaccaaatgaacacacatcaaaattggtctaaaaaactgcaagtcccaaactacaaagataaccaaaatcaaaaggctctgatactatcaaatgcaatctcatttcttcttggcagcagatttggggaccttagcacccgttgggtccttcttctcaacgctcttgatgacaccaacagccacagtctgacgcatgtccctgacagcaaaccgtccaagtggggggtactcaaagaaagtctccacaaccataggcttggtgggaaccatctttatcatccctgcatcaccattcttcaaaaacttgggctccttttcaagctcctttccaaatcgcctgtcgatcttggtcagcaattcggaaa

SEQ ID NO: 10352 - DNA, 554 bp, Gossypium hirsutum
  Clone ID: LIB3828-025-Q6-N6-F12
gctggggttttttgtttttttttttttttcacccaaaccttcttcccttggaaacataagataccaaatacaaaaaatttaaaccccaagtaaaaaaaaaaaaaaagaggcttgtctataacaagaactctttcaatgcatgggctgagcagggggggggcttcaacacaggggttactgccaggaaaaacgcaatcaaatgaaccatgtctgacactactcaaatcccaaacgcaactttaaccatgcaaacataactgacatgactcggggtagaccaacccttgacaaacacccaaacctaaggacacaaacgacctggaccattccaacccatagactacccatctagtttcacccggagaaatatcctaaacatgggtgaggaggttgatcagctgactaatctcaccatattcgccaaaagccaatggcatgaaaaacagagccaaactcttttcaaggggaggaagctggctccccatctttcttctctggatctgatttttctggatccacttttgtttccttctcttccttcttagcaacagcct

SEQ ID NO: 10353 - DNA, 539 bp, Gossypium hirsutum
  Clone ID: LIB3828-025-Q6-N6-F2
gtggttttttttttttgaaaataatagatgggaagggttcacattaattattatttctttaagcagtagtacaaatatcatgtgcacaaattatgaaatgccccctatggcactgcagaatcctaaccaaagtaattaaacatcactggggggggggggtttccttcccctcattttagcctttagcgaaataccctgtcgaatcggaatcaatttcctaaaactcaacaatatatacacttccgcgtcccccattcttgcagtggaaaccccccagccatgaatatatcggattcatcgataacgataaacattactgtaagccaggtgccactacacaatgagattggggatcttcgacaaaaatgcatttgttcgtgatgtatctcatctatcatctcatactggcagtagatgcatttacattcccagataccctcttgcacaagcagtcgggtaacggatttacataaaatgcttcttctgaacgaaacctgtccatgcccttagttcctgatacaggacctcttctcctcctc

SEQ ID NO: 10354 - DNA, 456 bp, Gossypium hirsutum
  Clone ID: LIB3828-025-Q6-N6-F3
atgttccacaagtacccaatcccttgcttaattgcacaactcaaaaggccatctaatcattccacgctaccggggggggggggaccaagtatcagaagggtgggcaaaagaaacatggcattagaatccggaggccacagaaccccagcctttatatgcagagagccttatttgcccaacattcagccgccgatttccaattgtcacattggccaacttctccggtacatctgaaggtccaatggcaatcctatccttgtccaaggatggggcaaaaggattctttcttcctgggggaagaaaccttggtagttgggcaaagctcctcaaggatgtatcattcttattaagatcctgattaaccatctgcagcttgcgttggacacctgggcccaaagctgcattggccttcagagtacaacgattgccagagaacttggcattagggagaaaccc

SEQ ID NO: 10355 - DNA, 508 bp, Gossypium hirsutum
  Clone ID: LIB3828-025-Q6-N6-F7
ggaactaaaagtctttattaattgaaaactcagaaatttcaaatgacaatcccaaccaggcgggcaacagctaaatgcccttttatttaaaaccagatataatggtagtacatgcctgaagcttggatcccaactcccaagaattgaattactcaattccaaagactttcttcaactggagaataaattcatagactttttcttggtcaggaagactcttggctacactctccttttgcatgcaccttttaacccaagcaatcatcttgggacactttgcttaaatgctgaagtccccacacttttcataagcataaaaccagttataaaatggaactaatgcaacatccacatatccaagactttcctccaaagtaagttttggtttcaagcttttcttccaacaggtttaggcactcaataaattctttctttgcatttgcttgttcttttccctttggcttccatattttggtccccagctcatatatcttcttggcaatgaaat

SEQ ID NO: 10356 - DNA, 498 bp, Gossypium hirsutum
  unsure (1)..(498): unsure at all n locations; Clone ID: LIB3828-025-Q6-N6-F8
aaaaaaagnaatataaatattttattaaatagaaatataaatattttattttggcaaggcaagggaatattattttaagttgattcatttaaaagtatgatgaaatttactaaatttctcatacatttattctaatcaagtgctgcaaaaccatgtgaatcttgcacagtccaagagaatgtcctcttagtaatgaattacggtcacgttatattcaataataacagtggtgccatcgaaaaataattcttgagtcgtgcatacccttctgccatcctgaattctcctcttcctcccaccaccgaaagctcacgttccatctttattaacggattccttgaaaatatgctaatagagctgcccttaaactttccggcagtaaatccaaaatctaagtacatcaccacagtcgttgaatttttgccggacaagatcccaagtcccagagcattcccaatcacctctgagttgtccccaggacctatcttgaggggatca

SEQ ID NO: 10357 - DNA, 397 bp, Gossypium hirsutum
  Clone ID: LIB3828-025-Q6-N6-F9
aaaaaaaaaaggggggggggggggggtaaaaaagctttggggggggggtaaaaaaaaaacccaatttaaaaaaccccattttggggggaaaaaccccaaaaaaggttttttttttattaaggggggcaaaccaaaaaaaaaattttaaaaaatttaaggtaaaaaaaaaattccaaaaaaaaaccccttttgggaaaaaaaaacctttaaaaaaggggggttttggcccctttggaaaaaaaaaaaccttttccttaaaaaaaaaaaaaccggggaaaaatttaaaaaatttttaaaaagggttaggggggtaaaaaaccggggggggggaaaaaaaaaaaccccgggggggggaaaaaaggggattgggaaccccggggggccgggggggcccccc

SEQ ID NO: 10358 - DNA, 315 bp, Gossypium hirsutum
  unsure (1)..(315): unsure at all n locations; Clone ID: LIB3828-025-Q6-N6-G1
gttgggggtttttaaagaataaaaatgttagagatgtttttgttagtgtatgaatataaaaattttatatgcatttggatacttaaagtaaatttaataatatgtttaaaaaanattatgggggtttganagggagaacaatatttttttgatattatatagtaatttaaagtataaaaagtgaattacaaggactcataatggatcatattagtggatgaagagagaattggtggtgatgttaaagatgttagagagtttattttttagattatatttatatttaaggaggaattgttatgaaattttaaaacc

SEQ ID NO: 10359 - DNA, 523 bp, Gossypium hirsutum
  Clone ID: LIB3828-025-Q6-N6-G10
gcaaactaatccttgggtatattccactttaaattcctcaaaaacatgcacacaaacaaaaacattgataaatgtacaaaaatattagaaaggattctcaccaggtagataagaaggagatccaccctcgatttggttctttttacgattgaatataccgctgatattaggtaaaaggacttttttcgagatggaagacctctctttttccaacttatgtacctgaattttctctggtgggttcggcttttgaagtctatagtgttgtggggatgattcagttgacatttgtgcttctgctaggatcctggatgcagcttcagctgcttttttctgttccctttcacgccacctacggagctccccttccaccgctctctttgctgcttcagccatctcagccctcttcaaagcatcggcagttgcaaccttcatgtcttcaatctctttttgagtcgcctctaaccttttgaggacctcgctttcactagcctttatagcttccacttgagcaatggcagct

SEQ ID NO: 10360 - DNA, 529 bp, Gossypium hirsutum
  Clone ID: LIB3828-025-Q6-N6-G11
caaaactaaaaatctcaatgcaaagttccatggcatgcagaagtttcaatggtgttcttctaggttaaataataatactggttgcgaaacaaacattataacaaagtaacagaacccagcatagcttaaaacaatgtcatctaagcatttgcagatgcagcctctgggtggtaatgaagcatctcagcccacatcatctccctaatcatctcttctctcatgttctcgtctatgtcgagatcaatcgggacttgggcaggtggattgcacctcggatcatatagccctgacatgtatgggtgtaggagagcttctgtgacggtaattctcttagatgggtcaaaaacaagcatcctttgcaacaaatctatggctaatggatcggcttgaggatataaatgggaaagatgggtgcccctagaataaggaagtgacttgatataccttcgggctttgggattatcgataaactgaagatcagcctcttgctggcttccaaggacatcgattattagcttaagctggctga

SEQ ID NO: 10361 - DNA, 514 bp, Gossypium hirsutum
  unsure (1)..(514): unsure at all n locations; Clone ID: LIB3828-025-Q6-N6-G12
accgtgcactttattcatagaaaaaccaaaactagtacattatccgaggtattcaaccctggaancacacatccaaaatcaacaagaaaaacatcacagtagcaaacggataacggtacatccctgagggctgctcctcatccccttcgtctccttcaccagactcagcgccaacttcttcataatctttttccagggcagcgagatcttcacgtgcctcggaaaactctccttcctccatgccctcaccaacataccagtgcacaaatgcacgcttggcatacatgagatcaaatttatgatcaatgcgggaaaacacttccgcaacgctggttgagttggagatcatgcagacagctctctgaaccttggcaaggtcccctcctggaacaacagttggtggctggtagttgataccgcacttgaatccagtagggcaccaatccacaaattggattgtgcgtttggtcttgatggtggccacagccgcattcacatctttgggcacaacatc

SEQ ID NO: 10362 - DNA, 502 bp, Gossypium hirsutum
  Clone ID: LIB3828-025-Q6-N6-G2
gctgaagctgttggtataaccattcaaataccaagttactcgggtaactcggttcaaccactaatatatcagttttttgtccatctcattgcataaatgaaaaagtagcagacaaagcacaatgacggggggggggagaggggaggtcttattcaaattccgaacatttcacaacgtaagcatatctctagtaaatatatcatcagtttccctacaaaactaacagaaaagaaaagcccaatgcaagaccagtctcctcgcaattccttaacaccagaagtgcagacttatgccatacctccgctggtcgctgtcctgataatctggaagagagatgatccaatgacgacgaatatgaagaacccaagaagcacaggaccaacaggataatccttccccttctttgtggttgtctgaggcacaggtcctctctttgttatgttcttttggaacttatccacctttctttctgcaaaacgccttgatgttgtcatgatgacgg

SEQ ID NO: 10363 - DNA, 524 bp, Gossypium hirsutum
  unsure (1)..(524): unsure at all n locations; Clone ID: LIB3828-025-Q6-N6-G3
atcaaaactgcaaaagaattgacataagtgcgcaacataaacagaaaaggggacaccaaaatttacgtgggaaaaccccttgggggggaaaaaaccacgggnacctttagtccactttaaaaatcttcactatgggggggggactggtttacacggccaatctacatgtacctcttgtggtattttgatcaagagctcttcaatactaatctcactacagcactgcaacgccatggattactatattcaccgtctccgaagctcggttccaactcccaagggattcaaacatagatcacgaatgtcaaccgaactagaggcgaacacttcaacgcacatatcttgatttccagagataatcaaagagaatagatatggcataaaccaaaaaatacctccaacatcattaacctcactgccgtgtcatcttcactggacccacagatagtactcacaaccttggccttgagagtcgctagtggtatagcttggagttcatgagcttattccgacgttggtgatga

SEQ ID NO: 10364 - DNA, 512 bp, Gossypium hirsutum
  Clone ID: LIB3828-025-Q6-N6-G7
gggatgcaatatctttattatttttctttatttcttatattataaaggcaacagattcatgtactgttctttccacacaaaatacaatttgaatacattgagctaatgagttgaggcagcattataggaacattgttggattcgaccgtgtttgaacttataacctaaaggcaattcaatacataaatagcataaaaataattaaactttgaagacgctgtgccataccatgtataaatagctttgagctttaattttctcatgccactacaaaagcacttgatgaaccagtgaaatgccgaattgatcccataagcccttttgaagcaccgaaatgtcttattctgtatactcccggtgaggaagacgatgggattatccattcgattgttgccttactctgggggcttagctttgaaggtcttgaccatttaaagcgaaggcagaaatcatcgtcatcgtacattggggtccatgtatccttcccttggagcatcttaacaagggcgaaa

SEQ ID NO: 10365 - DNA, 530 bp, Gossypium hirsutum
  Clone ID: LIB3828-025-Q6-N6-G8
aatattaataataatattcctttataaaataaaatgaattctgtgttctttttacatgtgatatttggttgtcattggttgaatgaacccagaacatgccatcaatccagttaacatcagactatcctgtccactgcccaagcaagtctaactgctccacgaatcatatattttgacaatattgcaggaggctaactcagccagtagcccttctagtcagcaggcttttcaaaacccaacttcatatctccctcacatgggagaatagaggaagaatcgcatgaccaactgaagttcggacttattaagttagtgaaatgattcacttgaaacttcaatatatttcaaacttaaagcctatatgcaacatgctgaggagccattgttctgcaactggggacatggcaatggaaacacagcattggtacaacctgaaacaaactcacaatgccatgctgcagttggggcaagtccaagtagtgtaacattcttgaagcatagcccttcaaatgacccacccttgataccag

SEQ ID NO: 10366 - DNA, 528 bp, Gossypium hirsutum
  Clone ID: LIB3828-025-Q6-N6-G9
gtacgcaaattttttcaaatttcgaacgggtaactaggcaaatgaacagctttagtcacaatgttaacacaatctaacctccctacaaatttacagctagaaagttcagggtgttcggtgagatatgttcacttggtaggtattttaaaaggtttatttgacaatacaaagaagctaaatgcgtcaaaatacaaacgcggatcggaactttgcgcttgtggtctcggtcgggtttggacacccaggtgatgctaggaatcataagatacaaagaagaagaccattcttaccatcccatgagtaatcttctaactctatctacaatctgatttctacctccaatacttgagaatttgaatttgcagttatcatccaaaaggaacctgtacacttcccattcccgttccgaacttgaatgtcttccgatttctgccgagaatatgcaaattccaagagactttaaagcttgtgtaacatcatagaaaacccttggtcttccctttccagataactcaaccggattagcaa

SEQ ID NO: 10367 - DNA, 442 bp, Gossypium hirsutum
  unsure (1)..(442): unsure at all n locations; Clone ID: LIB3828-025-Q6-N6-H1
gccttcaataagagttgagtatattattattattattattattattattacaaaaatagaaaggttgttcggattaattaataatngacaacattatttcaaataataatgataataaaagaagataatgggggggggtttggaagtttaaacttcaggggtnatgttaggatcaaagggaatggcaatttgtgccagacattcgtgggaatttaaaaagacacgaggagtccattttatgggttaatgcatattgatttttttgatagtttttcatgtgagtatgatataggtgttggaattggatactttattttggaactgggaaaagtaaccagtgttcaggtttacggtgccttttatgggggagtaactttttggtgtaatgatgtaattaatttgaaattgtattatgaaagttgtgggaaaatgtttataggga

SEQ ID NO: 10368 - DNA, 533 bp, Gossypium hirsutum
  Clone ID: LIB3828-025-Q6-N6-H10
aaaacatacatgtataaaatataaaaataatctctgttcgcattcagttagcggtaacaaaagatgtaacgaatttttgctttttttctactttgtacaggtaacaaaagatttcatcccaagtgcaaaacagttaaatcctatactgtacattcaaaggatctaagctatgcatatatgaataggaagcaagaagaacaaaattacagctgcatgagattcagctgtgattggacattttaagttagcatgtcatggcggcagcagccgccgccgcttttatagaagcgcagagaacagcttaaggttaaaacttgttagcataaaccaacactggaacataaaatacgacttgggaggatcaattagcactctcattttgtactaaaaagaactgaggtgagcttgcttgtacgttttatcgcaggtgctggaaacccacagcttggtttgacagcaaagacaatctgggaagatcttgccacaagatgtcatgtgatccatcgagctttctactggggaccatgccactg

SEQ ID NO: 10369 - DNA, 531 bp, Gossypium hirsutum
  Clone ID: LIB3828-025-Q6-N6-H11
ggcgggggttgttttgtttttttaccataaacatctctaatgtcatttacaaatatgtaggagcatcctactcgatttcgatataacctctcgttctcaacaataaaatgtttggacaccatatatttattctacacgaacatattctttcatgcgggggggaatgctcatatttgaatataagtaatcatacatactgaatataagtaatatcataatatagcttggagagaaacatcattggttcattacaggaaagatggacactaatctgaaatggccgcttcttgttattcattaaatgcagcatctcaatcccgtggacagagcaaactcattattggtgccttagatgagtgcactcgacgccacaattacaattttatctgtatgtagagccatcgccgatattaaccaaaacttaataacaaatgacaagctaatccagcaccacaatgcccggtttctgtcccgtagaagcttatgaatcttcatcaccaacattgacagcaaagtgcccaatttttttac

SEQ ID NO: 10370 - DNA, 543 bp, Gossypium hirsutum
  unsure (1)..(543): unsure at all n locations; Clone ID: LIB3828-025-Q6-N6-H12
ataggtaaatatgcaaattcctattcaaaggataaaccatacatagatgcaaccggtaaacaaagactagnaaattatttaaaaggccatcaaagggcacaatccttcacgtggaaaaccagaaaacccacattaaggaagaccttaaggcttagaacccaccacgaagacgaagaacaaggtgaagagtggactccttttgaatattgtaatcagccaaagtccttccatcttccagctgtttcccagcaaaaatcaacctttgctgatctggtggaattccttctttgtcctgaatcttcgctttcacgttatcaatcgtatccgagctctccacttctaaagtaatggtcttaccggtcaaagtcttgacgaagatctgcatcccacctcgaagacgtagaaccagatgaagagtcgattccttctggatattgtaatcggctaaagtccgcccgtcctcgagttgctttccggcgaagatgagacgttgctggtctggcgggatgccttccttgtcttggattttggctttcacgttgt

SEQ ID NO: 10371 - DNA, 220 bp, Gossypium hirsutum
  Clone ID: LIB3828-025-Q6-N6-H2
attaaaacttgttagttttttattttttttttaaatgattttttttagtagtttggatgaaacatggtcatagctgggtcaaaaaagaaagcggaatgcgaaaaaaaaaccaaacaacaaaggagaacagaaggggagagggggcacccgggggaaaaaagagagagagctaacggggggaaaaagggaagggaaaaaagagggcccaaaagcggggaaa

SEQ ID NO: 10372 - DNA, 162 bp, Gossypium hirsutum
  Clone ID: LIB3828-025-Q6-N6-H3
tttttttttgcgaaaataaaagtaactttcatccatcaaattattactgtaataatgaagctttatcttacaaaatggtataaacaacaaggatctgccaaaacccaaatttctcaatttgtacttaaggactggataaagaagagggcgtattgatttcat

SEQ ID NO: 10373 - DNA, 482 bp, Gossypium hirsutum
  Clone ID: LIB3828-025-Q6-N6-H7
agtattaattctgggaagtgcacactaaaattagtattaaaatttacatacatataattgattgaaccttaatttagttgacaccgttgcgagtgcaacaattaggaatctttaatttaaggatttaaaaaattataaatagcagtaagaattgaataaaaaataatttacatacataaatataggtgcagtccttaatcttccaactatgatttgctgtggaagaatgtcaaaatacatcaatggcatggcggattccgaaattaagatgctttcatatccttcaattcgaatcgtgtcaagtcttcggaatacagtatgccgttcggagaaagaagacgttgaagggaaaggaaaaaccgagcccattggaaccccataagtgcaaaccagcagctcgccaagccacatccagtagaagtcagaagcggtggtataagcgcaccaaaggcaaggcattctgtcattgacaagctaataaa

SEQ ID NO: 10374 - DNA, 534 bp, Gossypium hirsutum
  Clone ID: LIB3828-025-Q6-N6-H8
acaaaacattctttgcttcataattgcattacaagccaactccaccagcttttctgatatagaaaacgccagcataatttcgttacacagaaaattcttaataaagcctatataaaaaacaaggtgaccgaaaatcctaaatctcaaaaacactgacaatttaacataatgacaaagttatataggttgctgcatggtcacagttaagggactagtgacttcatgcttcccatcactccatactattgaaccagttttcatgctagtgccaccaggggagagcttcactgccatggtttgaacccttacaaggaagttgagtttttggccaactcttctaaatacaagctgttctggtttgaccgtaaccaccgtgccgctcggtggttgaattgtaactttatagatcgaattcgggtcaccgacgttagtgactcgtctgatgaaatgtgtagacatgttacgcctgccatactgttggaaaacggcggagagcgaagggtaattcaggttcccgacatggccggctcgttt

SEQ ID NO: 10375 - DNA, 518 bp, Gossypium hirsutum
  Clone ID: LIB3828-025-Q6-N6-H9
cattggaacatcgaagttgacgattcataatagcgtccaaagacaaacttaaaatattaaaacaaagatctaatagcagtaacccatgaaagttcgaaaaccacatagctaataataatcccaaataagcttccacacacattatttaaagccaaaaaaggccaccaacaacggcaaacaatccttacttagaaaccaccgcgaaggcgaaggacaagatgcagagtagactccttttggatattataatcagccaatgtcctgccatcttcaagttgcttgccagcaaatatgagcctttgctggtctggggggataccttccttgtcttgaatctttgccttaacattgtcaatggggtctgaactttcaacctctagagggatagtctttccagtaagagtcttaacaaagatctgcatcccaccacgcagccgcaacaccaagtgaagggtagactccttttggatattgtagtcggccaatgtcctaccatcttcgagctgcttgccagcaaa

SEQ ID NO: 10376 - DNA, 518 bp, Gossypium hirsutum
  Clone ID: LIB3828-026-Q6-N6-A10
gagtataaacatatggtccaaaacattttatttcattaaatacatttgggaactcaagcttttctcaccctctctctcctcatataccataattggatacagatttataagcttaattaaattaactgctgaaagggggaggccttggcatgccttgcacgatgccgcaagtcaatacaccttccggcaagttgtactcatccttgagggatcggttaggggaaataacactagcataaagctgttgcccaaggtaatgcctgtcccatatctccgacctcaggttccacatcccgcagttgtcgaatgtcaataggattgctgaccaggagttggggaatacctgtatggtgtgtctgctcacggcgtcaagaagattgtagttcatcctcttctcggggctccatttcccaacgtccatgcccacagcaaagaatgagtagccagacaagtggtaagactgaatggcgctctcgtgattctcgaagattatttccacaaagtttctgtgtgtcatg

SEQ ID NO: 10377 - DNA, 489 bp, Gossypium hirsutum
  Clone ID: LIB3828-026-Q6-N6-A11
aaggggaaaatcattaagtcattccatgaatgggatcttacaattcgggggaaagaaaaaaaaacaacaaaccctcgttgttgggggggaaggacaagctccataaacacgacaaaggcttcaactttaacatcaatagaacattacaacccgttgatatttgactttgtcacaactcacacacaacatatttggggcgattgcaagcaactttcacgatcagaaaatcaacctcagatgattcagagcgggggggggaatcgacaaaataattgagcatccatcaaactagagaggccgatcagaaaatctcaaattcatttattatttcaaaacataaacatattaggaagtcgatgaaaagccactgtttgagtttatacaaccaactcactttccaaaaaaaaccattgatgatcggggaaggttcaaaaaccacatcattatttgtccatcacaacttgggaagatattgaagatactcataaa

SEQ ID NO: 10378 - DNA, 534 bp, Gossypium hirsutum
  Clone ID: LIB3828-026-Q6-N6-A12
aataaaaaaaatattttagaattttaagcatattgagtacattattttcatttgtttatattaattatattttgggattatctaacttaaatctatagcttgaatttttaattaagctgatgaggtatttatacatgagaattttcaaagagtttactaaataaataaacaaaaattcctttttaccaccacaaagaaagatttccataaatgctatgtatttttcccctcctttgtcacatctggcgtttattaagcctcccagttgggaatgtttgcaggtgcttcattcaccattttcacaagggtcaccacactttctgggacccctggaggaggcaatgagagatttcgtggtggaggtccacgtagaaatgatctcttgtcaaatcgccattcaccaatttcaccatacattaactcgcccttcatgttgtagtcacatccataggtgtaatgaattataaacttttttccgatttcaaaatcccacggtggctgcagcatgaagtccttccgaagtatatgttgcac

SEQ ID NO: 10379 - DNA, 519 bp, Gossypium hirsutum
  Clone ID: LIB3828-026-Q6-N6-A2
gaaaaaaagaaagatttattattgaatgaagtaatatattctgatattacatcaagaaaattaatttattgggaaaagtcagcattagtcactacaaaggccgttttatgtgtatttgaagcagaactggttccggggggatataagctttaaattaggtgtaagctggtggtggccttggcatgttttccacaacaccgcaaactagtgcaccctcaggcatgttgtattcgtccctgagtgatttgttaggggaaagaacactaacataaagctgttgcccaaggtaacgcctgtcccatatctctgacctgatgttccacattccacagttgtcgaatgacaataggatagctgcccaggacttggggaaaacctgtatggtgtgtctgctcacggcatcaagaagattgtagttcttcctcttctcagggctccattgcccagtctcgacagccacagcaaagaaggcatagccacacaagtgataagactggatggctgtttcgcgattctcga

SEQ ID NO: 10380 - DNA, 527 bp, Gossypium hirsutum
  Clone ID: LIB3828-026-Q6-N6-A3
gctcaaggtagacacaataattgttcataatatcaaattcatagttgatatctatattactaagattgtcaaacactgggaatactcgtagaacttaaaagttattatcattcagaaactaagcaccccctccatttttgagcttatagctcatataggcagctttagctattggataactgcagcccttaactccctcacaatgttcatcacatcctctcttgtaagtttggttgcatcggctgcactcggaatgcgaaaggcatctgcgagttgaagtcggcacgagcagctcggtggtatccgtggtgatccatatgctctctcacattttcataagttagttgctgttgattcacaatgaaattgagttgcttattgtcctcctccaagaatttcgtatttttctttgccatatcaagaacatccatctgcttggcacggacacaggtaaggccattctcgagggcatcctctaaagccatcagctccttgtaaggcaaagatgtgatatcctcccctttcaa

SEQ ID NO: 10381 - DNA, 516 bp, Gossypium hirsutum
  Clone ID: LIB3828-026-Q6-N6-A7
atccaaatgaaagctgtagcattatagatgtcgaatattaggaacataaaatctaagtagcacacactagtggataaaatgcttcaagaaactgacaaaccaaaggtgtttgcttaggtccttggcttgaggtggccttcattggcaagcttgaagagacgagcctgagctgctgcagcgctgtttgaaccaagtgctgcaacaaaagtctccctgacttgcttagtcgagaatgggaacctattattcaccatggagttgagaaatgaggctgttccttcccggtaaagcgccccaagtccatcagtacgtgtgtttgaaagtgcttggggcaagctcatgcttgttccaagtccaggagcgttggtcacgccaaatgcgttgcctacagtgccccaccaaccaagcagaccccatatcagtgtggggtgactcctccagaaatcgcatgtaccaccaattggtggagttggagcaggaaagaatggaggtgagggaatgcttggagttcctggc

SEQ ID NO: 10382 - DNA, 530 bp, Gossypium hirsutum
  Clone ID: LIB3828-026-Q6-N6-A8
gatgtcaaggttagtgagttgatcgacagtaatgagagaacatgggaaaagagaacttataaacaataccttttcagaggaagatgctgggaaaaatccggatacctttagcacgcaaacctcatgatgatttccttacctggagaggctagtttccggtccgcagtacctataaactattacaaacttttgatgaaattcctagagcttacgctttacaaactgactacaggaatttttacaaaaaaaactctggctcctaaatctaccaaataaaatcaaggttacagtatagagaatttcatggaactatttgccgacgagggttaatatgcagcaccgaaagcttgtcagtagtacaagctgccttcgatgtggagaaagagttgaaacaatcgaccatattttcgcgaatatcctgaatctttgatcagcttactttataccagagccgcctcttttgttgtggactttgggctatctagagagttcgtaaaaattaattttgatggtgcgtatgattcaaatca

SEQ ID NO: 10383 - DNA, 515 bp, Gossypium hirsutum
  Clone ID: LIB3828-026-Q6-N6-A9
ttttttttttttttttttttttttttttttttttttttttttttttttttttttttgaaaatgaattacagtttgaaccctaaatttatcttggtttagggccaaagaaaaaattttaaaaaaaaaacccccttttaaaggggggggggggtgaaaaaaaaaaaggggcccccatggggcaaaacgggaaagcaaagccacaaagaaaagggggggaacaggaaaaaatgaaatacccacaggaaacaccaaactttaagggggggggggaacccaaaaaaaccggggaaaacccccaacctttaaaaggctacaaaaagggggcccgggggcaaaaaaagggaaaagggcccgcaaacattgaataaaaacccagaggaacccccgacaccgggggccaccccgaaattccgggcagggaccgaaagggggaccaccttaccccaaaggggggggaataaaaaagggggaaaaaaaggggaaaaacgggccccgggggaaaacggggacacgcc

SEQ ID NO: 10384 - DNA, 533 bp, Gossypium hirsutum
  Clone ID: LIB3828-026-Q6-N6-B1
atataaatggatcatttaatatactgtgaagcttacatctttgatgagtgtattttttagtaacagtgaaggagggacaacctcacttgtatttgttcttgttgcacatttgttctctgcctgcttgtgttcttttgctactgtttagcttctttgtattggcttcccctttgtgttcataaactgacactttgtcttgtaatttgaagattaagagagaagaagagaaggccaagaaggaaaggaagaaagaaaagaaggagaagaaagagaaaaaacgggagaagaaagaaagagataagtctcgggacagtggtgaagctgaaagtaaaaagcgtggtcataagaaaaggcataaagacgagaggagcaaagaagatcaaaaaggaggagaccgtcaaaagaaaagagagaatgaagtggaatgttttgagaagagtacgcttactgaagaacatggtcaggcggttggaccacagaactcttccgatagcacccttaacagcagtaaaagacagaagctgagctcgcct

SEQ ID NO: 10385 - DNA, 387 bp, Gossypium hirsutum
  Clone ID: LIB3828-026-Q6-N6-B10
gagtgacaacagcaataatattaataataatattcctttataaaataaaatgaattctgtgttctttttacatgtgatatttggttgtcattggttgaatgaacccagagcatgccatcaatccagttaacatcagactatcctgtccactgcccaagcaagtctaactgctccacgaatcatatattttgacaatattgcaggaggctaactcagccagtagcccttctagtcagcaggcttttcaaaacccaacttcatatctccctcacatggagaatagaggaagaatcgcatgaccaactgaagttcggacttattaagttagtgaaatgattcacttgaaacttcaatatatttcaaacttaaagcctatatgcaacatgc

SEQ ID NO: 10386 - DNA, 534 bp, Gossypium hirsutum
  Clone ID: LIB3828-026-Q6-N6-B11
atatcacaaaaaaagaccaccattcctgtaaataaaaagacctcaaagggtcggaaagtgaatacaaacaatatccctgttaccgtctagtgataaagccaaataagacagcaacgaggacagatattatcgatacaaaatgtaattacaactcaacattgctgcccgtaaagaatattagaccactaaagctagctactctcaacaagttaactagttaacaaagagaggcagtcctcaaatatacattctacacaaatctttcaataacaaggtttctaactcagctgcacagtgaatgtaccatgtaccttacttgttaaagaataaacctctcttctttccttttcttctctcaccagcccgtaagatgaataatctcaaggtgagcacaattgtatctcttgagcagctaatatcttgagagttgttatctgctcgtaacacacgctgcacaccaatttgatccaaaaattgtaaactctgtaggctcttcgaatgttattttaatctgagtgggtgggtaaaactttt

SEQ ID NO: 10387 - DNA, 548 bp, Gossypium hirsutum
  Clone ID: LIB3828-026-Q6-N6-B2
ggggggggtgggggggttttaaaaaaaatttttttttttttttttttttttttttttttttttttttttttttttttttggtttttttttttttttttttttttaaaagcaaacccccctttttttttttaaaaaaaaaaacccaattccgtgggggggggggggttttaataaaaaaaatttttaaaaaaaaatttaattaaaggaaaccccaggttttcccaccccgagattggcaaatgaaaccaaacggggttttagcagggggaaaaatatgaaactccccacaatttaaccctttttgaaaattaaactttgggaaaaacacctttgacatttttttttttaatggacccccaaaaacagggggctgggtccttcaactttggggaacaaccacctgatgggggggggtttttgggcccatttaaacatgggcttttctccaagggggtataaaaattagggggtggggctttctttggcccccaaaatacccccccccttggaggaccccccccaaaacaaaaaggggaaaacctcccccc

SEQ ID NO: 10388 - DNA, 475 bp, Gossypium hirsutum
  Clone ID: LIB3828-026-Q6-N6-B3
aaaacataaactagatttgtttaaaagcaatcaacagtctcacaaaagtaatttaagtccaaatttaagaaattgtccaagctgtaatgaaaactgatataattatctctgcaataatctctcatttgttgttggcagcagatttggtgaccttagcaccagttgggtccttcttctcaacactcttgatgacaccgacagcaacggtctggcgcatgtcacggacagcaaaacgtccgagtggtgggtattcggagaaagtctcaaccaccatgggtttggtgggaatcatttttaccatacctgcatcaccgttcttcaagaacttgggttccttttcgagttccttgccagatcgtctgtcaatcttggtcaacaggtcaaaaatttgacagcaatgttagaggtgtggtagtcgaggactggggcataaccttttccggtttggccagggtggtttctgatgataacctgg

SEQ ID NO: 10389 - DNA, 492 bp, Gossypium hirsutum
  Clone ID: LIB3828-026-Q6-N6-B7
cactggaaagataatttttcatatattattaatattcccttttacattatatggtattaccaaggatgaaaaaaggcaaaacagagttctcaatacctacccataattcactcatatcatttctacttaaaaacaaaaaaaaggtaccatgaacaaaaaagtcagaaaaaagctaaatatacaagccatgtcagaaaaggatcttaaaaagcagcagtcaaagggggaggcattgaaaaaactccatggataaagcttggctctggtacttaactcaaattttccccattttttttttcctcagcatccaaaaaaaccttgcatatgatgctagcacaaaacagtcatcaggagctgctttaacagcttgatcaaagtaagtttcagctctggaactatctttgggagtttcccaaattaaatcagcatacatagatagaacattcccgtcatttggattacccaaaatcgccctcccgcagtattcctcgg

SEQ ID NO: 10390 - DNA, 535 bp, Gossypium hirsutum
  Clone ID: LIB3828-026-Q6-N6-B9
agttcttaacaaatcttatttaacttttgagccatcataactgtgcttattggtgatcaaatgtataaacaaataaaagggattaattatattccatcaaaactttctgctgttgtaaacttctggaatgtccaatgaagttctccagttattgtttccaagatgtctcgtcaacccaatgtgcaataaggttaacattgagaagatcatagggccaaaacagatgtaaagcctgcctttatgccaaggactacagaactgtcaatgagattgctgcagaccgaagcttcactccatcatcatcccacttcgattgtggagcagttgtaccagcaatgatggcctttccaccactaacggcggccattatcgcgatgtgctgctcatctcttccaaattcatagaaatagtaagtcttgaaaccttcatcttcctttatctttatggttctggcattataaagtgttgctccacctggtacaaagattttagctgcgtcctttatggaacctaaatctgtaatatcttgggcctc

SEQ ID NO: 10391 - DNA, 502 bp, Gossypium hirsutum
  Clone ID: LIB3828-026-Q6-N6-C1
aaattaaacaaaaactgtatgttattatgtccatgcatcactttcatatagctgcaatacaggaagaaagggcaatatatgttattggtgattcatatgtgggaataagctatattaatgtcaataatgactttttgttagcgaacagggattgtatagaacgcccttcagcatcagcataactgctttattttgtatgatcaatacgaagacagctacttttacctaaggataatgttttactatgggataacttacgttcttttggagaacggggttatatgtacatatcctatgctatccctaagctctttactgatagaaactgaaaactttctgatgccctacctgggatgaccacattcattacaagtacgacctgagcccttactgcatcactatccaatttatcaggcgttattgtccactattaaccggaaaggacgcgtgtgttttacccaaccaaatcctgaccgctgctttatgatgttccaaatacact

SEQ ID NO: 10392 - DNA, 478 bp, Gossypium hirsutum
  Clone ID: LIB3828-026-Q6-N6-C10
aaccttactaaccacaaattttgattggcattggatccaacttttatctgatttctcaacctttttcgttcagcagtatggggatatatttaaacaacatatcaataaaatgaataggcaagtaagccaccccggaagggtatgggaagaaaatgcaatttgggtacatgggatcttatctcacaaggatctaagtccaacacaagcaaataccattttttggtacggcctccttatcattataagagggctgccgccacggttttttttgccgcctcacgcttaatttcgtcaggtttaccgctacctttgaaatacatggaaacttgctgaataacccaaacactgggcaatgattcaatgcaaaaaaatccaaaaccaatgaagtagaatatccccaccaaagcattggggccaatgagaaacaatcgcaggcaaaatacctgcaagggatttccccttgaaaaataattggggg

SEQ ID NO: 10393 - DNA, 479 bp, Gossypium hirsutum
  Clone ID: LIB3828-026-Q6-N6-C11
gaatcgggtaacgagtttagattcaatagcaacgaccaaaaaagggtcaaaataaaacttaaattcatttgatccgaattgcaggaaaagaaaacccctaaagggggagggagagagatgttacaccaaaaagcaaaatcgaccatcagggagagatgttcactcatcctcctgggtgggcaacctagccaatttggtggtcacaacaacatccaactgggctgcccgctcgacaatttccttcctcttttttggtgaaacatcatgagctatttaagcacagtatgtcctgttgggcattatgagaaggtccagcttttggacgttatgcacgacaaatttcttaaacccattgggaagatagtggggagtttttttgggggacccataaccaatattggggattaaagggcataccttgaacttgcttctaaacagggagtgaatacctttaggccttggacagtttgttttgacgg

SEQ ID NO: 10394 - DNA, 428 bp, Gossypium hirsutum
  Clone ID: LIB3828-026-Q6-N6-C12
aaaaaaaataaaaatttaaaaaaaaaccgggaaaacaaaagggggggcaaaaaaagaggggggggggagaccccaaaaaaaaagacaaacaaaggggtccaggcaaaaaatgaggggaaaaatgggaaccaaaaggggcgaaggggggggcccccaaggggggggaaaaaaaggagggggaaaccagggggggcaagggggcccctaaggggagccggaaaaaaaaggggggaaaaattggggggaaaatcctaataaaagggcaaaagacccaaaggagaaaaggggtgagggggggaaaacccggggggaaaaaaaggggggaaggaaaacgtcactggaaggttaaggggggggaaaaaaccgctcccggggaaatgaacggggaatatagggccataccggaaattggaacgggaacttcgggg

SEQ ID NO: 10395 - DNA, 520 bp, Gossypium hirsutum
  unsure (1)..(520): unsure at all n locations; Clone ID: LIB3828-026-Q6-N6-C2
caaacattagnattgttatttctttgacatagcaatcaagaagaagtattgtaggtaataattggggggggggatcaagcttttgttggaatccactgatctccttgaatgaaattttggacagagtaagtatatacattctgtccaggaattggagaactccatggaactcttgctgacatgtttgaacccggtcctgaattctgatattctccgtagaaaagtgttttcaatgcgaagtcaccactccatggcaaccatccctgcggagaaataagatctnccatcacacagtttatgtaaaccgtccttgaatattccttccatggccttcccaaaaagttcttgtgcactttagggttgctatagtagtatttngtgtagtcatccgtgccattgagggagcagttatgggaaaatgagaccagttgattgagcaggatcagttttgccatgagctgtgatggaattggattaaccttttacgggatttaactgacggggaacaaccaatatttca

SEQ ID NO: 10396 - DNA, 93 bp, Gossypium hirsutum
  unsure (1)..(93): unsure at all n locations; Clone ID: LIB3828-026-Q6-N6-C3
ggggtatacaggnctatccggaaaaaaaaaactggtctgtnanttnaatttttaggcttagaaattgaagtgagaggaaagattttttatttt

SEQ ID NO: 10397 - DNA, 528 bp, Gossypium hirsutum
  Clone ID: LIB3828-026-Q6-N6-C7
aagaaacatattcaacagcaggtgtaaattattgtagtatattagtcgtagatgagcgatgaaccaaccacaagcacaaagtcaatcgacacataaaaggacaaaaaacataagaagagggccccaagaatgcagaccacactcaaaaaagtctatgcgaattagactttaaacaccgaaataaacatgcgaaggacttattcaacattggactactgatatcagctcgggtgggcgccaaatcgccgaaacctttcactgtttttgcatagcgaggaccttagaccaagcaggcctagcagtgatctccttcacccaagcacaaacatgcggacgagaatcaatcagcttcttggcaggtgtagccaacaagcattgaatgttgggaatgtgatgcaggtcggccaaggtgaagcagtcacttgccaagtattttgactgtgtcaatcgagcctcgtacacgtcaagaactttggcaagcttaccttcattttcctccacagccgcggagtcggtaaccatgccgaa

SEQ ID NO: 10398 - DNA, 490 bp, Gossypium hirsutum
  Clone ID: LIB3828-026-Q6-N6-C8
aatgataattttcaatcaagcttactttaaatctcttttattcatgtaataataataaataaataaaaaaacagctagcacattgtaattcaatcatatatcaagctgcttgggtattctttattttctttctctttgtatagaatccgtagtttctataatctatatataaatctatgaagatttctatgaagattctggcgccatagcttgtatattcatggccttctttttccctaaaaaaccattggcatcaagtttcatgggaagggccttaatcgttcgtttgagttcatccatataagcaataccaccaccacacccattattgaacctgcggtaagggcatccgtaattgcaggcgccgaaaaagctgccgcccatgatatccacattgtcgcagtcgatacagtaagggcttttttcataacctatacctatcccagcaccgaatcccgtaggatcaggatcgatagaggttgaaaaatca

SEQ ID NO: 10399 - DNA, 535 bp, Gossypium hirsutum
  Clone ID: LIB3828-026-Q6-N6-C9
aaggttaaaaagtaaaagttatataattttttttaattaaacattaacttaatctggcaaccaagcaaacctaatccattaataccatatgacctaaatatgatgatgccatcccaatatacccccaaacacaaccacaattggaaggagcgccagcctagaagtagaaggcaaaaccgaagacgccgccaaccgcgacaagactccatgccagggaattcttggagaagatgagagacatggcactgctctgagctgggccaggagcacccaacatttctgaaggtgggtttgcaggcgatgaacctaaagtggatgggctaggacttgcaattggggctttggacgatgatttgaccaatacgtcgactttctggccggcttggcagtggcctggaacaccgcaaaggaaataaaagtggccaggccttttgagggttacggagtcggatccagaggtgtaggaggcgatggcagatgttccgttgcatgactggaaatcgtcgtgggtcacttgcatcacgttgtggaattg

SEQ ID NO: 10400 - DNA, 319 bp, Gossypium hirsutum
  Clone ID: LIB3828-026-Q6-N6-D1
aaaaaattgggggggggggggggaatttttagttggattgggggtttttttttttttggaaaaggaaaaaaaaaaaaaaagtattttggggtttaaaaaaaattttttaatttgggggggggaaaaaaaaaaaaggggggggggtttaatttatttggggggggttgaggaggggaggataaaaattattaaattttggggttttttgaaaaagaaaaatttggtttttaaaagggatttgtttaaaaaagatgatttttttgggaaatgggagaaaaaaggggaggtgttttggggaaaaaatgaaaagagatttttt

SEQ ID NO: 10401 - DNA, 525 bp, Gossypium hirsutum
  Clone ID: LIB3828-026-Q6-N6-D10
aacaatcaaattaaaactcaatcaacttaattgtatattaacaaaatttgtcgacttactgcatcccatggatctaaaagaaaagaacgtcactaaattagaaaagaaaacagataataaatattgaaataatatatggtaataaagtggttctaactttcagacgacaacaattgctacattgcatggctttgcacttctgcaggcagcaatgcaatagtttttcatttttcatcttttcaagatcaccccatcaacatcggctttttcgaccggccctttttacacgaaagctatatccgcagccaattcataagaaagcaaactatgaaatatatgtatataataaataacagccactactataacttcttaatggaaatggtccaaagaaggtcacaatcagattgcaccgtcactttctcttccttaactatattcgatgtgcttactagaccaccaaattccatcgctgtgttatctgcaccacccatttgttaaaatcatataggatatataattagt

SEQ ID NO: 10402 - DNA, 527 bp, Gossypium hirsutum
  Clone ID: LIB3828-026-Q6-N6-D11
aataaccaatttttacccggtcattttaaaactagatttaaataataaaaaaatcaaatgtccagttacacaagcccaatgtggcccaactcattttaacccaaactacccaaattagcctagccctaaacctaaaccagcaaatcgattcagcccaaaaggcccaatatcataatgcactgtggcaaaccctagcagcctccatgcacaccaattagcctctatacatgccacgccacagccacccagggccttcgtctccacgtgtcgagcctctgccctctcgtgtgccttcgcatgtgcgccacagccacgtgccccgcctccatgcgctacaccgagccgtgccacatcaccgtacggcctccacatacctggtcttcgttcgctccgtcataatcggggtcggacgaggctaagggtcccctggcgactggtctcgagttcacttcgtcacaatcagagtcattctcgggattcggaaagctgccgtcgattgatgtagcacgaaacgatgctgagccctt

SEQ ID NO: 10403 - DNA, 534 bp, Gossypium hirsutum
  Clone ID: LIB3828-026-Q6-N6-D12
acttaaactccatatttcagattaattaattaacttaccagtatttgtacatcattattataacaagggactcaaacatcggcaactgctaaagaaggcaaaagcaaaaccctcgcccgtctaactctttaggcatgggcatgggcatgacctacagtacaatacaccgccactaaaacctccgctcgcaaatcactcaaaagaacgaacacaacatcattgtttctgctctttcctattaaaataaaaggtattaaaataaacactaaaccctccagaccagtaatgcttccaaaaaaataaaggaaaaaagaaactacagaacagtacctgaccccaaaattctatatggctgaatcacatttatatgacaatctctggcatatatctggtaatgataaataaataccaatatagcctgtatgattgtcctatcaactgcccagctgcatgcaaaaccgcactggcactgtaaatttggtagctgttaaaatcccttaaatcatattcatgtttccagttcacccaagtaaa

SEQ ID NO: 10404 - DNA, 526 bp, Gossypium hirsutum
  Clone ID: LIB3828-026-Q6-N6-D2
aagcctatatatattatgtatgtgtagatgcatatataagacaacacagaaacgatagattacccttccaactcaaaaaggagctttgccccatcttggtttctttcccggtctcggatacaacgaaaaaggatgttatatagacttgaacctaatttctttctataattttagacactatttgcgcttgactatgttgtcttgttgtttgtgttgaaaatgtttttgcagctcattagtttcatcggcaacagtatcttcacaaacacttcctcccttcggggcggtttgcatagaatatccacagaaacagacacagcaaaactcctactgagattaaccccaatcctgcattgaccattttaaggtaacgctccaatggatggcagtaattcgaggtgatattttgaaatgtatcccggacaaaatcgcaattttgaaggcacagtaagggtggggtatagtgctcaagagcataactctcgttaatcgctgccaccagctgtgtgaatctgtctggcgttat

SEQ ID NO: 10405 - DNA, 472 bp, Gossypium hirsutum
  Clone ID: LIB3828-026-Q6-N6-D3
atcacaaactagatctctttttttttttaaaccatcaggtgtttgatgctccatattcatgataaacgatccattggccaacacaagaataacgacaacttaaattaagttctagcaaaacaaaaaacatgaaaatctcaaacataactttgaaggcctcttcaagggaactcctactgcaggcatcccaaatagcaaattatattttgttgaatgcaacaatgtcacaactctgaacatactcattgattggttcaaccgtcagatgttcctcgatgagagtgtcaactgacaccaaatcatccacaatggtcatcataatttgcaattttttaattccataaccaacgggcacaagcttaaatgctccccaaagcagtccttccatctgaacactttttaccggttcttcaagtttcttaatgtaagactcatcggcccatggtttaatatccaacaacacataggactt

SEQ ID NO: 10406 - DNA, 461 bp, Gossypium hirsutum
  unsure (1)..(461): unsure at all n locations; Clone ID: LIB3828-026-Q6-N6-D7
ctcaatcaaanacaaatgaaggaaagttgttattgctgtatgtatatctgttacagggttcaccatcttttccagagagcacgtaactagaattgtaaggatggaactataagattaccgcaaccaaaagaaaaacaactgtgacagtagctgaccttaggtatttggcccgacattacaaccaatgtaatcgtagatgtaaatgatcatgcaagtaggctctcctatgctgaaaaggggcatgtcaatgcaacatctcatctagtttctgcctgtactgagccaacttcctagtataagcataaactccagcctctgttggtgcgatgggacttccccttctaatgaacttcccctctttaaaaatgtaaagcatgggtatcccggttgatagttctaagctgataacctcctgtgaggttaacttatcaagatacataatgatagaccttaaggagttc

SEQ ID NO: 10407 - DNA, 523 bp, Gossypium hirsutum
  Clone ID: LIB3828-026-Q6-N6-D8
aattctctaagctcgatgcaattgggccatgaaactttcaattaaataccaacaacccacctcaaccctgaacttaattttccaaaagtaacaaagcctacaaggtcggatcaaaacctgatgaatttaggttaatttgccgactctgtacatcaatcatattttagccgctaccctttgaaaagaaaaaaactcgatagcatgctttttttagccttgtgatcaatgtcaacaatacaaaccaaaaaaataaaaaaaaaaacaaaaaatggcttaaagccgaatgaatatgctaacccgagcgagtattctccgacaacgtagcgacctcgtctacttcggtattgaaaacaaagcttggaaatgtagttgttatgtctcttaggtatgggagggtcattactctcaataatgatggattacggtagacaaagctcttccattcatgcatatctatctttccgtcctggttagtgtcggcatccatgaaagtcttatcaagtattgcctcaatgatttcttc

SEQ ID NO: 10408 - DNA, 427 bp, Gossypium hirsutum
  Clone ID: LIB3828-026-Q6-N6-D9
aaaaaaaaaaagaagctaggggttttgggttccaagccttaggggggggtcccccgggaattgggggaaaaccccccttttttggggaaaaccaaattctaatgggtttttttccccttataataataaaccgggaacccccctttgggggggaatttgggggccttacccccttgtttttgggggtgcaaatgacggacccggggcccccaagggggggcccttaatagcttttttttccaaaaactttggggggttaaaaaagctcccggccatttcccaccattttttaagacttctatatccaggggttcgggccaaccatttttgcccaaaatactttccccccccgatagggggggaagctcatcccaaaaacagaggccccatcaagggttgatgctttacccacaacccctttaataag

SEQ ID NO: 10409 - DNA, 492 bp, Gossypium hirsutum
  Clone ID: LIB3828-026-Q6-N6-E1
aaacccaaaaccacctatatttatatatcattcccaaggcctggcatcacagttataaaattacaaagaattacttcattgctcaatttgttacttttctgcacaggcaaaaaagttaggggtcacttgaggaaataagccaaagaaaaagggaaaatgcttttaacaaagaaaacccgctcgataaacattctaaaactgctaacattaagaccctgcaaaattatgaaaacctatatacacaaggaagctgggacctgcaaattggattccttaaacaaatttttcaacttggccaccttttatggggacatccaaaaatgaaatgggaaaaaggaatggttttaaataaataaagatacctcttttctacataaaggaactataaagttttttcttttttgacccaccttatccatataactcattccattgaaaaagctcattcatatattgtaaactcttataacacacttgcacacacctgcttat

SEQ ID NO: 10410 - DNA, 76 bp, Gossypium hirsutum
  Clone ID: LIB3828-026-Q6-N6-E10
tttttttttcaagctttggttttgaccggtgtagattcccaatgttaataactaaaattgggaatctacaccggtc

SEQ ID NO: 10411 - DNA, 530 bp, Gossypium hirsutum
  Clone ID: LIB3828-026-Q6-N6-E11
aagaaagaataattggttctttgacacaaaacggaacatggttcttcgatacaaaacggaacatattcgctcttaaacacgttcgatcttacatcctccaagagacgtattttattattaacaataccataaaaggggggctaaataaagcaatctatattaatagccgaggccaagaaaacatagaccttattaggcacaaagcaaatctaaagagctttaaggatatcatcagcacttgacacggtaaactcccctccagattcgacatttgctgccttcaccttgaggtcatcgaccaagagtgcgaacctcctagaacgagtgccgagacctttatcgccaaggttgagctcaagaccaagggcatgggtgtatgttgctgaaccatcagctagaaacttgacatctttgttctcagggtaagttttggtccatgccttcatcacaaagggatcattcacgctaatgcaaataatttcatcaacgcccttggatttcagctcccctgctttctcgatgaatccagg

SEQ ID NO: 10412 - DNA, 519 bp, Gossypium hirsutum
  Clone ID: LIB3828-026-Q6-N6-E12
aaaatgaaaaagactgtttttatgtaatatgaataaatatattaattacaattgcactgaatctgttggtatggtttaagcggtggcacttagggtttttgggacagggctggaacatggagtcgggtttaatttgccactagttttaggcttgacattcaaacattgggatgttgcgggttcaggtccggtgtgcttaatatcaatgtctgcaagttccacattttgacatggcgaagaaccgctgcaaataaacttgacagcttctggaagcgcagatgtgccacggatgttcttgaagctaatgttgcttagtttaactttcgattcttcatttatcttgcatttactccatgggcaatatttttgatcaattaggataggggaagagacattattcacgataatatcctcaaaatgtacatctgatactatcccaggagattcgcctggccaagttttgattcgagctccattcgaagtattagtgatggtgcagtttgtgactttaactccctc

SEQ ID NO: 10413 - DNA, 477 bp, Gossypium hirsutum
  Clone ID: LIB3828-026-Q6-N6-E2
aaaaagtagaaagcacgtattatttacaatttacagaaacagggcagtggatagtctggaaatgcttgactttaaaggaaaacaataggtggagggcatagattaaggtttttttattctaacctgggggggtggagccaattgctgtaacaaattcatctaaaaatcaagcgctagataacgaagccatacctatgtattgatagtaaagattgttctacatgaaatgttttttataaagagatctgccggatgaaccttgcagccagctgattttgtcaacagcgaggtaagttttatacccagctcattaaatatgtgtgctttatatgtaattgctatagcgtggactctacaaatgaaggacaagggatctgaataaaattaaatagctgtatgtaacaatatacaagctggatccacaaagtctggtgcattggggatgaaaaacaacaatgactgtttcatgggagaaag

SEQ ID NO: 10414 - DNA, 522 bp, Gossypium hirsutum
  unsure (1)..(522): unsure at all n locations; Clone ID: LIB3828-026-Q6-N6-E3
aaataataacatttcttggtaatcattcccaataaatcccaaatgtacaatgcacgggtatcaaatgttgtacataccaaaaagagggatgtatgcatatcaaaataatgtttttaacaagggcgaccaattctgggggggggtgttccggcataccttgtgagtctggggaccaatcgaccgggttgngaaagacattattttgtcagcatcgaatagcttgctggcattaggatcaccggatgtagtaaaataggcaccgttcatgaagtggtcaccctgtgatacccagttccaattcttccactgttccggtgataagtagcccctactggtcgcttgcttagttacatagatgcttgacgcaatatacctattgccctggctgataattgtagggtggctactaccgccaatggcatacatgaaccaatgagtgtagtcattgttgacgacatgaaaaaaacctaatcgacacctaggcatcctgtccaccaatcctttaccgaagcggttcaaagc

SEQ ID NO: 10415 - DNA, 484 bp, Gossypium hirsutum
  unsure (1)..(484): unsure at all n locations; Clone ID: LIB3828-026-Q6-N6-E7
gtcnatgaagcatgttcgataacgaagggaatgtgggtgtgaaaatccgttggcctgaggctaaaatgtgcctcgggtcaaattccattttcatttcatagaaccgatcccacttattgccaaagtggtccatccactcctgttgcgtagtgtaatgaggtaaatatcgcttcaccttgatcccagcttcatcacagtatctcagaatctgacggttctggttgttcaggtattctaagctctgggtttcctccccactatccaaggctgaccttagcaatgccaccaggtaaaacaaaccctcatccggtgtcaccacggagctcctatggtcccatttgttcttgttcattggatagatgagaattgggccacttgttttattccccaaaatgcccttgaagactcccttatcgaactcagcaatctttgagctgggtataaaaaggtttagccatggatgagggacctcccacaaaccctt

SEQ ID NO: 10416 - DNA, 384 bp, Gossypium hirsutum
  Clone ID: LIB3828-026-Q6-N6-E8
agaacaataaaacaaaaaactaacgggaaattcgaccggacccggggggcgacccgggaacccccgaccgggccccgcagggggacgaggggccccaaaaggggggcggggaaaaagggggggaaaagaagggcaaaggaggcgcccgggggaaaaaaatacccccccacaagaccacaaaaaaaaaaagccggaaagataaaggggaaaaacgggggggccaaaagagggaaagaacccacaggagggggggagggcgcaaagcccgaaaaccaaaagaaaaaacgaacgaaccaaagggaaaaaaaaaggggaaaacccaaggggaaagggggccacaaaaaggggaaccaaggaggggaggagattcaccaagaggaaggg

SEQ ID NO: 10417 - DNA, 135 bp, Gossypium hirsutum
  Clone ID: LIB3828-026-Q6-N6-E9
ggtacgcttggtttttacctggttaattttggtactcggttctcttgtggcgtaccagctttcgcgtagggggggggaatcaggagcggggcgcaaccagggccaaagctgtcggggggggggggggggtaaccc

SEQ ID NO: 10418 - DNA, 523 bp, Gossypium hirsutum
  Clone ID: LIB3828-026-Q6-N6-F1
tttttaaacaagaagaacatattcatatccaactatcgaatttcggcactcactccctaaacaaagctctaacatttaacacaggatacacaggggggttgcatgattacacaatgataagcaaagacccaaacgtgtccaatgaccgacgactctctaaatacattaaaatctacttgctctcagaatacaaatgcttaaagctactagctaaatacaaatgcttaaagctactagctatcccctctaaatcacacccttactaaaccgagaatataacctcaccaagcacaactccatttggaagataacgattgtcaccggttccaacatcaaacagcccggattctcatgttgccagctttcaactctgcatgttaaacaatgccggaattcgactcattcgcctcttccatttggctaagcttttcttctgctagcatcaaacctcaaaagcacatttttctacttattccatgttaacatctttattgttcagacaaactaattccaggattgaaac

SEQ ID NO: 10419 - DNA, 222 bp, Gossypium hirsutum
  Clone ID: LIB3828-026-Q6-N6-F10
gggaaaatagaattggtatatatattacactggtcaatctttcacttttacttacaacattcatgctggtagcaatcaaaacttatcacaaatatctatcacatagcttttttttttccgggggtgggcgggaaaaacagacaatggaaactcacacgattatttatcagatagcataaaatctttggccggagtttgggtgggaaaacagccaacgtaaac

SEQ ID NO: 10420 - DNA, 500 bp, Gossypium hirsutum
  Clone ID: LIB3828-026-Q6-N6-F11
gttcataatctccatttttcttattaaaataaaattatgaataaaaaaaagttatgcaagataatattacaatccttcatgtaccttgtgccgcaaggggttggaaatttaactatctggctaaaagttgctagaatcaacttagccttcctcatcaggggtctcccaaagattgataagctattagaaattaagcttccattgtcactgtttgctcatcgttgtcatggttaccgctagtttaatttatctaaccactgtaattggttgatttgtgaagccggagatatggccccccttccttagcttagcctcaggaactctcatatgtttggaagccggataatgcaatgcaacactcccactgtgctaccactgtcaataagaatctggatcatgtttgcatttagcttaataaatgagaatcaccaataatccttgcaagagcaagtaccatctacaaacttatggaaccgaacacgatctctaacaattatttc

SEQ ID NO: 10421 - DNA, 544 bp, Gossypium hirsutum
  Clone ID: LIB3828-026-Q6-N6-F12
gagctaacctgacatgatcgctttatcttgtgattatttggaagaaaggaatagtagttcatactctgtttgctacaaacgcttattgcagataatatttgatgataataaaaagacaagctaggcattaaatacaatcaggcctactgttgaggtaaagcagattggttgataagccttgctgctgagaaatgtaactttgcacaattgactataatttactcagatctattaacagaaaagcatatcatggttggtgaaaaccacatctgcatagataatgaagaatggctctagcattttacatcaatttgtgcgacgaacctcaccaccctgtcttgtgcttctgctactgcttagtggaaccgaactctgacttgaaagctgcaaatcagaaaggggaacagaacctgtctgcgaaaaaatcaaaccaactgaactactagatgtgctagcagaagaagggattcggctcaaataggaatccttcttagacgaaatcagctcaggccgtaaatcagaagaagaggaagaaggcgccaat

SEQ ID NO: 10422 - DNA, 534 bp, Gossypium hirsutum
  Clone ID: LIB3828-026-Q6-N6-F3
aaaaaaaatatcttcaataaaccaaatttgaaagttaacaaggctgagctataataatatgagataacgttacacgttctgagaaccctgaaagtaatactaatcgccacacttatgttgaagacaatttgttgggggggatcacctattcggctttggtggcctgagaacattccagtccagtttctcacgctttgactgctttttggatgaggctttaccgctgctaggggtagattgaatgtcagattgttttctcttaaggtctccattaccttcatgtttatcagtgccaacttttgagtgagttgcttcagatgcagatccattttcactagacaaagttcttccaccagaggcatccggccgagacacatttgatgcttcttcattcagtttatcaatagaaggattgaaacttcgaaatgacatccgcccaacagttgctccaggatgaggatccccttctataatcaccacacattttctagtaatagtactaatcccttcagggttaacctcttcttccttttt

SEQ ID NO: 10423 - DNA, 515 bp, Gossypium hirsutum
  Clone ID: LIB3828-026-Q6-N6-F7
gaaaaacaaagcaaactttcgttacgatgacagtaaaagaattgtataaactgattacattacactaaaaaaaaaaatgatacgtagtatgatgagaaaactaagttttattggttccttaaatttcttttttcctcattcaaggggggaagagcgagaatctttaccggcaagggtttgaattattgcttcaaggagtttaatttccttgtcacgcttagagatctcttcttgctttgctcgcaactcttccatgtgaagttcaaatattggggggttctcgagctcctttgtaacctcttgggcacgcaattcggcggccttttgggcagcctcagcctgtcgcttctcggaacgagcacccgctgctgctgtgattgcagcatctacctctttttcaagcgtctccaccctttgttcaaggaccttgatggttcgggcttgttccgaggtaagtgaggccttggcgaaggtatcttcgtcgacgaaaacagcttttttgagaagtaatttct

SEQ ID NO: 10424 - DNA, 228 bp, Gossypium hirsutum
  Clone ID: LIB3828-026-Q6-N6-F8
gggggggaaaaaaaaaaaaaaatttttcaaaaaaaggccgggggaaaaaagaatttgaaaaaaaaaaaaaaaagggggaaaaagggggggggggaaaaaggggccttggaaaaaccgaaaaaaaaaaatggggggccaccgaaaaaaaaagggggggcccaaccggggaaaggtttttaaaaaaaaaaggggtttttaaaaaaatggccaccccgccccggggggccc

SEQ ID NO: 10425 - DNA, 543 bp, Gossypium hirsutum
  Clone ID: LIB3828-026-Q6-N6-F9
agaaaaaataaaaaaactaattttgatatttttaagtacaaagattaaatttcaaattttgtctgagtacagacacagacgtattttaacagactagaatttggaacacttcaaacacataataactaaaacttatagtggcctaacctgaaaacgtaaacctaaaatacaaatgacccctgtagacccaatttttagcccgggcccatacatatacagaaaaataaaacaaaacaacagtccaaatctaattacaccaggccaaaaactttgcaatggcccaataattggttacacaagcccaatggcccaaatcgttttcagaaacaggaagccctagagttctatttgccttgcgccacagccactacgcatgttggcacatcaagcacgtcccccagctcgcttattgcacgccccacgtctgtgcgctccgcttcacgccttcacgatctgtaaattgagcaagagaatagcgagcaactgtttgtatttggctataaagccttcaattttgattgtaaaaaggatgatttttttcct

SEQ ID NO: 10426 - DNA, 466 bp, Gossypium hirsutum
  Clone ID: LIB3828-026-Q6-N6-G1
agtaaaaaacatattattgacataaataataacaacagtagcacacatagctaaataagtggaaaaaaacccgcatcatacaagtagaggatgggattctttatcacaaagcacacaaaataccaggttctcaaaaagaggtgaaaaaagactatgattaaactgcaagaaaagtggtgacacaaccaacaacttaaaagagcaagcccgatttaactaaaatcagaaaaaatctggagcgcaatcagagaaaaaagagcggaccaggacaaacccaaagagcacttaacactccaaacctatatcagtgaaacgaagcccaactgaccgggaccctttatctaatctcagccaaaataaaaggtagaaatacgaaagagatggtaccaaaatgtgaaaagaaattaccgtgtggctaataacttaaaaagccattgcagacaattaggattctacctaagctaat

SEQ ID NO: 10427 - DNA, 526 bp, Gossypium hirsutum
  Clone ID: LIB3828-026-Q6-N6-G10
ggaaacaaacatttattaattattgttaaactacaagtaacaaatggcaatgtttgcaagaaacaaatgaacacgaaaaaccaaaaacacttgaacgggatgaacatccggaactctaaaggggccagcattggtgagactaacaactcaatgatgccatctatgccttgtttgcaatgttgttcgaaagccagtccagtccctcatacagaccttcaccagaagtggcacatgtgctctggatgtaccagtggcgttggcggagagaatgaaggccaagcttgtcagtaatctcagcagcattcatagcatttggaagatcttgcttgtttgcaaatactagcaggacagcatccctcaactcatcctcattcaacatcctgtgcaactcatctctagcttcaaccacacgatcacgatcgttgctatcaaccacaaaaataagtccttgtgtgttttggaagtaatgtctccacaatggtcggatcttgtcctggccaccaacatcccaaaccgtgaagctgat

SEQ ID NO: 10428 - DNA, 526 bp, Gossypium hirsutum
  Clone ID: LIB3828-026-Q6-N6-G11
ggttgaaaggtaatgttggagtgattgcagcaggcgcagccaaatatgagagctaaaaacaaaagcctctcattatcacaagtctatccataatagctaaactatagccataaatcatcccacaacattcactggttaaacctatcccataacatcagttccgaccccccataataccatcgctgaaagcaaatactaaattaaagagacaacaaagagaatgcaaagattcctctcacataaaatctaccaaactcccccatgctcactaatcagcctctgcataggcagtttcaaggtgggcttgctccgcttcttggacctctttttcggtcttccttcctttcttggatttgtagtacacactcatgaatgttcccacagctccgtacttcctacgcacatgctcatacaggtcagcatcgaacatcctccagaaatccttctcgttcagctccgacactgcatactgtggctgaaaactatggtttttgatcagccattgctccattttacgaactgcctc

SEQ ID NO: 10429 - DNA, 535 bp, Gossypium hirsutum
  Clone ID: LIB3828-026-Q6-N6-G12
cgttgctaatagcaaaattaattcaagcataaagacaaacaaagatgtgtgcttttccatggtgaataaaatattataaaaggtacaacttctaaattgtagtacagtctaacccatcattaggagatgggggaaacataaacagagatagaatagttttttttttattcgtaggcatatctaatttattaactccatgaggtgatcagctaatctcttccacccatcaaattcaagccagcagtttctttatatccttctcaatgctaagaggagaagtagtgggagcataacgatcgacgacatggccctccttatcgaccaagaacttggaaaaattccacttgatgctgtccccaaaaagtccacctttactagacttgaggaatttgtatatgggagcagccttctcaccattcacatcgaccttatcaaatatggggtattcagctttaaagcgagtgcaagcaaactctaagatttgctcattgttccctggctcctgtcctccaaactggttacatgggaatgcaag

SEQ ID NO: 10430 - DNA, 475 bp, Gossypium hirsutum
  unsure (1)..(475): unsure at all n locations; Clone ID: LIB3828-026-Q6-N6-G2
gaataatacccagcatgtggctgatatgtagaacagggaaatgcggcatcattatgagtagttaaaagccagaggactaacaaggctaggttgggcggccctgcatttttcatgaccacctaaccatnaacgggggggtgggggccggttcattcacccatatattgtcccccaccaaattgatggcggacttcgggttttatgtatgggcgaaaatggaaccattgaacatctaaaaacaactctgatctccaatgccaggatttccactgtggtttaccggaatattctatcatggaaacctgtttatttgggaagatattgggggctctatatgaagtgtcattgatgtgaatagaaaggcgaatgctgtgtataataatggtcttgtataaattggctgtataattcaatcacatacatggctcgagaacctaatacatccctaggaatgcttatgtgaaaaatttgaacc

SEQ ID NO: 10431 - DNA, 525 bp, Gossypium hirsutum
  Clone ID: LIB3828-026-Q6-N6-G3
aaacaaaatcaaaaaattggcagctactccacacattccaaaaccacgagaaatttttgtttatgctagcatgataaagtactgaatatcatgattatgacaggaaacgagccatccatgactcgaaacgaggaccatgcgaggcggactgcagcttcatcctcatcagccattcccatgcccttcctccgctttataccatcgggggacctgttcatgaaggcatgtgcattgcctggataaatatgcacctcatatggagtttttgattctttcagtttttcctccaaagccttcgcagccgtcacatctgaaaacccaacaaagttatcaagttctccaaaatgagcttgaacaggtgctttggcctgggcagggtctgccagttcaggtgaaggaaccccataaaaggcagcaacagcatcaacttgaggaactaagacagaacttgcaatagagagagcaccccccatgcaaaatccggtcactccaaccttttttgaaccattagctttaagccaatca

SEQ ID NO: 10432 - DNA, 510 bp, Gossypium hirsutum
  Clone ID: LIB3828-026-Q6-N6-G7
atgggaaaattaacataactcagttctgatcgaaaaaaaaaataatgcaacaaagctcgtaagaacagaacagaaatatcaagcacttggtgcaaagaaaacttgtttcagaattccccatgaatgaaccaaagagaagcagcgtttttaagcatcaaaccaaaattaccgaacattgaagcataagccaagtacttctatgaactccatatgataacaaacctaaactgacaaaattatccatcatgaaaaatcatctctcaaggaagaccagcaggtccagcaccaccataaccaccacctccacgaccaaaagcaggccgtgttccagggcccctgaatgaaggctgataatcagctggagctcctcctttatcaccaaaatcaccgcctcctcgaggaccaccgcgatagccatctctgtcaccaaatctcctctcaccgtcaccaaagcgtggtgggccgcgtggacggtcaccgggagggcccatgggacgaccagcaggtttc

SEQ ID NO: 10433 - DNA, 512 bp, Gossypium hirsutum
  Clone ID: LIB3828-026-Q6-N6-G8
aaaggataatttcagctttcttttgaattacaacactttggcaattgtgtatgaacagttcgaatgaaatagataatcaaagtacataaatttcaatgcgttaaaagtttgtaattgggggggggaaaccagaacattagtttctaaaaagaaaagaaagaaaattggaagtaattttcagcctccaaagagaatcccagcagcttgttcttcattaccatcacataatttaagagcttctatcgccatttctcttgcaaaccccaactcaataagctttgcaactttggcttcaaattcaggtttatgtgttgcaacacctcgtgcacctccggaagactggcctccagatggcacattagccttctttgttgttccagttgtcacagcagctcctgagcttgatgcttgttttaagtgcctttcttcatcaaggaagcgagaagggatgtccttttcttgcaaaaatgggactgaaacttctcctcctccaaccctaagaacattatcct

SEQ ID NO: 10434 - DNA, 362 bp, Gossypium hirsutum
  Clone ID: LIB3828-026-Q6-N6-G9
aaagagagaaaccttggttagtatattataaaaaaaattcgaaacaggggtattaatatcaactagatcaatcaaataaataattaagcgggggggggggggggccaattgatttgatcgggataaactcataattgccagagggggcaataaataaaccatatatacaatctactcactaaattaactaaattggggggggaaaaagggtccctaaagaggggcagggggttcatcttcatcagcatttggggggggaattgaagcagataccataaatgggtaaatttggagctaaaaggttatgggggtttaccaaaacttgattcatttgaggaagcggggttaacaaacctggagtt

SEQ ID NO: 10435 - DNA, 432 bp, Gossypium hirsutum
  Clone ID: LIB3828-026-Q6-N6-H1
aaggggcaaagctcataaaaaatttcatttttgttcttaaaaaaatacccaacagctttgggggggcaagtatttcaactaggttttctatataatattttaattaaggatttttaaaagccccaacccaacttaaaacaaatttttgaacccctaaaaaaagtaaaatccccacgggtagctaaaggaaaagttttgatcaaggcaaagtttccaacccccatatttttatgggtccataaacacttggtgaaaaaagtagccgtttttccccagggcaccattgtcctgaattaacatccatgtaaggggccttttcctttttaaatagcaattgatatgaaaatccatttattgaaccatttttattttttaaaaacaaccttacaggattattaggagttccactggcaaaaatttccttttttgacc

SEQ ID NO: 10436 - DNA, 523 bp, Gossypium hirsutum
  Clone ID: LIB3828-026-Q6-N6-H10
gaatctaattatccacattttgtattatataagatcttcaaataacaacgtgtgaaacaaaacgtgaacaatgattcgtattacatatagtggctttgacaattcaatgcttgttgtgaaagatctaaggggaaattcgaacccacattgatcgacggcaaggtactccattgtagttcacaaagagcatgtaataaccaggtggtgcaatgttgctattaatgggagtttgaagaacaatgttgtttgtatttagggcaacatatttgttaaattccacaattcccaattgaatcaatctctgattcatagcaaccccgtgggtcacaaatggcggcgagtaaatcgtcacttgaagcttttgttggtcaatttcgacgtttccacggatctgcgttgtaaatttctgaccgtatttcacctggttattggacttttcaacaatgatctcttgttggaacatacccaagttcgggtccaagtaatgtggtgagaacttctcaacccgaacttcggtggggac

SEQ ID NO: 10437 - DNA, 534 bp, Gossypium hirsutum
  Clone ID: LIB3828-026-Q6-N6-H11
aaaaaaaaatacaatacaatgttttcttcatttctttcttttaaaatataaaaacattagactacataatttcaacacttttttcatacaattaattcatcgaggaaagttttccagaaaccatgaaacaaacatatgccaattttccaatcattcttcccccccccaccccccttttcttctgaaaatgtaaacacaaaaagatcataattattatcaaccagcggccattgaagtaaatttaagctctcacagggtatctatcaatgcaatcaacccatgggttatcccttgaaggcttcctcacacgacgcatggatcgccaaaccacactgttgcatttaaacccagaaccgaatgctatttgccagatcctatcccctcttttaaccctttctttagcttccaaataagccaattcgtaccatatgctgctgctcgatgtgttgccgaaccggtgtaaggtcatcctcgatgcttccatgttgttttcgctgagttccaagttcttttgcagctcgtctagcaccgtct

SEQ ID NO: 10438 - DNA, 521 bp, Gossypium hirsutum
  Clone ID: LIB3828-026-Q6-N6-H12
acgcaaaatcgcaacaattatacattttaacaaaatgacataaaggactaatccctcaaagccctctcattacataatatgctcaaagcaaagtactgctccccagacatccactttacaaaaataccaaactaattaagcctactaatgtcactttctaaatccatatgaaaatgacaaattctgcctgaaatgcgacaaacccaacttattacttgccattgggcatcgattctaccttaccatcgtttcctgcaagcaacatgggtgtatctttcctagtcaaaccagggcattcaaaccccaggacatcacccaacaccttctgcacgtgattcgattcctggatcggcgattgccctccgggcttcactgtcatctcttccggcaatctatcaaggtaacgtgacctacaatgttggccttggattcatgaagaacaaataagggtcccaaaatttgacccctctaacggagcgtcctctcaaaacatgcttctgcttagcaattgtacggaaacg

SEQ ID NO: 10439 - DNA, 531 bp, Gossypium hirsutum
  Clone ID: LIB3828-026-Q6-N6-H2
aacataggatataaaaaaaaattatttgcgagaataaaataattataagagttacaacgtcatcaaaaaaaatatacctctgctattgattaagcggtcggggtaggttttgctgggataggggcagaacatgcagctggattttgtttgccactaactttaggcttcacattcgaacattgtgatactgcaggtccagtcggtccactatgcgtaatttcaatgtctgcaagttctacattttcacaaggcaaagtagcactacaaataatcttgacagcttctggacgcgcagaagtgccgtgaatgtttttgaaactaatgttgcttagtttaactttcgattcttcatttattttgcatttgttccatgggcaatatttctgatcaattataataggagaactgacattggtcacggtaatatcctcaaagtgaatgttcgaacaagtgccaggttcagcacctggccaagttttgattctaacaccattggaagtattagtcatggtgcaattttttactgtaact

SEQ ID NO: 10440 - DNA, 527 bp, Gossypium hirsutum
  Clone ID: LIB3828-026-Q6-N6-H3
gccgagagttataagtatcatacattcaaaccagtaaaggaagaaatatacttacgcattttcagcatttaaaacaaaaaccaccccacatgcattgagtggtctaattgtgagtgataagatgctatataaaggggggggggccaacatgatttgtaatgtcaaatgtatgattaatgtcccaatccaagccccccatttgagctctgagagccgaaccaacatgatcaaaccacttcttggagttgaagtaacaagtggttcttcttgtaattgaaacggcaatcaataccttggataccaaaacatacccttaatgccctcaggatcgggttcaaaacccaagttccgatagaactccacaacttgactgtccgcaaaaagtgttatattaccaatatctctctgtagaagggtccttatcatcttttcaaccatggccttaccaaggccttggccctgatagctaggatcaacaagaacatcccagattgtagcattgaatgcatggtcagatgtagcacgag

SEQ ID NO: 10441 - DNA, 539 bp, Gossypium hirsutum
  Clone ID: LIB3828-026-Q6-N6-H7
aaccctagaattaacgttagtaaatctatcaagtcaagttggtattttacctacacctgcccaaagcaccttaccctattgggtcgggacaaagcaagaactcggcaagtccggggtcttttttaccctaaggtcctaacaagtctaccagctttcacattcaatgtattggaaaacggtgtgagcattatcccgagggtccacccatgtgttgaggctgacactgaagatctaattctttaacaggaatgctatatatgatgagaccacaggctttaagcaacagctcatatacattacataggtattatgccccactaacacacttgaacattagctaagcttatacgactgactaagaaatccattcccttggaaaatcatgtttacaccgcattcaacagtctctttgctagagtacaaagctcataagcccgtcagcatgccttgagtcacgagtggatagcggcttctatttcatgactcaacatgttctactgataaaaggaatatatataatccaaaacctgcacacatgt

SEQ ID NO: 10442 - DNA, 106 bp, Gossypium hirsutum
  Clone ID: LIB3828-026-Q6-N6-H8
acccacccaacacctggttgcagggtttcataaaagctctgtgtcacgatttctctagtacaagcctgtgaaaaagtagtaatttacattgtatgtttcactacaa

SEQ ID NO: 10443 - DNA, 486 bp, Gossypium hirsutum
  Clone ID: LIB3828-026-Q6-N6-H9
ggccaaaagcaaaatgaatgtttcgggggatttaacttcaaatacatttccagatttggggccaaaaatcaaatctgaaaatttctacatttataaattatctacaacaggattggacatttaggggatcccataaatccaatcaaaaccagggttgccatgttggatccatcatacataaatttctgggtagcagggcagcctcaactaactcggtaacacccctctgtactgactggggggggtccattgcattttcctcctcttcaaaaaaacactggggagctattccgttgatccggccaataacattctccacgttggggggaaccttatttttgaagtcagcagggttcaaactaccaattccagcggcaggggcaagtggcatcccgaggggtcttctccaaaaccaaaaaagcagctcatcacggaaaaacatggccagttgataccacaaatgctgcgattgcttgggtgaaacta

SEQ ID NO: 10444 - DNA, 466 bp, Gossypium hirsutum
  Clone ID: LIB3828-027-Q6-N6-A1
ggggagggagaaaaaacaatagcggggcccgaggcccaaaaaaacccaaagcaaaagggggggggaagaaaaaggggaggaaaaaaaaaaaaaaaaggggggggtatgaaaaaaaaggttaaaacaaggggggggcgggcccggggggcgagccgggaacgggggaccgggcccgggagggggaccagccccccctatggggggggggagtagagctggggggaagcaggggcaaagccggtcccggggggaaagggaaatcggggcacaatgccaaaaaacaaacaaaccggaagcagaaggggaaaaggccggggcgccaaaagagaaagcaaacccaaaaaaaaggggggggggtaagggcccccttcccagggggaaaaccgaaaccggccggggcattaaggaaaaggacaaccccccgggagggggggaaggcgaattggcccccaggggggggggtgtt

SEQ ID NO: 10445 - DNA, 518 bp, Gossypium hirsutum
  Clone ID: LIB3828-027-Q6-N6-A10
gaattcagatgatatttttttttcaaaaaaacgcagttgtttgtgggaggggggggggtggagcttcaaagtacatgtccctatcaaaggaaactaacgatttagcaaaagattagagaccagttgtgcacaattgaagtgaaggtgcatggtgttggaaacattgtttctaagaaagaaaatgattacgagaatcaaaagaaatcaatctctaaataattaccagaaggcttcacatctaaacccggaaccttgtcattggttggtggtacctttgccgagtttgttccagcagaacagtccatcacaacttgcttcggcacatcgggtggatttgcacaacgaatgagagcccaattcacactttgaaagaatggatgctgtttaatttcagttgcgccacgcctataggcaagccgatgctgcggttcctttacgagtaaacctctgatcaagtccttagcagcaaagctcacactaggatactcaggaaatcttaatggctggccaacgacatt

SEQ ID NO: 10446 - DNA, 560 bp, Gossypium hirsutum
  Clone ID: LIB3828-027-Q6-N6-A11
cacttaaaaacacatatataaagataattacacaaaattaaaataaaagaaaatgattgatcccccgttcatagttttttcttaacctttcaacaaccccatgaatccaagccgatgatgccgagtccatctttgacaccataacacataatatgatcagttcctaaatttccaataatatttatgattataggaaaatttaaaaagaaaaatatttaatgccccccattttttggcaatataagcattattttagaaggctctttctttgacgatatcaaagctcatttcactgggatcggtggcttgcaattcaacttgaacaccatccagttctcttctgaacctatctttggaacttgcgtacaacattttgctcctcaccctcgatgtgtctggtgaccatgcgatgaagaaaatcttgctcttttggcaattctcatcggtggtgaaatcgaaatcgtagacagcgtaacgacactcatcggacggcaaactggaacataatttctcatagctgtctttgggtgcacctactttctccactacaatctgttgga

SEQ ID NO: 10447 - DNA, 542 bp, Gossypium hirsutum
  unsure (1)..(542): unsure at all n locations; Clone ID: LIB3828-027-Q6-N6-A12
ggtgtattagaatcaatcataagtctcacaataagtgcattcatttacctacatataagtctatgttctaagtcaaaacaatcacataagataatcataaatataccactatgcattggagcagagaagctaaaaagcacgcgacatacatactcctctcgggcaagaaaacagacctaaaatacgaaaattggctaagtatggagataattcgcagccatcatcagctccagagtcagttcgggttcaatgtggaactcagtctctttgcccctggaatattgaagagaccaataaaaatactgacaaatcttctcaagaatcacagcacttatctccgggaaagtcacttccccatgctccgcctcagcgaaaccacctggagaagtaagcatgttacggattgtttgagaaaccatagcagcttctttgtcgataacgaattccattccttcagcgctaatgagtttcacntgtgtcttctttcttcatctttgttgttgncggggttatttttaaattttcgattatcggcgaatctt

SEQ ID NO: 10448 - DNA, 546 bp, Gossypium hirsutum
  Clone ID: LIB3828-027-Q6-N6-A2
atgggtgtctttccctaatgcaaggaatgtgagataccataagtgcacacaaactaatcgaacaaagcattcacggtatcaggcaactctaattaaccacaaacaagtatatcatccagaggaatcatcttacagaataacaacatgaaaaatgccttaatgaggtcggtaaccccttctatctcatagaaaacataacttgacttaccctaatgaggacccacgggcagtaaattggttcagctcagttttactccattaaaccttcaagactgaagcttggtacagacaaatgacatgaaaatgcctttccagcatcaccggcaggtaagaaatgataatccaaagcatttctgaaccgccatagctgaatatgattttgaccctttattacccacaagttcaactacctaccatcatattcagcaacacagaaaaaagacattgaaagattaactccaagaaatgggaaagattcaacaattaaaaactaacaatttattgttgtagcagaagaaaatagcagaacacgtaacaggcatcaaa

SEQ ID NO: 10449 - DNA, 559 bp, Gossypium hirsutum
  Clone ID: LIB3828-027-Q6-N6-A3
ccttcaaatcttatcattcatcataagctttggaagcaaatgcagagacacaagaaatcaatccatcaaagatacaagggaagaacccacaacaaccatacatattatgttatgtcaatcttgatttgacaacataaacatcacccaagaaacatatacatatcgttattcactcaagcagcttcctcttcttcttcctctccttcctcatactcgtcgtcagcagttgcatcctggtattgctggtactctgcaactaaatcattcatgttgctctcagcttccgtaaactccatctcatccattccctcaccagtgtaccagtgcaagaaagctttcctcctgaacatagctgtaaactgctcactaaccctcctaaacatctcctgaatcgaagttgaatttccgatgaaagtagatgccattttcagacccttaggtgggatgtcacacacgctagacttcacattgttagggatccactcaacaaagtatgacgaattcttattctggacattaatcatttgttcgtcaacctccttagtgctcatcttacccc

SEQ ID NO: 10450 - DNA, 330 bp, Gossypium hirsutum
  unsure (1)..(330): unsure at all n locations; Clone ID: LIB3828-027-Q6-N6-A4
aaagagaaaaaaagcggaggggggtttcatatctcagcagctaaataagcaaaacctgaggcagcgtacatcaagcattaagcttttccagnttaccaacgcagcttattcactttaaacaaaaaccaaaatttatggtggggggggggcttgcacattgctccagcacaattgttctnngtctttgaagcaggggtcaaattcccactcttccgcccaccctttcaaccattttttctttcccccttgttttcccccggggctttctgatattttctttgtttccctccatttttccccacacccatttcatttgatctttgtcatcat

SEQ ID NO: 10451 - DNA, 467 bp, Gossypium hirsutum
  Clone ID: LIB3828-027-Q6-N6-A5
ggcaaaacgaatattggttggggccatttattcttcaaaaaaaccctttttgcccaaggagggttttatagcaaacccttcggcaacaacattacttcttatttgggttaattaaaaagacgacacccaacccttccccggtatttcatcttaaaaggggatcaataaaaaggaagggtgggcgcctatttggggattaaaaactcatagttcagcaaggaacaaaaaacgggaaacaaatcctaattaccccccaatcgaccaggtttcccgcttcggattttgaccacagggttatggtgcccttccaatgctgcaaaaattgcatcattgcgggtaacaattcgaaaagggggcccctctggggtgaatacccacccccccacagggatgacgggagggggggaaaaaaaaaaataaaaaatttcagcgtctctgcaaaaaaaaaacttgcatcttggtggctt

SEQ ID NO: 10452 - DNA, 560 bp, Gossypium hirsutum
  unsure (1)..(560): unsure at all n locations; Clone ID: LIB3828-027-Q6-N6-A6
agaacaaactttgatctaatatagngaaaaatgaggaatgaactgatacaaaaattattgtacatgtatatatgaactgaagattttcagtgtataaaagaatgaaatacaattgagattgaggtacaatgaaaaaaaattcaacaacatattctgtatgcctatatcctaataagatgcttttctaaacagtcaggcctagagaaactgcatcatcttgcagtcacactactgccaagctctttctcctcacttaccatccttccaatctcggtttttgcaacacaaaccaagaatatactagcaaagaatatagcaaaaattagcataagaaatacactattccaacccctagtggatacatacccagccaaaaggggcccaagagctgctcccactgagccagtgccatctatgattgctgtcactgtagctaatgcacgtgagtttcctttaatcaagtcctgggtaccaagatcagcagcaacagctgttgtaattagtgaataaggcccattcactagcaacccagagataaacatcaatcctatattggtaac

SEQ ID NO: 10453 - DNA, 547 bp, Gossypium hirsutum
  unsure (1)..(547): unsure at all n locations; Clone ID: LIB3828-027-Q6-N6-A7
ctgaaccaaggtaattatttttcttaactaagtgagaacaacaataaattaacangacaaggaggggattctactgctttttcatccaatgtagaacttttctatgaaaacttaccgcaaaaataaatgtttctccaatttttcaacaagggatgggcctttatgctacagcttcacatgaccaatgcctcctctaaatgaaccataaagaggttgagatcttctaaagctgaagatatcatcaattcggatggtatttgggttaactgcttagcttttctgcgagtggtattcggccaaatgttggttcccatgcacttgcacgctaagtgttttctttcgagttgcaccgactttcacattttcattgaagaattctatcagttcttgttgcgtaagtttctttaatgctgcaacctcagcttctttccgatcaaacttgagcgtcccgtcagtgatctctcgccagtaaaaccgagattcttcccttaaattcttgtgcttctcaagcttcatatcaatcaatgcatttacattgcttcttaaa

SEQ ID NO: 10454 - DNA, 61 bp, Gossypium hirsutum
  Clone ID: LIB3828-027-Q6-N6-A8
attcaaagccccattttattcaatattttcaatattcatcacatgtttcttcggcacccgg

SEQ ID NO: 10455 - DNA, 447 bp, Gossypium hirsutum
  Clone ID: LIB3828-027-Q6-N6-A9
aaaccttaatcaaatataacttaaacattaacaagggacaataaaaaaaatacatcttcgaaaatatataattgaagtatcaatttacccattaacttttcctaggattttacaggcgagatcgaatgaaaattgttttccttttaggatcttcgagctccatttccttcgagtcttgagggaccatcttcttcttcttcacaggctctgttcctcctacagctttgtttgcaatggcttccatttttgttgattgggtctcctccttcattagtttcacattgcttgcctcatcttttaacttttcctgcaaaaatgtctgatacagtttcttcccaccagtgaaacctttgagggaaacgttaatggcggaatcaaccgcaaatttgcttaagttctttaggaagcttccgatgttcaggccgcgatcggggttcgacacgttgc

SEQ ID NO: 10456 - DNA, 569 bp, Gossypium hirsutum
  Clone ID: LIB3828-027-Q6-N6-B1
tcgcgatctagaaccggacgcgtggggttttgtattctggatctcaaataccgtacatatatattcagagccagaatacaaaacagctgttaatgtgtttataactctcttttttccctgggcaatgatttccagacattactcaagcttgattcgacctgaaaacacttgcctagacggactataaatagaacaatggttctaaaatttcaggaaagtgaaagaaaaaaaaaagttcttcaaccgccttaggcagaaaataatgaatgctgttaggcatgtgaagcaagctagcagtccagaaactaagagtaggagatgactatattttaagccatcacaaggtgtgtttgtagttcatcatataaccacaataattcatataagcttttaatcctttgtgacccatctacggcccctaataagatatccgccagagtttagatagcagctactgtctccactttccgcactggtagtgcttcctgattttttacaatgtttctttccccttgctaccgcactatcactcatgctcccagttaagaaggggatcgtctattccacga

SEQ ID NO: 10457 - DNA, 555 bp, Gossypium hirsutum
  Clone ID: LIB3828-027-Q6-N6-B10
gggaagaaatttgtgaactcagagttaagaaataataagtcagagtacacagacacacttcgtgtatcaaacaaacgaaataatttcctataattaacatctttggaatgccctaagttgcattaagcatctagtagaatacgaagcctagttacatagaaattgaaactttcataaaataaaacgatgcttcaagtaaatatcagaatcgctcccaattcacctcatttatcaactttatcagccttcttatcaagtcttgcggtacctgagcttgatgactcgcccattgaatcaggagaagcagcagcttgggatgaaactctcttaagagaagttgggagccctgatatttccttcatcaaatgcaacctcatgtcacaaggacgaacttggtttcctatgcatgccattgcaaatttcgaatattgaaatagaacatcagcagcagcttgtttcttttcttcagtccagttcgactgacaacaaaacgggattcagaaatcaaaacagggagaagaaaggggatcagaatctcgtcatattaaatggata

SEQ ID NO: 10458 - DNA, 504 bp, Gossypium hirsutum
  Clone ID: LIB3828-027-Q6-N6-B11
atataataattctatttattcattacgtatcttatcgtattaaataaattcttctgaaacaatgagaatcagtgcatttttaatgtgaagcagttgttttagaatcttttaaaaaaaaaaaccagatactaccacaaatgttatcaaatgtaaaaagaaaaaagaaaaagaaatctcaccgtcggccaattctctgccctgctccaactaacaatgccttaccaactacgcccgagcgaagtccgaaagccagcgccacggtcccggctatggctatccacttccaattaaggctgttatcgttcttcctcttaataataaccgtactttgactgttttcatcttcccttgaaacatgaccggaaccgggagaacttatgttctcatcacaagagatctttgttgtaattcttgccatgagtgcacatttagacaatgaagtatcggtttttcttgcactctggtacgccctcatgcctggagtgtaacttttttacagctccc

SEQ ID NO: 10459 - DNA, 535 bp, Gossypium hirsutum
  Clone ID: LIB3828-027-Q6-N6-B12
atccaaatatatctttaacataagatttaaatacagaaatttagaaaacgacaaacaggaaaatgttccatcatcatcaaatacataatctccaacagatacgatacaacataggcacataatagaagtgacgataatttttaaagtaaaagtaacagtacacaccaattttgctttcacagcaatattatatgattaacagcatgaacttagcttatggatacggaaatcatcacgagatagatattttaatcaagcaagggataggtggtgagatcggagcctccgccactgtgaaggctaggatggtttggctgcaggcgtaaagcaaatatacgaggacctccattttgatacccgatcagggtatcataatcccctccattatcaactaatccatatggatcttctttcagggattccagttcatgtaagagatttttgtgtatctcttccacattcctcacctttttcctggaagtatcgatctggttggagagaacacgatactttctatcacgaataagagtgacag

SEQ ID NO: 10460 - DNA, 554 bp, Gossypium hirsutum
  Clone ID: LIB3828-027-Q6-N6-B2
gaaacaaatattaaccattctcatttgccaaaaatattattacagactgtagcttttccttcttataaagacaccaaaataacattaatatgacaaagagatcagcagcatacattcatcgtcacacattaatagagtacatcacattatgtccaaagttcaaaatctcaactcaggcacggaatgactgaaacgcatacctaacttaccatgcatcctgcagattttaatctttagggagaaaagggaactcaaacagataactcagttttggagacgaggataccatcagtgtctgcataaagccactccccatcacagattctagtcccggcaatggttatagggacatgtttctccccaattcccttcttattggccttcattggatgagaatgaagcgctctcaccccaatgtcacaaccgtttatctcatcaacatcccttacgcagccattaaccactattccagcccacccattgttttgagcttgaactacagggttgcctccaagtatggcacaccttaaactaccacccccatctacaaccag

SEQ ID NO: 10461 - DNA, 567 bp, Gossypium hirsutum
  Clone ID: LIB3828-027-Q6-N6-B3
atatagcaaagaaaacatatatattagcatgtacatgcattaattacatatggctacaaaacaagattcaaggaactttaggatattgtaaatcaaatattgttttgagctatttattcttcataattactctttttatccaacaggattttatagcaagcccttctgcaacatcattacttcttattttgtataattaatacgacgacaaccaactcttcctcattatttcatcttaatatggtatcatctccctactttggtggactgggttcactgtccataacctcttctatccctttgctctttacagtttcagcctggcaacatcctgatgcgcacctgggctgaccacactcagcacaagtcccaccgcaaccctgacggcaacactccccactctcacatcccgactgtcctggcattagtgggatttgtgggacttgtgggatctgtgggattagtggaatttgtgggatttgtgggatctgtgggatctgtggaattcttgggatttctggaatttgaggaaatggtagaacgaaaccaccagattacaattaccgg

SEQ ID NO: 10462 - DNA, 546 bp, Gossypium hirsutum
  Clone ID: LIB3828-027-Q6-N6-B4
aaccttaaagtgctcttattataatatagcaaaaccagttacaagggtgatcaaaattcaactttattcgctgaactcacataaagtactttcatgcatatagttcaaaccttgttctttcagaaaagacccaaacttggcctcactcaaagctcaaagataaaccaagaagtttggacaaatgagatatgaaataaggaagggcaggccatccaacagcagtcaccagctttccatcagagacacaccctttagactcttccaattcccctccacccatcttcaccattaccttcattccatccccgcttgcacatctcttcccctttagaacaccagcagcagcaaggagccattgtccttgcccaacaccagcaatgaccctgtttctctcagcgaattccttcactagagtgactgctttgtcgttcattaccagcaactctggggacctcccacccggcacaacaaggcaatcgtaatcataaacacttacatcactccaattggctgtaataaccaagttatggccacgtttctcgctga

SEQ ID NO: 10463 - DNA, 560 bp, Gossypium hirsutum
  unsure (1)..(560): unsure at all n locations; Clone ID: LIB3828-027-Q6-N6-B5
aatgaattcaaagactaaatttaaatttccatgatcacgagnaacatatagaagaatcaagtgggaaatcaattacataaaacgaaaataatctatccattcgttcattattttggactccacattctcagatagtagtatttcaaatcattctccattcagccctaactagtagaacaattagtttcggcagtgaatgcagggaggggaacggcaagtcaattacagcatggatgaagaggaatcgaaactcatagtaaaccaaaaattaagataattgataacaatatcacataatatctagcaaacaaaatggcagttcaatccaatccttgaaaccaatatcataaaaacattatcaaaagaaaacaaagacttaaaatccatcaaagctttcaacaaggcttcttgccttcttcacctacatagatctcttacttctcagatgagttaggtcccctctttttgccaaatccaaccactgctgtgacgaagcgtcggttgtattgcatccgcttgtaagcgcggccacggggcttcttcttcttgtcttgcttggc

SEQ ID NO: 10464 - DNA, 576 bp, Gossypium hirsutum
  Clone ID: LIB3828-027-Q6-N6-B6
aaacaatattattactacattgatccctccaaacaaaataagattttattttatctctttcattttcaaaaaactttatttgaatcatcatcttcattattattcttatgaagctttagagttttgctaatttatgaatgttaaacggattagcttcgagagaagattcggagctataagccctttcggcaaccttctcgttccaagcctcggtaggatggaaaccgtcccaaaataggaatcgccctcgattactgcatggcttcgaatttttgagacaaagctcaccgccgccaccgccaattgtgcaacacgtaccattcgtcacgaatgtcgtcgaatttggagaaggagtaagataagtaaatttagcatagggtagatcattgttaagttgatgtatcaatggcataagcatctcgttgaaaagtgcagcagcgttgtttaatttatcgacacaaaatgatccattggttccgtactccgaaattgcgaatggggcgcaaccaataagtgacagtccatacaccgcaaacttccttgcgccattgttgtacaaagtcttaagttggttcg

SEQ ID NO: 10465 - DNA, 554 bp, Gossypium hirsutum
  Clone ID: LIB3828-027-Q6-N6-B7
gaaaaacacgttttatagggaaacttggtattgatacagctgcatataggtacaaatgtgtaatcagttacaggctatggctacttttacttttaggtgaaggatttaactgcagatgaggtagtgaccaaacttgagagaaggccaacaattagggcactgttatatgtggtcggctcggcttgcattgagttgttccgggaatcgatgtatgtttcattaaggaaaggcccacccacaaggcctccaacagccacattaggattcggttgagttgaatcaagccacttgaagccgtcggtgcaaccagtagtcgcatcagctggaattgaagctcctctatgatgcacatattgtgggtacttatccccataccccaacagaaagctcattttcaaagggtttttgcccaatacataatcagcctgtgatttggcaaactttctaagatccgacggtttgaatgaatggtcaccacaggttatttttgcagtctgtgatgtaagcatgtaatcactgtaaagagcagctaaaaatgcagaggcaacagggtg

SEQ ID NO: 10466 - DNA, 517 bp, Gossypium hirsutum
  Clone ID: LIB3828-027-Q6-N6-B8
gaatattaaggcagttgctctcaaatcaactttataaacctttacataacaagaagccaaaaaaaggaattaatgatccccattccagctttctttcatgatagcaggaaattcttgatgggccaaaaaagtaaaccagaaaactcctgggacgaaatagtagtatttgaatgtaaaagggaatctagtttctaatatgctggttgattctaaaccagtaaacttaaaaccatatctggtttcatgacctatggcaaacacatttgtaggggtaagcactattgattgggtcgtttccttcaactggaacttgctcagctctgcatttgtatttgcatcctctacattcgttaaaagggcaagtaggggctggggatccaatcatcaatctccttgaattcctatccatttttgcttcattgctgccttgggttgcttgcatatgcaattgaggatattgatagaccccttgttggaatggaagtattagttgagttctaaatccttgtgctacaag

SEQ ID NO: 10467 - DNA, 578 bp, Gossypium hirsutum
  Clone ID: LIB3828-027-Q6-N6-B9
aaaattataatacaatttcacattttagaatgtaaaataattacatcgtgagatacataacctacaaataaactgtacaggaattttagcattgtatcaatcaatgattcatatgattgaaatcatgttattcaggcaggaagggaagcctagtaacacttgttcctccgcagctatcagttaggggctttgagccagtttcgtttcgtaaattcgatgtagctttcagggattttgatgatacctttttgttcaatctatgaggaagaatttgcaaccttgggttaagctcagtacctgagttctctgcatccaactgatagcttttgacaagctcaagttgacgggctattatttcggaacgtctcgggagaagctccactggttcaccaccgggaatgacgatatactcgatcgccagacgaacctcctctaaggcatcgatctcttctaatgtaggttttcgttttggtgcatcatcttcaatctcaatatcagaagaatctctgtctagaagccttgaccttgaggcatatgattccctttcgagaatatgcgcactgctttgaccatttgtg

SEQ ID NO: 10468 - DNA, 554 bp, Gossypium hirsutum
  Clone ID: LIB3828-027-Q6-N6-C1
ggagaaaaaattatccattaaagaatcaagtttttcttttaatgcaaaataacaacaaataaatgaaagtactttaagaacggtgatataatagccagaagaaaactatcacctagcgaggaaatttcgtatcatatttgcatttaagcatattttttttctttctacaccatgttcaagtaagagagtgttattacaaaaacaaaacagacaaccaaaaaagaattgcgaatcagcattttgtttagggtgtcccttccgtgtgtagttatacttactatgtgatgaaaagatatattaaaatgtgtcaatcagcttacttacataacaaaaatcttcagttcccatttactgcttctgttgtttccttaacttcctcaaaaagtgtctcaagctcagttgttatctccgagaaggacggtcgcttgtcaggagctgcttcccaacatctctgcatcaaatctaagagttttggatgtgcattctcaggtagttccggacgcaggccctgtctcactcccagtgcagcttgtagtggtgtcatggtatcgtaa

SEQ ID NO: 10469 - DNA, 557 bp, Gossypium hirsutum
  Clone ID: LIB3828-027-Q6-N6-C10
agcaatcgttcaaactatcatgtatatatgaaagtaatgaaaagcatctgttttcaagacattattttagtacatcatgggcaccctcctttttttacctcaaccagatttacatccttcttttcttttcatttcctcatcttgctagaaacttttgaaggtcctgtgaccctcagctggccttgactttgccctaaaaacaaggtaaaaaggatactcctgtttttgtgatgctcttgtttcacaagaatcttacccaacagtctgctgcaacaaaaaataaaatcaaataagaaatcaacaaatcatttcaaaacccaaacctatgtactgcatattggtatagacattacaattgctggaggacactaatgttgttcttgcgactattctccctctagctcatatctatcactaccaccagggcagaaatgttccagttccaccgggtatttaaagggatggccttttctattgttacaagtaattatatattcaataaagttcacaagaagcatgatcttgttctagataagaaacataacaaaaatgccaaa

SEQ ID NO: 10470 - DNA, 515 bp, Gossypium hirsutum
  Clone ID: LIB3828-027-Q6-N6-C11
caataaaaaaagggtaatatttttactctaaatggaaaaagtgtaaatgttctaaaaaggttcttcaatatattcaaaatttcaagcataaaccctagttaagccttcttcacatgaatagacatatcaaaaggtgaaagaatcaaggagttcgtatcgattggtacaaactttgaactgctacaaaaggaaaaactcaaagcagtcaaagaacaaatcttaatagcaaagatagaataaagtaaaactatgtccctttgggtagttgcttttactttctgcacaagtggggaataaacagaatgaaccaccttttttttgggtatgtgtgtactcgtatctgggtaatgaatatgcttcggtttgagccatttacaggatgagtctttcgcaccagttgctgacttgtgaagttgtgatgagtaaagcacagtttaccattcccattctgaaccatcggaaaagagtttcaatgcatcgcggttgccatcaacgtaaaattccacgacagcttt

SEQ ID NO: 10471 - DNA, 559 bp, Gossypium hirsutum
  Clone ID: LIB3828-027-Q6-N6-C12
aacgaaagaagtataatgtaattaataaataaagtataactcaaaatattcttacaataatgttaaatatgacaatgttaaaaatattcttacaacgagaaaactaatgtctaagatggcggcttttgcgactgctgaaacatctgcatcatatgctgaagctgtagctggagctcatcgtactttctactctgctctgcctctctcgctgctgccgctgcctccttctctgctgcctccgctctaagttgttgctggagttcttcatattttttttaaacctcgacaatttgctcaaccatgttcacttgtatctgagctatctgatctcttaacctctgaacttcagcttgagcttgactcccggaaggcatgtattgctgggagccgaatccaaaatattaggtcggggtaacaccagatccttgaaatcgaatccgaccgtacctttcaggacccaaaacttcagtgataattctgttattaatgttctcaagattaatagaactatcagtcgaagcaatcgcttcatactccgccttcttctcctttagtttct

SEQ ID NO: 10472 - DNA, 542 bp, Gossypium hirsutum
  unsure (1)..(542): unsure at all n locations; Clone ID: LIB3828-027-Q6-N6-C2
attatatcctttgaaatttcctatgcggtaaaagcaaacaaaatgggaaaaaaaaaaaagaaaaaaaacactcgcccaaagtcttcttattattattattcaagactgttcacacattctatgccgcggctattcgcaagcaaaatacattttaatcatatatatatatataaagcgtagatccaccggccatgcatgtagcgtgttaaaccttaaaagtaaaagagtccgagtccggcaacaacggtaacagcaccaacgaaactggaggctttgagagaaacggcactagatggtgatggagcgagagcaccgccgtttggtgtaggaggggaactgctagtgccaatggaggaggagggagatgaggcgggagatgttgaaggcgatgaaaaaaaaaaggtcttgggcacatccgccgcataagccccaacaacggcaatgagaacaagggcgacgacgagcataacttggcgagccatctttatttgctgnggttaaattttaaaaataaaagaaatataagntaaatgttttttaat

SEQ ID NO: 10473 - DNA, 565 bp, Gossypium hirsutum
  Clone ID: LIB3828-027-Q6-N6-C3
aaccaaccaaacatcgtaatatctattccattcagcaaaccaaacatgctgttacatttatagttcatttgtaaaaagttcagtcccaaacacttctatgctcatctaaatgcgtacaaaaggagaaaattgaattctaaatgttgaaatatagtgagaaaagaaatttatatatctcaaaatcacaatacatgcctgtgctggaaaacacagtttgcacttggggatatgcatatattctctctttgtcttcaacatggagaatcctgtcctgcattagcagtccaaagtagagccttggagtgggtgtggaaaattacattacttgtccccaccacctccaaacatccccatcatgtctttggtagaacccatttgcttcatcaagttctgcaacccacccatacccccaatttgctttaacatctgcggaggcaggaccttgctcatgtgctgtgcattcatgttccgagacaacgcactcatttcacccttctttggaattttcagccccttcatcttgctccatatctttgctagccgcttgtactcctccatcatttcc

SEQ ID NO: 10474 - DNA, 546 bp, Gossypium hirsutum
  Clone ID: LIB3828-027-Q6-N6-C4
ggatatactagcattaagaagtggatgagaagaggcattgttttaaaccatgcatgacaaaagctataatcttatatttctaaataccaaccgttttgagccatctcctaagttcggtattgagatatccgcttgtaatcagttaaagtgtatcttgcagaaacccaacaaggtaaactgtaagaaccacattcatggaagaaccgagaaataaaaaaaatagaagacagggtgaaagaacaagaagcctcagcaaatagtcggtggttctattatcttttctccagtaacatctgcatgctcctgtgcgtcaatgtcacaatatacgataacatataaattgataactggttattgttagggaattagtcgataatgcaccgagttactctatatggagttgatgccttacttggacgctacatgataacgaaagcacttgcagactctgaagtcctttagctgtgctgcaacacttgcaaacaaagaacaaaacagagaggaaacaacgaaacaaatggagacctcacaaattgaaagatcaac

SEQ ID NO: 10475 - DNA, 498 bp, Gossypium hirsutum
  Clone ID: LIB3828-027-Q6-N6-C5
agccaatactactaattttcattattggaaaccaatggaacaaggctggaatgcaaacataacgagtaatacacacaagcttttcacattttttaaactacacaaaacagcacataatcgccaaacttcgctttttagtataacgaggcattaccacatgacatagtttcaagtagcataccacctttacatttcatgaacagcttcctcggcttcatcctcgtattcaagttcatcctcagctgttgcatcctggtattggtgatattcaaaaacaagggcattcatgttgctctcagcctcagggaattccatttcatccatcccttcaccagtgtaccagtgcaagaaagccttcctcctgaacataacagggaattgctcactcactcgcctgaacatttcctgaatggaggttgagttgcccacaaaggtagatgccataaacaggccccgaggaggaatatcacaaacactggacttgacattgtttggaat

SEQ ID NO: 10476 - DNA, 563 bp, Gossypium hirsutum
  unsure (1)..(563): unsure at all n locations; Clone ID: LIB3828-027-Q6-N6-C6
ataactaatcataataattataataacaatcgagagtaagccatcatcatatctcaaccgtcaaaatagcaacacgctatcatgatataaaatcatcatcaccgtcaaaatataaataaaaataaataaaaacaaaagaaatacactactaaaaataagaaattaacaatgagcctaaaataaaaatcatcaaatccaaatcctgtcctcccccgaaagtcagatctaaatcaacaaagcagcaaaaacgactgcaacggcagatccggcgacggtgaccctgttcaaagcggctgcactcgtaggagaagtgggagagctgcctggtgtatcgctgatggagtttgtgggagaaacagcgctagcgggagagccagcgggagagccagcgggagaaccagcgggagaaccagcgggaggagctgggggagaagtggtgggagaggaagttggtgaagattcaggggctgaagacggnggagtggatgttgacggcggagatgcggttggtgtagtggttggagacatggttggagaaaccttgggagccggagtagggttag

SEQ ID NO: 10477 - DNA, 553 bp, Gossypium hirsutum
  Clone ID: LIB3828-027-Q6-N6-C7
aggattggaattgtttagaaatctaactctaaatctgctgataatcaagtcctttaccattacaccatgagcttagtcgactactcttgattaattaaaaatgattatcactaaaagaacaagaaatgccataggagtagatcaaaggaaaatcaaatatctttggcaataagcctacagtcaagccaatccaagcatcgttaagcacgccaggatatggtctttcgattctgtatccaaaagattgaaataggttactcaaacatgttcaaaatttggctgaatgaatatccgactttatctgctcacaattcgcagtgatttttttcctgtctgacctcacttcttcactaggatgtacatgacaacccttggactacgataatctggatgccactgtgactgatcgatgcgcccaaccacaaagtccttcactgcagcttctagaaagcattcaaggacagtatcatttcgaagttccccagacaaaaacaccgttgtttgtggcctgcatagctgtgtaagggagtccaacaaatccacaactgctcct

SEQ ID NO: 10478 - DNA, 518 bp, Gossypium hirsutum
  Clone ID: LIB3828-027-Q6-N6-C8
acttgaaacaagcaccacatgtaatattagaaagcaaacttcaattcagtaaaaatttacacataaaacttgatctttaagctgaaattatataatcctaaataacaaagtcttactatttatcacaagctcattcaaatggataccacgggtcttttaacctctagccttaagctcggggaggcgccttgacaaatcggcctcatcaaccttttcctgggtcttgggtggcacaacatgagcggggggctgtggcaacccaacagagacctccaacccataatcatcagccacttgctgcatcaagctgttgacctcaccttctggtgtggacaatgaagtagagccagccatagcactctccataaactctgcctggacctccatattcacaaactggttctcgaatttatccattggctctgacattttctgcaaattgccgggggccaaggaagattcgagagacttgacgatatttcccatggacttgttgatgggggtcatcttagcctggg

SEQ ID NO: 10479 - DNA, 206 bp, Gossypium hirsutum
  unsure (1)..(206): unsure at all n locations; Clone ID: LIB3828-027-Q6-N6-C9
tgggggggtgtgggtggngtggttgtgtgtgtgtggttgggtttttngggggggggnnntttttttttttttttttttgttttttttttttgggtttgggggttgggtgggttggtttgtggggggggttggntggtgtnntgtggttgtttggggggttgttgtttgtgtgggttttttgggtttttgggggtggggtggttgtt

SEQ ID NO: 10480 - DNA, 350 bp, Gossypium hirsutum
  Clone ID: LIB3828-027-Q6-N6-D1
gtatgagagttaaagttgtttttttttttgggtaaaaaaaaagggggagaaatttggaggaaaagaaaaaaaaaaagcttttttaaaagggggaaaaaaaaaaaaccccccttggcggggagggggggaaaaaacgggggagacaaaaaaaaaaaaaggggggggataaaacaggggaaaaaaaaataaaaaaaaaaggggacagagggggagagaaggagggttttgggaaacccagaaaaaaaacgagaagggggagcaacccaacccaaagcgaggggggggaaaaaaaaaaaattaatcccgggaacttgttggccccctttggaaaaaaaggggaaaaggggggg

SEQ ID NO: 10481 - DNA, 447 bp, Gossypium hirsutum
  Clone ID: LIB3828-027-Q6-N6-D10
gggggtagggggggggggggggggggggggggggggggggggaagagggggggggggggggggggggggggggggggggggggggggggggggggggggaaagggggggggaagggggggggggagaaaagaaggagggaaagaaaaaaaaaaaaaaaaaaggggaaaaaaaaaagaaagaggggggggggaaaaagagaagggaaaaaaaaaaaaaaaaagggggggggggggggggaaaaaagagaaaaaaaaagggggagaggggaggggaaaaaggggagaaaaagaggggggaggggggggaagaaaggggggaaaaagggggggggggggggaaggggggggaagaaaggggggcagggggggggaaaaagtggccagcccaaggggggagagaaggggagggggaaggggggaagggggggggaaaaaaagaagagtaag

SEQ ID NO: 10482 - DNA, 551 bp, Gossypium hirsutum
  Clone ID: LIB3828-027-Q6-N6-D11
aaatgaagcattaatctaacataaataaaaacagaaaacaacagaagcaaacaagacatgacagttttgttctgtttttagtctgtacatgaaaaacaagggattcaaaaaccagttacctaatttaaacttatgtctttttttttattttctctaaatccaaatttaagctctaataataataagctttgtgtcgcttttgcttattatataattattgtcattcttaagcaacactgatgatgttattgttatctccactgctaaagtttggcatcacctgaaatggagaatgcctggaagttgaagatgatgatgaatccatttgatcggattgcaaagacagcttgagtgacagcgataaaggatccgtcgcaggatttaagtctgtgttgagatcggatctctgaagagctgggaaatttggaaccggacggatgagatttgccgttggaacattgttattcaattgattcccctgtgctattgtgagattttcagtcggattctgaattggaaccggcggaactacctggttaaaggccatggga

SEQ ID NO: 10483 - DNA, 272 bp, Gossypium hirsutum
  Clone ID: LIB3828-027-Q6-N6-D12
aatcgtgttgccttaatatgcagaggtttctacatttataaaagaaagataccggcacatattatcaaaatatacattaacttcgacacctagtgagtcttgggcaggcacgattccaagggttaatagcttcttggagaaggcgacggtaggaaacaagaccggagacccctggatgggggattggcattgctggatcaatttggatcacctgttccatcagcactatgccgattcgaggccaacaaatgaaccatgttttcatgtttgag

SEQ ID NO: 10484 - DNA, 557 bp, Gossypium hirsutum
  Clone ID: LIB3828-027-Q6-N6-D2
atatgcaaatgattattgattattatttgaaaaatatattaaacactaactgtttaatttacactggactttaactggtaaaaccagttaaggtttcagttacaatgcaagcaataggagaaaagtcacagctaaatcaacaatactttttttttgacaatgtatacaaagaaaattcaggctcaaactctaagtagtctacatccatcaacatttttttccaattattttcttctaattaggattctgtccattctggacacctaggccatacaatacacctgcatatttctctgtggagccgacgaaaaagttatctctcaacttcctaaaggtgcatgaggtgagcaaactatcggaaccagcttgatggcacaccgactctttccacttccaacaactcggcgagcttgttcaaaccaccatgaaggctgttgcaaaacttcatcatgtgcttgatgtcgtataccatgggggaaatatatcttgatcaaatcaaaaaacccagcttgactatcaggcaaactcctgcaagtcaaaagcttaagcaagtaccc

SEQ ID NO: 10485 - DNA, 552 bp, Gossypium hirsutum
  Clone ID: LIB3828-027-Q6-N6-D7
aaaaccaaataagcaatcacaagggaattcttataaagtaaaatttgagagaattttaacaagccctaagaaatattttttccccttaaaaaatagctgaattttgattgaacaaaaaatgctttactatgaaatttaaaccctccaagcaaatagaactgaaacacaaaccaagcacatagacaacacactacactatctttttcaaacgccttcaaacagtcacctgtgccaatgtgctttttatttctgtgtgatgtttaaccatctttatgtcatgctttctttacttgggtaacagcagcgacaaacaaaatggtgatgcaccaaaagcccttcttgatcttgttaatcgttgggggttcaaaagggagttaccttgcattctcagtaggtagattcatgagatggactatcggcatgcatgtccattgaggagtcattagagctaagaggatttgaatccctagtctggtttgggagaaagctaggttcattgttcctggctccgtttcctgaaggaaggccgccattaggacagtagccttcttg

SEQ ID NO: 10486 - DNA, 86 bp, Gossypium hirsutum
  Clone ID: LIB3828-027-Q6-N6-D8
tttttttgacgtaacagttaaaatagattttagaggccaacaaactaaatataatttgtagggcctaattttcgcccgggcccaac

SEQ ID NO: 10487 - DNA, 585 bp, Gossypium hirsutum
  Clone ID: LIB3828-027-Q6-N6-D9
aaaaattccaaatccaaaaaagaaaaaatgaagagtgaaaaaccaagttcagtcacaactataaccccataacagtgacagtatttttcaagttccaaaacagtactgaatcaataaaaaagaacccagctatcatccttctaaccaagccaactcatttttagcacattataggccaacactactaccaactcatgaaacaaggttatcatttaaagacaatgaagccagctgatcagcagctccaccagcttgctgctgttgctgtgctacagtcctcagaacttccattgcttctgcaactttggcttttagagcttctggtgactcgagcaagtgtaaaacctccgtctggtccatctccagaagcatccctgttactttggctgctgcatcgggttccagctgctcgacaagtggatagagattctcccccagcatcgttctttgctgttctggagtagcatttgcaagagctgaggccaaagctccaattggaattggttgagaaagtggtgcatcacgcattggcatgctgcccatatcatatggaacagaaagcatgcctcctggaacattaggcat

SEQ ID NO: 10488 - DNA, 541 bp, Gossypium hirsutum
  Clone ID: LIB3828-027-Q6-N6-E1
gaaaacacattaggtggctgtattaaccctacttacattcacagcttgaagaaaagggggttgaaacatcttatatgtacataggaagggggggggggttgcaaaagcaaggccggtggagccatgcatgaaattcagattcgggtatacatatttatatgtatatataaaaataaaaatgaaaaacaccatacgctattgatgccacaacattatccaaaatcggatcagaccattcgtgcttatatctggattctgatttgtgaggcaaacttgatgctaatagcatcgcaaaccagtttttaacttgagtagttcatgttctttccaacaggacagaaattttactatgccactcctcatgtctccatcaaaaacctatagagttaccctgaacaattctttgcactagatgctgatggacagttcacttcttttgcaactgtaccttctgtgggaactggaatgtcctcaaactttgaacccaacgaccctggcttcatcttctggacctcttccctagtgtagataccaatcttgc

SEQ ID NO: 10489 - DNA, 381 bp, Gossypium hirsutum
  unsure (1)..(381): unsure at all n locations; Clone ID: LIB3828-027-Q6-N6-E10
cggagaatatcttgtttcgaattagcaagaaattacagcaggttggagatgccattggcaatggatgaatattttagggtccatataaccattcctgtaagactaagagatgtatagtttgttcattctttttgaaatattatagttttttgccaaaaaaaaaaaaaaaaaaaaaaaaaaaaaaaaaaaaaaaaaaaaaaaaaaaaaaaaaaaaaaaaaaaaaaaaaaaaaaaaaaaaaaaaaaaaaaaaaaaaaaaaaaaaaaaaaaaaaaaaaaaaaaaaaaaaaaaaaaaaaaaaaaaaaaaaaaaaaaaaaaaaaaaaaaaaaaaaaaaaggggggggngggcgccctttttttttttttttggggggtgnaggggg

SEQ ID NO: 10490 - DNA, 284 bp, Gossypium hirsutum
  Clone ID: LIB3828-027-Q6-N6-E11
gaacagaaacaatgcccatgagttgttattattataagatctgaaagcttgttgcaaagacaaaggatcagagtgatttattgctgagaagtaaatgagattatgataatggccatggagggtcggtagggcaagtacaaaggtgaaagaggcaagtgcaggtggggcatttggcgcagacacttccacagtcttcacttctatggcatctaaacgaaatgataggtccccttgcctccgccaccatctctgtatgagttgtaaacattaagattactgcaaat

SEQ ID NO: 10491 - DNA, 558 bp, Gossypium hirsutum
  Clone ID: LIB3828-027-Q6-N6-E12
atgaaacagcatatcgaatcttctctatttcgatttctgagagttgctcggaggatatgatggtttgaaaatacgaaagacaggggagtatacagttaagagtgggtacagaatcctatctacagctcatttacaagaccatacatatatttcctctatgaataatgattacaaagatttctataaagccttatgggcactaaacattccaaaaaaaaataaaaatccattgctggagactgattaacgatctgctgccccattttggtaatctggcacgacggaagttgagtgtggatgttgcttgccctctgtgtaagacagatctggaggatacagctcatttggtatggtcttgtgatactcaatagcgtgtttgggcttcattacaagtaaaggttcctccactagaagcttcgttgtgctgtaagaggcgttttgttagaatgtttctgcaacagatgagcaaacagagatgaatcattactttgtcagtttggggactttggcatcgcagaaataagctaatccacaaaggggtcaaattttttatgcaag

SEQ ID NO: 10492 - DNA, 546 bp, Gossypium hirsutum
  Clone ID: LIB3828-027-Q6-N6-E3
aaaatgaaaaagaacggtttttatgtaatatgaataaatatattaattacaattgcactgaatctgttggtatggtttaagcggtggcacttagggtttttgggacagggctggaacatggagtcgggtttaatttgccactagttttaggcttgacattcaaacattgggatgttgcgggttcaggtccggtgtgcttaatatcaatgtctgcaagttccacattttgacatggcgaagaaccgctgcaaataaacttgacagcttctggaagcgcagatgtgccacggatgttcttgaagctaatgttgcttagtttaactttcgattcttcatttatcttgcatttactccatgggcaatatttttgatcaattaggataggggaagagacattattcacgataatatcctcaaaatgtacatctgatactatcccaggagattcgcctggccaagttttgattcgagctccattcgaagtattagtgatggtgcagtttgtgactttaactccctcaactggctcttcatttgggtactttc

SEQ ID NO: 10493 - DNA, 270 bp, Gossypium hirsutum
  unsure (1)..(270): unsure at all n locations; Clone ID: LIB3828-027-Q6-N6-E7
tcgcggcgaatttcatcggatatatatattatttttattcatttactacanccgaaaccaaaggcaaattaaattgtgaaaagaaaaataatatatatatccgatgaaattcgcaaagggataatgcaatgtaaggggtatctttttttaaaaaaaaattaattttttttttcttttttcttttttcttttttctcagttttaaatttcctatctagtgtgccacacgataaatgatacgcaccgcagggacgttgaaaccgaggacgac

SEQ ID NO: 10494 - DNA, 514 bp, Gossypium hirsutum
  Clone ID: LIB3828-027-Q6-N6-E8
ggcgaaacacacttatatagttcaagttcaagatgcatatgtacagcattgacgtacaatgaagacagacacacatgatcatctttaccatatcccaacttggcaatgggcctcgctaacaacattacaatgaacattgcttgttctttataacaatgccacgactcccaactattttacaaaataactggtaccaaaaactgagttcaagtcgcaggtttcccttccctcttcagtaattcctgtttggtagcggcaattgagactgtctttcctttttctcacgttggcactctccacaccagcttgagaaatctttctgatatttcctcagctcacggaagaccgaacttctgcaccacaaaagtaagttgacccgatgaccagatgttgtggctcttgcaccatgcctatggcgcccgcgatgaaaaactgcccgtcctggaacatgagaataatccaaaatttcatctgactgggtttctgtattgacatgtttatcacaccgaacacc

SEQ ID NO: 10495 - DNA, 555 bp, Gossypium hirsutum
  Clone ID: LIB3828-027-Q6-N6-E9
gtcaaaacaagctctggtttcgacgcatattaaaggaagaaacatttctaatcttcctacagacaccatgtaggctgtatttcgcaattctgcagttacataatgatcggcaatgaaccatatatacagttgtcaaacgaactcaattattacaacaaagttcgacctgtgccccttaaacatcaagttacatagcactcaccacagcagaaggatcttgttaatcatctttcagcagtgacagtggagttatccccattagatgaagatacaacatctggagttacagttacagcctctgactcgttagcttcagcatcactctgctcagcagtctttacagttggatccgggattgctactgtagaaacctttgaaaggtctctcaaaacacccttatttgcccacttgagtccacatgcattgcaaagagtccttggaccagcaggtccacgacgcatcataggagttttcttagagctgattccacagtgtgtacataaaacttcttgaatattctcatcttgcccagaacctggtgttccactccatcct

SEQ ID NO: 10496 - DNA, 468 bp, Gossypium hirsutum
  Clone ID: LIB3828-027-Q6-N6-F1
gggaaaggggggtcccccgggaaattttcaggtgggggcccctataaactattacaggggggggctttggaccccaagggggtttttttacatcccgaaactttaaacttttacggggaactttgggcattacaaattccctcgaaaataaaaaggactttttggggggtttcagggaactatttcccattttttttcaatctaaaaaaaaagggggttttggggaaaactaaatggcccaaatgggagtttgaaaaaaaaagcaccccccatattttgcaacaatgccctgcaacaaatgggggctgggataaatttaaactttcgggggtcccgaactacaataatgggggtttttggggaggggtcactggaatttttgggcaaagaaaccaggagcaattgccaatattttgggggggactatgggatattttccaaactttccaacccgtgggcggacccctg

SEQ ID NO: 10497 - DNA, 453 bp, Gossypium hirsutum
  Clone ID: LIB3828-027-Q6-N6-F10
accaaaatcttagggatccttggattattcaaaacattattccaataccatgcgttggcctactaccaaaaaaaaaaagaaaacattggattgatgctggtttaagaaaaaattcagcctaatttctaccccaatctcttccggccttcatgggattaataataattagcttacaacaacccctgttccacatattctttggttctcaaacagggaattgttgttgaagggtataaatgtcaagtcctttgagcttcactacggattcaacgtgtcctttgggtgggagaaggtccctcaaccttgcaacttccgcacgcttcctggcttgctcacaaatctcccacagttttatatagctgctcttttccggaattccaggaggggtcaacccatgaagggggcgttgaaccaatgcccattgagcttccctctttccttttgcgtaaaact

SEQ ID NO: 10498 - DNA, 555 bp, Gossypium hirsutum
  Clone ID: LIB3828-027-Q6-N6-F11
gtcgattaaaatttttattaatacattagtttgtatctacagtatttacaagaattacaagagatggaaagaaaacaccatgccaaatactcagctttaaattcatggaaggcgttggaaagcgggttcctcaaaatcaatttcgatgctgcttttgataaggggaaaaatatatcttgttcaggggtaatagtcaagaactttaaaggtgatgtattcgtttcaaaatcggtcatccatgacaatatttcttcaggatttgcagcagaagccttagcatgtttgcaggtagttatggtgggaaaagaactagagataaaatatgttattttcgaaggcgactctctgacggttataaaaaaagtgaacacaaaaaaaaaagataaatcggtaatcggcccttatattgatgatattcaagagcataatgcgaatttttatggatgcaaattccagcatgcaaaaagagcagcacataacctggcatctgaagggctgaaaacgagggtgaatgcatactctgttcatgagtctgttactcaagttctcaccgat

SEQ ID NO: 10499 - DNA, 455 bp, Gossypium hirsutum
  Clone ID: LIB3828-027-Q6-N6-F12
ggcttcggattatttcttacttcaataacatgaaccataaacaatagttcgatttatttacaagttttcattaaacacagtttacattcacttgcaatataatcatgtacaagaatggagttcagcattgtatttcacttttttcacttatcgatggcaaatatgttcattttgtatttgaggtattgatcaactgtgagcggtttagggccgccaaaccagttaatcataaaaatgtcttcaatttccaatttgaaaacctggaaatcgtgacctttaggccaccccttcatttccggatgctttgtgaacagcgcagttcgagcgaactctgcttcttcggagtttgcttcaagtaggaccaaccttcccgtgagtgtgatttttgcacacacagggctttctgggtcagcattgctgcaggttccaagcggatactcactgattgcgagtga

SEQ ID NO: 10500 - DNA, 545 bp, Gossypium hirsutum
  Clone ID: LIB3828-027-Q6-N6-F2
gatcaatgctaaaatcatctctcttttttcatgactttattaataaaaaaattgaataaattatgaatatacagtaagatactcataatgactcaattcttattacacgagaacaagtcagaacaaatatgtcacacggcttcgcttccaagttcatccttaagctcataataacccatgtctgtaagaacttttttacaacctggaagagcttctttctttttaaacccaagattgttggcaaagcgaattgggccggtaacaccatccaatgcggtgagttccaccctggctttcctccacgcttctgtgggatcattacaatccgctcggggactcttcatcaagttgacatcacagtctgagtcttcataatctcctgtcacttcaattttgtagcttcccgcagcatcagttgttatttctgggctttgaaaagtaattttttcactggttcgattcctacattccaattttactgttgcaccagaaataggttcgcttatgctagtctgaaattcaacaccgacagtatcacaataaac

SEQ ID NO: 10501 - DNA, 557 bp, Gossypium hirsutum
  unsure (1)..(557): unsure at all n locations; Clone ID: LIB3828-027-Q6-N6-F3
caatatcgaagagataaatacaatttattctaattgttgaataaaataatacaaaattcattcaactctacacatcatcagtaatggtaagattattataccacaagagtacctttgaaaaactcaacaccaaggttttttgcaacaaaattgaggtctctcaaaactgtgaacttgttcatcttgttgagccaacaagcttttagtgtaagaactaagctactccaggcaagccaaaagtatcttttaaagtgtatcagaatccagcggaaataaaagaaataattcaagcaatcattctgctcgaaatatttgtgcagaggtctatctagcaactccaccagctgaaaaaagtagtacagttcaaaatcagagaccaaatctctgttcatgatattgatttacttggtttagccatttataaattctttgtcagaaaaaatagtgtcatgataccatttaatcttctttatgctgtttatgggcaagggnagaagtgggttagctggttataaactactttatgttgtttccttcccaggaatacanatgacatc

SEQ ID NO: 10502 - DNA, 495 bp, Gossypium hirsutum
  Clone ID: LIB3828-027-Q6-N6-F7
aattcttcatatgatcttcaaaacaatagtgggtgcaacaaacatgtaaatagagtacttcatatatttttatatatataggaaataaaataattatatatagtgtattcgacgattaaatgcttccggtgaaatatttatggcaaaatttgtacccacatcgatcgaaggcaaggcaccccattgtagttcacgaagagcatgtaataaccaggttgcgcaatgttgccattcatgggagcttgaaaaacaatgttgtttgtatttggggctacatctttattaaattccaaaattcccaattgaatcaatctctgattcatgcagatcccgtgggtcacaaacggcggcgagtagatcgtcacttgaagcttttgttggtcgattacaccatttccacggatttgcactgtgaatttttggccatactttaattggttatcggacttttcggtgatgatctcttgtcggaacatggccaagttagggtccaag

SEQ ID NO: 10503 - DNA, 394 bp, Gossypium hirsutum
  Clone ID: LIB3828-027-Q6-N6-F9
gggactgaatttgcacgcttggaaaaatattattctaaaaataaaattttatattaaacttttgttatggcccaattcaacccgggacccatgaacagaaatcagaataaacaagtccactttgtttaccaattcaaacattatatgggcccaaccataaacaaaacccaaacccaatacaaaattgaaacccaaactaacccaaaccccaagcccaatcccatagcccaaaagctcaaacaattttcagccaaaccctaagtagactgcccttgggccgtaaccaaaaaagcgcctccttgcacgtggggcgttttctccgagtcgggggccattccacctccacgtcagagtctacacccaccacgcacctaatatacctcgtggttcgggg

SEQ ID NO: 10504 - DNA, 525 bp, Gossypium hirsutum
  Clone ID: LIB3828-027-Q6-N6-G10
atagaagcagtaagttaattaccatgttatacgaagttattaaatattacatgtttactttgttttacttttttccctaattaataatgattcgataagctccggtaatgccccgtaccctgttccgatgaggtaggggtgttacaaaaaagacagtggcaaagaccgtaaaaatgatagtgcccaaaagagaatcactcacgtgaccggcggcattattcgatgtgttgttctctaacaaaccagttggcgcatcggccggggatccgactggggtgccagttggtggagctcgtggtgaagctgttagtggtgacgctgctttagacattggagatgggcttggagataaatatggtgtaggtgaaggcgaagaaactggttctagggctggtgctgacgacggtgacttgtcgaacaactcagaagagagcaaaacattgtcaacggtgaaaatggcgaccgacgatgagtcaaaaactacttcggcgaccctagatgggccaacccctgtgtgtagtgtca

SEQ ID NO: 10505 - DNA, 335 bp, Gossypium hirsutum
  Clone ID: LIB3828-027-Q6-N6-G11
aaaaacaaaaaaaaaatttccggtaaaacgttttcattcccccaaaaaaacatccgaacaagaggggggtataattcccccttttttaacctctcccaggggagaaaaaatcccgggtttttttcatctcacctacctaggctctaatccttctaacccttgggtttgcttgggtgggttcagcaatcaaaagggcattcccggttttttaaagttcatcaggagaatcatcatctttttaaggggacccccccccgggggccccaccaaatttttgcccacgcgtccgcccacgcgtccgcccacgcgtccgcccacccgtccggggaacccgg

SEQ ID NO: 10506 - DNA, 540 bp, Gossypium hirsutum
  Clone ID: LIB3828-027-Q6-N6-G12
atagccaaacttcacaatattgatttcaacataacacagaattaagggagtcatataatgtaatattagtacaaaagacaccatagtctacgaataacagaaaatattacagatgccaaaattcgaatcccatatttgcagagggtggcagcatgagctagttccggatttctgttgtaaacacaggtttctgtatttctcagaaaactagtataaacaagtgcatttggttctgaaactttgtcaactaattaactaaacgagtctttagatggcatgaagaatgtagcagttgcagtataaaataaaatttgctgaggccttgtttggtagggaaggtagagaaggaacatgacagaaattacttttagtccaacggttaaccgttagattgaaagatcttttccgatgttccacttttccatctttcgtaccaaacaaacaaagggttactagcccctactgtccttccttctcttgtcattgccatatactgaatgttattgttaatggaaggcgacacgaaggtgttggggttcg

SEQ ID NO: 10507 - DNA, 532 bp, Gossypium hirsutum
  unsure (1)..(532): unsure at all n locations; Clone ID: LIB3828-027-Q6-N6-G2
aaattaaaggcaggtacattgtttgcaaatgttacagaaccgatgttgagaacggaatgagaggaacaaanagagatggaccatcttctagcctacacatctcctacaccatcaaccgccataaaacttgcggatcactaaaatgggatgcaggtaacttgagttagtccaaatcaaggaactccattcttttcctcattgtacctttaagatctgttgcttccctttctgctttctgagcctgcataagttacaatgctatttattaatgaaaatatccaactacaaaatacttaacatataaatctatttagtaaactttttttttttggccagaaaacagaataattaattgtgttcagacatttagtttaattgatacgtaaaatgtactagaaatctgtatatgtatgtatgcatgtatgtataatgggcatccggtgaaacattattactcatatcattaggaaccatgccaatccctcccaagaaactgggttcagagatgaagcctggtacaatgaatttcttt

SEQ ID NO: 10508 - DNA, 564 bp, Gossypium hirsutum
  Clone ID: LIB3828-027-Q6-N6-G3
gtcgaaaatagatgctaaattattgaataaagttcaatatatgatgagtacgagtacatacatatatgtatatataagttaaaatcatatcgagagtatgctatgcttgcatgattaagactggatatgatcttgggatttaaaaatccttattcggtaagagggaagcccatttctttaagaacttgagcacatccagggacagctaccttcttcttgaagccaagattgttagcctttctgctaggctcagctaagccatcatcgctagttaactccacttgtgccttttcaaatgcttccatcttctcgttacaatctgcccttggactgctcactgtgctcactgcgcaaatctgttcctcgtggtcgccttccaccgggatcttgtacacaccgtttgcgtctgtttccgcttcgtggctgtacgtaacagtttcgtccccttctttcctgcactccaacttcaccttggcacctggtatgggttcgctgagtttggtttcgaactctacgcggcaagtgtcgcaataaactttgccgagtacgacgaacttgttgccg

SEQ ID NO: 10509 - DNA, 435 bp, Gossypium hirsutum
  Clone ID: LIB3828-027-Q6-N6-G7
aaaaaagaagatacaaatcaatgaattagatgaaggggggccccccatcaaagagaaccccaaaatcccctataataggcccatttcgccggggcccatgccaaaacccgaatgaaaaaaaacaaaatacccaaataaaacccaataataaggggccaggccatttacaaattactcttatggcccaacagacccaataaacttaattccctagcctatttacaagaaaactatcacagcccaaaaatttaacccaattgaaacccgacctagggggcccaaattccggtttcaaggactgaaaccctaggaccaaaattgcagcccccttagcgagggtctccaacgccactgagtcccgagcctcgacacgtcaccacaaacgggttttccacaccatgcatacttgcaaacccacgcgtccgcccacccgtc

SEQ ID NO: 10510 - DNA, 526 bp, Gossypium hirsutum
  Clone ID: LIB3828-027-Q6-N6-G8
aaaaacaatgcttattattattgtctcgcttagcaaaaatactaagttgtttctttgaattttttttttaagaaaaggagaaaacctgaagaccaatccgctaaaaaatcaaagattggaggatgatggtgaatatctgcaaactctagcttcactgtaaacaagccctggtttgcaaaaataccctttacttggactgcaatgtctatcttctgaacatatgcaaagcccttctaaagcacatccatcacttctaacacctttcccaaataatatctcatccgaccattcactcgacaacatattttctgggtctaattgcttcttcactgcaataaacatattaaagtttaggtacttactttgaactttcaaaaacgccaagttcctgtttttagcccaatgtgggcgagccccatacttgaaaaacgccatttgctccacttcttccattacatcttggtttaacctcggggtggaagcttcatcagctcgataatagttgaaatcaacaactatggagtcc

SEQ ID NO: 10511 - DNA, 432 bp, Gossypium hirsutum
  Clone ID: LIB3828-027-Q6-N6-G9
aaaaaaagcccccttttttttaattccaaatttttaaaaattcaaggggggggtttcaaccctttaagggaaccccaaaggggaaaaaccaaaaaaacaggggggccccccacccagggtccaaaaaacgggaggggggggggaagcacccctaaaaccccccccgggggctcaaaaaaaacggggaaggggcttgggcccaaacccccttttgaagggggaagaattgggaaccccggggccaaaaagggccttaatggggggggaaaaaaaaaagggggggggggaaccctttttaattccctgggggaaaaaggggtttttaaacccccccgaaaaaaaaaaaaaccccccgggaaaaggggaacccccccgcccccgggggcccccccgaaaattccgacccggccccgggggggaaccaatttttcc

SEQ ID NO: 10512 - DNA, 526 bp, Gossypium hirsutum
  Clone ID: LIB3828-027-Q6-N6-H1
actaggagaaaaagtattgaatgtatttaccaccgaaaataatattacattacagttacatacaacttctccgaaaataagataaaaaaaaaaaagaacacgataaacatcaataagccagataaaatcacaaccgtccaattcatcatgatcaacggttcagaccaccactttcgtcaagcctacgaatcagatacaaagcattacttgtaaccatagccacatttgtgatcttcttcttcacatcacctttcaccttccgatcaaccccttcgaacccatcaatacacgtgtcctcatacgtcagcgccgcactcacccacgtccgtgcattactcatctggaactcgaacgtttcgcctctcaaatgcttcaactcactcaacgttttgcttaactcatccaccgactcagccatttgttccacgcagtcgcttagagccgctcgttccctttcgcttttccccgtgaggctggtttttaagtaggtcgaagctttgagggcgcgggcgaggccgactttaac

SEQ ID NO: 10513 - DNA, 498 bp, Gossypium hirsutum
  Clone ID: LIB3828-027-Q6-N6-H10
ccgacccaacacagtttttaataattaagggaaagccacagcaccaaccatagagtcccagcggggtatataaaaataaaaaaaaatatgcggggggggaaaaacaccccgcataaaaaaggattttttggagacatcgagacacattaaaggggaggggctggggcttcccgacccaacacagcatggaaaaataaaggaaagccacagcaacaaccatagagtcccagcgggggataaaaaaaaaaaaaaaaatatccttcgggcaaaaaacaccccgcataaaaaaggattttttggaaacatcgaaacacattaaaggggaggggcgggggctcttgcactctgaacggaacccaaacttttctaccaaaatgcacccgaaccgcttgcttaaaacacttcttaaaaaagcccaaacatccaacgatctaacattcctggaaaagcaaaaggcccccccaaaacagcacaaagcgagggaaaaaaaggaaaaag

SEQ ID NO: 10514 - DNA, 484 bp, Gossypium hirsutum
  Clone ID: LIB3828-027-Q6-N6-H11
aacaaaaaaaacatatatattagcatgcacatgcattaattacatatggctacaaaacaagattcaaggaactttaggatattgcaaatcgaatattgttttgagctatttattcttcataattactctttttgtccaagaggattttatagcaaacccttctgcaacatcattacttcttattttgtataattaataagacgacaaccaactcttcctcgttatttcatcttaatatgggatcatctctctactttggtggactgggttcactgtccataacctcttctatccctttgctctttacagtttcagcctggcaacatcctgatgcgcacctgggctgaccacactcagcacaagtcccaccacaaccctgacggcaacactctccactctcacatcccgactgtcctggcattagtgggatttttgggacttgtgggatctgtgggacttgtgggatctgtgggattagtggaat

SEQ ID NO: 10515 - DNA, 552 bp, Gossypium hirsutum
  Clone ID: LIB3828-027-Q6-N6-H12
aatacataaagattgattcaatatgtaattttatacataaaaaaaccacacaaagtattactatttctaaaacaaaattcatcctcgtgagaaaagaatgccaaatcatcatcacctctcattaatcaaaggaaaaagatcaaaaagaagaagaaacaatatacaacagagggttggttcaagcttagatgaagccagagtattgcaatgcttgcatataacttagagaagtccttcgatgctttcaattcaaccgccagagaatccaaaatactggaatagaaagccaaagtatgcacctgtaagcatactcatggagatggggctgtaaagtgtacgaccagacaatggctcatttaggaagaatgcaacataaaatatgccacataccgttactcgaattttttctgcttcatccattacttcttgaaagttcaaaccagtccagtcctgaacattgctttcttccattaatatttcctttgccttgtcgcataatgctctgacctaaacaagataacatgaaaacagagttacaaccaattataaccc

SEQ ID NO: 10516 - DNA, 541 bp, Gossypium hirsutum
  Clone ID: LIB3828-027-Q6-N6-H2
gaaaagaaatcgattttttattaatcaaaccattaaaaactacaacttgatcaccgaatcaatcatatgtggataaacacaaatatcaaatcttcaatatatgaatgggatcacagcttttctgtctttgggataatcgtccttaaacttctccaaataccaaagccgggtggcacgagctctaggcatcaggttggcacaagtgtagagaaagaagccaaaacccacccaagaccatgtcattaacgcccacccaaaccactccataatctccccaaaatagttggggcaactcaccaactcaaacagccctcctcttgggatcttatatccaccatcaccttgtttcttcagtcccaccaacactttatcagcccaaacattcacccacataccaactacaaaaattaacaatccaccaagaaacctccaccaaaacagctcctcattttcatagtcgtccttatagtgcgacacccacctggcttgcaaataaccgttcaaaagattaaacccaaacgccataaaagctacactcacc

SEQ ID NO: 10517 - DNA, 524 bp, Gossypium hirsutum
  Clone ID: LIB3828-027-Q6-N6-H3
gattcgatatgaaaataaatatatgtatttatttatttaaatatgtacaattgaatcaaaataaaaattttatgaatacatataaaccataattcaaatttacatatttaattacaccaaataaaattacacattaaattaaaataattcacgtttaaacttacatatttatccctttctaaattctctaatgttttagatcatgaatgacgacaacacctgtcctgcatgccagctaggaaaaacgtgatcctgatgtaagaaagctctaaccatgaaatgacaaaaacaccctcatatcctagttcaccatgcatgtccaaaagtggtatttcaaattttacggaaatttatttatttaatatttcaaagaattaaatgaattatagcgtatagattctataactggcaaggggcaacacaatccataaaaacataaacccttatatttaaccgcacaaaatatttctttagtttttcggttcttccctgttccgagtctgttctctcttgccgcctcctaa

SEQ ID NO: 10518 - DNA, 543 bp, Gossypium hirsutum
  Clone ID: LIB3828-027-Q6-N6-H7
gcaaatataaagtatagatatgtatttgacaccaacgcattttttaaatcgtttattgggagccaaagaaaaggcacgaaacaatgaaaaacattcacaattacaaattaaaaacatcacgaattgtttacactcgtaaattttcttcttcatcatcatctaattcaaaccagaatttgatctcacagtgtactctgctacaagctgtgcaaatgatgaagacttgttttccagcaaacttgatggactatcatattcttctattactccatgacttagaagcagaaccatgtcgctatccagaaccgaagttatccggtgagcgatcgtcatgaccgtacaatcggagaagtgctcccttaacgtcatctgtattaggttgtcagtggctgtatccaccgatgcggtcgcttcgtcaagcactaagatcttacttttcttcaatagtacacgcccaaggcacaccaactgcctttgccccatgctccaattctctccattctcactaactaaggaattgagtcggccggccttgtttcgaac

SEQ ID NO: 10519 - DNA, 389 bp, Gossypium hirsutum
  Clone ID: LIB3828-027-Q6-N6-H8
gggggaagaaaaccctttgcaaaaaagggggggggggggcccccccccccaaaggggggggggcccaaaaggccctttattggaaaaaccgggggaaaggcgcttaaaaaaaaattgaggggctccaaaaccgccgcccggggaaaattttccaaccgggaaaagggggggggcaaacataccttttgggggaggcaggggataaaaggttagggggaaaggacccggggccccttttccgcccaagaaaggggggaagccggccctattttggggggcgagaagggggtaaaaaagaaggggtaaaaaaaaaggcccaaattttttttgggggggcaaaaaaaaaaagccgaaaaatgggggctccggccccagagaaaaaaaagaaa

SEQ ID NO: 10520 - DNA, 480 bp, Gossypium hirsutum
  Clone ID: LIB3828-027-Q6-N6-H9
caaagggaaaagaaaaaataaaactaacccccctttgggaaaaaaaagaggggggggggcggccccttttttttggactttaaagggggaaaaatttttttttttccaaaaaaaaaaaaaaaaaaaaaaaaaaaaggggggggccctcgggggggcccggggggccaccccggaaatcccggcccggccccgggggggcacccatttttcctaaaggggggggtaaaaaaagggggggaaaaaaagggaaaaaggggttcccgggggaaaattgtttcccctcaaaaatcccaaaaaaaaaaagggcgggaaaaaaaaagggaaaagcgggggggcccaaagggggggcccaccccaaataaaggggggggccccaacggccccttttaaaaaggaaaaaccgggggggccaggttaaaaaaaaaaccccccacccccgggggggggggggttttgttttggggccccgggggggttttt

SEQ ID NO: 10521 - DNA, 469 bp, Gossypium hirsutum
  Clone ID: LIB3828-028-Q6-N6-A10
aaaatagcaatacttattttaacggaacacaacaaaaaaatcaaactcaggtataacgcccctggaaggggctgatacctttgctgaaagagccaatagaaatagaggttctaaaaaaattaacaaaatgtttgatgacaatttgcaaaattaagcccggaatggtggctttaaaccaaacttttccatggggacctgcgggattgctaacgtttattcacccctttcccacggggcgtcttccgtttcccaaggggcttgttttatttgggattaaggcacttcagatgtaagcccccttggggggcggctttactagcccaaaaaatagggaaaatagggatcaccctattatttttaggttaactatcccaaaaagctggggaaatagggaacccccctttatttttaggttgactagccgaaaagacatgggggagataggtcaaaccccgatgttttaaggttt

SEQ ID NO: 10522 - DNA, 504 bp, Gossypium hirsutum
  Clone ID: LIB3828-028-Q6-N6-A11
gagacaataacaaagttaccaccataatttcatatgggacaatatacaagcattaatttgggggaccaggactataaactttccaaggcccatccttttccttttttctttctctaagctacaataattgaaaccatagtctttatacacatttccccacgatcacttttcactcaaatcatctaaggctggtcactcctggaatattttgatgcttacattgatgggcttaaaaaaatatgacctctccatgatccttgggagggactcattgaggggcaattgactaaggggggagtcttgaaatttacatactcatctttggagcaagtaactttggacagttggatcgatgccagctgttttgttgggggggggtctaatggcattaggcttcctaaaacccgggtcacttcatgcatgggtggtcgatcaaacggttgtcttttcgtgcataaaagggctagctgaaaaacttttttaactgctccaaaaaccttgcat

SEQ ID NO: 10523 - DNA, 544 bp, Gossypium hirsutum
  Clone ID: LIB3828-028-Q6-N6-A12
atagtcaaattacaaagataaaagatgggtttcatgcacaattaaccatgaaaatggcttgaagcattcatgaatcatgagacccttaccaggaagtaaagcaccaaaattaagcattcagcaaaagacagcttactataaatggctaaagcatccgttaagagaccacactcctttgagtctgaaaaccaacacaaaacaagggttcttttacttttattcacaaacttcctagttcacatacagagtttgctcctaggccattgcatctccactcaatgtattattcccgctcaccaggactgaaatttcacccttgcagaccgataataccgcaagctactctaccaccagcatttccggtgcttttgctaagctcatgcccccccttgccaaggtcatccggatcagcatggacaacgacagctcttccaataatggagtgtggcccagagagagaatctgtttgtcgacaatagagaaactcgcagagccatcagcaccaacagtgacatttcctagatcaccagcatggcgattcaca

SEQ ID NO: 10524 - DNA, 546 bp, Gossypium hirsutum
  Clone ID: LIB3828-028-Q6-N6-A2
gcaaagtaacttattattgccataaatttaatataagttgatacatgaactgaataggcgttaagcttcccgcccacaccatcaaaggcttctagtctttaacaataaacacacaaattcataggattctaaaaaaggaaaaaagaagaagataaaactgcaagccaagtggagcacgaccaattacttaaaaggcatgtttgtttaactttaagcagcaacactatggagcacaacagtctcaacagtgaggccaggtccaaacccaaagagcactccccactccaatccttctcctgtggtctgaagcccatcttcccttgatttcttcctcatctcatccaaaataaatagaacacaagcacttgacatgttaccatactctgaaagaacgtgccttgtggctcgtagcttctctggcttcagtgctaatttggcttctacttgatctaatattgctggaccaccaggatgagcaatccaaaaaaggagttccaatcggatatgcccaatggttgaaatgcttctaccaggctcttttctata

SEQ ID NO: 10525 - DNA, 551 bp, Gossypium hirsutum
  Clone ID: LIB3828-028-Q6-N6-A3
aaaaacaaaacaaacaaacatttacatggtactatttattgtgtaacctaatctgtcataatgtaaatgattatgccttacataaaaatacaaatgttttattttcattacgagagtataaacatattttattttagcaaccgaaatcattgatattggcataatgacttagttggtcttctaatattataaaaaatttattttaactttccttttaatttttaaatttgtgttttttattaaatcacctcaaaatgaatgaaaaattgacatttcttaacattgcatgaattgccatgtgaatgacacatcaacatttaattaattttttaattttaaaaaattttaaaaattattttaaaaatcataaaaattattaaaaacctgtaaaattataatacttttaaattattaaaatttaattaaatgttgacatgccactcacatggctattaatgtgtatgccacgccagcaaagttaacaaatattaaattttccattccattttagggtaatgtggcaaaaaaatacaagctcttaaggttaaaaa

SEQ ID NO: 10526 - DNA, 545 bp, Gossypium hirsutum
  Clone ID: LIB3828-028-Q6-N6-A5
gagaaaatacttccatcattcagaatttcgactcttttaactactcacgtgacattgattcatcatgaacatgcatggtagtttcatttaattaataactagcattaatatcacatcccaaatcgtcttatttgaaatagactagttaggtttccgcatttaagtagatctgttcatcagctgttgccattgtcttctgaatcctctcaatgaacccaagcatcacctcagtacttttctcatcaagttctggaattgtatggcctttgggatgattaatcacaaaaggatccacaaaatattccagcagagaaattgattcttgtttcatgaagtccgtttctcctatgatatggagagaagggcattcaagaggtgaagaatatgcattggaagtgagcttatgatgtacgaactttggccctccaaacttggctcctgatattattatcagaaacttgattcttggaaccctggtaagggctaatccatctctctgcattccaggcaatgcagcagataaaagtgctccctgggagaagccc

SEQ ID NO: 10527 - DNA, 551 bp, Gossypium hirsutum
  Clone ID: LIB3828-028-Q6-N6-A6
ctggaaagcatgtcaaaagctatcaaaatgtttaacactgctatacattgctattttctccaaaattctttcttctcttttcaagcaataaataccgcaatcatttagaaacaaagtatccactgttctcaacaaaaaacttgcctgcaatgaacccgcttttctcgtgcaagaaaaaggccaatatgacaacctaatttactcggggttggggggggggtaactttacattatgtccaatctcagtctcctgctaatgttctcttgttgcccaattacagcattcctttctcttctacactggtactgcatccttccattcctttgcaatttttccttggccactttcatgatctggctcattctctttcaatccctcagaaagagctattttttctcgaggcttttcaccaggatggacttcagctgacagcgtgagcttattgaatagttctactggtgcttcatccggaagcttcattgtggctgttgtttggttcatattctggaggacaccgttttcacctttactagaaattgccttcttatta

SEQ ID NO: 10528 - DNA, 428 bp, Gossypium hirsutum
  Clone ID: LIB3828-028-Q6-N6-A7
gagaaacaaatttcaattcgtttacatcataacaaaaacaacccttatcatcgtatctctcgaaacaacatacattgcataatttactttccgttctataataatatagcttaaaacatatcatcaaataatgtacccatccatacattactctttgctcttaaaattcaattggcacaagtggcacaagtggcgcaggtacaaccggcaccacatttgcagtacatctttccggtgccactgcccccggcggcttcagcctggctgcatgtgcatggattgcatccgcaatgctccccgcacgagcaccgcttgtggtccgcctcgccggctccgcaactgcaagtcgtgccgccggggcacggcgaaggacagccacacttatcgttacacgtagcgaatcctctaacttcaactttggaatccgc

SEQ ID NO: 10529 - DNA, 543 bp, Gossypium hirsutum
  unsure (1)..(543): unsure at all n locations; Clone ID: LIB3828-028-Q6-N6-A8
aaaattataaaaatataaaatttaatttcgattccaaaatttgtttctccacttcgctcctggtttggatgaaaagaaaatgcaaatgtaatagtaagagaatacagtctcttgatcgatgattttagtatgatatattgctcacattatctatggccaccgccagaaaagaagtgttcaaatgtgaatagagttaaaagcatcgcatttccgcctgacttctccttgattcccagtcttaaccccattaaggctaagcttctcaattgctcgagcgaaatcattgaaaaaagcagtctggtttttagcatacaattgcacgaaaggcctggttttggggttctggaacagcgcattgtcagattccaacagccccattcccttctccaagttctggtaataaagattgtcaaacttggatggagtcattacatcattgaaagctgacattgcaggattcttctcatagttgtgacagagtttctttagagcctcggcatacttgggattataagcagnatcggtggnggacagttttgctat

SEQ ID NO: 10530 - DNA, 420 bp, Gossypium hirsutum
  Clone ID: LIB3828-028-Q6-N6-A9
ggggggggaaaaaaaaaaaaaaaagggggggtgggggggggggaaaaaaaggaaaaaaaaaaaggccccccaatgggggggggggggaaaaggggggggcttaaggggttgggggggggggggggaaaggggggggggggtaaaatggccccggggggggggggggaaaaaaaaaaaggggggagggggggggcgggggggggccccccggaaatttggggggggccccggggggggccaaaatttttttaaaaagggggggaaaaaaaaaggggggaaaaaaggggaaaattttgttcgggggaaaaaagggtttccccaaaaaagcaaaaaaaaaaaaggggggggaaaaaaaaaggaaaaacggggggggccaaaagggggggccaaccaaaaaaaaagggggggggcccaacgccc

SEQ ID NO: 10531 - DNA, 384 bp, Gossypium hirsutum
  Clone ID: LIB3828-028-Q6-N6-B1
gggccccccccccaaaacaaggttttggcaaaaaaagggcttttttttaggcaaaaaaaacaaaccttgaaaaaacccaccccccctttttttttttaaaaaaacaacccttttccaggggcaaaaccaaaaaaaattggcttaaaagcccgaaaaaaaaagggggaaaactggggtttgagggaaaaaaacaaaacccctctatttttttaaattttaaggccaaacaaaaaaaaagggggagccccccttttggggcaaaaaaaaaactgtgaaaccggggcataattttgggggttttgggggggccaaattttttaaaaaaagggtaaaaaaatttttcccccccaaaaaagggggcaaaaaccccaggagccctgtttt

SEQ ID NO: 10532 - DNA, 499 bp, Gossypium hirsutum
  unsure (1)..(499): unsure at all n locations; Clone ID: LIB3828-028-Q6-N6-B10
gggcaataataaacacttgccgcaatacatatatatanaaaaaataaaacgagtcttaaaagcataacagcataatcatacagctttaaagagcatttatatatatatccgcctcttttgtttacctataaaaaaggtttttgccgaaatgacatcagtctttgatgaataattcatcttctctggacttaaaagactataagcacacctcgtgtagtaggtcggtgtttaaccggtgttttgcatgccggcagcaatacccttcatggtcaaaatgagggtgtcctccaaaccaggggcatactcgcttgttgggttcagtttgacaagttcatcagcaggtttgcttgattccatgatctctctagagaatgtggccgcaacttcacgctgtaatttgggtcacggatacgtttgagtgtgtaggcctggcagacatttagagtggtgatgtatgaatcacgtagccggagtctttgcttcaagtaggggatcccct

SEQ ID NO: 10533 - DNA, 500 bp, Gossypium hirsutum
  Clone ID: LIB3828-028-Q6-N6-B11
aactaaatcaaaacatagaacatcattaaatacttgaaaatccctttcatctatgctcactatagagcagaagcactagcaaagcacagttcaagcaaaaattatatattcgaggggaaagcaggggcaaaaggggataacatggccaatggcactctcaacagccggggaaaaaaactgggtcctctaaatcttggtgaatgcaacaatgtcacagctttgaatgtattcattgcgtggctctgtcgggaggcactcctctataagggtatcaactgaaacaagatcatccactatggtaagcatgatctgtagcttcttgatgccataaccaacagcaaccagctttgatgctccccacaaaagtccaggcatctcaacggatcgaacagcttcttccaacttcttcatatcagtctcatcatcccatggtttaacatccatgagaacagaggactttccactttctttcttcttagctgacttctttgcagcttccc

SEQ ID NO: 10534 - DNA, 516 bp, Gossypium hirsutum
  Clone ID: LIB3828-028-Q6-N6-B12
aatgtggtatgatgcttatattataataaagacatgctattaaactttgtcttaaaaaaaaaaaaaaaaaaaaaaaaaaaaaaaaaaaaaaaaaaaaaaaaaaaaaaaaaaaaaaaaaaaaaaaaaaaaaaaaaaaaaaaaaaaaaaaaaaaaaaaaaaaaaaaaaaaaaaaaaaaaaaaaaaaaaaaaaaaaaaaaaaaaaaaaaaaaaaaaaaaaaaaaaaaaaaaaaaaaaccaggcgggttgtgggcctattaacatggtgcttttaggacaaagcgcaaaaaaaaacgacttgtttttttaaaaaacttgatcttccagggccccaggagaaaaagataaaaaagaaaaagggtttcggattagcaaaccttcgttgtaaatggtttcagctttaacaaaaactaaacacccctctttttttttttttccctctttttcggtgaatttttgaacaaaaaaataaaaaatgggggcgaatactggaaacaaatccccctcaaaagggtaagg

SEQ ID NO: 10535 - DNA, 504 bp, Gossypium hirsutum
  Clone ID: LIB3828-028-Q6-N6-B2
aaacagaagttaagatccctttcattacttttcaataagtcatacttatgaatggtgatagaaaaaaaaagtaatggaatgtagcttaacccgtaaaaagaaaacacctaattcaaatccctatgtaagaatcatcttattcagcttcagcttcagcttcagcccctggtgttggatcatcttctgtcttggcttctgatgaggttttcttcatggcagttgccttggtaacatgtgcatagctacctttctctttgaacaattgtgcaaagtgaatcttacaatagaggataccatctaatgcagcaaatgaagatgttgtaagcacacaaccaccatgtgaacacctaaagcagtttttatggtagatttctccttccattgtcaccttctctaatgggtatgcagttttcttgcaaactccacatttgtcttgtgtgccggagaagaaggatgcatatttgccagcctttttctctgttgtcccattggatgccatttttc

SEQ ID NO: 10536 - DNA, 568 bp, Gossypium hirsutum
  Clone ID: LIB3828-028-Q6-N6-B3
gaaacaaatattaaccattctcatttgccaaaaatttattacagactgtagcttttccttctcataaagacaccaaaataacattactctaatatgacaaagagatcagcagcatacattcatcgtcacacattaatagagtacatcacattatgtccaaagttcaaaatctcaactcaggcacggaatgactgaaacgcatacgtaacttaccatgcatcctgcagatttcagtctttaggtagaaaagggaactcaaacagataactcagttttggagacgaggataccatcagtgtccgcataaagccactccccatcacagattctagtcccggcaatggttaaagggacatgtttctccccaattcccttcttattggccttcattggatgagaatgaagcgctctcaccccaatgtcacaaccgtttatctcatcaacatcccttacgcagccattaaccactattccagcccacccattgttttgagcttgaactacagggttgcctccaagtatggcacaccttaaactaccacccccatctacaaccagaactctgccg

SEQ ID NO: 10537 - DNA, 73 bp, Gossypium hirsutum
  Clone ID: LIB3828-028-Q6-N6-B4
gggggggccccccttttcccccccccccccccccctttttggggggggggttgtttttttttttttttttttt

SEQ ID NO: 10538 - DNA, 540 bp, Gossypium hirsutum
  Clone ID: LIB3828-028-Q6-N6-B5
agatattaatcatgttttaataataaatttatattttaatctaatacaaatcatgtagcttcaattactcgaattgaatccatgcatttatgtcaacataaatacctctctcgagtatttaacccacccccacaaaagtcatcatattttcccaccaaatgattccgctttcacattgacccaggaataccctattaataataatttcccaggccttcaaaaatggacctctatagcagcgatggccaaattgatgcgaatcgtcttgtgaatcgacttaacgatatccctcaccggcgactcgatgttagccgcttccaactcgtcctcgcagggagacacagacgcggaatcggcggagagttcttcgatgatgtggttggcgttgtgctcggtgatggcttccatggctttctgatccgagtcgatgatgtcctcgaagttcttgacgcaagtccagaggatctcgccgtattcgggggtggtggatggatctttcatgataatattagctttgtccaaggcttctttcaccttctg

SEQ ID NO: 10539 - DNA, 436 bp, Gossypium hirsutum
  Clone ID: LIB3828-028-Q6-N6-B6
acttcgggacgggtagggtatattctcatatccaagttcaggaaaaaaaaaatccgggtaacataaactaagaatgcccattctcatctgcaaccatccctttgaattagcaaatcattattgggctaacatgagtttgcagcaatcaactcaagggctactgagttctattaatcgagtcaaggactcttaaatggaactctaaagaaaactcttacatcaatgagtttcatcacaagggttttctcctctctttatatcaaggggggtaaccccattgatagccaagcttgaaaagaaggagttaacggaacaagatattgatctaatgcttgatgtccccacggattcggataccgaaaaaaaagtgaggatgaaaatgatagggatgaaaacaagggggaattgcaatttgaaaaaaaaaaccacccctccc

SEQ ID NO: 10540 - DNA, 538 bp, Gossypium hirsutum
  Clone ID: LIB3828-028-Q6-N6-B7
aaagagctccattcattaacaataacaaaccaaaactccgagaaagtagtaaacaaagaaatagaattacaaagagtaacaacaaaggccagttcctctttggctttttcagaaacttggccgaattccagaccacttacatgggatgggatctttttcaagtaaaacaaccagaatcaaaactaaattttccgctagagaggttactaacccaacctaatagtaaaaaccaaaaagatatataagaggagacagtacactagggtttgaatgatacacgggaacaaaggtagaaaacacaacgccaaaaagaaaaaggtgcttttccctcttgctcttaaggacaattggggtttttaccagggcccccataataaaagtaatggccccaatccccgttgctccctgtttgtacatcatagcagtttgattgttctgtaaaggtgccaagccctttgggagccttgagattattggagtcatcaacaacctgtatgttcctgaaataactagatttgccaaaaccttcttcggggaa

SEQ ID NO: 10541 - DNA, 446 bp, Gossypium hirsutum
  Clone ID: LIB3828-028-Q6-N6-B8
ggaaagaaaattttggattacgaatttaatggaaagggataaataagggggcaacaaattgagttgtgtaaaaagggggcggggaaatcaaacaaataaacatttttaaaaatcaaaagggtttagagccaggggaatgaatccactgcagttggatctccacttccccacactccacatttttcaatctaaggaagagggcttggatgaacttcccttcattattcacgtatatgggactttcatccaccaggcagttgtcggggtccggtttcaaccttgataaaactggtccacttgggatttcttccaaattcgtatacgttttcaaagcttttatgaatgacctcacctcgaactctgaatctcccattttggcatccttgctgaacgggtcatgggcgtacacagtcagactgactggaatccatccccggacccctggg

SEQ ID NO: 10542 - DNA, 430 bp, Gossypium hirsutum
  unsure (1)..(430): unsure at all n locations; Clone ID: LIB3828-028-Q6-N6-B9
aatagaatataaatattttnattgaacgaacaaaagataggggggagcttcatttagttcatgcaaatctttatgtacattgtcaaatcttaaatccacacaaattttgaagtagacgattcaataatacaacatggcctctcttcatgttttgcaacatgacctgcggtactcccatcaacaaaatcacttctctactacatgccttaaagtgccatctcagcctgcaatgcagcaagttcatcttcctcagcagtgcgcttttgaggaataggacgagctggttgcctaccagcaggcacctgcactggagctgcaggagcagttgttgcaggctggagaagttgttcttccaactcagcaccttcaagttcttcaagttctgcctccaattcatcctcgtcaaaatcagctgcagctccaataggag

SEQ ID NO: 10543 - DNA, 496 bp, Gossypium hirsutum
  Clone ID: LIB3828-028-Q6-N6-C1
gggggctaaatgcatactactattttaaaaatatatattacaaggcctaataattttaggagtaggggagacatctgggctacaacatacattttacacaaacaaacatttcatttttccccttgagggctgcaacacatattgggcgacgtaaaggttaagggcccttggcaacgtttccatgggggggcatgccagtatagcaggtcccgcaaacctccctgttccctgaagtccccgggggcacccacttgcacctcaagcagcaagtcccacaccccctgttgcatctgtttggcctcgagggttgactgcatcttttcttgcataatcctccacaatcaatctttagcatcagtcttttgtttccgcctttggtaaccaaagaacccacctcaccgacattggttataactttttctgccttcaaatcaaatgaaacctttgcaaggcaaagtagcaggacacctaacccaaaaagcatacggactgccat

SEQ ID NO: 10544 - DNA, 559 bp, Gossypium hirsutum
  Clone ID: LIB3828-028-Q6-N6-C10
cattatcacaagtctatccataatagctaaactatagccataaatcatcccacaacattcactgcttaaacctatcccataacatcagttccgaccccccataataccatcgctgaaagcaaatactaaattaaagagacaacaaagagaatgcaaagattcctctcacataaaatctaccaaactcccccatgctcactaatcagcctctgcataggcagtttcaaggtgggcttgctccgcttcttggacctctttttcggtcttccttcctttcttggatttgtagtacacactcatgaatgttcccacagctccgtacttcctacgcacatgctcatacaggtcagcatcgaacatcctccagaaatccttctcgttcagctccgacactgcatactgtggctgaaaactatggtttttgatcagccattgctccattttacgaactgcctcagcaccatcaaatacttcacccctcaatacagggcctggagcataatacaccccaacatcggtgaacatctgagcgtatggtgtgtcgccttgtctgtgctgc

SEQ ID NO: 10545 - DNA, 553 bp, Gossypium hirsutum
  unsure (1)..(553): unsure at all n locations; Clone ID: LIB3828-028-Q6-N6-C11
cagcacaataataaaggataattctaataaaatatagcatattacactcagtgcatataaaattctactctngaaaattacagcaactactgcttgaatcagcataaaagctaatgaaatatatgcattcttctctcaccataccagaaaggtaagagggttcaagcagtatcggcctgaaagctctctagtgcccatacttttggaactcccactcactgttatccaatgggcaaacttgacgagtcttgagccatcggctgatacaatggaagtgaaatgcatggttgcagaccccccaagcaacagtgcattcctcactggtggcgctagcttggttagcttggcactcgatacagagatccataatgtgattcctacaaattgcacaattatccacgacaatatcccaggcccagagggcaacggcactccacttcttgatctcgaagcgcttgggcttcttagtagaggaagacgcggcggagctaccggaagcttcaccggcgggcaccatcggcacatcggaatctagagtagccatggctgcaaa

SEQ ID NO: 10546 - DNA, 553 bp, Gossypium hirsutum
  Clone ID: LIB3828-028-Q6-N6-C12
gccttgaagaaccacatgcaaaagcttgagaagcacttcttcattatcgccaccatcaattccgttattaacttcaatagaaaccctctttaaaacttccccagctccaacgttttcaaggcggagttccgccagtaaagaagccactttttcttcttcgtcctccgtccacggcgcggcttccaagtactccaagcaagaaagaaccccagcatcaaagccaattgccgctgaaaccttcaaaattccaagaaccttagaaacgtcctctctcattaacatcttcctcaaatccttacaatacatcaacctcaaaacctcaatgtaaacctctacgtcatcacaatctgctatttccacactgtacggcccagtaggtccattcgtctcttgtgatcggtccgataacttcactgcaaaaaacctactgtgagccaccagtatttgcctgtgaacgttcattaacacactaatcccatccttggaactaagcgtcagcttcatatcactcgaattcgggtcgttgaactggttcccagggctacgagtcgat

SEQ ID NO: 10547 - DNA, 513 bp, Gossypium hirsutum
  Clone ID: LIB3828-028-Q6-N6-C2
tttttttttttttttttttttttttttttttttttttttttttttttttttttttttttttttttttttttttttttttttttttttttttttttttttttttttttaatttttttttttttttttttaataaaattttaaaaaaaaagagggggggtttttttttttttttttttttttaaattattaaaaaaaaaaaaaaaaaaaaaaaggtaaaaaaaaataaataaagaaaaataaaaaaaaaaaaaaaaaaaaaggggggggggccctttttttttttttttaatttttaggcccgagagggttttaaaaaagaccctaaaaaaaaaaaagggggtttttttgggaaaaaaaaaaaaaaaaacggggaggggcctctttttattaaaaaaaacttttggaacaaaaaggaatttttaaggaaccgggttgaaaaaaaaaaaagttttttttgggttaaaaaaaaaagaaaaaaaaaccgggaaaccggggagggcaaacagggggggg

SEQ ID NO: 10548 - DNA, 482 bp, Gossypium hirsutum
  Clone ID: LIB3828-028-Q6-N6-C3
gcgaacaaatgttaatgtaactttattatttttaaaagtaaattactgcaagacatattttacaaaaataataaatgttgattttattatttttgcattgtttttattatttttaatggctttagccacctctttaaaaaaaatgggtatgatgttgctttctagatctcatcggggtctactatgccattttacgcttcctcccgccagtagattcagtagcaacttctacttcagattctggagaaactgcaatctcatcagctaagccagaagttggcccatcggcatattcagtagcaacttctacatccgattctggagtagctgcaatctcatcagctaagccagaagttggcccatccacactttgggaattatctccagcagagcttttaaagttttcaacaagttgagctacccctgaactcaaaagtgcatcttcggcttcaggggatgctgcctcatctcccacgcgtccg

SEQ ID NO: 10549 - DNA, 544 bp, Gossypium hirsutum
  Clone ID: LIB3828-028-Q6-N6-C4
gcaaatcgaatattgttttgagctatttattcttcataattactctttttgtccaagaggattttatagcaaacccttctgcaacatcattacttcttattttgtataattaataagacgacaaccaactcttcctcgttatttcatcttaatatggaatcatctctctactttggtggactgggttcactgtccataacctcttctatccctttgctctttacagtttcagcctggcaacatcctgatgcgcacctgggctgaccacactcagcacaagtcccaccacaaccctgacggcaacactctccactctcacatcccgactgtcctggcattagtgggatttttgggacttgtgggatctgtgggacttgtgggatctgtgggattagtggaatttgtgggatttgtgggatctgtgggatttgtgggatttctggaattcttgggatttctggaatttgaggaaatggtagaacgaaaccaccaggattacaattaccggaacatccagaagaacaacatttatcaggaccacctt

SEQ ID NO: 10550 - DNA, 491 bp, Gossypium hirsutum
  Clone ID: LIB3828-028-Q6-N6-C5
aagaaaattcttcccatataaaagaataaattcctaattttccccctttgcgtttcattttcctccatttttcacccagtcaaaaaaattttcaatcatttatacagctcccctctggatttttagtaagggggataaggtcctggatatggacctggagggtaatagggtggaggagggtaagcgcccgctggaggagggtatccgccatatgggtctggtccaagaggatacctggctggaggatacaagggttgttgaggataaccaccaggatacgggggagctggataacccgccggacctggtggtggataaggagctggaactggtggtccgccgtatggaggtcgttgatgaggtggcggtgcatatgctggtggtgccgacggttgactatatcctcctgagacttggtgtttggcgttgggataatgcagtatcagctgtacttctcctgcatacctgccagttttggtttgaatggccca

SEQ ID NO: 10551 - DNA, 566 bp, Gossypium hirsutum
  Clone ID: LIB3828-028-Q6-N6-C6
atgcaaactaattatgcaaatcgcttaagaacatcaaggaagttgacaagtaacaatctcatagtttatcaagaaatgaatgaaaaatacaaaaaaagaaaaaggtataccctttttcttaaagggatggggagggtcatttatgatacacgcagccttcaccatgcattatttgcaccaaaaactgtttctgcaactcgaacatgtaaaccaaccattgctacaaggaaacattttttctttttgatattaacccaccttctaagtggagaaagacaattatctatgttccaacggtttgactaattacaagaaaatttaggcctaaaccatccaagaagctacagattgatccttgccaaacaaaatggaccatggaccatgaaccatgaacaacttatttgcagctttgcaagcaatgaaatcagctcagtgaagctatgatcagccccagttcccacaagtttttatcggtttctctattgcaaatgacgacacctcattttctcatcctcaagcttattttttaacgtttcaacccgctcgagtaaagcagcattttcctg

SEQ ID NO: 10552 - DNA, 560 bp, Gossypium hirsutum
  unsure (1)..(560): unsure at all n locations; Clone ID: LIB3828-028-Q6-N6-C7
gacctgcaatgtacatatatagattattatttaatacaccgngnaaaatcaatgtatcaaacaattatcctatatatatatcaataaaaaatgcatagatagagttgcaatttgacgagaacccaagtggaggggctgatataacacccttttttttagtatgtaacaagtgaacagtttctctaacattggcccccttccaataagataaatggaaggaagaaacaacctacagacaataagcatagtgaagttttcgatataaattacaaactacactttaagtcaaagatcttctaccatctaaaaacatagtttcagatcacggccgtcgtttcgggggcttaattgaagaattgctagtggttgcagcagttattttcttagaacttgatgggatcttggaggtgctccgggacagtgacaatcgagcagtaggttttgtttgcaacactttctgagatagctttggaagcttagacgggagtgatggggcgatagacttcccaatattatcagatttttcagatttgcttgctttctcaaccttctctggttta

SEQ ID NO: 10553 - DNA, 413 bp, Gossypium hirsutum
  Clone ID: LIB3828-028-Q6-N6-C8
aatataaattctgctggggtgaacagagtaaaaatttctaatcattgaagaaaaggcacaaatacgaaactgtctaattagatcatttgctctagatgatctcaaaaaagtctttactactgttataaaaaaggcctagccattgctctcaaagattaaaatcaaaatgaaacatgagtggatcccagcactgggaggcaaaaccaatcctcgaaatcgtcgctgaaaactcgagctccatgccagtgtactagactagtgaaattcagtgagctaagttcacataaatgttgataggatattcttcttgagagtgaattcatctgcttttgctgggcttatagacttgtcaagaatgcgctgcagccgctcgatttccttcttgggataatcagcacctttctccaaacagc

SEQ ID NO: 10554 - DNA, 557 bp, Gossypium hirsutum
  Clone ID: LIB3828-028-Q6-N6-C9
gagtccaacagctattgcataaatggcaaaacacaaaatccaataatcaagttcaacccctagtaaataactttgacaaaattaggttaagattaccgctaagaaatacaactaaccgcgaacaccccgattgagactaaccatgcgagctgaagcatccatctgggaacctctcattcctgaaccggctctcccagagtaaccgcctgttcctcgtgattgacctgaccgatcccttgaagcctgtcctaatgccaatggtctgccaccgccagtatacgcggcacgtccagaactaccttgcctaccctgattgtaggacaagtctggccacctaccgccgccgccgccagctgtcccaggagcatattcctggttatctcgccgccttagtggcagatccaatccaccaccaccaaatctagcctcgactgccctctcattactctcagcaagtattgaaagcttttctgtcaactggaatgccaaggcctgaaaccttgagtactcaacatcatggaagatgatgcatcgtgttggctggtcccagcttgcat

SEQ ID NO: 10555 - DNA, 326 bp, Gossypium hirsutum
  Clone ID: LIB3828-028-Q6-N6-D1
cggcccaaaaaaaaggggtttctttttttctcctggagaaagagggggcggggggtctttagggggggctaacccctggggcttttttgggccccaagggggataaacccctggggggcttgggggggggcccccggggcccaagggggggggggtcacccccccccccaaatgggggttttctaggggccccgggctcccttaaattccccggccgcggggggcgccccgggaattccggcccgggcccggggggggacccaattttccctttgggggggcgaattaaggcgggggggaaccaggggcaaagcggcccccggggg

SEQ ID NO: 10556 - DNA, 512 bp, Gossypium hirsutum
  Clone ID: LIB3828-028-Q6-N6-D10
agtggcaagacattttttttttactgcaatgtctaatcaaacattgttcaacatccctaaccttacattgcatccacaaaccattcttttattaaatccaatacaaaaatagggcaccaaacctacataattgctcattcaatccctgaaatttcttaaaatcctagtgattaaatggtaagaccttcaggagcagcagctgcaggagcctttggcttggctttctcaacgacaatagcttgagtcgtaagcaccattcccgcaaccgaagccgcgttctgcaacgcacatcttgtcacctttgccgggtcaataactccagcttccagcatgttctcatacgtgtctgtcattgcattgtaaccgatctcccaatcgctgttctttactttctccaccactacctcaccttccattcctgcattttgagctatcaacgaggccggtgctaccaaagccttctgcacaatgtcggctcctatgcgctcttcagagtcttcaagcttatcctt

SEQ ID NO: 10557 - DNA, 407 bp, Gossypium hirsutum
  Clone ID: LIB3828-028-Q6-N6-D11
aattaaaaaagtattgtatatatgaatttttgttaaaatatttttatgaattttttaaaaaaaaaaaaaggagggggaaaaggggaaaaaattaaaaaaaaaaaaaaaaaaattaaaaacgggattataaaggggggaaagggggggaataaggttttaagagcaagaaaaaaaataaatggttaagaaaaaaaaaaaaaagaggccaaaagaaaaaaaaaagagggggaagggaaaacggaaaaaaagaagcagagcaaaagattaacgagccaaagagaaaaaatacctgctcaaaacaagaaaagaaaaataaccaccatgcaaagacaaaagaaaggagggggccccaaacaggagaaagggaaaaaaaaggaaaagccccccaagaccgggaaccaaaaagg

SEQ ID NO: 10558 - DNA, 506 bp, Gossypium hirsutum
  unsure (1)..(506): unsure at all n locations; Clone ID: LIB3828-028-Q6-N6-D12
tgttgaacaacaatttttttctttctttttcttacaaanagaattgacagaaaaacaaaagaatcaaaaaaaaaagaaaaaaaaatggaaaaccttacatacactgaacagtatcacaaatttcaagtgttgcctatgttcaaaatggagactatttatgctgtcattgtaacaccattctaacttatgctgggtgtaattagggccagaatctagagggtagaagatgatgaaaatcactctcagattgagttccgtgtctccgccggcatcagcgtatttgtatcagcccctaatctgtcctttacagaacctgctcaccaataaggtctagaccaaccagaaggaaggatatcccttgaaacagcaagaaatagaaatggataccctgtgcagacagtaagctcctagctgaagctgttaggaggaggaacgccagagagagctccttcgngtatattctattatgcttctttttacgagccttttgttcctgttcttgctgg

SEQ ID NO: 10559 - DNA, 483 bp, Gossypium hirsutum
  Clone ID: LIB3828-028-Q6-N6-D2
aaattaggggaaaaacattggcctcaaaaaaaaaaaaaaaagggggccccccctttttttttttttttaaaaaaacaaaaaaaggggcgaagcccccaaaccctggtaaaaaaaaatgcccaaaaccaaaattaaaaaatcccccccgctgaaaaaaccccccccgaggggaaaaatttgattaaaggcaacaaaaacatattcctaaaaaaaccccgggatatccccggggggttaaaaaaaaacccgaaaaggaaccaaaggggtcaaaccggatcccgaaaaaaaaggggtaaacccccctttgcaaaaacggggaaattccttaaaaagctaaaaccggtttttcccccccaaaaaaaattttgtataaaaaaaaacccccatgtaacccgaaaaaaaaaacgggacccccggggaaaaggtttttgtttctaaaaaccaaccacgggccccaacccaaaaaaccttatattcataaaa

SEQ ID NO: 10560 - DNA, 458 bp, Gossypium hirsutum
  Clone ID: LIB3828-028-Q6-N6-D3
aaatcaaatgtctatattttagagaaccatcaaaccagtttctgcattttaagtttctaccagtacatccaagcataaaggagttacagctcattccttcattcgctttgcatggaaaagaaaatcaaacgaaaaaaaaaaaaccccgattcaaacgagttcagtgcagaggaatgcataagtccagcttagttgttgttctcagggttattctcaagttccctcctcagttgtaaagagaaatcgtcagtaacatcatcatcatcccagtcatcttcccattgctggggaatctcctttccttcttccttatcctcccactcttcatcaatctcaaattcttcaaactcatcatcatcttcaaacaaatcaatcttcacgtcttcggttgccgattttggttgttccgttgccattttttctaggagttgtaattgcacagagactctgaatatttc

SEQ ID NO: 10561 - DNA, 434 bp, Gossypium hirsutum
  Clone ID: LIB3828-028-Q6-N6-D7
gggggggggaaaaaaaccaacttttttttaaaaaaaattgaaagaatggggccccccacaaaaaaaaattttttttttttgggggctttatgggtttaccccccaaggaaaaaaaaatttggggaaagaaaaaagcttatgggaaaaaccatttaaaagcttttcctggggacaattggggggcccgattaaatggcctttgcctgggaaaaccaaatttttgggaaggggctaagggaaaccaaaaacggccccccaatccaaaaactttatttttttttagggggggaaaaaaccttaatttttatgcgggtgggagcaaaaacccaaaaccccttgggaattttataaagaaaaccggggaaaaaaattgtcccccccctgggaaaaatgttcccgcacaaattttttctaatatcggcggcccattttat

SEQ ID NO: 10562 - DNA, 395 bp, Gossypium hirsutum
  Clone ID: LIB3828-028-Q6-N6-D8
gggtaaaaatttttttgggtttttaccaactttttttaacgggccaaaaaaaaagggaattaacattccccccaaactatttgggttcaaaatctggggcggggaaaaacaggggggaatcatcaaactttttgggaaaaccattttccccaacccggggtccaaagggcgggaaaaccttgaacaggggcccttttttttttgggggagcaaccccccaggggcctccaattttgggggcccgcccaatttggtaataaggccccttcccaaaaaaaattttggaaaggggatttttgattttccccggggttgaaaaaggggttacccaatcccccaaaccccctttgaaacctttttaacccggattaaattttagggggtttcggaccccg

SEQ ID NO: 10563 - DNA, 516 bp, Gossypium hirsutum
  Clone ID: LIB3828-028-Q6-N6-D9
aaaggaataactgccaccattttattacaagcttatgctgacacctaaaacattgttacttacagcaaaggattgtttggtttttcctatattaaaaatattttgatatctatttctatacattaatacaaaggagaacagtcataaaaacagaacaagacaaaacaaaactcataggatactgtctgaatatatctcacacctgtcttcttaagcaaaaaagactaacaaacatggtcggcagcctcctacaactattatgcacaggattgtcgatacagttattatattgacttaccagccatagatgggattttccacttgtggtggtaagagatgaaggtctttacaatgttgcttgtcgtaatcccgtgtaccaggtattgcccccgtgcaaagtctaagcaactcgtttcctgtaagacagtagtgggcgaatgctagacccccatcaaccatctctgaaaggtttggcaatgtcgatgattttgcaattattttcgatcccgcttttgc

SEQ ID NO: 10564 - DNA, 424 bp, Gossypium hirsutum
  Clone ID: LIB3828-028-Q6-N6-E1
aacaaaaagacaattttcaactttaatatataacagggggggggccccagataattccaactcttttattcaccccattcccactaaaacacaacccttcaacttaactctttatctcccatcatctggggttaaaaacccaaagaagggaaataagacatgccaatcaaacccctttctataaaaatcctttcaaggggttaattgggggtcttaaaaccctaatttatccccctccgggggggatttccttgcctttcttttctccataaagaagaaccccatcaacgacccaacggggaaagccctgaaacaaaccggcgctttatcgagcgaaacatgggggccggggatggcttggatttcaaacagattggttttcttctcggggtcggggttttgaccgtaccccaccccgtggtcc

SEQ ID NO: 10565 - DNA, 496 bp, Gossypium hirsutum
  Clone ID: LIB3828-028-Q6-N6-E10
gggacaaaacaccaatataagttcataatcattgggcttttacaaaattttaggcttaaattatgaacctatactaggccaaatacacattctaacgccaaagtcatataacccgtttctctaaacctagccgaagtacagaacccgaaaggggcaatgctctagagccgtgcagcactagcaagtcttctggtaacgtgccagtaatcgtaccaaggggtggcgggtcccatgaacgatttccccgcacggactttttgacgcacaccttgcctgactcctacgtacggctgttcagtgcaaacagggcatggatttattgtcctttgttctctgaaacagaagttgaggaaggattttgggctgagatttctcacggctccgagagcaccatacggagaagtataataggggattaagaagggggaatcttacggcgccatccataaattgtgatgttcaaagcgtcggatggaagggagcaaatccttagggt

SEQ ID NO: 10566 - DNA, 562 bp, Gossypium hirsutum
  Clone ID: LIB3828-028-Q6-N6-E11
agcaaagaaaacatatatattagcatgtacatgcattaattacatatggctacaaaacaagattcaaggaactttaggatattgtaaatcaaatattgttttgagctatttattcttcataattactctttttatccaacaggattttatagcaagcccttctgcaacatcattacttcttattttgtataattaatacgacgacaaccaactcttcctcattatttcatcttaatatggtatcatctccctactttggtggactgggttcactgtccataacctcttctatccctttgctctttacagtttcagcctggcaacatcctgatgcgcacctgggctgaccacactcagcacaagtcccaccgcaaccctgacggcaacactccccactctcacatcccgactgtcctggcattagtgggatttgtgggacttgtgggatctgtgggattagtggaatttgtgggatttgtgggatctgtgggatctgtggaattcttgggatttctggaatttgaggaaatggtagaacgaaaccccaggattacaattaccg

SEQ ID NO: 10567 - DNA, 557 bp, Gossypium hirsutum
  Clone ID: LIB3828-028-Q6-N6-E12
cctaaaaaccctctaaatacattcacgtattttaaataaattaaacatacatacttcaaatccgatattcacacccaaatccgagtaacttcggtttctgatcctaatacaattcaatgcagcttattctttagctaagtaaacaaatagtacaacgaaaaggagatcaatctgtccaactgtattagcagtttaatgaattaattattaccaatctatctcttctcaaataaacagaagggaatcaattgacaacatcaagcaccagttttcgggatttcaaaactgaccatttcaaacgccggtaataagctgcttggagaagtgcaagtgatagcacaaatatccacttaaaccccatcagttttctctcttccatttccggttcagccgcccatgataaaaatgtcaccacatctttccccatttgggcctctgtagctggagtaccatcttcatattcaatagcatcatcgttaagcattttcggcatagctattgcaccgccaggaaagtaagggttataatgcagaccttctcgaatcgagataccagca

SEQ ID NO: 10568 - DNA, 535 bp, Gossypium hirsutum
  Clone ID: LIB3828-028-Q6-N6-E2
acggccaaggttttttttttttttcataaataaatattatcactcaaataccagtttttttccaaattgaaaataccatcagccatgcacgatgatcattgatagaagattataataaaaaaagtaaacaagatcaacggccacaaattaagcacaaaagaaagctgaacaaaaattaaatacaccggaaattttattgactaataattggggagttgttcatgggtctggttaatgaagatgaactcatagacgagaccagcgagcccaccaccaataagtggtccagcccaatacacccagtggttttcccaggaccagctaaccaaggctggtccaaatgaaacggctgggttcattgaggctccgtcgaatgccccaccagctaaaatattggctcccacgattaaaccgatcgccaacggtgcgatcactcccaagttgcctcgtttaggatcgacggctgtggcgtaaacggtgtacaccagtccgaaagtcatcacgatctcgaaaacgaacgcgtttaatgctccca

SEQ ID NO: 10569 - DNA, 443 bp, Gossypium hirsutum
  Clone ID: LIB3828-028-Q6-N6-E3
ggtaaaaaaggtggggaattggggggggggggggggaaagaaaggagggggggaaggggggggggcgggggggggaggggggggaggggggggggggggggggggcggggggggaggggggggggggggggggaaagggggcaccccggggggggggggggggggggcgggcaaaactgctttatctttaagagggaagggggggaaaaggggaacccggaagttgcaaagagggagggaaggaaaaaaaaaagaagggttgctaaaaaaaaaaaaaaaatcgggggggggaaagggcgcttcttggagcaaaattaacccggaattaaggggaaaataaagggttccattggggggggaggggaacaaagaaaacttgaggttttttgtaaggccggtcggaaccccctacaaaaagatgggatggggccatccaggggcaa

SEQ ID NO: 10570 - DNA, 515 bp, Gossypium hirsutum
  unsure (1)..(515): unsure at all n locations; Clone ID: LIB3828-028-Q6-N6-E7
agagcattataagaaaaaaaattccatttattttttaaattatatgtatacatatacatatatatatataaggtaaaagttcaaaanatactggaagaaaaaaatggacacaaaaatgtttgaagtacagaaattgatgtttgatgacattccacctatgatttcttggcctttttcaggtacttgtcctgaatcttcagtgcgttttgacatgctttcttagcatccaaatttccagttatctcacccaatatcgtcacaacatcatcgagacccttagcgtcctttagaatctgcctattcttggtctcaaggacgcttgcaacaaggaaaaccgagagcgcacagtttttatccacgtgtccattctgcagattttttctttgaaatttaccgtaccgctttagctcctttgcatgtaatgtttgtgtactgttgctatctagagctgcatcgggttgctcgtacaacgagaagatattagggttgtattccattgcccacataacctccca

SEQ ID NO: 10571 - DNA, 576 bp, Gossypium hirsutum
  Clone ID: LIB3828-028-Q6-N6-E8
gtctaaccgaacaagtttttattgtataattctaatattagaataggataaaatacaatgcatcataaacaaatacagggagccaacatttgaaggtcagccagtgtgtctaacatcttacggttccacattccaccgccataatagcttaccttatgtgcttattttagaggtacaataacaaaagttttgaaaacccaggagacaaattggaacaagagattgaatgagatcaaggcacaatcttgtaagccttcatcttatcaatccaagtaacaaacgaattctgagaattcctaaaccccaaaaacccatgctccttgctcttattcatactgagcagcggcatcggcaacggagccgaaagcatcgcatctgtaaaccaccaatttcccacctcctgcaaactcgtcttctgcaactggttctccttcactatttcttcccaaactccttccttccctttcatcatctcctccaacccccggttctccccttccacgaacccaaattattctatcccgaattgctctgccaaaacgctccacaaatgcttccacttgaaaacatccccat

SEQ ID NO: 10572 - DNA, 561 bp, Gossypium hirsutum
  unsure (1)..(561): unsure at all n locations; Clone ID: LIB3828-028-Q6-N6-E9
cgcaaataagtaaatttaattcttcatatgatcttcaaaacaatagtgggtgcaacaaacatgtaaatagagtacttcatatatttttatatatatangaaataaaataattatatatagtgtattcgacgattaaatgcttccggtgaaatatttatggcaaaatttgtacccacatcgatcgaaggcaaggcaccccattgtagttcacgaagagcatgtaataaccaggttgcgcaatgttgccattcatgggagcttgaagaacaatgttgtttgtatttggggctacatctttattaaattccaaaattcccaattgaatcaatctctgattcatgcagatcccgtgggtcacaaacggcggcgagtagatcgtcacttgaagcttttgttggtcgattacaccatttccacggatttgcactgtgaatttttggccatactttaattggttatcggacttttcggtgatgatctcttgtcggaacatggccaagttagggtccaagtaaggtggcgagaacttctcaacccgaacttcggtgggaaataatgcgt

SEQ ID NO: 10573 - DNA, 527 bp, Gossypium hirsutum
  Clone ID: LIB3828-028-Q6-N6-F1
gttcatgaaatcgtattggaacataataatattatatatacatatcgatctctctctcacaccttaaacatgtttcactctgcttaaacaaacttcccttcaaccccaccattgatgcactgcgacaccttcatcccttaacttcccatacaaagccaagcattcccagtaagcccttctgctcatgttctttcttccaccaagtcctttaggtttgcattccaagaacagctcatcaaccaatctaatagccttgctcttcaccatatcttcaaccacttcagcctcagccttcatcactacatactcttcctcctgcacgttcttcctcagccaacccgacatcccagtctccgccgcagtctgcggcacctctttcttggtagagtccttggtcagtgtctcgatcttgtacatctcgaacttcagattccttgtgggataattcttgacaaaccaggtggtggcactgccgccatctttcttaggcaagcctacatcaatgaaaacccgcgggggtagctttc

SEQ ID NO: 10574 - DNA, 510 bp, Gossypium hirsutum
  Clone ID: LIB3828-028-Q6-N6-F10
acaggggatgaatataaaacatttataaataacatgtacgtttataaatagggggaaaacgaataaatcacaaatacctaaatattgctttcaatatatcccataaagtgcaggctttcaataagttgaaaacacaatttcaaattgcttaacatatggctttatctatcacttcatttgtattcaaatgatggcaccgcaggagcatcaaagctctccaaaacctccgtcttatttccattacccactggcgggtcctggttttttccaccaccaaaaactcctccgaaccatgaggaggaagactctggtgaaccctgtgtcgaactgtcgaccaatgcaggggcttggttcggcaattgccccattggaaatccaggcataccggccacattcggtgccgcttcttcgatcataattggcatctgtggttgactgagaaattattcaacatgatcccggcaccttctattaaagcaagcaataccccaccaaacaatgccgatcttg

SEQ ID NO: 10575 - DNA, 486 bp, Gossypium hirsutum
  Clone ID: LIB3828-028-Q6-N6-F11
atgcaacattgattgaagtcaaatgtattcccaagtatgcatcctcccacagaaaggcaatagaggaagctcaaagaacaaaaccgagacttgcaaacgttaaacaccatttctttttatatctaaagctaagcaccattctgagaaatacattctcaaggtcttcaacacaaacaatgaattggtttagtaggacttcccacaatggattaggctccctgcgcccaagaaaagtccgaatattgctgcactacccaatgtggtttgcccaatatatcgaatcttcagcagtcctggaaccttgtacctaattgcctcataagtcccataaacagcaccaacggcgccaccaacagcgcctccgacggcgaccccagcggtgacgcgagccaagcagctgtcccttgccatgtcggctcagtataacgtcttcccttgttttccgtttgttttgtttatttaggttttctgcgagttcggttaggc

SEQ ID NO: 10576 - DNA, 562 bp, Gossypium hirsutum
  unsure (1)..(562): unsure at all n locations; Clone ID: LIB3828-028-Q6-N6-F12
caaaagttgtaactcattgcatctttttaaaatttatatgcttaaaatacattcaatatagtccatgaatttggacgaaagagtgcatngaaaagtcattcatgtttgccccaaaaactcatcagctgaaccttatggcaaaagcataaaattttactttcaccattgaatcaatgaaagtctgacagtaaatgttaccatatatatcaagtcgaaaactagtttgaactaggcacctaagctttcaatgcaaagaaattttgttggattgtatgagcaccacaacattgcttctcagccttgagtgatctccttctcctttgccttgcacaattcatcggcggacttgacgaactttttagtcaactcatcaatttctttctcgaatctcttagcctcatccttgggaaaactagaacccgctttctttattgtatccaatgccttttgtcgagcccttcttatgctttgtttaacatcttcggaagacttggcaacaactttgcacatagcctgcatatgctcttttgttaatggtggaataggtgcgatcaaccgttgt

SEQ ID NO: 10577 - DNA, 500 bp, Gossypium hirsutum
  unsure (1)..(500): unsure at all n locations; Clone ID: LIB3828-028-Q6-N6-F2
gcaacaagggtgaaatccattatctcatatctaaatgatcaccatcaaacaaatttaaaggggcagggcccccatccatcctaagtcatgtcaaagagctaacactgtttttccacctgacacaacaacacatttttccgcaaattttttaatctcacccagttaaaaacacatcaggctttgatcccctctcccccatccatgacagggaaagagcaaaatatcacccataactattgttaacagcatttcaggtttcagctaaaatgatttcatgtgctcggttcaacctcctttttttttgaaaatccgatgccatgctcctcaggctttgcatctccttcggccttgtcatctggctttggcactttttgcccttcatcatcactggcctcaaattcatccatgccacccatgccgcccatgccacccattatgtcacccatgccgcccatgccgcccatgccgcccatnatgtggcccatgccgcccattccccc

SEQ ID NO: 10578 - DNA, 539 bp, Gossypium hirsutum
  Clone ID: LIB3828-028-Q6-N6-F3
gagaataaaaaggtattccattaaagagacaaatcgtttatgaaatttcaacattctacaaatgacacaagttctgatcgaactcaatttaagtttcctaacagacgacaagaattaaaggcacaacgcagagccttttaaatcttcattatgatggtaaaattccaattatgttgtggctgggggaaaaacaaggtacaacacaactcttcatcgaaaacaaaaatcaataggtatgaatcaaactgacccggactccatctgtaatcgatagacatttatgctactgcaggcatgtccttgagccatggatccagtggcttaccaattgagtacactatgaaaccaatctccctcagctcatccgcgttcacgatgttccttccatcgaaaacaaaagccggcttttgcatgttgtcgtatatcctcttgaagtcaagtttcttgaattcgtcccactcggtcagaatgcaaattccatgggcatctttggttgcctcataagcatcccacacacagctgacttgcttgacagtcgt

SEQ ID NO: 10579 - DNA, 539 bp, Gossypium hirsutum
  Clone ID: LIB3828-028-Q6-N6-F7
ttttttttttttttttttttttttttttttttttttttttttttttttttttttttttttttttttttttttttttttttttttttttttttttttttttttttttttttttttttttttttttaaaaaaaaaaaaaaaacgggggggggggggcaaaaaagggccccccccctttttgggtggggaaagggaaaccctttggggaaaaaaacgggggttaaaaaaaaaagggggaaaaaaaacccccccccaaagaaacctgaaacccccaaaaaaatggggggggaccccaacccccgttaaaaaaaaataaaaaaaatttggccgggggaaaaaaagggggggccggggccttaaaaaaaaaaggggggccaaaaaaaaaaaggggggccggctttaaaggggggtttaaaaaaagggggccccgggttcaaaaaaagggccccccaaaaccgggggagggggggggccccccccccgggagagaagaggaaaatttggaaaaaaaaaaaattttggggggcggtggggaccccgg

SEQ ID NO: 10580 - DNA, 556 bp, Gossypium hirsutum
  Clone ID: LIB3828-028-Q6-N6-F8
aactaagaatcccaacaactttattacgaaatttcctacatattcaacataataaaagttcacacatgatttcccccaagttgggggtctagtatgggaatatcaaatatgggcaaataaaccaaccaactgggatccttgttttctaggcacttttctcactgcacagcttctcaataagttctgcagcatcttgaacagttgggatggattgggcattgtcctcttccaccgggattccgaattcttcctcaagtcccatcacaatctcaaccgtatcaagagaatcagctccaagatcaagaaatgttgattcaccggggatgggtttgtcattgtctaaagctaattggctctttactacttcacataccttatccacggtctcttgtttggcagcacagcagatctgcaagcgagcaggcattggacgcatcgtaaatgagagggtgcttcttccctggttcataaatgaacccaatttcaacccagaaacactgcctttagcaaaggggcgaggttgcatggagatggatgaaccagcaatagaagccat

SEQ ID NO: 10581 - DNA, 482 bp, Gossypium hirsutum
  Clone ID: LIB3828-028-Q6-N6-F9
gcaaatcgaatattgttttgagctatttattcttcataattactctttttgtccaagaggattttatagcaaacccttctgcaacatcattacttcttattttgtataattaataagacgacaaccaactcttcctcgttatttcatcttaatatggtatcatctctctactttggtggactgggttcactgtccataacctcttctatccctttgctctttacagtttcagcctggcaacatcctgatgcgcacctgggctgaccacactcagcacaagtcccaccacaaccctgacggcaacactctccactctcacatcccgactgtcctggcattagtgggatttttgggacttgtgggatctgtgggacttgtgggatctgtgggattagtggaatttgtgggatttgtgggatctgtgggatttgtgggatttctggaattcttgggatttctggaatttgaggaaatggtagaac

SEQ ID NO: 10582 - DNA, 527 bp, Gossypium hirsutum
  Clone ID: LIB3828-028-Q6-N6-G1
atatgcactatgcagctaaaattttttatacatggatgtgtaatcatttcgttaaatgattacaccttattggataaaataatgtaagatataccggagctgctacttaaaaaaacatgtagatacagttatcaaataccgtatacgtagtatgcttatagcttacggatcgccgccttcaatcgtgatattgcctcctgactctcctctcgttcgcaaggaccggcgcttctcctttaccagggaattcccacttaaccacgtccccgtcccaagaggagctgaccaacacagggtaatgcgggtgccaactacagtctcttactggtgatgtatggtgcttcagtaccgcaacttgggctccggtgaccacatcataaatataaacccgagaatcgtgagatccggtgtaaatgtacttttggcccgtgcagtattcaggtgaaaaataacagcgaataagagtacgcaacactgagtgacctttataagtagccactgatccgtcacttgggtgtttcaaatct

SEQ ID NO: 10583 - DNA, 549 bp, Gossypium hirsutum
  Clone ID: LIB3828-028-Q6-N6-G10
aaaaaaagcatgcagcaaaacaaaactgcattaaggcaaatactatatattcttccacacatccctcaaaacacttttatttcaaaccatttggtcatcttcaaacaagaagagaccaaatcccacatcattttcccatccccagacactttcccatcacccaaacacaaaaaagaactctaaaaataaaacaaaaacctaaccatcatgaaatttcagtaaaacaagaaacaatcaaaccatccggatgctttttctttctcgataaaaactcattaactgtccccctcagtacctgtaatgaggaggcttgtaaggaccttcaacaggcacactaatgtaatcagcttgatctttagtgagcttagtgagcttagctccgagcttgccgaggtgaagtgcagcaactttctcgtcgaggtgctttggcaatacgtaaaccttcttctcatattttccagttgccttctccttccatagctcgagctgggcaatcacctggttagtgaacgagcaggacatgacaaaacttgggtgtccagtggcaca

SEQ ID NO: 10584 - DNA, 337 bp, Gossypium hirsutum
  Clone ID: LIB3828-028-Q6-N6-G11
agagggaacagataatattattaaaaagaaaaattaacgcatggaagacacttggccaccacaaaggtaatagcaagcaagaaggggctatttcttgggggggggggggataaaaagaaaaaaaagacggggatcctatcatattacattaccacacattacattacccgcaaaaaaacccactatttttggcaggggaaaaaaaaccttttataaggctacccttaactcgcccctcaacccattttccccaattggagaaataaagaacaaagaattggaacccacagctcttttttacaacccaggctattttatcgggaccctttggtttctc

SEQ ID NO: 10585 - DNA, 554 bp, Gossypium hirsutum
  Clone ID: LIB3828-028-Q6-N6-G12
gaaatgaaaagaaataatatagtatcatatctgaggccaaagatgagatgtacagtttactagtaaggagcacactgaaatcagatttaggaactgttcccatctgaagaactcaaaagattaatcagcaatattacgggaaatatgaaagtctgaaataagaactaaagtttccgttgggggacaccaggaaatcaaataaaacatttttgaaagaattctcaacttcaaaagctaaagcaccacatacacataatcttcagtcagattacacaggcaggatccttacccagcccagcacaaagaagataaaatgccatgtcttgacagcctcacaaatttggcatgctagggacgagttctactgctttccgcatttctaactgggttgaaataaggatgagccattgcttcttttgcagttggcctttcctgatgatcatatcgaagcaacttatcaaggaagtcaatggcctcaggtagtgccaaatgttgattctcggcattaatgaactttgtccaaggttttcgactgtgcctgccaacaagggccg

SEQ ID NO: 10586 - DNA, 449 bp, Gossypium hirsutum
  Clone ID: LIB3828-028-Q6-N6-G2
ggcgaaaaaaccggcttcataatttcttttggttgggaggtcactggtcaactttacccatgcccctggtttcaacaatcatgcctgccgctttgggtttaaacaccatccttatttcaacccaatggaaataaaattcgggtttccaattacccctttcagacttttaacttaataagggtcccttttcacccggaaataagcctctccatttaatcagggcgcccggaacaattccctggttttatacccttgccaccggcttccccttaaaacccagaccttaattttaagtttgggaatctaaatttggttggaacttcaaggggacccaggcccaattgagggcattaaccacctttatgggcattgggggtgaaaatttttacccggagaaagggtagaagccaaatcaccttcccagttcccaaaaacatggtattgggatt

SEQ ID NO: 10587 - DNA, 223 bp, Gossypium hirsutum
  Clone ID: LIB3828-028-Q6-N6-G3
gcatcgccaaggaacattattacacatcagttaataaaaagatgaaaaacagctctcatagttacatagagagactaatgatgtgaaaacagatctactaaagttgtaaagttgtaaatcgttccagttaactgaaagccttagtttggtgcctggctttttccttctccttcacttcactcccctgattcttgtcataagctggatgattttcatgaatctc

SEQ ID NO: 10588 - DNA, 582 bp, Gossypium hirsutum
  Clone ID: LIB3828-028-Q6-N6-G8
aaacagaacaagtaaggttctcattcataagataaaagcaataatcctcaatacaaacaaagcactgcctctatcctggccaagccaaccaccattttagccaccaaaagcttatgaaacaaccatcatcacgcacaatgcgacccaagttgtagcaaaagccagaaccggtgaaagattccatgaagaagatgaatccgggatcttagtcgtcgtagtagtagatggtgaagtggttgatggtttatcagtggaagatgaagaagaagaagactccactttgatcgcaagcttcatgccgctctcacaatgaccagccacaccacaaatgaagtagtgagtaccggcggtcttcagattgatggtggtggctccggtgctatccgtcgagattgctttccccaccgtacatgtactgtaatcgctagaacttacctcctccactgtatggcttgttgggtaattgaaaacgagggaatccccaactttgaaggtcttgtcgttagcccaaccactataatcgacaccggttgcccagccagaggtgtcaccaacagtgtaaaccgtggccaagcttggccc

SEQ ID NO: 10589 - DNA, 544 bp, Gossypium hirsutum
  Clone ID: LIB3828-028-Q6-N6-G9
aaatgaaatgagcaaatacatttatataataaaagtagtgtcgatattactatgaatgaaaaacatgaataaaagagctgcgggctaccacatgctttctttaatctgcagccacttcagccctaaacactactacacctttacctttttaccattcgctggaatttttttttactattaccaccagctcattcacaaataaaaacaacagtaaaaaaaagttaaccccacacacatagtttacttcagtaccaaacttataacctaagcttttaggtttcctttccctaaatcctaataataacactttcttttaccccacttcagattttccgggaaaataaaggaaatttgaaggcgggaaaccaagaacaaaaaagtttgatttcaaacgacttgtcttgtcttgtttttttttttttttcaaatacggaaattcttgccggtgaaggtttggccgaactgccaattagatggtgccacattccatgaagtggaagtgcgtttgtcactgccggtgactctaaaaaagagtgcctgaccg

SEQ ID NO: 10590 - DNA, 526 bp, Gossypium hirsutum
  Clone ID: LIB3828-028-Q6-N6-H1
aggagcccacgaaaactcattccaatcccaaagcctaaatatcaaatacctgcagggaaattcgtttacccactatactaaatatacagtttcacataggaaaatctcaaaaaaacaaaaacaaaaaagaacacactaaataaaaccaagaacgatgataacagttaaaccctagaaaactaaaaccctaggctaaggcaaaagggtatcctctctttccacagcaatagcatgcaatgggaacttcatctcacatgacagcttcaggacctcactcaaatcgaccgggtgagccaccgaatcttgaacccacttgaaaccttgcatcagcttggctacccacagttggaccgtcaccagcccaaggttcttcccagggcaaaccctgcgcccagccccaaagggtgcgagcctcaagtcaccgcctcttacgtccacctcagcttccaggaacctctccggcttgaactcgaccgggtctttccacactttggggtcatgggttatggcccacatgttcaccatg

SEQ ID NO: 10591 - DNA, 556 bp, Gossypium hirsutum
  Clone ID: LIB3828-028-Q6-N6-H10
gaaaaaaatcaataatttcttaaagatgagagcactagtccactacattatctgggaatataaaatgacagcttcaaccaaatatctcaccagatttttttgagaaaagacaccatgaccgaacaagctagtctatcaatgcaggtctttaaaacttgtagaggcaattttatgttctctatctttcttattttaccgcatcaaaggaagtaaccatctcatctctgctccatttccgttggataagtagtacacttttttccagctttcctccgagaatgcttcccttcttacaagcctttgcctgacgtagtaatggcaaacagttgctgcctcatcaggactgtaacgaggcatgttaacacgggcaccaacaggtatatctggcaaatctaaacgaagttttcccacagcagttgaatgagagaatgcaccaaccatcatgtcctcatgcatcatggacctaaaggcattcaccattgcaagttctctggcgtgtattggtcgacaagaacggacagtcactggctcctcatactcactgaaggtaaaccaa

SEQ ID NO: 10592 - DNA, 563 bp, Gossypium hirsutum
  Clone ID: LIB3828-028-Q6-N6-H12
catcacttcacttgtacgagccttgtttttctaaaaaaaaaaaaaacaacgtacgccctagcgaatttaacataacaaattgccaatttcagttcgccaatcacaattatttttttaatccaagatcatgaaaaatccgtcaaagcacattattactctccccagtcttccagacttccggtttcaccaatcaaaagtaaagccctcccttcattcaaacaatgatattacctttccctacggcttgagtgccaaggccagcccgactttagcactcttttcaattgctctggtgtccacgtctccagagatagtgaagagggattttgggcgccactcatgctggataagaccacttgctctgccgtagttgttcagtcgagccttcactgtggtcaacgggtcaagagcatgctgtgtaccaatcgtgagagtgttctcattacttgaaaagctatgggtcagctccgcaccaaccggtgtgttcgtcaatgggctaacaatgtggtagtaggaagcattaagagtgtcacctttatcatttaatgttagggaagcaatga

SEQ ID NO: 10593 - DNA, 539 bp, Gossypium hirsutum
  Clone ID: LIB3828-028-Q6-N6-H2
aaaaaaaaaacaaatcagtaaactgataataataataaacatttaaagcttaatccgcctaaaagacaaaagttcatatcaacccaaaaaaacacaacattggctcaacaaaattacttaagacattactaaatatctaaaagtcacgttcgatcagtactcttcagtaagaaatcttacttttttttttttttttacttctttgacttcttggaacccacggctgattgcacagctgccgcaggctgtgctgcaactggcttttctcctcctccaggtccctgggccaaacgctcttccctcctagcaaattttctttccctgcttgccttattcttagccctcttagcttcaaactggtcagccaacgtcttctctctggccttctcagccttagatttgtggatgctctccatgagaactctcttgttcttgaacacgttacccttgactttcatgtacatgtcatggtacatgtgcttgtcaatcttctttgattccctatacttgcggagcaagcgtctcagaacacgcatcct

SEQ ID NO: 10594 - DNA, 193 bp, Gossypium hirsutum
  Clone ID: LIB3828-028-Q6-N6-H3
agtaaaagtttcaacgtttttatttgaagactgccaatagccaagataacatactgctcctggctggattagtgttcatgaacgtttacatatcataatccctacagaaacacgtagataaacaacttaaaataccatgccaagttttaacaatttcttctcacaccagttcatcatacgagtaagattgttt

SEQ ID NO: 10595 - DNA, 543 bp, Gossypium hirsutum
  Clone ID: LIB3828-028-Q6-N6-H7
atgttgaaatgatatattttattcatttcttaggtatcccaggaacatgggctagaagctatttacgacgtgcttcgcctagcataaatataagatcttgcagaatatacatagagagccaatccaagggcactaagtgcagcaagcagccaataaaagtaatcaagatgtgccctgttaagattatctgcaaaccagctatctctgccatctttaccagttactgtctcaattacagagatgagaaagctacttaagaagcttccaacaccaaggatgctaaggtagagtgcaataccgatgctccttaattcatttggcatctggtcataataaaattcttggagacctactattgccaacacatcagataacccacacagtgagtattgggggaccaaccaccataccctcattggaactgtcacgtttggcttgtctaccaacccatgttctcgagcagtttgaagcctcttcatctctactaaagcagcaatcaccattgccatagcagacacagcaattccagttccaattctttga

SEQ ID NO: 10596 - DNA, 452 bp, Gossypium hirsutum
  Clone ID: LIB3828-028-Q6-N6-H8
aacccgggggggggggggaaaaaatttggaaaatttgggccaaaaaaaaaattttttgttaaaagggaaaaaaaaaaactgggggggggaaaaggggtttaaaaaggaaaaaaaaaaaaagggggggttttttttttaaccggctttacccctttggggggaaaaaaaaaaggggaggacgggggcattaaatggccccggaagaaacctttttcaaaaacaaggggggggccgaacccattaagggggcccaagggggaatttggcaaaaaataaaagggggaaaaaaaccggggggggggccgaaaaaaagggttcgcaaaaaggggggggaacaaaaaacccaaagggtttcaaaaaaaaaaagggaaactttttggggggggaaaaacccaccctttttaaggaaaaattgttttttaacccggtaaaaaaactgggccccccccccc

SEQ ID NO: 10597 - DNA, 513 bp, Gossypium hirsutum
  Clone ID: LIB3828-028-Q6-N6-H9
ggacacaagagattcatttatctgatttcttcagaaaaacactacatatattatacagcgttttcttttggtaaaatcataaacttctagaattgaactattaaactaatgccattttgaaggatactaacatattttttatcatttgggaggtcgagaaaattaagtaaaattcaaaattattcatgttgcagtaaattgtattgactaacttgtatatgttggaatacagagttcaaggaagaacttggtattatagctcctacatgatatgatatgatattaccttctaaaacgtatcattccgtcacaagccaatgtcccttcaagatctccgatgattcgagctatacgaacctcgagacctctttgaacttcctgaaacaaagatcttacattatcggagaaccgtttcatgtcaatggtatgtaccttatctagctccaccccgaggaacccagagactattttgggttgaatttccattaacttttgggcctgttgcaaccatgt

SEQ ID NO: 10598 - DNA, 561 bp, Gossypium hirsutum
  Clone ID: LIB3828-029-Q6-N6-A1
gacaagctattacacaacaagcattacaacataaaaatttacacctttgttgtgtacatcagatttgcatcttacatgtctttggatccttattgtacatgaacccatgggtttcaactagaccataaccctgaacaactacaacatttgtagaccataactagacgccttctataacacaaaggaatgacatgatccaacacggttcatcgactggatcaagcaacaattgggtatgatgcacaagttgccacaccgcacatgtttttgcccatctccatcttgaagtagccattgtcaccccattctgcaccccatgagttcttaatgagccaatatggaacgccattttcgactccatacccaactgcaagaacagcgtggttcacatccatggggtgtgctgccacatgttttactggtataaaccccacttttgtaaaaacggaaactagtgacaacttcaaatgccacactaacaggccggaccatggcaactgcatgctttaattcatcttcagcacccaagttaatgttgacagagtcaaggactttaacacc

SEQ ID NO: 10599 - DNA, 423 bp, Gossypium hirsutum
  Clone ID: LIB3828-029-Q6-N6-A10
aaaaaaaaaaaaatttatttttttggggaaaaaaaaaaacggggcccaaaaagggggggggaaaaaggttattttccaagggggggggggcccatgggggaccccccgggcggggaaaacccttagaaaaaaggggggggaccaaaaacccccccaaaaaaaaccccccttggggttttttcccgggggggggggaaaaaaaaaaaaaaaaaacggggcgggggggggggggtttaattattttgaaaaacaacttaaaccccgggggttaaagggggatggacaccgccccaaccctgggtggggtttaaaaagcctttttttccacccccttgggaaaaaaaaaaaaaaaaccctttccccgggccgggcaaaaaacctccacccggggggggaaaacccaaaacttccccataaacgggg

SEQ ID NO: 10600 - DNA, 551 bp, Gossypium hirsutum
  unsure (1)..(551): unsure at all n locations; Clone ID: LIB3828-029-Q6-N6-A11
tcgcgatggcaaatccatgnatcctaccaggaccatattcatttttctttctcttcttttatatggttctactaccggtttcagtcgcgttttctcttcagaagttgtcgttttccggcaatttttaattttggtgcctctaattctgataccggtggcttcgctgccgccttctttcaacctaagccaccttatggagacaccttttttggaatgccgtccggaagagcatgtgatggacgactcattgttgatttcactgttgagaatttggatttgccattcctaagctcttacctaaattcactggcaatcaatttctcacatggcgcgaatttcgcgacggtgtcttccaccataagattaccgacggctgatgttatcccccaaggccaagccagtccattctacctatctttacaatgttcacaatttgctcagttcaaaaatagatcccaaattattagaagacaaggaggaatatatgcaagtctaatgccaagggagggaaacttttgccaaggcattatacactttcgacatcggccaaa

SEQ ID NO: 10601 - DNA, 530 bp, Gossypium hirsutum
  Clone ID: LIB3828-029-Q6-N6-A12
gccaccaaagtcaaaattgagcataatactttttatatattaatttattacaaaatctttaaatgataaatctagaaagagattattctaaatagaaaagttaaaaccaaaatcacgattaaaaaaatctaaaacgacattaagggcctaaaaagtatttttaatcaatcctagaaattctttctttcgagcatttgcttgaaccaatatgccgagagtttgggatatcttttgagatcattgggatcaacatataccagaccaaatcttgggggatatcctaataaccattcaaaattgtctagaattgaccaagcaaagtagccagggacattagctccatcatccatagctcttttcaattccttcaagtagcttctataaaagcttactctattaatatcatataacgattcaggaaatgtgagattgccaggatcatccattccattttcagagagaattatattagggcttccataatgtttttttacatatgttactgctttggacataccccatggaacttt

SEQ ID NO: 10602 - DNA, 515 bp, Gossypium hirsutum
  unsure (1)..(515): unsure at all n locations; Clone ID: LIB3828-029-Q6-N6-A2
cagaattaattaaactaaatttacttaaaatcaatatccaatatatangaaatcaatgccaatactacacactttatataaccactttattttctaagataggaaatagcacattttttgcaaactatagataaatatatgctaggcagcaaattagaaaattatgtccagccagccagggccttggttcggcggctatagtccagcagagcgatcagcgtattcttgaaccaatgctgcgaacaatgttggcctctcaagcaagcgtgatggtggctcaaattcttttgcccttcctgcatccatcaccagaaccctgtcacagtccatgactgtgggtattctatgagcaatgctgataatggtgcaggctgcaaactcttcccttatgatcttttggattacagcatccgtttgcgagtcaaccgatgcggttgcctcgtccatgaacaaaagcttgctgtgctttagtataaccctccctaagcacaaaagctgcctttgccccacactcc

SEQ ID NO: 10603 - DNA, 548 bp, Gossypium hirsutum
  Clone ID: LIB3828-029-Q6-N6-A3
gtcaaaaaaatgaaatcaatttcgtaaaaataagtaatctaaagcctctctcaaagctaaacatttgaatagaaaaagaaagataaaaaacaggggtttagaaagaagaataataaagaaatgataaggcctgcttgctagcaaatataacctatcaccttatttatttatttatgtagagcagcatcctttcttggtgtttcctgatgcatcagcgacattaatggtagttccttgcccgggaagcttggtggtagccgctgcttcctgggctgccaatgcctttttacacatgatatgataaatctcagtcaatatagtttggaatgccttctcaatgttggttgcttccagcgcagacgtctcgagaaatgaaagaccttccttctcggccaaaccatgaccatccacctcagaaacagctcgaagatgattcaggtcagatttatttccagccatcatgacgacaatgttagaatcggcgtgttccctcaattcacgcagccacctttggacgttatcaaaggtttgcctctttgttatgtcgt

SEQ ID NO: 10604 - DNA, 555 bp, Gossypium hirsutum
  Clone ID: LIB3828-029-Q6-N6-A4
attaaaaataacaatattaggaaaaactaaaatctagcattttcgaagccgtgtagatcactgactttattcttcaccatggccactttagccaacttctcagccgttctccaagccgatgacggtgttagtggctccccattctcatccatcaccaccataatcgcctccctttctcgttccctctcgttcactcgccgccgttggatttccaccatctgttgtttcatccgctgcaattccgtcagctcggcttctaaccctcgcacgtactccgccaccgtcaacgaattcgactgcattaacaatgctctagccgaagccaacagatggtgtgcacttgtcaagtcgttaccacactcaattaacctcctcgactcggctatggctcgagtcgttatgaaaaagaatctaaactgttcgatctcaggagccggtgatcgaacggcgttcggctgaggaacgagaagggattgatctcggccgtatacgacttcttgcgaaaccggatctttgtaaagacaacgaacacacatcacgtgattggacctgacc

SEQ ID NO: 10605 - DNA, 128 bp, Gossypium hirsutum
  Clone ID: LIB3828-029-Q6-N6-A5
actaataataaatttgctctcaaaatttaactatgatgattaaatgttgagaaattttatttttataatacaatattgggggaggtacgaagggaaggggataacaaaattaaaaaaaaagggcggcc

SEQ ID NO: 10606 - DNA, 556 bp, Gossypium hirsutum
  unsure (1)..(556): unsure at all n locations; Clone ID: LIB3828-029-Q6-N6-A6
gaaacggtagaaaggtggaatgaaatgattaaggggngaaaataagagcatttgagtcttttcattctctcaaaatccaatcctagaaaccactaattcaattagataataatattaaaaaaatttcaaaaagaatctaccatgcgacaaatccttccattatcatctcttctattcctttttctcccttccataaaatcttcctgcagaacacaaagttagatagacattggttttgttaagcatccttgcataaaaaaaattggtgataattgaaaagcgagcgcctttaataaacatcattgtcaacccaagcctaatagatgtgtgggggtaacaccacataagactccctctcacatttagctcaacaaagcctacactgagcatcatgatgaaggtcattaacatcacantggggtagaaaagagtaacacaacataacctgagctttgataccctgttaagcattcaaaataaaatgataggttgaagaaaacaacttcatattaagacagtaataaagcaagaaagaagaatctagctcaaactatag

SEQ ID NO: 10607 - DNA, 571 bp, Gossypium hirsutum
  Clone ID: LIB3828-029-Q6-N6-A7
agtaaaccttattttgatagtcttattaagcaagcaaaacatcattattaagtaacagacactaggaatcggcctctcaaagcaatgcactgcagtgtcccttctaatatgaagcttagcaataaaatcaactactctatttgcatctctcgaaatcttcgcgaatttaacttctcacctgcattgatgaagttcttgaatattgcgaacaagagtaatcgagtgaggatccattgagctatccgatataagctgcaccaccatctcagagtcactctgacaatgatgatcttcttgtatcctcgctgccaagctagttttaaaccatatcataccgccagcaactcagtttgcaaaacagaacctgaacaaacattctactatatccaagtagccaatttccatggtgcgtctcttagcaaccccaccagctgctgcccaagaatggttcaaggcaaccgctccgtctgtgttgagttcgacccatcctgggggaggtaaactccatctcttggaagaacattaccattctgctgtggagaaatcagatgatagacctcagtctgcattc

SEQ ID NO: 10608 - DNA, 511 bp, Gossypium hirsutum
  Clone ID: LIB3828-029-Q6-N6-A8
ggaaaacaaagccaatctttttgttatttgattgtatacaagaaaattcacaaaattttacagaaccttggactggggacgaaaatgaaattaaaaaatttatgaatattatatgaaatacgatctatctcctatatcgaaaccttaaagaacacgaaatggaagtcaaaaaagaaaagaaaaaaaacagacaacgaagtaagcaaaatgatggcaatggcatagagttcatgaggtcatagcttatttgtaggctcccatgccgacaccagcctttccgccgccaccgtatggccggaagctgttttccctagcatttgaatagcaaatatagtagaacttattgacaatagcagtcaagaaaatgaaggcagcccctgcaccaaacactcccttcctcaaagtttcacaagacggtggctgctcgctgaagatggtccggtattttgtgtggtatgcattccgtactgatcccgccaacaaacatatctcggctattaggaaaaataac

SEQ ID NO: 10609 - DNA, 560 bp, Gossypium hirsutum
  unsure (1)..(560): unsure at all n locations; Clone ID: LIB3828-029-Q6-N6-A9
aaaacaatccaataattacataatacatttagnaaaaatgaattatttgctactcagttgtcttaatacaacaaaagcaataatgcttgagacagtcacatgagtaatctaaaaagatggcattggaattcatatatagttttaaattataattgcaaaacttttttaccgctatccatcactccaataatgacatttttgccatgtttagcttttgacaataagtcttctcctcccatcttaagcttttcccatgaatagctatctccttcatctaagccaacaaattcccatgaccttgttgtctgcactgagtgctttccatgtgaaggaaacactgacaaaagcccatccattccagagagcttggaggcttcatctggtgtaagctttgcagcaaagccattgatgctgtgtttgtagctgtaaagaagggaagatttagcatcttcttcagattctttgactgaaagtaagtatgagatatgggttttctcaatctcatgcaaagctttctccccattgttgtgtagccccaagtaaactatatacactttttc

SEQ ID NO: 10610 - DNA, 514 bp, Gossypium hirsutum
  Clone ID: LIB3828-029-Q6-N6-B1
ccgaagaaccaaaatctatatattgatttattgatgcacatctagtgtataatctgccttaacgaaagagtctcgtattggactatacctaataacatagctgtataatcttacgtagggggaaacctgaactggaataatcccatctaagaaaaatgcctatagaataggatgacacctaaatttacactctttacaaaaaaaaaaaaaaacgaatggtgtgaaacgggtcaaaaaaaccatgccgaccacacaagctaaaacaccataaattacctgtagattaagcttagcacacatcatagttggattggactctgttatttgggggcttgccaatctgtaaacaagcaattggagggacagtaggagtggtcaactctccataactttgccaacagaatggatcgtataggtggtagcgttcctgcattggctttagctgaatggcagataaagtcacccctatacatggaaaggctgtcactacaaggccaagtgcacaggttttact

SEQ ID NO: 10611 - DNA, 99 bp, Gossypium hirsutum
  Clone ID: LIB3828-029-Q6-N6-B10
tttttttttttttttttttttttttttttttttttttttttagcctaaccttggattttgctttccactcatttattcatggactgattttcttttttc

SEQ ID NO: 10612 - DNA, 554 bp, Gossypium hirsutum
  Clone ID: LIB3828-029-Q6-N6-B11
aaacaacttgggttttaaagttactttagtagcaaaggaacagcaagtacaatacaagacattatttaatgttcacaagcgaataatcataaaattaacatagttttaacaccaaagttcaacaagtttagttcaataatccacgcaacaccaaacaaactagatattgttcgaaataccaataagcaaagcccaacaaaatagatgctcaaaatacaagcactcccttaacagtagaacataacacgcttgacattttccttgagggcaggcagaggtctgacggcagcactagcaccaggtcctcttgtgctacgcccaccagcagctgcagctccacctccacgccctgcagctgtgccacttgtcattgatccactgtctgatgtttctggttccatataaaagcgagctcggaatgcagcaagatgtgcgtagtacgcagggggaacaatcgacactgatcgtgtgcaccttgcatatgtatagcaaaggttatttgtaagggactgtaatgcatcagctgtaaacttgttctcatcccatagcacatg

SEQ ID NO: 10613 - DNA, 546 bp, Gossypium hirsutum
  Clone ID: LIB3828-029-Q6-N6-B12
aaaacccaaacacataattttattcagggatgtgagattacggaatgttatgttatatttgatgaaccctaaaatgaaaaccaaatggcagaggagactttatatacatagctgattgaatgcaaagacttgatatccaccagagcgctggtgaactatcattattttaatatatatagacccacgcatcttttacgttttgcatattactacttcccattaatttatttcagatggaagatacgagagaagaatcatcttctgtaattctaagattcacagactcttttaacaaatcaaatgaagtgaaagaatgtggtcgcagtagcgcactcatctcttgcgcatcttccagcagtgtttgattaggagcgaccttctttggctccttgaaggaattctcatccatcagattagcagacgtgagagtggtctttgttgatccagacagctttacagaatttggatccaatccatcaacagaaatttggaggttgactgaattgctcccaaagtttacaacctttatccttatgtaggtttgac

SEQ ID NO: 10614 - DNA, 547 bp, Gossypium hirsutum
  Clone ID: LIB3828-029-Q6-N6-B2
aaaatgaaaaagaactgtttttatgtaatatgaataaatatattaattacaattgcactgaatctgttggtatggtttaagcggtggcacttagggtttttgggacagggctggaacatggagtcgggtttaatttgccactagttttaggcttgacattcaaacattgggatgttgcgggttcaggtccggtgtgcttaatatcaatgtctgcaagttccacattttgacatggcgaagaaccgctgcaaataaacttgacagcttctggaagcgcagatgtgccacggatgttcttgaagctaatgttgcttagtttaactttcgattcttcatttatcttgcatttactccatgggcaatatttttgatcaattaggataggggaagagacattattcacgataatatcctcaaaatgtacatctgatactatcccaggagattcgcctggccaagttttgattcgagctccattcgaagtattagtgatggtgcagtttgtgactttaactccctcaactggctcttcatttgggtactttcc

SEQ ID NO: 10615 - DNA, 534 bp, Gossypium hirsutum
  unsure (1)..(534): unsure at all n locations; Clone ID: LIB3828-029-Q6-N6-B3
gctaaaaaaaataaatgaattgatcactcaagtaaccagacaatacatataggaatatatatttgcaaacagaactgtttttttttcatctatattgtaaaacaatgggaaatttgcaggaccagggcttcttataagcaaaaaatatggaacaaggaaaaggattggtttcatctgaaaaaccattggatttcttcaagtgttctaccctttgtctcagggacccagagtgtcacaaatacaatggtgaaagcactcaccaccatgtaaattgtaaaaggttcctccactgctccaatccaaaagcaagttggcagtcattgtaaccacccaagcaaagaaccagttgngaaagtgttgctatgctttccagctagacccttgatgtttattggaagaatctctgacattataacccaaggaatggcacccattccaagagagaaggtaaccaccatggccacaactccaactactgacaagattcccataatgctatagacactagagtcactagatacaacatcctttaaa

SEQ ID NO: 10616 - DNA, 195 bp, Gossypium hirsutum
  Clone ID: LIB3828-029-Q6-N6-B4
aaaaaaaaaatgggctgggggggttttattaatggcgggggacaaaaacgggggggggaacattgatgcttgtttattaaaaaaaggcgggtttaaaaagggggaataaaaaataaaaccggcctaaaccacgggcctacaagggttaggaccatcatttttaggaaaataaaatccccatttccggggccccgg

SEQ ID NO: 10617 - DNA, 509 bp, Gossypium hirsutum
  Clone ID: LIB3828-029-Q6-N6-B5
tttttttttttttttttttttttttgttttttttttttttttttttttttttttttttttttttttttttttttttttttaaattttttatttccaaaaaaaaaaaaataaaaaaatttccacaaaaaaacccaaaacccgggaggggggggggaaccattttaaaaaaagaaaaaaaaaacaaaaaaaataaaaaaaaaaaacccaaactgggaaaaaaaaaaaaaccccccccaaaaaattcccacccaccccccaaaagggaaaaaaaaagaaaaaacaaacccgaaaaaaaaaaaaaaacccttccaaagggcaaaaaaccgtggaaaaacccaaaaaaaccggggacaaaaaaccccccttaaaaaaaaaaaccctggcgggggaaaaaaattgggagaaacccccccccaaaaaagggggaaacacccccccaaaaaaaagaaccccccttcaaaaccccccaaaaaaaaaaaaccccccccccccaaagggaaaccaccccc

SEQ ID NO: 10618 - DNA, 542 bp, Gossypium hirsutum
  Clone ID: LIB3828-029-Q6-N6-B6
gacaaaattggaggttaattaattgcattcaagaaaaccaggtcaatctacaaaacccgattgtacgatgaggaacaagtagtcctagggattcattctataatctgtataaacaaagtaggatcttgaaaagttgtgtgctattgttcaatgtgcggaattgagtctctcttgttacaaaagctttggcagaactttccaatatctcaagtcagaagggtttgtgtgaatggctcgaagaacccattgcaggggactttggcagccctccaccctggatgaactgtcagactcggatgcaatctgtcttgcaagcaaatgcatttgaaaaaacagctctgctggtctcatttctggtggccaagaaaaccattcaaggcgaagatttctctcccactttttcctagaaccaatgcttccttctgcttgggctaacaatgctgagacaatgggtattgggaccgaagaagttatatgagctttactgagactccttatggcactggataaaaattgcgaatcatgatacctccttgcaatct

SEQ ID NO: 10619 - DNA, 536 bp, Gossypium hirsutum
  Clone ID: LIB3828-029-Q6-N6-B7
gactcaaatataattgaattttatttacttcagatgaaatcatttattttgcatttactagattctccctcaacactcaataaggaaaaaaaagatccaaagggggctatggacaaaaattaaaaatgctaaactatcctaaaagttcaataaagtgatagcctccttcaactttggagtggtgtcagaacatacatcttgcaagcatgaggagctacggatgccgtcaatctatcgcgcttattcatggaaacatatttgtgcttccacaagtctctaacaatggctggtgtgttgggagagagtccaaaatccctccacgcagcagttataagagccctcaattcgcttcggttccataacactaccacaaccctgttgtctgataatggccctgcccatacttctaggccatctttggatcgtagtttcctcccttgaactcctagtgagtcttgatttacttcaatcacttctttgttcccaaggatccttagggtcctgttgcttgcagatcgaaggtcgcatccaatgag

SEQ ID NO: 10620 - DNA, 528 bp, Gossypium hirsutum
  Clone ID: LIB3828-029-Q6-N6-B8
ggagcataaaatccgggattacggtaaaatatccaaaatatccatggaacaagtgacaagtataatgaagatctcgatcagaggacgtcgcttaccaatcactaacagttcatctagaacggttttttattcaaaactgcagctaatcctattaaggcaaaccactccttttccaaacagattatggaaatgatgaatgcattcatgagaggcacgagtatgccaattccttctcctcggtcagctccactccggtcaagtccaacttcttcctcgagaattcatcaattgccagcccttggacaattgtccattctccattcttacaagttacagggaaggaatagatgaccccagctggtgcattgtatgaaccatcagagtaaacccccatggaaacccatgtgccctcgggagttccaaggacccaatcacgaatgtgatcacaagcagcactagcagcagatagtgcacttgagagtttcctagctttgatgattgcagcaccacgttgttggacagtggtta

SEQ ID NO: 10621 - DNA, 544 bp, Gossypium hirsutum
  unsure (1)..(544): unsure at all n locations; Clone ID: LIB3828-029-Q6-N6-B9
gcatcagacatcacaaacgtgcatagataaaaataggagattaacccacaaaatcgtccgaaaaaacgagttgcagagatatgaatatatctaaatcataggcttgcaaaggatacatttttttctataattgtaactcggagggtgcaagctctatcttatgtaatagagaattgaagtcttctttaccgatcaaactgcaaaatacgagtaactcgataagagccctgcaaaaccctttgataggcaaccttcaattgcacagggagacttcgaacaacacacaggactactgtgtttagcaacttccatgcaatcatcagatgcatcaggggtaaccaatctgtgtgcaatcaacctacttctcttagaattcaatgagcaattcaggtctggtgtgtccgacaagtgcgaatccgaggactccatttcgtcatcatgacattcgagcaatttcctcttcatcccaggaaatactcttaatccaggcaaagtgtcctcatatgcacacaactggnggctccgaatcaacacagcaacagaa

SEQ ID NO: 10622 - DNA, 540 bp, Gossypium hirsutum
  Clone ID: LIB3828-029-Q6-N6-C1
caacactatcgtcatctccgccattcttggttcattgttttccgacaatatgaacattaaaagaaaaaataataaaagaataaagagaaatggcatatagattaaaaaaaagaagcttgcgagctgcaattgttttgccaaataaaaaaacaagacattacttttgcgcctcttgcactctttgaagaattagaagcacttcctgtgcacaatagaggggccggattcatcgtactccgccttagcaatccacatctgctggaaagtactgagagatgctaagatggagcctccaatccagacactgtatttcctttcaggtggagccaccaccttaattttcatgctgcttggggctaaggcagtgatttccttgctcattctatcagcaattccagggaacatagtagttccaccactgagaacaatgtttccatacaaatccttcctaatgtcgacatcgcacttcatgatagagttgtaggtggtttcatgaatgccagcagcttccattccaatcatggaaggttggaaaaggac

SEQ ID NO: 10623 - DNA, 474 bp, Gossypium hirsutum
  Clone ID: LIB3828-029-Q6-N6-C10
gatcaacggcacagcaaatatattataggcaataaaccatataaatccacaaaatagcacaggttgaacagtagtgcaaatatccatgatagagcttagttactgccgattgctgcttaatatgctaccattgacccattcagggtttcttacaagacaataaccgataagcaaaacaaagcaaagctttgtttcaccagtaggcagtagtcccccaaacctaaccctttaaaacaacccctaatcctaaacctaacgctaatccattattacatttgggaaagaaaacccagagatttaaacgccagtagatccaaatcccccagcacctctagtagtagaatccaaatcatcaacttccaaaacatcaggggtcatgatcttctcaatgatcaactgggcaatcctgtcacccactttcacttcaaaatcaacatcagaatggttgaacaaaaacacccccaggggtcccct

SEQ ID NO: 10624 - DNA, 343 bp, Gossypium hirsutum
  Clone ID: LIB3828-029-Q6-N6-C11
ccaaagccccatttaaattttttcattattcaacacagggttctttcaaaaaataaaaaattagggggaagtataattttcggccacaggggggtttttcaaaccgggggccgggaaaaaaacaaaaaaacaaggggggccccaaccaatgatccaagggccggcaagggtggggcagccaccctggaatctgggcctgatgctggggcggaaccgggagaggggctaggaataaaaccacccgcggaaggggagggagcaggggcattggcagccatgaccaccctaattggggggggagcaacaatgatggggggggaacggacccctgggtccacccggg

SEQ ID NO: 10625 - DNA, 482 bp, Gossypium hirsutum
  Clone ID: LIB3828-029-Q6-N6-C12
aatcaaattatactatacattatatttcaagtttgtgataaatgaagttacattgtagtaaaggcctatatggttttcatctttggccatcatagttatacatttttactttatatcaggccctcttgatcttcaagcgatcgtttccgggctttcaggttgagctcgagactttgaggtaacggaggtgttcttcccctgcggaagagaaccacgagtgccctcaccgttcggcaaagatcgaataccgatgaagcgtcgatctcagcaacaccttcacatccttgccctcctccctgcattaagtcacaatattttgcagcttcattctcatcttcgaatacaagtactccttccctaacatcctccaccagcatctcaaacttagtaccagatctaggctgttcggttttgtttccgaacccagaactccgctttcctcctttagaaaacaataacccgagttccgtttcgacttcact

SEQ ID NO: 10626 - DNA, 533 bp, Gossypium hirsutum
  Clone ID: LIB3828-029-Q6-N6-C2
ataatccacaaaaagaaaactacatttatttaatacgaatcttattattgttacattattatcgcgacatggaacatagaaaaaggacatatatatatataaaaacattaaatttagcagcaaattaattaggaacccctgcacaatgaagtcaagacatggattttctccacttgggaggacgaacaggcttttgtttgatatcaatgggggtttgcctcccaaagttagcctctctttcttcttcaatcttctcaaatacactcacgctgctcttcagcgacggcattatccccagcttcttccacctgaaaaaccctttcttcttatccactagtttctccatttgcatttgtatcgctacgcattggttttggaccctcagcagctcttccttcagcttctttatctccatttgttgagcgttcatttcacgtttcgacatgcaccgaaccggggcttccagtcctgccgggttcggactccgggttccgttgaacgacccactccaatcaacatgtcggttgagcttg

SEQ ID NO: 10627 - DNA, 527 bp, Gossypium hirsutum
  Clone ID: LIB3828-029-Q6-N6-C3
gaaattgaagcaaaggattttattacaaaactggaaaactctaataaaacgattatacaagtctcgggaaaattctactatatattaataggaaaatggatttcaaaatgtaatgaaagaatatttccttaaacaaaaaacaaaatcatggacggttaatcagaacaccgaaagaacctgaaatgctttgcattaaaatgctttgcttgctcttactgtgaagccagttggaggtgaggcctaattggcaaccggattgccagtcttttaagctgtacaaagagatgaccaagaaaaagccagactttcagttactacggaatattcttcgagggtcaagttgtccgctacagtaactggaaggaacagctgaaatctctagccttcctttccactcttcaccaggtttcaaaatgatgggcttctctacacaagcagctgtgacacatagcatgtgtttatattcatcatcaccgaaatcagccatcgcctttgctttcttatcccaggggttccacacgacagca

SEQ ID NO: 10628 - DNA, 562 bp, Gossypium hirsutum
  Clone ID: LIB3828-029-Q6-N6-C4
aaaaaggaatacctcttctcttgcgcttacaacatatatattttttaacatgatacaaattctaaactgatacccctaatttaaaaacctccattgatcttctacaaatgtcaaaaatcccattgtagacagaccactagagacactaaggaaagaaaaaaaaagcctacatgacaaaggtaaaagatgcttagacctaagaaaatacaagaaaattacatgatagttgtgtttttagggactcaaatggcttcccaatcgatttccagtgatgggaacttatctaaactgaagttttcaatttcattgtcttcccatttggaatcagagaaatcaaagaaagtgatatcagattctggtgaagataatgatcctgctaatgatgattcatcaactgatgatgatgatgatgatgatgagttgtcttgtttatgatcgaactcctcggttttgatggggtaatgaaactccgcggccttggggagggtcttcgtcttcactggattgccttgtgcttgtaagctttgacagatagcctggagcttagcatcaaccgaggcat

SEQ ID NO: 10629 - DNA, 546 bp, Gossypium hirsutum
  unsure (1)..(546): unsure at all n locations; Clone ID: LIB3828-029-Q6-N6-C5
cacaaaatactatctcttgtgcttgagaatatatgcaaaaaattccccatcactaatggactagtttccattacaaaagctattgagtggccagtgtcaccaaggtccattggccacttctcgaaacagagcctcgaggtcatcagcattctcttgcttgaataaccttatctctctatcaagtttagtcagtgtatgggttacttccgctagctttgcttcgagtttcagcttttcctcatttgagttggcttgttcgagtttagcttctttgtacctcctcgacttcgtcaagaggttcattaacttgtccaatcgagcacgtaagaagcccactttcatgcctaacccctcaaacgatctcaaagttttgtcccaagtgaggaaactgtcgtggggagttgtaagcttggcagctctaatggcatccgcaatattgatcgtctcggcaatgactccggcaaccagtttacagttaagtccctcgagaagattttcgtgaaggaatgagttttgattacaacanagctcgtagtacttcatctg

SEQ ID NO: 10630 - DNA, 293 bp, Gossypium hirsutum
  Clone ID: LIB3828-029-Q6-N6-C7
ggagaataaaagcatatctttattataatataagcatcataccacattacaaagcaacaatagaattaaaggttgggaatcccccatcaaagagacaaacaagcccacccattatttctatttatcggatgaaattaaaaagcatagagtttaaaaaggggggggggctggataaaccaaaaaaggccttccacaagaagagatttttggatcgcaataatccgcatggaatgcatccttgagcttgcgcagcccgttgttacccccaatccctagtaacagcgatatcaaag

SEQ ID NO: 10631 - DNA, 535 bp, Gossypium hirsutum
  Clone ID: LIB3828-029-Q6-N6-C8
gaaaaacagatttttgtatataatataacccaaagcagcattagcccagcttcttacacaaatactatgtgcatataccaacatagcatatatatatttataaacaagcagtcaaaacttgaatacacaagacactgtattgtacaaaatacccccttcaaaaaaaaaaccaaaaagataagcactgtacactctctttgccattctttttcctttcattctgctgcacccagttctctcacagtgtatatacacgatcgcagaatgggggaaattattcggaaaatttgcagccggtgatcctaacaaacaataaatatactaacggaacatcatatagtatatgtcgctttttgattctagagcttcttggcatgaaaatagagtccatattaattatgtatgagataaaagatggtatgataaaagatgaaattaaaagcaaatgccatcacctaccttattaagtaatttccagacaggtcattgtcaagtaccgacggctttacacgcaccaccatgataaattgtctct

SEQ ID NO: 10632 - DNA, 443 bp, Gossypium hirsutum
  Clone ID: LIB3828-029-Q6-N6-C9
ccaagaaataagttgtcgttaatagcattaatttctacaatagccatatcaggcatcgagtcgtatccatctcgctaatacaaaccatatatcaaaataaatatgcggaaatttcagaaaaataaacataaaacccacaccgatctaattcaaaaagcagcctcctaaccctaaccccaactacagatcaacaaatagccttttcaagatgaagtaaacttggtcacgggcttggtaccttcagaaacggcgtgcttggcaagctcaccaggaagtccaagcctaacagcggtctgaatttccctggaagtgatggtgggtttcttgctgtacctgcgcgagcctagaggcttcttgagcaagcttctcgaagatatcattgatgaaactgttcatgatccccatagctttgctagagatcccgatggcagggtgaacttgct

SEQ ID NO: 10633 - DNA, 551 bp, Gossypium hirsutum
  Clone ID: LIB3828-029-Q6-N6-D1
aaagcaaaaaaaaataataataataataacaaaaaataacaaaaatatccataatttgaacaagtaattcatattagagaatattaaattaaaacaaaaataaaaattcaagtgatcgatttcatcatctggtttttggttgtactgcaaatgatcgtttagcattgtaaaagggctaaactggttgatccaatcctcttgtaagaacagttataagaagccaatttagacaaagagtactagaaaattttaaacattgaactgcccccaccccccaattctgactcccagattttctttatcaatgtttctcggcttttgcctcagatttggccacagatttagtatcatcaccttttacggtgtcttcacctccatcttcaggcaaatcagaggtccagagggtgaggttgtctctcagaagctgcataattagggtgctatctttgtatgattcctcactcaaagtgtccaactccgaaatggcttcatcaaatgcttgcttagccaaatgacatgccctctcaggtgaattcattatctcataataa

SEQ ID NO: 10634 - DNA, 551 bp, Gossypium hirsutum
  Clone ID: LIB3828-029-Q6-N6-D10
cccttaattatattttaaccattcaaatgaaaatgtaatctgttgtatcttgaacaattacattatttaatggctatagtaataaaataaaatggtactaaatttggagcaagataaccatactcccttgaataatagcaagctagatagcatcacaagctactattagataccgataacttaactacaaaattgaaagatagtgatatcacctcgatgcggtttctggaattaaataaacctagggaatgaaaaacatagtctgcagaccaaatgacttgcattcataaaaatgctgtaatattaaataaatgacacaaaattagccattttctgcacgatcataagcattggatttgtgcttaggtgcgaatgtgaaaccatatggaaccttgccaagcagcattttagatatacggatccagtcagctgcacaatcacaagccattagcgtgtcaagatcatatcgtccatagtatgaaggaggtcgacaattcagacgatgggggatgacatcttacagaccaacaggaatatacctacatgcgtag

SEQ ID NO: 10635 - DNA, 389 bp, Gossypium hirsutum
  Clone ID: LIB3828-029-Q6-N6-D11
aaaagggcaaagcacactcagttgtatatgctgagaaatattgttttaaactgaagcaaacaaaaaaccatgaacactcagcgagaactaaggccccccaagcttatttgagtctgatttcacaacctaaattccatgagaagaaacggacaacccccaaaaacagcactaaacgtctatcatcaatacagaaaatttctctgatccacagaccacaagactaaattcttagtatttggagtccttaacatgaaggctctttgcagcaccctcactaatctttgcatcacccttgtatgtacccaagggggcctccgagttagccttgcacctaacaaggaaagcatcttgggctttcttcacgttttcctcctttccaacccaggcct

SEQ ID NO: 10636 - DNA, 496 bp, Gossypium hirsutum
  Clone ID: LIB3828-029-Q6-N6-D12
agaataataatgattcaatttttattataggctaatgccgagcttttagaaaagttgaagtgaaaatacatattatagttctgaccaaggggcaatgtctccagcttcttggctaagctcataatagcctatctcttgaagaacttgagtacactgaggaagagcaaccttcttcttaaacccaagattgttggcaaaccgaagttcaccgctgacgccgtcaagtgtggtgagaaccaccctggatatcctccacatttcggagggatcattgcaatccgggttgggactcctcaccaaggcgacgtcgcagtctgattcctcataatcgccttccactacaatgtgatagtctccacgttcgtcagtcactatttcttggctctggaaggtaaggtgattgtctgtacgattcctgcattccagtttcactactgctccagcgatgggttcgctgagtttggtctcaaactcaacacggcaagtgtcacagtaa

SEQ ID NO: 10637 - DNA, 376 bp, Gossypium hirsutum
  Clone ID: LIB3828-029-Q6-N6-D2
aaaaaggggggccgggggggcaaaaaagggggaaccaaaaagccccggggggggggggtttgggccccaaatgggggaaaaaaaaaaaaaaattcccggggaaaaaaaagggtttaaggcccaggggggggcccccaaaatttttttttttttggggggaaaaaacaaaaaccccactggggggggaaaaaccttttcccggaaaaaaaaaaccccaaaaaaaaaaaaaaggggggggcccaaaggcccattggggggggtttttggatctttgggggggggggggggtaccccccccccccctattgaaaaaaggggaccaaaaatttttcccccccccgggccctttggggggggccaaatttgaacccccccc

SEQ ID NO: 10638 - DNA, 251 bp, Gossypium hirsutum
  Clone ID: LIB3828-029-Q6-N6-D3
ataaaggtcaaggaattcaaatatcaaacccaaattttatattggtcaacaaaacacaacaacccactagggggcattcaaactaaaagggggggagaactaatacaaaactccgaagggccgggaaaaagaaaaaaggagcggagaggggattccgacctgggagggtaaaagccaaaaaaacaaaatttttggggaggtcccttcaacatcatcacttaggtccaaaagcaaagttgctattctttgac

SEQ ID NO: 10639 - DNA, 560 bp, Gossypium hirsutum
  Clone ID: LIB3828-029-Q6-N6-D7
ggaatagaacatcttaactatttcagctcgaatatgcttttgggttacacctttaggacaaggttcagacatgtacttaatgcacaaagaaaattgggactttaaaacaggtttttcaagggggaataaattgtttacaaatacatatgaaaacaagaacaatatacgaaagtgattttaggtactttcaacaaatacatcccattgagtgcaaaacaaatgtctaaggctgagcttcgctctttcttttcttcatggattgccgctgtttgcagcaaccagcaggcattatatcattctatagtttgcacattcaacgtgatgccaattactcttgagctttggtcctgttattatctgagagagaaagtacattcacattgtcataaacccatcagtccacaacttctttctcgctattaacactcgttcttcaccaccagtgagagcatcagttctgggttcaacctcagataaccagccatcccaccgcaatgcagtgataaatttctggatgtaatttatcactgagtgtttatctcttataatgacaaacccat

SEQ ID NO: 10640 - DNA, 370 bp, Gossypium hirsutum
  Clone ID: LIB3828-029-Q6-N6-D8
ggggggggggggggggaaacccaaaaaggattttcgggggggggggccggaaaaaaatttcccccgggggccccggaaaaaaaagggggggggaaaagggggttttcccaaaaaaattttcccccccaaaaaacccagggggcaaaaaaaaaggggggggggccttccccccccccggaaaaaacccccccccccggggaaaaagggggggccccaaaacccccaaaaaaaaagccttttaaaaattggaaaaaaaaatttgggggtatcccccaaaaccgggggggaattttggggggggggggcccccaaaattgggccccgaaaaaaaggggaaaacccggaaaaacggggttaattttaaacgggg

SEQ ID NO: 10641 - DNA, 479 bp, Gossypium hirsutum
  Clone ID: LIB3828-029-Q6-N6-D9
attaatcaaacatgccttttacaagggattttacaatttcataaacgaggaaataaaccccccccccaaaaaaaaaaaacccaaataataaaatgggggtcatttagcattgaattattcaagctttggagcctcgcagggcccaattggtttcactcccaacttggggcatcctacttgttctcaactgagcatcggccatgaaattggcaccacacatcaccccttcactgtcaattcttggcattgccttcattttgctccttggatgctcaaaactcatcaatccttgctcactggggaacatacaccctgggggaaatggggcaaatgatttaccacagctttcttttataagcttcaagttatctgaaacaactactgatccatcagctgctacaccccaataaagattaaccctttcatttgcacccaatgcaacaaatacacttccagctttgctatcatacaccacaaat

SEQ ID NO: 10642 - DNA, 531 bp, Gossypium hirsutum
  Clone ID: LIB3828-029-Q6-N6-E10
gaaagaattaagtttttttattaaaaaatacagaaagtttacactactataaataaccaaaaatatatgtcttgataaagagagagagagagagattttcacactgttttagtttcggctgagagagttgttgtgaccattcatcatcaacaccatcatccatcataattagttcacagtcacacctctcttcaccacttaaaccatcccttttttcaccactttcggaccaaacaaagccaaattctctaagcttggcaaaaaaaccctaaccccactaaaaggtcccccccccccttttcatttttttttgtgaaaatggaggtagccaacactaaaaccaccccatacccacaatctgagtcttcatcagagacacacaaccccaacgaggccacgaccaagtctttaaccctcctcaagagctgcacaatccaccatcatatggtggtttcttacaaagagtgcctcaaaaaccatgctgccagcttgggtggacatgccttggatggttgtggtgagttcatgcct

SEQ ID NO: 10643 - DNA, 540 bp, Gossypium hirsutum
  Clone ID: LIB3828-029-Q6-N6-E11
gactctagaatttaactacctttatgtcatcaagtacacattattgtaacataagcacatcttacactttttgttcaaatatatcaaacataaacaccgaggaaacgaaaaatctaaacattgattacttttacaagctaaggggagaataaatcagatagtagtaaatctataatactaaattatcaagaaaaccacataacgaataaaaaagagaaacggcaatggggtatagagaccacaacattctcattcaaaacataacaatggagacctaacactgactttgccaccattcaagtttaaatatttgccggctcaaagttggggaaactaaagctcaagggctcctgtaattcggggttgatcgggaacaagttacactgtccatgttgtgccatcaactggtccaccagaaccattgctaccatggcttccaccatcggcacagctcgagggacaacacaaggatcatgacgaccgcgagctaacagttcgatctctttcttttctcgagtcactgtatgctgctttttactg

SEQ ID NO: 10644 - DNA, 555 bp, Gossypium hirsutum
  unsure (1)..(555): unsure at all n locations; Clone ID: LIB3828-029-Q6-N6-E12
aaaattcaaaagttagaactcaagttatcataaatattaaagtaaaaataaaaatttagaatcaaaactaaaataaataatacatatngagaaacagactgactagttgaacctgcctatgactatacacattgcaaggtagtaaaaaatacaatgaatacaaaattaaaatgaagcagcatcggactagaaaggaagccaaaagaaagctcgggaaaataacatatgaatgcaccaccaagcttgtcgagcatccaatgcctgggggcactgagcctcttcaagtatttcttcaaccctctagcctgaaagaagaaaactttaaataaatccaaaatttatattgtttaaagcacaagaattttcacattaaaaacaatatatagacccaaatttaaaacaaaggagagtaaacacattaaaaaaactcaattataaaccaattatcaaagaaacccaaaccattttaaaactaccataacatgaaatcaacagcaaacattggccaatcaagtttgacattatcccttttttattagtaaaaatttcaatcat

SEQ ID NO: 10645 - DNA, 547 bp, Gossypium hirsutum
  Clone ID: LIB3828-029-Q6-N6-E2
ggacaaattctagcactagatagaaaaaaaaagaaaaacctattgcttcaatgtctttctactgggagtcactgggaaaaaaacttacacaactattaccttacctatcaaaagttatataggttttcggggatatcacaacgaaaacattgaagtctttattttgtgttcgaccaggaatggatgacttcactccccaaatcctgtggccgtgcatgaaacaagccaacatccccaatgcaagcaacgagctttctctgttctaatcgacatcatcggatgctaaaaccaatccaccactttgctcttggcaaacaattatttcaaaagtagaggtagggctccctatgccatatcgaggactctcaaagtttaggcttaatgttaatgcagaatacaaagaatctctctcttttatcccatcgaagtttatctatcaactcggagaatgttgttgcatattctactgctggttgttgactctctttgaggatcaagtgtccattgaccgtcaacaacaaattttatctcgtataccccgggataa

SEQ ID NO: 10646 - DNA, 525 bp, Gossypium hirsutum
  Clone ID: LIB3828-029-Q6-N6-E3
gccactacttttttccctctatcttacatttattgtaaatataagagttctatgttacaaatcaaaattgcagggagaattgcaaagaaccgcagctagtttctctcacaatctcaattagaaaggaccatctcagctttaagcaattcaaataagaatatgcccaagctttatacattaccttttcttaaggcacccttcagtcattcggttgctttcatcggttcgtgggctttgaaatgaattagtagcttggcaccaggacgcaaatatgcaccctacacttccagcagtggaatgaccagatggaccaatgtgatggttgccgtggcagatcaatatggcagtcagttgttcgaaaacattcactgcaacactggctcaaatacttcaagtccggatggggcggtctgataaacacttcatcaatttgactagcttgtgcacttgatgataattgctttggcggggagacagataacagctgagcttcaatgatgccattcaccttgcgttctttattat

SEQ ID NO: 10647 - DNA, 236 bp, Gossypium hirsutum
  Clone ID: LIB3828-029-Q6-N6-E7
acaaacctaaaaaagggccccccctaaaaaaaaaaaagccggggggggaaacagggccctttttttggcgggtttttacataaaacccgggataaaagcgggggcctgacaaaggggggatttttacagataacggggccctccctaacaaaaaaaaaacccccagggggaaaagggggggaatttaaaaaaaaaaaccccccattttttccctattttttttcccacccctcccg

SEQ ID NO: 10648 - DNA, 453 bp, Gossypium hirsutum
  Clone ID: LIB3828-029-Q6-N6-E8
ggcacaatccagtttccatgaataaaagcaaaagctttcacaagcacaagttaaaacaaatttccttcaaactttttaaactcaacaaatcttctttaaaccctacaatatgtaaccttttttttttcattgtctcacactttcaattcccgtctctcagcaaaaagtttccccgtgacggcctcgttgggaagcaaagcaagccagacgccggtatccgcggcatgctctgccgagacattaccggaccaacttgtcatagcagttctgacccatcccggacaataacaatttatatatatcttttcaccttctggtcgttcagagagttgtttagccattagcatactgtaaagattaacagcaagtttagatacagcgtagtcggtaaatttctgaggccatccacctgattgccatgtatcagcttcaacttgttgtagaaatgttgac

SEQ ID NO: 10649 - DNA, 483 bp, Gossypium hirsutum
  Clone ID: LIB3828-029-Q6-N6-E9
attatgatctttaaaacaatagtgggtgcatcaaacatgtaaattgagtactttatatatttttatttatatagaattaaattaattatacaccagggcatccgacgaataaatgctgccggtgaaaaattgatgggaaaatttgcacccacatcgcatcgaaggcaaggcaccccattgtagttcacgaagagcatgtaataaccaggttgcgcaatgttgccattcatgggagcttgaagaacaatgttgtccgaattcggggctacatctttattaaattccaaaattcccaattgaatcaatctctgattcatgcaaatcccgtgggtcacaaacggcggcgagaagatcgtcacttgaagcttttgtgggtcgattacaccatttccacggatttgcactgagaatatctggccatactttaattggatatcggacttttcggtgatgatctcttgtcggaacatggccaagttaggg

SEQ ID NO: 10650 - DNA, 548 bp, Gossypium hirsutum
  Clone ID: LIB3828-029-Q6-N6-F1
ggaacgaaaaggcacttttttttaacgaacaagaaaagacaagaaaccaaagcaggggaaaacactgatgattctgatgaatcaaatctcctaccacaaaaaaacatattaacagctactgaaatatgctgctttcaggacattaacaaaagacatgaactaggaacagaagactaaggccttttcttttgctttttacttcttctttgctttttactacattacagggctcttgagaagtccatgccacgacgaattgaagccattccaggttcctctttcagaaccaaagacggcaatggaaagcccttgcttcattgatgcaactgtacttgcgttactcatttcttcattatgagatggccccataagttccccgttaaaccccatattttcaaccttccccatgtactcatttccaaacccatagtaaaaattctgcaagctgatctgggttccaaggaaactgcttcttagtgcatcaacaatggcaggattgcgtggtgaagtactactggtacaaacgttaaggctagggtttccaaaat

SEQ ID NO: 10651 - DNA, 415 bp, Gossypium hirsutum
  unsure (1)..(415): unsure at all n locations; Clone ID: LIB3828-029-Q6-N6-F10
cttctatgcttttacctgtggtccaanactactgaaacaatagataacaatattacaacaaaataaaggaatggctgacccacttccttcactgccttttatgtacgcattttgtatggtagtaagtatagtattgacgatgattacgagtaacggttgagtggtggttctgattgtagtgcggtggtggtggtggctctctatagatatctgatctccgatgtgaaattttgtgtttgatttataccttcagtcttcctcagcatagaaagctaaataccaacagggcaagtcgggccgcctgtgccagcatacataccaatggtaccatgtccagacgagaacctgggcatttgacagttgaaagagtttaaggatgcaatctctaaagcattatttgcaggaagtagagttg

SEQ ID NO: 10652 - DNA, 525 bp, Gossypium hirsutum
  Clone ID: LIB3828-029-Q6-N6-F11
aaaaacttagtatttattgtaccaataaaagagtagatatttatcgtctcatacaccgtttttataactagcaaggtccaaattatttcttgttagtctaaacaaatggacatagtaaacaaataccaaaaatctggtgtttatgccagacaaggaaggtagttaagttctattcaaatacaaacttatacaaagccatagctatataaatacttaatacataacatttcaaaccatttcttgttgtgaagaaataggagtagagttttctagtatcagacttgattgtttaggagagactgacatatagtatttgagaataggcttaaccttttcagcactgataataattccccagaacatgaaacgatatataaccaccatgctaaccaagattgcaagatcaacccatttagagtatcccatgtcaacttgccaatagtttctcaagacttcatcaccactaatggtaggaggtcccccagctcgatcgttgttgaaactcaatccttcatattcattttt

SEQ ID NO: 10653 - DNA, 395 bp, Gossypium hirsutum
  Clone ID: LIB3828-029-Q6-N6-F12
gagggggaacctttttcaaaggggaaaaatctagttgcccctaacccaagtaaaatgaaaaaagaagggaaaagaggagggccttcccctaatcaaagggggccccaatcctcccattgaagaaagaccctcttaacccccctttttttttatcacccaaatttcacccaaaacccacttgacaaaacacccccaaaccaacaaatgttaaaaaaaagcccgaaacccttggggaagtacccggaaaaagggggaaaagccggggcccaaaatccctagggggtgcccaaggggagggggcccaaaaaaaacccttcccaactataactttctcttccccaaaagaaacccccaaaaaaagggaaaactttgtgaaagggccttcatttaaaggg

SEQ ID NO: 10654 - DNA, 271 bp, Gossypium hirsutum
  Clone ID: LIB3828-029-Q6-N6-F2
aatcttctcaaaacattctttaaaaaaaatccaatacaccaagaacaaaaaccgcccttaaaaaaccccaaagggggccccacaaaaaccaaaaaggggggaacacccaaaaaaaaaaaacccccaggcccagcccccacaattaggcaccccttttcccgaaccagcagcccccgggggggccggccccccccccaggaggccggcccaaaaccgccggggaattcccccaaaccaccacaaattgcgaggggcccggacccctgggacc

SEQ ID NO: 10655 - DNA, 528 bp, Gossypium hirsutum
  Clone ID: LIB3828-029-Q6-N6-F3
aagaaaaaaaattcatatttgggtatttcattccataatcttaaattaacagagaaacaaaatggacaaattcttaatttcaccaatggataagttatcttagccaatggtttcttcttaactaaatttagtaaattttacccatccaaaagcttttctagtttaagaatcagagatgggccaagtcatgtcattctcgaaaatccagtgacacaccttgatccgacccggacccgaacccaatgccaagaacgctccatgattcgaactccaactggatgtgtccaaatgacagatggcaacaccatgattgatcttctccagggacttcggatccagaatatccgcttcatagacccggacctcggggaccgagtggcaatagtaaagcaaatacgggtacaaactctgatggcaagaaaccgatttcgttactttcccgccgttgattcctttaacgcttccgatctttatgttctcctttgacccttttacgttctccgtcgtacgaaccttcacgttccgccc

SEQ ID NO: 10656 - DNA, 561 bp, Gossypium hirsutum
  Clone ID: LIB3828-029-Q6-N6-F7
gttaaacctctttttttcataactgataactgatttcagtctacatgaaatgatagaagaaacttcaagaaaacctttttcattgtctgcaaagtacaaagaaacttacaaacatatagaagaaacctcaagaaaacctttttctttgtctgcaaagtacaaagaaacttacaaacatactgtcgtcgaaaaaaaccccaatgaaaatctcactaaaaagggatgcatacagaacaaaagcgtcgggtacaacacggctggtgatttccccgaaaattagtggatacacaaagtataaaatactgagacaatcaagtactaccagtagccatcaagaactcaccttcgcataccaagtcagttccaacgtatgctttcccttccatctttgcgattccaaaccgcttttgcagcttaataagtgtcatcctcataaccaaagtatctcctgcaatgactggtttcctaaaccttactttgtcaactccagcaaaaaagaagttttcccgagaacctcccacctcaggttgcagcataactagacctccaacttgggccatc

SEQ ID NO: 10657 - DNA, 573 bp, Gossypium hirsutum
  Clone ID: LIB3828-029-Q6-N6-F8
aggtccaataggtatctaatattgaaatggaaggtttcttgccacaattcacgctaaatattatattcataactgcgaaatagatatttatatttacatgaagacaatttatagcagtggttaaaattttgtttatgattttggattattttaatttttttccctcaaagaacttgcagtcgagagagaatcatcaggtgaaagtgagaaagaagtgtgacattcatattcaagatcctcaaagccccagaattcttcttgttcctcttcttctggcattctccacctctctttatcagtttccccttccataagaacttccaatacctcattcatggtgggacgccaggctgaagaggctcgaatgcagagggatgccgtgaaggcaagtctctttagctgtgaaatatcgtaggaccctccaagccttggatctaccaatttttccatctcttcacgtttcaacagtggttttgcccagcagtgcaagctttggtgagaggcgtcaactggtttcctccctgaaataatctctaacaagaaaactccaaaggcaaacacatctgttttctc

SEQ ID NO: 10658 - DNA, 493 bp, Gossypium hirsutum
  Clone ID: LIB3828-029-Q6-N6-F9
ataaaaaaaggtaactttgatttcactaattaacccgtgttatctgtacaaatgagttgggttttttttcaatgacacgatatctaccgcaccaaatgtagctggcattaggtaaatatatgctcattttgactgaataaaagaatgttgcagcaatgcaatatatgcaatggtatgaactgttgatgttcttcctcaatccaagcaagtaaaccatcagattgagaattaatcatacttttaccggaatcgatttcgcagcatccagatggttcaagcggcacgttccgagaaggtactccggcagctcatcttccgtatttgcctgtatcaaaaatgccatttcgataaccagattgttgaggtaaccaagcacaagattgaccacccctcttgccactgtcgatgacccaatgtcaatcccaagctccaagtagtttttgccatggaaataattcatttccagagcatggccaattagacaagctttctt

SEQ ID NO: 10659 - DNA, 552 bp, Gossypium hirsutum
  Clone ID: LIB3828-029-Q6-N6-G1
actcaaacttttatactttataatattttgaatagctatgactttacttgaaagataagatcgcattccatagttgttgtttcaagactttagagcatgacttctctattaaaaatccaactgaagggaagacttgacgcttgctttgctcttaattgaaatctctcttccaattttctaatttttggagcaagattacatacaaaatcctgagctttacgcccatcagctgaaagtccagttaattccttcacgttccatcgatccaccaagaactccacaatatcagcatagtcggaagcagtgtaaaccccaagtctttgtgcaacagccgagaagtggtcgaaaaggttttcgtcttgcccatcgtacatcaagtaagcaggcatcgtgattttcttcctcatcatgttggcaaaggctcgaacggtttcgtcaggatccacctcaaacagcttgttagtgagtttggtataggctgtctcgtgccgcttttcatccgcggcaatgaaaccacatattttagccaactcagtgtccccatactccttg

SEQ ID NO: 10660 - DNA, 457 bp, Gossypium hirsutum
  Clone ID: LIB3828-029-Q6-N6-G10
aaaaaacaaataataattaagtatatatccttggaatttcctaagatataaaggacaatacataatttcaaaaagtagtgtagtgtacggttgcaatcagggtaaaaatattcctcccatgagaggactaatgttcttctatgagacgagacaacctctctaaactaagttattcaaaatgagaataaaaataatatttgcggtaggcaaggcaaaatttggaatgtaataaataacattgcaatgaatttgatgacccatctgtagttgccatatgattatgccccaccagaaccatacttctttccgaaaacaatcatttggagcttatcatagcctgcaagcacacccgcaccagcaaccgcacgcaggatgttggcaccagctcccttaaacagtgacttaaagccctccttcttaaggatttgcgagaacgcatccatcgagctcttgtact

SEQ ID NO: 10661 - DNA, 518 bp, Gossypium hirsutum
  Clone ID: LIB3828-029-Q6-N6-G11
attcaactgtggcttcaagccttcaacatgcacttccatatatatatagatcaagttcttacataatcccacacgttatagttttttttttatttttctcatgcaattggtgttcaaagtcacaaccgagatgctttcatggaatcagcacaactgatccagttgttctacgattctcgaggtctgcatgtgcctgcgctgcttctgacaaggggtacttgtgattcacccgaacccgcaatacgcctgatgcaacattagcaaacacttcccctgcagtttccagcagctcatcccgagttgacgtgtattgcatcatggaaggcctagtcaagaacaatgatttgggtgcaagtgcagacaacggaaccggatctggtgtaccggatgactgcccaaagcacaccatatagccacggggctttaaacatgccaacgagccctcaaaggtatctttccctacagaatcgtatacaacttccacccccttgccggatgttatctcattgacacgggaa

SEQ ID NO: 10662 - DNA, 556 bp, Gossypium hirsutum
  Clone ID: LIB3828-029-Q6-N6-G12
gcttgttgttgttttttttagaaaaaccaaccagtaaatagctttgtagtgtaattcacggttgccttttgcctggcatcaaacccatgaatcaagtatagttttcaaatagaaattacattttgcaaaattgattatggtggcacaaccatgaagtggggggggggatgcaaccatggcaagttttagagatgaggaagtaatataagattaatgccgaccttggtctatgattccgcgggagcatcctcgagcttttcgatcttttgtcgtttggcatcaagctcgctatcttgatggctgagacacccatttactttctgttgacccaaaagagagatgtgcttgctggtgatttggcgacctgccctaagctttggcccccagtgcctttcaggatttggaaggaatctagcaaccttcttagcttgtgccttgctcagggatgcaacagctcgagcaaagtttgcctaccaaaaagaataagattgcgggtgtaaaaaagaattttcctaccttaaatctttttcaccaatgtttttgtccaataaagcgg

SEQ ID NO: 10663 - DNA, 478 bp, Gossypium hirsutum
  Clone ID: LIB3828-029-Q6-N6-G2
cgaggagaaggcaattttatttaagagaaagtagctacagcacggtagaggaccccaattacgtattaccactagactagactagactagaaagccatgaaatctccctcaatacaataatgacttttaatatgatggcctaataaaataacctgaagctaaacttaaacttgaatttctacgtgccatctgtacatttcctccgatggcactggcaatgtaagtgtcaccaatccgggggctgagtcatagttgaagtgagtgtcggcattgtccacacaacacttaaacggatgctgagatgagtatgcaccaaacctcccacaaccccggactttgaaactgatcgctgctgttggattccggttgttgctgagtgaagttgtcaactccgaggaaacctcgccatcaaagaactgcagtttctcattggatgtcatttgtacttcgaacttctccacggcaccgttgctgttga

SEQ ID NO: 10664 - DNA, 556 bp, Gossypium hirsutum
  Clone ID: LIB3828-029-Q6-N6-G3
aaaaggaatgtgtagaagtcgataagatcctagtattatacaataatacaaagaacaattataaagaaacaaaactggactgaatacctaccaaaatataataatgattttaaaataaaggatgcagaccaaagcgatagataaaaattaattgtttgaaaaaccaactcatcctgcgacatctcagatgcatgaaaatcttcatcctttgaaattgatgcaacaaaatcaaaaggatgacttagaactcgtatgaaccaattctgcaacactgaatccacttataatttcatttttatcttccattcacttactgaaataccttccttaacctatctgcagaaagggctgctctcttattggttggttcaagcaccagagcatagctaaaatcctcaattgcctccttatagtaaccaagcatctctctagcagtgcctcttcgtaaatatgcctttacattctttttatcaaggctgatagctttggtacaatctgtttctgcttggaggaaacttcctagttctagatatgctgcggccctgttgctataata

SEQ ID NO: 10665 - DNA, 180 bp, Gossypium hirsutum
  Clone ID: LIB3828-029-Q6-N6-G7
aacacgttaaaagttaaaaaattatataatacttaaaacacaatcataacatggagaaaatgataccaatatgacataattttttgctataggcagaacacaatttcatttaagataacctaataatttgcaaatactactcattaaacacataaatcatcaattatagtcacctaaaac

SEQ ID NO: 10666 - DNA, 561 bp, Gossypium hirsutum
  Clone ID: LIB3828-029-Q6-N6-G8
acacaagcaagagataaattaagtcatatgtaggcatacattttatagtgttaaaacttcttaagcataatctaaaagcaaagaacaaaacaagttcgctgccgggaaacacgagaaactaaacaaaagaaagcaagttctaaaagctagctgtttttaactctaaaatttacagccaccaccatctgtttggaggtgcaaccaaaaggttctgctggatttgctgcaaggcaagaagcaacttttgagtactacacgctagcttccagatttcttcttcctaaaagcgaacttcacaagccttttgaagacgagatgttgcatagatcagaataacacatttactggagtcgattttattcttgggacacaatacagaaacaaagcaaacgccgtcccgaaaggttactgttcaacgacattaaccagttcatactcgatcagtgacagattgttgtcttccttcacattgaaattagcaggctcagcaacctcaacacgaccccacttgtccacagcaagcctcatcgatcctttaaacatgtcaattttcgcattgcg

SEQ ID NO: 10667 - DNA, 444 bp, Gossypium hirsutum
  Clone ID: LIB3828-029-Q6-N6-G9
aaaaacccaacgggcccctataaaaaaatttaataaaaaggcggcaaccctttcagagagagagaaaggaaaaaaattggggggaatttggaaaaaaaaaaaatctgggggccaaacgggacagggggccccacccccccatttttaaaaaaaaataattaaggggggggggcaaaaaaaattagggggctagggggaaaaggtaaagggggattatgttaaccccttaacccagggggggggggttttaaaacaggggaagccccctaataaaaacggggcccttgaggaccgggggggatcccacgaaataaaaaaaaaattgggggggggggggaatggttccttcatccacggaaaaaaaaaggggaattttggggatggaactgggggggtttataattagggcaaaggggggaccaaaaaaaccgggcccggggggcc

SEQ ID NO: 10668 - DNA, 537 bp, Gossypium hirsutum
  Clone ID: LIB3828-029-Q6-N6-H1
aaatcttaacaaattcaattttatttttgaagcatggagactacaagagagccttttacatctcaaattcaaaaaataaaaaaaaatgaaaaaataattatatttataaaattataatagcaaatgctctagcaagtcaaagcagaaaagctttgaggaaaggataatttacatcttaggttattaaacttaacatcaattttcatataggacacaaatcgttaatttcatcgaattttatcatcatactttttttttattaacaaattaagtaatttatgttaatttcgttaaataactttaatgtcaaagcaagctcggaatgtatatcagaatgaagtttaccgagtcaaaattttccattaaaattacttaatgaaattaacatacagaaattaatttattaataattaaaattgatcgacttaattcgataaaattaaaaatacgtgacgtacatgataattgatgctaaattctgtgacctcaaatgtaaattacccgggtaaggaaaaattcaacccctggaaaatgggt

SEQ ID NO: 10669 - DNA, 489 bp, Gossypium hirsutum
  Clone ID: LIB3828-029-Q6-N6-H10
attagtagaaaaattgtataaattatgaatatacataaggctaatcataattatccaattcatgggaaaaagtccaacttacctaacatatttcctcaagcagcttcgtttccaagttctttttgaagttcaaagtaacccatttctgttagaactttggtacattcgggaagagcttccttttttttaaacccaagattgttggcaaagcgaatttcacccgaaaccccatccaatgtggtgagaaccaccctggctttcctccactcttcggtggggtcattgcaatctgctctgggactcttcactagcattacatcacaatctgattcttcataatcacccgtcacttggattttataatttcctttatcgccagccgttatttctggactttgataagtgatcttttcgtctgtacgattcctacattctaacttcactgttgcaccgggaataggttcactgatagatgtctcaaattcaaca

SEQ ID NO: 10670 - DNA, 569 bp, Gossypium hirsutum
  Clone ID: LIB3828-029-Q6-N6-H11
aatatagtaattggtaaccatgatcagccgaagcaaagctttggacggcatcaaagtgagatctgtttgaagaatagcctatatagatgatgatcatttcatggcttgtcaaagtaattcaatacaaggaaaaaggggtaaaaaagaaaaaacaatttgaaccattgcttaatgccacaaaatgaaattgcttgccggattaataataggagagcttcttaataccttggagctgctgaagaagatataatgagagtacgtgggaattgtaatccggaaatattctattcagaattcaggatgctttcacttgtgagccacaatttcttttggacaataaacacgacgttgtctccttcgtgttctgaatccgaacttgaatcagcagttgctactgcttcccagtgcaaagctgataaatacttccttacgaaatctataactggttgtttgtcctgaatgattatgaaacccctgggacggagaatgcgatccatctcgagtaacaaatcttcagcactgcagcccttcttctcaatatcagaaaagacagtccaagcatggagtaa

SEQ ID NO: 10671 - DNA, 559 bp, Gossypium hirsutum
  Clone ID: LIB3828-029-Q6-N6-H12
acccctcaaaaaagatgcttcatataccattgaagaagatgagacttttgtttatcgactcaactgtaagacactccgtcagataactttgagacatgcataacagaatcataagattcaaatggaaattgctaaacttgttctagacaaagacttggatataacatctaaacaacaaaccaaaatcataccaccccgccaaactattaacatttcacttgaaacaaaagcagaaagcattttaccatctccattattcctgccatttggagatgccaatttagttggcacggcttcgaataacatcaagtcccatctcagtcgggtcagttgcctgcagctctacttgaataccgtccaactctctcttgaacctgtcctttgagcttgcataaatcatcttgcttctcacccttgaggtgtcaggagaccatgcaatgaagaaaatcctgcttttttggcaattctcagcagtcacaaagtcaaaatcatagacagcataccgacattcgtcagcagggaggcttgaagtgaaatcatcatagctttgacttggctc

SEQ ID NO: 10672 - DNA, 558 bp, Gossypium hirsutum
  Clone ID: LIB3828-029-Q6-N6-H2
aagagattgctatatccgattttatcgtgttgaacagcaggatacagtgttctgttcctatgagtatcaaacctatgtttctgtaacttcccagaattttctctatcgtggtttcagaaaatccaaatatgttcgtcccacaatttaaactatcatctttatggacaaatgttagctatagatgctttttacaaatgttgcctccatttctgtgctctccactgcctagcaatatatcgtaaggcaaagccgatatctattaaagctgtttaaactatgactttctccaggttcagagcagtgctaaacctcttctacatgctcatctgtgttgcacgttcaagaagacttctgtattcacgacttcttgaccactcatcaatctcacgagctcgtagaacaggcagtggatgtgaaagttgccgtgtttgggcatttcttatataccacccgattgggcttgaagaagccttttcataagagtgagcttgctccaaaaatgcatcaacatttagctgatcagccattgatgggcagccaccagttaatttcatcaaa

SEQ ID NO: 10673 - DNA, 526 bp, Gossypium hirsutum
  Clone ID: LIB3828-029-Q6-N6-H3
aaaatcataagagcgtattatattttaaattgaatttgcaagaatgaataaaagaatatcgtaccatttgacattttgatatgccataatgtcaatcacacttcttgcaaataaattatttaaacccccttgaacaaaggataatgtatgatttgttacaagacacgaaccagtttgtcatgattcccctttatttcctttaagattaattactgaaagctcttgttcaacgaactctcctgcacatatggatggatatttactagcaaggggtgattccgcaaagtgtccgagaggctttaacacagcatccgaagctatgtgcgcaaacaatgttgaggatactctccataggctacgattttgctctgatgctaactttatagcatcgattgtcctctttgtgacaacaacttcatgcataccagcagtacactcaccagcagtcaaccattctatctgcttcccagtctgaattagaagacatcctataggaactttcacctcaatcttttgcccattcctt

SEQ ID NO: 10674 - DNA, 543 bp, Gossypium hirsutum
  Clone ID: LIB3828-029-Q6-N6-H7
attgcaaatcgaatattgttttgagctatttattcttcataattactctttttgtccaagaggattttatagcaaacccttctgcaacatcattacttcttattttgtataattaataagacgacaaccaactcttcctcgttatttcatcttaatatggtatcatctctctactttggtggactgggttcactgtccataacctcttctatccctttgctctttacagtttcagcctggcaacatcctgatgcgcacctgggctgaccacactcagcacaagtcccaccacaaccctgacggcaacactctccactctcacatcccgactgtcctggcattagtgggatttttgggacttgtgggatctgtgggacttgtgggatctgtgggattagtggaatttgtgggatttgtgggatctgtgggatttgtgggatttctggaattcttgggatttctggaatttgaggaaatggtagaacgaaaccaccaggattacaattaccggaacatccagaagaacaacatttatcaggacca

SEQ ID NO: 10675 - DNA, 461 bp, Gossypium hirsutum
  Clone ID: LIB3828-029-Q6-N6-H8
ggggaacaaaaaaaaaaaaaaaaaaaagggggaaaaaaaaaaaaaggggggggcaaacaaaaaaagggggaaaaaaaaaaaaagcaaagccccaaaaaaaaaaaggcccccaaaaaaaaaaaaaaaaaaaataaaaaaaaaaaaaacgggaaaaaaagacctttaaaaaaaagggaaaaaaaaaaaaggccaaaaaaaaaaaaaataaaggaaagggaaaaaaaaaaaaaaaaaaaaaaaatattttaacccaagggcaaaaaaaaaaaaagggaaaactaaaggggggcaaaccgggtaattggaaaaaaaaaaaaaaacggcccccaaaaaacccccccccgcaaaaagggaaaaaaaccctttttaagggggaacccccaatttggggccctgggaaaaaacaaaaaatttgggggggggggttttgaaaaaggaaaaccccaaaaagggggggaaaa

SEQ ID NO: 10676 - DNA, 534 bp, Gossypium hirsutum
  Clone ID: LIB3828-029-Q6-N6-H9
aaaaaaaaagctttaccataatcaaagggagatcaaatcatacaattgaagaaagatcctcttaacttccttttttttttatcactcaaatttcagccaaaacccagttgacaaatcactctcaaactaacatatgtttaagaagagcctgaaactcttggagaagtaacaggaaagagtggtaaaagctgaggctcagtatctctaggtgttgacataggtgatggatgcaagtaaaagcctttctcagctatagctttctcttcctcagatgaattccctaaagaaggtgaagacttgttgaaagggtcttcatttaatggtgtaaccgggctaagtgctagctttgggaagtcaagcaagcttggagacaagatctctgcattcctcggcgaataaaaagcaccaccaccaccaccaccttcaccgttgttagaaggaaggaaagtgttgatcatgaggttgttcttcaggttactgtttcttctctcataaagcttgaaattttgcttcttgggggagttggttttcatg

SEQ ID NO: 10677 - DNA, 553 bp, Gossypium hirsutum
  unsure (1)..(553): unsure at all n locations; Clone ID: LIB3828-030-Q6-N6-A1
gagattaaaaaacatttgaagacaatttctaaacaaaacaaaactaataacattggtgngaaactcctgagtttctcttccccaacctactttacagccctgcgggtttatcatgtttctgcaaaacacagtagaaaactatagcaccatttatattatttattgccattcaaagcttcaatcatacttcatatatatatactgctttgcatcaattattggtttttcagcacaagtaaacttccaaaagctaaaggtggcctactagatgatagcaatgttaacttaatagaagcttctccgactcgaactcactttccgagccctccccatcggagcaatcttcttctttttctttagcccataagacgatgtagagaccgctgaacatgagtaacattccagcaaggcttcccattgaaatggtctcccctaaagtaataaaagagaggaggactgtgatcactgttccaatggggctaaacattgagactagaaccggtcccctcttcttcattgcccatccattgaagcttagacatgctccacccac

SEQ ID NO: 10678 - DNA, 568 bp, Gossypium hirsutum
  Clone ID: LIB3828-030-Q6-N6-A10
acaacagaagctccatattttattattacagaatatgagtgatcacagcgtagtaagtaggaggcatggtacaattacttttaaacatgaatttttttagttggaagttgaatgaaaaatcaacaagaggaggatcaacccaactttacttttctaaccaatttatgatacaaaaatccaagtcttatgtcatcactagtttattactaatagtcagagcctgcaatattaactgatagaaatgcgaaatctttggcagctgtttttgcaactctgacaaaacaagatccatccaatgactcatttaacattcgcagcctgtagatctctgtggccgtcctccactagcaacatcaatggtttcgggaaggtagatttcttcttcaggctcattcttgagagcatttctggctatgcactcaaaagcagcatcgacattgaatccttcttttgcagaggtctcaaagtaaggtatgtttccttttgaagcacaccatgcctttgctttcttctcagaaaccacgcgactgttaccaccgtcaacatcaaccttgtttcccaacacaac

SEQ ID NO: 10679 - DNA, 540 bp, Gossypium hirsutum
  unsure (1)..(540): unsure at all n locations; Clone ID: LIB3828-030-Q6-N6-A11
aaataaaccataattcattaatataacttaatagcaataaaacatagtacattgcttattcatagttttagaccttttcaaacccataggtatcaaagggcttgaaaattacaccattttctattctcacacacacgtcaagaagatgcagcagcagcctcttgcagctgttttacattagtgatataatcgttcattgcttcctccttcgatttcccttcaacagccttccatgcatcccacttgtacttttccttcatgttgaacattccaggacggctggtgttcactggtccaacagtagcttgcttggatgaccgaccatggagacgacccacaatgattcaagtcatggncgaagttcaaggaaatacaagcagggtcgggactcgagtcccaatcaaccattgccactgatgatnggaggtttcagcgcagtcgaaatggtagggatgaccataaaagaaatccccgaaggtaagcagtaaggtgatcacacaaggtgatgattcattgagatctcccacaaaattttcccaa

SEQ ID NO: 10680 - DNA, 525 bp, Gossypium hirsutum
  unsure (1)..(525): unsure at all n locations; Clone ID: LIB3828-030-Q6-N6-A12
cagcaatcagatcaaagcagttctaacacaatgggtaaaaacagtgacggctgtacaaaatataggaagataaggcaaaacacaaacggtgtaaggagtttaaagatcattctgataacagttttcagttttagtttttgagaggaaagccctacaagacatcaaatatcaatccatcattcttcccctcagcatggctgccgctttcctcacttgcctcacgggccctaagatgaataccttgtccggtgggcccttggcacccccaaaatgaatttccgcattgcaagactccttaattgacaagatggaaaccccttttcttccaatgacacgtcccatcttcccttgcggaacatccagaattgaaagtatttcttcttcaggagcatccccctccaccatcaagttatctggaataggaggaatagatggccaatcggcatagttattatcgttgatgcagaaacatcggcaatatagagctccacgaactgcaaggtgccggnacgcgtgggccgaccc

SEQ ID NO: 10681 - DNA, 527 bp, Gossypium hirsutum
  Clone ID: LIB3828-030-Q6-N6-A2
aacttaaaaaaaaatttataaccgatcaaccaaaccaaattgagccgatgaaatttggtttgattcagaggtcaatacaaaaacagtgacagtcccactcagctacattccctcagctaaagaaaacaataaataaaacaaaaagaaacaaacagctttctaagtggaaaaactgatcaactaaaataaaccagcatattacatactacagtattctttgatcaagttttggttgcttgtttgaatcaaaaatggtattagtccttccatccctctttactcaaccgtcgggaggcaaggcctttggaggagaggccaggtgtgacaggcttcgacggagtcataggcgcttcctcgtcatcccaatcatcaccccagctgttatcccacccgtcgttaacatctcgttctggttctgcttttgccgcaacggatacaggcagctccatgtcgagccttcggtacttcaagctattggatgcaagtatcttgcgccggaaactcatgcacatccaacctgatgctag

SEQ ID NO: 10682 - DNA, 574 bp, Gossypium hirsutum
  Clone ID: LIB3828-030-Q6-N6-A3
gcaaatcgaatattgttttgagctatttattcttcataattactctttttgtccaagaggattttatagcaaacccttctgcaacatcattacttcttattttgtataattaataagacgacaaccaactcttcctcgttatttcatcttaatatggtatcatctctctactttggtggactgggttcactgtccataacctcttctatccctttgctctttacagtttcagcctggcaacatcctgatgcgcacctgggctgaccacactcagcacaagtcccaccacaaccctgacggcaacactctccactctcacatcccgactgtcctggcattagtgggatttttgggacttgtgggatctgtgggacttgtgggatctgtgggattagtggaatttgtgggatttgtgggatctgtgggatttgtgggatttctggaattcttgggatttctggaatttgaggaaatggtagaacgaaaccaccaggattacaattaccggaacatccagaagaacaacatttatcaggaccaccttcaaaaccaaaaccaagagtaccaatttcag

SEQ ID NO: 10683 - DNA, 478 bp, Gossypium hirsutum
  Clone ID: LIB3828-030-Q6-N6-A4
ataaaaaaaagtctatttaaaaaatcaaaccctttaatgggagagttttttgtccaaatgcattgccgggactaaatatttttatccaaacgacctttagatttcggcaaattacaagattctaaaacacgactatatttatccattggtatatacatttctagctcacatatatatatatacagatcgggattacttcaatatcttagccagggatctcaaacatcatgctttttcaaccataacccattttttaaaaggatgtctgactccaaaacatgcttcattctgtcaaagcttaatttcattctcattttctgacatgtcttacgtagggagggatgtatctttatcaagcatgttctttgctatgaaggtttgcctcgaaagttaaccatgtatatggcaactatggggacaatggcaccaaccagttgcaagggtgagaaggtctcgccaaagtacaaaaacccaaaaa

SEQ ID NO: 10684 - DNA, 524 bp, Gossypium hirsutum
  Clone ID: LIB3828-030-Q6-N6-A5
gacaagattaattagacatttcaagtttacaggctgctagtatatcaagtttctacaacagttgaagtataggaaaaatttacattctgcatagcaagtaaatatgaacaacatattaatttaataatggcttctctgcgtccaccccctcttcaatatcacaataaagttcttttcttttagcccataagacgacgtagagaccagtgaacataagcaacattcctgcaaaacttcctaatgaaattgtctcccctaaggtaataaaagagaaaaccactgcaatgactgttccaatggggctgaacattgagacaaaaactggtccccttttcttcattgcccatccattgaagcttacacttgccccgcccattgcacctgccattagagaaaagataatgaggtccttaaagctaacaaagggtgaagcccattgcaaagcatgatcttcaactaactgaacaattgcagtaataatcattccaatgaacgatgttagggcacatagtgacattggcgca

SEQ ID NO: 10685 - DNA, 578 bp, Gossypium hirsutum
  Clone ID: LIB3828-030-Q6-N6-A6
aaagccaagggtcttcactcaagattatggaaaggagttaaaattttacagactatgaccatatatatttatatataaccatgaatcattcttgcaagacaaacgatccctctatccttttctccattggctgtgaaggggcaaaatttagtggtgaaaacataccattgaaactagaggcaggtgcaggcttgaattcataaggaccttccttcactccccaaacctgatttccatcgtcatcataacccctatcccaggtatgtatctcattgttcttcaaaattgtaagttctgaagtgcagaatgctgctccattccatgaatttgggaatccacctggtggagttgaaccttcgtataaacagcgtttccccctctcacagcgtttgagatatatagttgtcagatgttcagcaatatcatcaataacttcttcaggtagtgggcgttgatcccttggacgatcgcagaaattcttgtattcatctgcatctctaattgcgtaagaacttacctcaacatcacatttcaaatcctttggacaaggcttcaccatgaaaaacctctgccgaaaa

SEQ ID NO: 10686 - DNA, 573 bp, Gossypium hirsutum
  unsure (1)..(573): unsure at all n locations; Clone ID: LIB3828-030-Q6-N6-A7
ataataaataattaagaattattaaaactatataaatatgtatatatatanaaaaaatttatcttccaaagcaagggcataggaaaatgatggcaaaattgtaagcttataagatcctagttttttagttctcaagaattcaagatatcccaactcttttgcatgtatgaaggcaatggagcaactatttccaggcttttgagctttgaaagatcatcatccgtaaacgatttcggatttcgcaatacctgagaaacattcggtaagatcatttcccgacaatgaagatgaagacgaaggtgtttttccgaaatgcttccgctatccatattgagtccgaaagggagcatgttttcctttgctaccttctcgtttgagttctttcttaggtctgactcagccagattttgcaaccttctatgagcttgccacccatatttgtagtctccaacaatcggtgttcccagtacctcggcacagtgtactcgaagttggtgctttctaccagtgagaggagacagttctaaccatgtgaacccatgtgttgatgttttaatgacacgatactctgta

SEQ ID NO: 10687 - DNA, 527 bp, Gossypium hirsutum
  unsure (1)..(527): unsure at all n locations; Clone ID: LIB3828-030-Q6-N6-A8
aaccaaatgttngaaaattcgtgtaatagacttatagcaaatggtaaatcaatgtaaaagttcgagaatgaaaaaaagaaaaacgaattagcatgctggtaaatcacaagaaattcaggaagtaatgaaaaagccttagatttgccagaaatggcaaactcttctcaagggtaacaatttggcaggaagggaaggaatgctcattgtagaaagagcatgcatgtctactttattataagaatcatttctctaaaggctgcaaaatggaatgggaattttgtaaacccatttaggaagccgtagattccttcaaatatgcaatgagatcagcacgttcctgtggcttcttcaatccagggaaaaccatttttgttccagggatgtacttcttagggttgagaaggtagtcatacaaagtattctccccccaaatcacagccatgctcttgttagcagcggagtatgaataaccaggagcggtacccgattgccttccgaacagaccgttcagattgggtccttgtttg

SEQ ID NO: 10688 - DNA, 580 bp, Gossypium hirsutum
  Clone ID: LIB3828-030-Q6-N6-A9
aaggtaaacatgtaatttttattcatataatatcattacataggataaaacacagataaaatagtttaggtttatttatgaggccttaacagggccagacatcacaatcattcacataaaatccagaaacctcattttcataggagagcttagaaaccaccccgaagacgcaagacaaggtggagagtggattccttctgaatattgtaatcagccaaagtccttccatcttccaattgtttcccagcgaaaatcaacctttgctgatctggtggaattccttctttgtcctgaatcttcgccttaacattgtcgatcgtatcggaactctccacctccaaagttatggttttcccagtcaacgtcttgacgaaaatctgcatcccaccacgaagcctcaataccaaatggagggtggactccttctggatgttgtaatcggccaaggtgcgaccgtcctcgagttgtttcccggcaaatatgagcctttgctggtctggtgggatgccttccttgtcttggatctttgccttgacgttgtcaatggtgtcagagctttcgacttccaaattatggtctt

SEQ ID NO: 10689 - DNA, 456 bp, Gossypium hirsutum
  Clone ID: LIB3828-030-Q6-N6-B1
caaaccacacatttcattattcattatatgttattttcaaacaaacatttatgttctaaatttatgatttccatagtcacgcgtgcgaaaaaaatgtgattatctattactaggagagaagaagagaatagggtgggatcgcataaaagaaaatttactgacaatcattcagaaaagataccaaatgtactatgcttgggtatcaaatattgtacgtaaaaaagggaggacaaatgcatataaaaatagcatttttagcaaggacggccgattgtgcagcttagtggtccggcatactttgtgagctcggggaccatttgaccaggtttgaaaggcatcattttgtcggcgccaaattgcttgctggcacttggattacctgatggtgtaaaaaagcaccgttctcgaagtggtcaccttgtgatacccaattccaattcttccacttgtcccggc

SEQ ID NO: 10690 - DNA, 482 bp, Gossypium hirsutum
  Clone ID: LIB3828-030-Q6-N6-B10
atacccgggggctacaagttttattataccagtcagcactaaaatcacaacacggtatcacagatgacggaaaagcaatagcaacacaacactgcagctctgctgacacaagcacaaaaacaagttttattgttactaccaaagccagtaacaccaaactagacaagttattattgcttaagaacaaagtaaagatcccctaagtagtgaggataggtggcagataatcagatttggcaccaagaacacgagcctttgtgtcagggaagaactcggcgccaggcaattcagtgacagatccatcactagaaacaccgatggggtagcggagtaggtgtccaggcaagtctcgctcaagtgactcacttgaatagagatcccaatatttgtcagcaacctgattcaccttcctgacacactcttcactttctggtgcgaggaatgtgtcatcaagcatgccaaggtgctcataccacagtgac

SEQ ID NO: 10691 - DNA, 546 bp, Gossypium hirsutum
  unsure (1)..(546): unsure at all n locations; Clone ID: LIB3828-030-Q6-N6-B11
tagaagaaaagagcacctcatcatacttgnaaaattttcattccattacaattatttggtttttaagccacaagatggcaatctcagatcccaacccatatttattatggttttcatcatttggaattacaacagagaattcaaacttggtgatcaaagttaccaggaaaacagtttttaaagacggtaaatgatccaagggaagaagacaaagagccccagccgccaccaccgggtgttaaaatctgaagtatttccccagcctgcatctccactgtgtttttgcctccaaggtagattcgtcttttatcttttgttataagatagttggctccacaagctccatttgctcctccttttagccctctaggtgcatgtactcgcctctcagaaagaatgctaaccacaactgggcgcctgaactcaatttccctcacgagtccattaccccctttgcgatgtcctgctcctccactattttctctcagtccaaatttgtgcaagaatactggatacctctgctcgaaaattcaggatcggtcattc

SEQ ID NO: 10692 - DNA, 533 bp, Gossypium hirsutum
  Clone ID: LIB3828-030-Q6-N6-B12
atgaaagcaaattaagaaaatgatatgattagagactgaaatctaccaaaacgcaaaaaaacagcatgatttcataataaataattccgcagcttcaacgaaaatcataaaagtttcgagccaccttggaaaaccaaagggggcaccctcttgacaatgacaagatacagtagtaaattaaacaaaaccagataacgctagagaccacctgccatagctatgccaccgtctgtcaagcacccaatactgagaacagttaccagacaacaatggcaccacactataacatgcaaaaccaagcaaaagaccaactatatcataaatgataaagtctatcaaactattattatcataataaaatactccatctgcggaaacttcattaggtttagccagcacggttcacttcttcttagcagcagacttggtgaccttggcaccggttgggtccttcttctcaacattcttgataacaccaacagccacggtctgacgcatgtccctcacagcaaaacgacccaagggtgggtact

SEQ ID NO: 10693 - DNA, 533 bp, Gossypium hirsutum
  Clone ID: LIB3828-030-Q6-N6-B2
gccaaaaaaagaaaggaatataatgaaaattgctaaatccgaaaacagcaacagctaatgaatgacttacatacttgtgctttacattggtaaatgggaataagaacttgttaatgttgaggtaatgctggtcttttttccaacatctcgtaatgaacaacgaaattatccttgcggactgtttcaaatgatatcggatcaaaacagtgataagaacctctctcgtacgtgttcgtcttaactaatggctcgacattgggaacccttatgaaccaacaccggtgctccttgtggtaaaaccagcctctattgtaaagttcatttgcagcgtataattgagcttcatcttttggcatgctgtaaaatatatagaacaatgtgtccacggtgaacttcgaaaaataaccttggtgtaaaggaggtggttgcttagcgtaataacattgtggcacagtgaactccgggtcacccttagctggttcatcagaccacggagaaccaaatgtcttgtaaagattttctgatgaattcaa

SEQ ID NO: 10694 - DNA, 522 bp, Gossypium hirsutum
  Clone ID: LIB3828-030-Q6-N6-B3
gaaaaaaaaaacttcattccatttttatgattttaagagaacagtaacaacatcgatcaaaaagggagaacccaaaccaaacagtaataggagaaacttaaaattactaactactaaacccaaaccaaacccataacaatataggcccaagcccactttgaaacctaaacttaagacctccagctgccttcagatgcaccgccgccttttgagtaacgagatccgccgtcaccatatcctccttcacggggtccacctccgtacccaccaccaccataccctccaccatttccgtatccaccttcacggggtccgccaccatatcctccttggcgaccaccatatccgccgccgcctccaccgggggtgtaaccaccgtttcctcctccaaatcctccgccaccgcctccacttttgcgcgattgggcttcgttgacggtgatgttccttccatcaagattttgaccgttcattccttcgatcgcgtccctaatagctttctcgtcacggaaagtaacgaat

SEQ ID NO: 10695 - DNA, 439 bp, Gossypium hirsutum
  Clone ID: LIB3828-030-Q6-N6-B4
atggcaaaagatttccagtgataaactgatacagagtaagaggtttaaaggacctttatttaattcaaaaggaagtgctaagtttaaatggtggcattcgatttggagctcttggaccggctctcgttgagtcgtctcatccatttcttctgcgacgaggttaaagcagtgaacgaaggagatgaagctcttctcagaggttgtccagccaccggaagctccaccgggagtgctgcggcggtactagtaaatgcgtttagaaccagaaatgcaagtattggagatagatccaatgttcctcccaatggtggaattatcccccggaatatgttcaggtacggatcacatatagtactgaggggactaacaatggctggaggtgagttagggaaccaagtcaaaaccagcctaacgattaacaacgtgttgtaaatgttta

SEQ ID NO: 10696 - DNA, 539 bp, Gossypium hirsutum
  Clone ID: LIB3828-030-Q6-N6-B5
gtcttaagcatttatctataaatttaagcaaccaaaacaaacatccaaaaattcagaaactcagtcacagctaatttaaatccatataataaaaccttaattcaaaacaagcataaccatatcatttcactaagaacaacatcaaaacgaaccatgacagttcttcaacggtaactcttctggaaccttgccctggcacctcttccaccaaacttcttaggctcgcacctcctgggatcagcgaccagcaaagtcctatcgtacccgaccaaaatatccttaatctccttcttgctctgctcatcaacgtacttctggtaaaaagcgacaagggctttagcgatgctttgacggatagcgtagatctgagaagtgtgacctccacctttgactcggatcctcatgtcaacgccggcaaaacgctgacggccgaggagaaggattggctcgacggccttgaaacggaggatctcgggctcgacaagctcaatgggacaaccattgatcttgatcaaaccacggcctctcttgcagtgtgt

SEQ ID NO: 10697 - DNA, 536 bp, Gossypium hirsutum
  unsure (1)..(536): unsure at all n locations; Clone ID: LIB3828-030-Q6-N6-B6
aaaatgaaaagtgggtaaatttgttattacagaacaatatcaaatgaaagagcaggtaaagaaactaatagttccttaaactttctattccgacaaattattttctcttaccatatcaaattcttgaacaagatcctaggaaccctcccaattctaaatctatattaatataatccccattcaaaaagccagaaggagcatgaatccagaaagcaaagccaaataccccacctggaaattccggctcgcaccaccaaagttctggtcaatagggtacaggctccctggtggaccagttgtgtatataaagnatggtgggggagggcatggcggaggtggtggaggaggagttttgtgtacatgacggggtacacttgacgccttgatcaccactctcatcaagctcccttgatttcaagccgttgatggggtatgcaaaggtggcgattaccaagaatatggttactgctattgccggcggattgaaacgggtcgatttcgccgacatggtggcgaactgaagatgaggaaattaa

SEQ ID NO: 10698 - DNA, 390 bp, Gossypium hirsutum
  Clone ID: LIB3828-030-Q6-N6-B7
ccgccggggctcaaaaaagggtgagcttgtttgaactttgttaacggctttttaataaaaaaaaacttttttccctcaaaaaaaaaaaaaaaaaaaaagggggggccgcccttttttttttttttttggcttggaaccggggtggggccccatttttttttaatcggaagtttgagcaatcaaatcttacctctgggatgcaaagggttttcctatctccccctaaaatatttaatcaaaaaaataaaacaccattgccttgaaaggtatttaaaaatttgcatgattagcccgaaccagcaaaaatccaggattttatttgacgcaatcaattagcccagcattactccacgtttttgaaaagggacaacgcttttaaaccccattttt

SEQ ID NO: 10699 - DNA, 533 bp, Gossypium hirsutum
  Clone ID: LIB3828-030-Q6-N6-B8
gaggagaaaaacaaatctgaaattaaagaaacttggtttgcaccttaaatgtaacactggcaaatagtagcaaacaacacaaacattggaaaacacgaaacacatgatatgtccaaggaaaccatagttgagctctaagagctcaatcaaatataaattaaagcaacaaacaatcaactgatagaagcttaacaaactgggaatcgaataacctgaaacagattccttcttccccaaggtataagccattgattcaatgtgaccgaaatcttccctcaaaactgatcttgaatccatcattaacacctcgttatcgactgatagagggggttaagtttggcttttttttctccactcttagtggatcaatggtgagaatcagaggaagcagaggacagcttattggcaatgttgtcatgctcctcctcttggccctgaattcgtgacggaacgcgaaaaccggagtatacaccagatgtggtgaaatcccatgctagataaagcagcttgttgatggatgttttgtgggattt

SEQ ID NO: 10700 - DNA, 544 bp, Gossypium hirsutum
  Clone ID: LIB3828-030-Q6-N6-B9
acctaaagtgtgcatatttatttgtattggtaaacactattttagcatattaccacatggaaaaccaaacaaattcctgtccaataataaagcgcatgtataatccatcggaacatttgattccaagtgctgattagagaagaaaaaaagtaaaaggaacacttctacaacctagattgcatctataagaaactactagatgaagtacagagtacatatcctatgagcttgactcgtcactgctgtccctcccctgactcaggctttagaggtgcttccttgatctcatctccagcttcatccgtgatgtcagatgtccagagggtcagattgtcccggagaagttgcatgatcaatgtactatccttgtaagattcctcacccaaagtatccaactctgaaattgcatcatcaaaagcctgttttgcaagattgcaggcacgatcaggtgagttgaggatttcgtagtagaaaacagagaagttaagagcaagcccgagtctaattgggtgagtaggagcaagttcaacaatagcaatatcct

SEQ ID NO: 10701 - DNA, 544 bp, Gossypium hirsutum
  Clone ID: LIB3828-030-Q6-N6-C1
ggtgaataaattcataaatgagatcttattctaacagaatagataccaccttaaattttaatttaatcaattattgcatttaagtagctagatttaagaagtcgtcaagaatagaacgacgtccaacgcattgatacatagttgtcgaaacatgatatttctatgaggcaactccaattgattcccaggcattttcctcaacccgttgtcgcaagtgatcgcgtcatcaatggccgattccaaaaacatttttgtatccttgtagttcttcgacaccagcgacgataccgcgccatcgagctgctgtgttgccgatatgtaattatcttcacaatcctggaagttctgctccactgccggctccagtttctgtgtgtcgagtgacttcttgatatagaaagatgtgttcgtgccattattcgacgccaccttgatcgatatcaaggcgagcgtggctaagtcagcacttttgctggcatgttctgccatgaggcttgagacgcaaaggtctttcgccttcaccttctcgcaagcgtgcgcaact

SEQ ID NO: 10702 - DNA, 512 bp, Gossypium hirsutum
  unsure (1)..(512): unsure at all n locations; Clone ID: LIB3828-030-Q6-N6-C10
aattgaaatgcaataatctgaattaagaactgtagaagctaactctcaaagtctaatacaatacataaaaccataaatttcttattgttcatctaagctcagtaaatatgataaaatataactatgagatatgtagtaacatatataaatgtatctccctccaacctgcaaaataacacaatgatgtgttttcacttggaagcaccattaggaatcttggcggatatatcgcccgatgggttcagttcatcccaagcttcaatccatgtcaccatagcatccgccagcttattgaagtagtcatcgaccttgccgagtttcgccttcacttgcttggagatctcgatgtagcatttctgtacggtggtgcagtccttcggaagggcaacggattggaagaaaggaatcaactcttcttgccagnaaattcctttgtattctttcttaagggtcacaaacgggttgctcgctttgctgtgccaaatgtagggaagtccggtcttcactcccca

SEQ ID NO: 10703 - DNA, 508 bp, Gossypium hirsutum
  Clone ID: LIB3828-030-Q6-N6-C11
ctgtaaattctctgtatcaaactccactataccacaggtatattagagggggaacagttgaaaagaagtgatgtgaaggggcaaacgtgatgcctctatacacaaccaaaagaaaaaattaaaaaaaaactttattaaaccgagtatgtttacagactttaaacgcctatccaaagtcttctaatccttgtgcgagtatccatcggccggaaggaactttgcatatggatcagctttggctctgttcctatgatcatagtattccacagctgcagcaccggctaatgctgccaacgtaagggcttgcgcatgcaacctagcgtgaataattttaacgctggttttcataccaggttgagaccaattgtaggcaatagaacccgcaataccgctcagccacagacacccaacagttctaagcttgtgatcaacgacccattcccttattgattcaatcttgctcttaggttccaccatttttcacagaatttaagcttttttattcttt

SEQ ID NO: 10704 - DNA, 579 bp, Gossypium hirsutum
  Clone ID: LIB3828-030-Q6-N6-C12
agtagtataaaattagaaacaaccattaatccgaatccgatgagagttgaaataccaatgctggttcatacagtttatatagattaccaaatacccaaggaagcatattttctcttagcaaaagccaagtctagcattatacatgaggcaagcagccaacccagccggcatttaccagcaatttcatggaaagtcttagttactattttttaataacagactagaccagaggtgggtattgcttggcttgctggcgaacccttctcttatattcattagcatcctggatgaagaggtgatacccttcagtttgagcaggatcagcagggtttggagcatccagaagatcttggattccaataagaatctgcttcacagttatggctggtctccaaccactatcctcatttaggattgaaaggcaaacagtaccagatggataaacatttgggtggaaaaagccctggggaaatttacactttggaggcttgctgggataatcttcactgaaatggagcgtgagcggggaagtagccaccctcccaatcagttcctgctttaccagggatcgtgcaatgc

SEQ ID NO: 10705 - DNA, 553 bp, Gossypium hirsutum
  Clone ID: LIB3828-030-Q6-N6-C2
acaaaaaagccatcttttatttcacagttatcaatctaattcaacatcttacatatagttcaatatctgaaaacaaataaagctacagtttggacactcttagaaaaagtgaatacacatacacacatacatacataagtatacacattctatgatagttttggtgtggatgaagcatgaaaaaagaaaggcatcaaatttaaagatttgatcaccttggtagaggaattatgtcagaatcacaattcaatgatgcgatggccatcatgtctctcgattcatcttcatcgactccccttgttcggtttatctcggctaccaaacactcgcttaattcggtcacgacgtggttcatagttggcctttttgtggaagccggagataaacaagccattgccacttcgattgctctccatacagaatttatctcgaaatctcctttcaacctcgaatccacgatgttctcaatgtctccattcgacaacatcgaactgacccaacgacttatgtgagtaggctcatctatggttcttgctattaccggcctgttcgt

SEQ ID NO: 10706 - DNA, 511 bp, Gossypium hirsutum
  Clone ID: LIB3828-030-Q6-N6-C3
catgaaacaagatactcaaatatttgaacttaaataaagctccaataccagagttaagatataaaattaagaactaagcgccacaattgtcaacaaaatgactcaactggtttgtagccaacacataaacgaacatcataccaaagttgaacataacgtagtcagcagctgctcaactctcagtttgctccctcaacctcctaatagtactcctcaccgtcacagcgctggcagtgttcaaagtataagcaccaccagctttaactttcccgcaatccttgcagccccagattcctacagcctttctcttcactgcatactttccacagaactcgcagaagtacttgctgtgttgactcacctccatcttcttaatttgcttcctcaaactggcaccataacgggtaccatattttccaacaattccggccttcttcgttctctttgtcatggtcgctgggctgagaggatctgcgcctgtctggtccggaaggtgaggagcggctcttcg

SEQ ID NO: 10707 - DNA, 258 bp, Gossypium hirsutum
  Clone ID: LIB3828-030-Q6-N6-C4
agagtgagaaagaggcagagcaaccttgcatattcaagaagctaaataagcaactacctgaggacagcgtacatcaaacattaagctttttcagcttcaccaacgacagattattcagttgtaagaagaggaaaaaatgacgacttggatgaggcttgaacattgctccaaacaaaagttgccatcataagaagcgggggtttaattcccacgcgttcgaccacgcgttcgaccacacgtgcgtagtacgctgggttg

SEQ ID NO: 10708 - DNA, 556 bp, Gossypium hirsutum
  Clone ID: LIB3828-030-Q6-N6-C5
catctccattggaaacctcaatcttctccaggttgcctcttccctatggctgtcattggatacggcgttgttcgccatcaatgcttgccgctttatcttgctgaccatcttcttgtaattagtgacaaaccgatctaactcccacaacgtctcggtatccattgcctcaatgtcgagttcgatctcatctccatcttgcctcaaatgcccattccttttccttatgatctgaaccacattatccatcttctcttgtggtaagctctgtaatccaatccccaacttttgcttctcttccatgctcatttccctcttgttcggatccttagcctttggcttcggctgcttcaatgacttcacaggtggtggccttacaggtgaaggcacccttgccggcgcctgcaagtgcatctgtggtggtggtacattcgggttcgaaacaaagcccgatacccctccaattctatcaattctatcagatctcgacacaaaattagccgaatcatccctatcgacaattatcctctcactatctctttccctatctttcttcaac

SEQ ID NO: 10709 - DNA, 579 bp, Gossypium hirsutum
  Clone ID: LIB3828-030-Q6-N6-C6
aaattgtaacaatcagctaaatcatcattatcaactttcatcactacataatgtacaaaataatttcgtgacatttttacaacatctagaattgcaatactttgttttaaaattgccaacaataaggtgaaaaaagaattgctctacaacctatagaagaaacagtgaatcccaacagccattcaggattgtgacagcaagtgttaaatttgaagcaaaacggagcactgtgccaaccagaacgaggcagccagttttcaaggcagaggcataggaggtttccacttcgcaaattcaacaagattcctattcactacggatccattatgcagccaaaatgtttcagctgattggtgaaattgcctcactttcctctgaagctcccacattaacgctcgcattgtagaacatggctccgagtctggagcataaacccacaaacatcttacttgcctgccacgacctattatctgctctatgacctcatctggtatcgaagccaggtaatccagaagctcaggccctattgatgtggatggccatttgattgatatctctgtgtagtcaattacattttga

SEQ ID NO: 10710 - DNA, 538 bp, Gossypium hirsutum
  unsure (1)..(538): unsure at all n locations; Clone ID: LIB3828-030-Q6-N6-C7
aatattatatcatatatgatttaatgataaaaatcataaaactttcttgaaaaccatggaccaaaaaataactaaacaataaaattctagaaattataaataaaacagaacagaataaatacctatgatgtaattgttctataattgacactagccacaacaggaaaccgaagtgtaaaaggcatagaaaaagaatatatcacacagttcaaaagcaagcgcaaagatgtgcttttagttagcagccaaatcttcatactgccatgggttgaattcagtggacttaatgtcaatctcctcactgctactcgagccatctatggcagctcggtgttcggtatacttgccgttgtattgataaacttccaagtcaccccaaggtgtagcagcaacttcgttggcgaagtcaaaccatttaggcgtgaatttatggcccttttcctccctgtttttcttttcagctctctgtatttcctccaaactgctcttttcaaagcctgccttanagaggtcaccctgctctagtgcatatctgtcg

SEQ ID NO: 10711 - DNA, 443 bp, Gossypium hirsutum
  Clone ID: LIB3828-030-Q6-N6-C8
caaatgtaatttagaaccaaagtccatcctggtaccaaggggcaacaaccggacagggcaaaccacgcgggcgcgggggcccaccccccaaacccggaccgggcgcggcaggcgccccccctaacccgaggggggggcccccgggggcggggcgggggccgggccaaagggggggccggggggaaatgggaacccgggcccaaccccacacaaaaagcgaaccggaagcggaaagggaaaggcccgggaagccaaaagaggggccaaacgcaaaaggacgggggggcccccagggaccccgtcccaaaaggaaaaccggcggggccaccaacggaaaggaaaaggccaacccggggggggaggccggtgggggaatgggggccagggggggttcgcgccgcaccagggggaccggcaacagggggccgccctacaccccccgg

SEQ ID NO: 10712 - DNA, 554 bp, Gossypium hirsutum
  Clone ID: LIB3828-030-Q6-N6-C9
gagataggaaaactgatatactgactttaaatgcaaattacatccaataatacaataaaatcgcgattaacagacccacaattttatttaaatataaggtggaagagggattattttatactattattaggggacattccaatcaaaggaatcgtagtttgtgttgtagtagtccaagtatcaaaagcattgatctctatcatggtatttttgggctgttaaatgcaggtttcatgaatatttcagagtttgatagcaccaaaagttgtcaggattggttgcctggtgataacttgcgttgggtgtaattgccctataacttgcgggtaaatggtaaagctgtgattagtcagttatcttcttgctcagtctaatgcagctatgactgcatcaatgacttcttgagtagtactagttcctccaaggtcctttgtacggtacttgccatctgatataacccgttccacagcagtttccaatcgatctgcaaatgagggaaactgcagatgtcttaacatcatagcagacgacagaagcagggccacagggtttgc

SEQ ID NO: 10713 - DNA, 450 bp, Gossypium hirsutum
  Clone ID: LIB3828-030-Q6-N6-D1
cttgcaaatcccttacaacctggtttctgcttggatgacacaataagaagagtttacatccttcaaaccatacaacatacttattttaaaacgtaaaacacaaaaaatgccaacggccattgatatgcaacttgcaaaaaccccttacagtggcaaaaatatcccaacactcaacttggttgcatccaccgattcccttcggtttaagattggataaatggacccggtcccttttgtgatgaacggcagcagtttcttccttccccgccttttcaaatgaatctacagtgtttccttcaccattggacggtttaccaacctaagggtttttgtttactatcgacggttgcttcccaccaaaaatgagctacaaaaaaatgctgagactttcaccacatttgaaaccaagacaccattgcggagggtagaatgggtcttagcatgctaaat

SEQ ID NO: 10714 - DNA, 548 bp, Gossypium hirsutum
  Clone ID: LIB3828-030-Q6-N6-D10
acaacatctataagaagttgctttttcttttttttcgttttaaccctctctttgtacttttttatttattgttctaaaaagaagctatccaagtttttctaagcggctgatggtgccgtcacgtctttaacttggccaacttctgagaattctgccgccattaacaacggttgcaaattcgccggttctgccttcccttcactattacttggttttttataggtggtgaggttgggttcgaagatgaacatgcttgcgttgaagtatagggaagggggttgttgacccatctcgtcaggtcatttgatattgtcgggacattgttgacagtaatcgaagttgtattgtggggtgtggcttcttgtttgttctcacaaaaacagtccatcactgcgtagaaatgcccgtttcgcaaatcaaataagtgatctatgttgtcatataattgtatgtcgccgtccaggtatagcattttactatactccacgaactcccaaagacagagcttggaatagttaatgacgtaataagccatggcgaactgagtc

SEQ ID NO: 10715 - DNA, 376 bp, Gossypium hirsutum
  Clone ID: LIB3828-030-Q6-N6-D12
ggcacaatatcagactaattgttgatttgataaattttgtactaggaaggaaaaatgatgaaacaaaatgtaaaggggattcaaattaaaataatttttttttacaaaatataaacaattatagaattcatgtcatttatagattatttaaaattaattcttgttctcaaaatcaaccatatcaacaccaatgtttatactgttgaaaatcatcttgccaagtaacgaatgcagttctggtattggggagttaattttggcttcttcgaacgcatcttcgcactggcttatatgatccacattagagcttaagtccatgtttagctcatcagcgtcatgtttggagatagcatcaaggattgcttgtttgtttttg

SEQ ID NO: 10716 - DNA, 548 bp, Gossypium hirsutum
  Clone ID: LIB3828-030-Q6-N6-D2
ggagaaatcatacaagatagttatatatatatatattaatgtgataattccaagaaacatcttccaaatttaagcttagaaacatctccatcatcaactcccttactgttaacaaaaacaattaagaaagagtgcatatagcctcatttgcaattagaaaagcttcaacttcaaaaattaataaccagtgaaatacttaagaaacttttagcaatgcttcgatggttcataaaccgagaggcatgatctaagaacaagtaactggagggaatcaaggggatagcggaaccgagcaacttctccatacaaaaataaccagagaagtaaaatcgtaccgtgaagattggcgatttcactcttgtttctcttcctcgcgtttgggagcttctttgatctcgttggttgcattgtcctgcatatctgaagtccataaggtgagattatcacgaaggagttgcattatcaaagtgctgtccttgtatgaatcctctccaagagtatccagctcggagatggcttcatcaaaagcctgtttggcaagactgcaa

SEQ ID NO: 10717 - DNA, 459 bp, Gossypium hirsutum
  Clone ID: LIB3828-030-Q6-N6-D3
aggaaagctagattctatgattgaccaaaatataaagggcacatttagaaaatttcaaaaacccacgataactggtcacatccatttacccagcttaattaaattcccaaaacatggctataatttagtataaaatgcatactggtctgcccaaaactgacttgcctcacaagcttcgaaagggagtcttcatctcaagatgacccaacagcattggcctttccataaataccccgaaattcgcggggggcagcttgatatgatgctttccaaaagccaaagttcttttgattgatttgaaaccccgtcacattttgaattacatcaaaaagcctctcctggggaggggtcttgagctcttgaacaacaacaaaaaagggctttccattctcaaaggaaatatgaatgttggggggtttggtcttgcaattagcatggggctcaaactcatatgccttc

SEQ ID NO: 10718 - DNA, 381 bp, Gossypium hirsutum
  Clone ID: LIB3828-030-Q6-N6-D4
agcaaaaaaaacatatatattagcatgtacatgcattaattacatatggctacaaaacaagattcaaggaactttaggatattggaaatcaaatattgttttgagctattgattcttcataattactctttttatccaacaggattttatagcaagcccttctgcaacatcattacttcttattttggataattaatacgacgacaaccaactcttcctcattatttcatcttaaaaagggatcatctccctactttgggggactgggttcactgtccataacctcttctatccctttgctctttacaggttaagcctggcaacattctgaagcgcacctgggctgaccacacttaggaaaagtcccaccagaacccttta

SEQ ID NO: 10719 - DNA, 570 bp, Gossypium hirsutum
  Clone ID: LIB3828-030-Q6-N6-D7
tttttgttaaacatttaagtccatccatgcatttgcagtttcttttctcattacaaaaaatgggaacccatttgctattgatcttattatctacaaaactcctccaaaagggacccgaattatcgtaacgtggaaaaagaaaagaatgaattaaaattaaaagataaaaaatggttttgagattaacccccgtcgcatcatttgtcattagcatcgccaccgctggcttttatggtgtttaaccttgaaagtccagtctctctctgaatcgatggcgtaagtgcgttaacctccgcctcatcatttgtcattatcatcgctttcgccatcatcagatttatggtcatttaccttacaaactcctattccacgcccagccgctgtttgaaccgatggcgtaagtgcatcaactacggtcgcagacgacatctccatcttactaactctaaccgcaccgattaatttttccggcaactcatcctcggtctgtccttccactacaaatcccatatcgattactacgctcgtcgcgcatcccaatgcgaggtgtaaaatcgcgttggcaaccgc

SEQ ID NO: 10720 - DNA, 508 bp, Gossypium hirsutum
  Clone ID: LIB3828-030-Q6-N6-D8
acaggcgttaaacaccatatcataaaatataagggggcacaaaaattctacaggcgttaaacaccatatgggaaagctttactctttttcaaataaccatacaaatcccaaatttcattaataaaaaggaaaataaaataaataaaaatgcaaagcaaattgtagtgcagccagggctagccaacatgaacattaaaaccttgtttaagcagagatactatgaagcaccacggtctcaacagggagccctggtccgaacccaaacaggacaccccactcgagcccttcacccggggttccaaagccatcttcctttgatttcttcctcatctcatccaatatgaacagcacacaagcccttgacatgttcccatattctgaaagcacgtgcctcgtggctcggagtttttcggatttaagggctagcttcgcctcaacctgatccaatatggctggaccaccggggtgagcgatccaaaaaagcgagttccaatccgaaatgcccaaa

SEQ ID NO: 10721 - DNA, 573 bp, Gossypium hirsutum
  Clone ID: LIB3828-030-Q6-N6-D9
gttgaacaaagtaattaattcctgcccacacatatcagttcatcataataagtatttgtctgaatccccaggttttttaacatttatttttttgatggaactaattattgaggcaagttttgctagaaacagtatctgcactaacttgagtttatatatagaagacgattcacattcattcgaacaacacaatgctgtctcttccggcatgtccagtacaacgagtgatcacctgttcgaaacagaaacagctaaagctcgaacatgttactcctccttagtatctgcaggagaagatttttcctctgactcagtaactggagtttgtgatggaccatcttcagtttgcttagtatcagtttctgcagctcctgaggcttcaccactggcatccccttcggttactggaaccattgtcttcttgatggatccaaccttcacgtacttgctcatgaacttgtactcccaatcctgcaatgcgtccaattcgaatggaccgagatctgaaatatcacctgtcagatctttttcttcgaaagacatctttgcaagagctctgcttgcatctttttc

SEQ ID NO: 10722 - DNA, 554 bp, Gossypium hirsutum
  Clone ID: LIB3828-030-Q6-N6-E1
gttaaataccttctgacttaagtttataccaaagatgattaagtggcagtaaagcaagattacaaccttaaaaaactaaaaaactaaagcttaaatcttccagctgaacctgaaaataacagtctcaccttgcaacaaaacacaaaaaataaagcattcaaaacaaggtagtcgccaactgcttagataattccgattttgtttgcaacatccaaggcatcgtaatccggcgtcaacctaacatatgccttctttgtgccatcgggcctgatcaaggtgttcactttcttggcctgaatatcatacatcttcttcacagcatctttgatcttcttcttgtctgcacggatgtcaacaataaatactaaagtgttattgtcctcgatcttcttcatggctgactcagttgtgaggggaaacttgagaatctggtaatggtcaagcttgttccttggtggggcactaatgcgtggatactttgggttcctatctttcttcaaggtccttggcctgtgaaacgtaacctttgttcggatcttcttggccttcttctt

SEQ ID NO: 10723 - DNA, 174 bp, Gossypium hirsutum
  Clone ID: LIB3828-030-Q6-N6-E10
ggaaaaaaaaataaatgtttatttattaaacagtccttttacagcccatttagcctagacctagcagactggtaacccaaataccccataagcatgcccattacacctttgacccaattcaacggctcaaaatgaactaggcccaaaacctaaaatttccagctagagttttcg

SEQ ID NO: 10724 - DNA, 521 bp, Gossypium hirsutum
  Clone ID: LIB3828-030-Q6-N6-E11
aaccatactatcttttttttatttttattaaaaaaaaacattctaaattaaatattagcttctccaactaagtatcaataaatagttttttgcttatggaaaaaggcaccagaatttgttttctaaatcccagccagaaaggctggtgaggtttaccattgctagcatttttaaaggaaaacaaacgtagtaaaaggataaagctgctcagacgagtgcctatcatcagttattatagctcatcttcacttgtattatcccctccgctggatggcttcccattgactgcaacaagctccgtgtcaaatactagtgttgctccacctgggattttgggtggtgaaccatggtcaccataaccaagctttgcgggtattttcaacttccgcttctcaccgacacacattcctagtagtccttggtcccatcctttgattacttgaccactaccaagctcaaattcaattgggtcacccctttcaaaacttgaatcgaatacagttccatcagtgagttttccc

SEQ ID NO: 10725 - DNA, 572 bp, Gossypium hirsutum
  Clone ID: LIB3828-030-Q6-N6-E12
ctcagataaataatctcatattttctttcatgccaaacaaacgaaaagaaaatttgtttacatagctagcagatattggaattcaaagtcatatggtattttctcaacactaatgggtgatgatgttttgccagcattatggttcctataacaatccaccattgatttccttaacgaaccagaagtgggtaattgttggcaaacccattgaaccaatgagttcatatccacagcaaaatcaaacatgttgttcagcagcagttctgggaatgcaatcttttttgtattgctcaccattattgatgcttgcaagtactcttgttttgatttctctaactcagttgaaactccatcaccggtgtatattctcacctgaaaaaaaaagggtaacttattgatttattttggctaaatcctcgaattcgggcctaactgtttaggggttgcttattgaaggactaaatcttttaaaatgatcatataaaagcttaacattacaaaagtattcaaataaaagccatacctttcaaaatagttaaataagagtcaaaatttttctaaagtattactca

SEQ ID NO: 10726 - DNA, 531 bp, Gossypium hirsutum
  Clone ID: LIB3828-030-Q6-N6-E2
ggggtaaaaaaggaaatgacttttattcatcatgtaaagaagatgtggatgttgatttacataggcacatcacttaaccttagagacataccagttatagaaaataggcaagttgtctcagcccgcttgttgtgaaatgggcgctggctccggtgctactgaatgtccattgccaatttggtatggtttctcatcaattccccagaatttagcagtttttacatcatcttgagccatcaatcgtgagaactcttcgtggtcatacttcaatgttgcgtttcccccaaattcgttggggagattctcaatatcaaaatataattgcatcatctccacactatctttgtttttagggtaaacaaatttcaccttctgagctgtttttggatccagaaaatacctcacagccttatagaaggcttcaaaaaaccttggtggattatacaagaaagcgattgccagcctctctggatagtggctctgaaggatgtatatgatatccccggctgttctgatgggaacactggtgtt

SEQ ID NO: 10727 - DNA, 548 bp, Gossypium hirsutum
  Clone ID: LIB3828-030-Q6-N6-E3
aacagcaagcgagaccgaatttatgattgcagttcttaccagttctcatacaggtacattgttagctttacatacaaatcttccagatttcaagcaggcagtccaaagccagaacactgcatttatttacacacacccatcacatatttgattttttacttccaacacaaagccgaattaaaatgctccatagcaaggagacctaatctgctttatttatatattatattgatcatcctcgcaatcaaccagaaccgtgtatgtatactaccagtaccctacgagcgcaaccagggattaagctttaatcatcactggccaagggaacagattttaccaattcacggaacttgaggatgtagcaacatttcaagatatcttcgggtctcacgtctttagagttttgaaacgtacttgcagaaaccatatactccagccaatgtcattagcctttcagaataaattttgcatgtatacctttcataaatcctcttaagccctccattggatattttagtccagtggcttgggtcctccttgcaacgttc

SEQ ID NO: 10728 - DNA, 539 bp, Gossypium hirsutum
  unsure (1)..(539): unsure at all n locations; Clone ID: LIB3828-030-Q6-N6-E8
ctggtgcaacaaagtttaatatataaagaagcaacaagcaccagatgcgtgacaaagtcatgacatatatatacagatccattattcagatttatgaataaaagataaaaagacagcaagcaacatggnaaagtggcaaatataacaacaaaatgctaggctagcctctcaacattctgtcaagcacgatggtgtctactacatctgcgtcctctgtgatttgcagtgctgaaacagcctgtgctgctataagaccagctgaaagttcttcgtttccccagcctctatcctcaaaccatggtgcatgtagatcccttctgcaagctccatacgtgaaggaccagtcactgcttccaaactcagcccactcgcatccaccactatacgcattagcgacccacccttgagaggttgtgtgagcctgatggggaagcctagatctccttccccaatcccaatggttgaacccctcgtccttctttaccataatctcacatgaaatcccccgagtcttcaccaaccagaacatgcaaagcaac

SEQ ID NO: 10729 - DNA, 378 bp, Gossypium hirsutum
  Clone ID: LIB3828-030-Q6-N6-E9
aaactaaatggtgtttacatggggttgaacttgcatattacaacactagacctgaaaaaaaaaaagtaagggaaaacaagattttataacaaacggaatccgactgcaaagggtacaaacagcaaaaaaccattgaaaagaaaatcatgaatgagaacgaaagaacaacttggcaaatggttcaaactgctccagcgggaagaatgggagacaaaacaaccaagggaagcctactagcaatgacccaagtctcggaactttgcaccctattccgcccgggattgaccagcccgggaagagaggatgataccgacaatgagcccatagagagccaaagcctccccaaaaatgagaataagaatcattccaacaaaaagc

SEQ ID NO: 10730 - DNA, 568 bp, Gossypium hirsutum
  Clone ID: LIB3828-030-Q6-N6-F1
aaataaaagtagtgattttatatgaaaaattaaacgatcggttcaaatcgatccaaactatcgggttcttgttcttggacaagtccgcctctcatttccaacaattacatagcacaacagcttgttctataattaggaataattaaattatagtaggtaatgaagctaagcggggcacatgattattttggagccaaaatattggcaatgtcgtaggcattgctgactagttggcgaaagtgattagtcttttcatacagttccttgtcttttcctgctttttgattcagcacggagatgcaggtgtcggcatcgtctatggcgctttccaactcgattttcacttgtttgaaatccctcgacagtgtgactgccagcgcatcgtcaagctcctgcattgcgtcgtcgaaattttccgagcaatcttcaaagttctgctccgttgtaggttccaaaattttaccgtcaaggagctgcttcttgatgtagacggaagcgttgacgccatggttggaagcaacgttgatagctatcaatgcgagggcggctacatcttttgcgtcttggg

SEQ ID NO: 10731 - DNA, 546 bp, Gossypium hirsutum
  Clone ID: LIB3828-030-Q6-N6-F10
cacgtcctacaagtgaaatactgttaatcattcaaataaagaaaaaagtataaatacaacctaaatgcaggcttgacaaagaactaacttggtaaacaaagagtaacaaatcattgaaacaaacatgtatggtagttaaggcaagtaaaaaccctgttcaactctgagctccaatgactgtgattctttggccacatgagtctttccaccattcgctgccttttctccttttccacctttaccaaaaggggttgcaaacttgccatcagattttggcgatgagaaattaacatcaggtgaaccttcagttccaaactgaactttccttcccctctttgattttgctgaattatcatcttttccagcggtggatttgagagaagatttgggtgttgttttggtgggcaaggagaacattctgccacccttctccgacattttcaccaccaacgtttaaaatctatgaattgttcattcaaaacacaccaatttttagggcgtaaatcatcaataaaattcaataaataataaaaagcatgcacttgc

SEQ ID NO: 10732 - DNA, 543 bp, Gossypium hirsutum
  unsure (1)..(543): unsure at all n locations; Clone ID: LIB3828-030-Q6-N6-F11
gcgggatgtttaaaacatgggtttagtattaaatacaggaattatattcaaaattagaataaaaaaaaaaaaaaaaaaaaaaaaaaaaaaaaaaaaaaaaaaaaaaaaaaaaaaaaaaaaaaaaaaaaaaaaaaaaaaaaaaaaaaaaaaaaaaaaaaaaaaaaaaaaaaaaaaaaaaaaaaaaagggggggggccccccttttttttttntttttttgaaaaaacccgcaaaaaaaaaaaggggtattcccccgtgttgaaaaaaaaattttttttccccccccagggggttttttataaaaaaaaaaaaaaactccccccaaattaaaaaaaaaaaaacaacagccccaaaaaggggcttctcctcttttttttttaacccccccccatttttttttaaaaaaccccccctccaaaaaaaaaaaaaccccccccccctttttagaaacacaaaaaaaaaaggggtgttggccccccataaaaaaaaattttttttttgggggtccccgaccatttttaaaaaaactttttttttttttttt

SEQ ID NO: 10733 - DNA, 494 bp, Gossypium hirsutum
  Clone ID: LIB3828-030-Q6-N6-F12
aataacttaaaatcgatctttattatatattattatcaaaaagctcacaaaatgtgttgatgtgttcaaggatttgaacatgaagatttgaaggcaacaacaatcaaaatcttaaaatatgacatacgttccatacaatcaatcaccctacctaattcctttccgattttttctttgatgacgaggaatcagaaaatcccaccacctccatttacatataatttttgtcttacaacatttcattgaacatatatatggtgaagggcactaaagcagcaaaggttggaaaattgtagttagagaggatgaaacctgggagtctcaccttctttttgagaggggcttctccaaaatccagtaccgtaaaacctttgccacatttcattttccagttccactgcagctttctcagtttcttcggaaacccctgcgtcttggaaatagtcctcgagacagagtaattcgggatcattacatcggaaatgggcgccgtc

SEQ ID NO: 10734 - DNA, 550 bp, Gossypium hirsutum
  Clone ID: LIB3828-030-Q6-N6-F2
tttttttttttttttttttttttttttttttttttttttttttttttttttttttttttttttttttttttttttttttttttttttgggggggaacccccaaaaaaaaggggcttataaaaaggggggggaaaacaaccgggccaaaaaaaaaaaaaaactttaaaaaaccggccaagcaaaaaggggcacgggaacaggggccaaaaaaaaatggggaaagggggaaaatttaaaaaaaacagaatccaggggaaaatccaaaaaggaaaaaattggtttaaacccccaaggggaccaaaaagggaaaccctcggggggttttttcccaagagggttccccaaaatgggaaaaaaaaggcaaaaaaggggcccccattaaaaaaaaaagcggttttttcaaggggcccggaaaaaaaaaaaaaggggggccaaaaaactttaagctttaaagggggtaaccgcccaaaaaaatccaaggggggggggaaatggctttgggagggcccccccacctttgggaggggacccacccaaaaagccatctctt

SEQ ID NO: 10735 - DNA, 552 bp, Gossypium hirsutum
  Clone ID: LIB3828-030-Q6-N6-F3
gcgactaaaaaatctcaacatccataaatttgattggctaaatctacacactgtactatacctgtacatgtgaaatttttttcacttctaaaaagatacaaatcaaagaatactaacacaaagtcatgaactttggcgcacacaaacacaccatgaccaaccacaaacaaaaatctcacacaaatgaaagcacccaattaaaagaatgaaatgaatatggaacatgaaaggaaaaaaataaaaataaaataacactaaaaagacactcatgatttatatcttacaagcaatggagataatgtcatccctagatggattgccttcactaatgccacaaattgggatagactttcttgagagaaccacttcagtttccacttcttactactcagaccggcccttttttgcgttttggtcgatgaaccggctttcgatgtgctggacttaatggccaatgttatacaacacgtctctccttgctcgatgaccatctctgatatgcctgcgatgttgcagcttgaatcaagggaggaatatggactggaacatgca

SEQ ID NO: 10736 - DNA, 547 bp, Gossypium hirsutum
  Clone ID: LIB3828-030-Q6-N6-F7
caaacatcatgtatttatgaatatagcgagcatatatgcaggcaaagtccaacaaaaataacacggggaatcgatataattctgaacacaagtacaaaattgctatcaaaattattgaaatatgttttagggtctcaacaaaccactgaagctctgccgcacgcatccagtctcagcacattatcatctaaacaagcatcttaatagggtgcaactggagcacggaagctagctccggcatagacagcttccgcaccaagctcctcctcaattcgcagaagctgattgtacttggctaaacgctcagacctgcatggagctccggtcttaatttggcccgtggccaaaccgactgaaagatcagcaataaaagtatcctccgtttcaccactgcggtggctggccatcacaccccatccagcttgcttggacattttcacagcttcaatactttcagtaacagatccaatttgattgaccttgagaagaagggcattgcaagttttttcagcaatagccttcgcaaccctctttgggttggtgacca

SEQ ID NO: 10737 - DNA, 548 bp, Gossypium hirsutum
  Clone ID: LIB3828-030-Q6-N6-F8
caaggaactttaggatattgtaaatcaaatattgttttgagctatttattcttcataattactctttttatccaacaggattttatagcaagcccttctgcaacatcattacttcttattttgtataattaatacgacgacaaccaactcttcctcattatttcatcttaatatggtatcatctccctactttggtggactgggttcactgtccataacctcttctatccctttgctctttacagtttcagcctggcaacatcctgatgcgcacctgggctgaccacactcagcacaagtcccaccgcaaccctgacggcaacactccccactctcacatcccgactgtcctggcattagtgggatttgtgggacttgtgggatctgtgggattagtggaatttgtgggatttgtgggatctgtgggatctgtggaattcttgggatttctggaatttgaggaaatggtagaacgaaaccaccaggattacaattaccggaacatccagaaaaacaacatttttcaggaccaccttcaaaaccaaaac

SEQ ID NO: 10738 - DNA, 567 bp, Gossypium hirsutum
  Clone ID: LIB3828-030-Q6-N6-G10
agtaggatcaaatcccttttttatggtgataaaagtacactggtaaacgaccaacatgtggcccatccaaagagagttgtctatgattatgaatcacatcaggaatcaaagaggtagaaacctaccaacaaagcttcattgcgcatttagttgattgggataatcaccaagttgctccatctgccagctttcttgaggagccacatgttcatggcaaggtgtgtattgctccatcttctccatgagttctttggctgttggagcagagacaattatatgcctagcacttggcttgataaatccctctttaaccccgttgtcaaataaagcaagcaaattattgtagtaaccatcaacatttagcaaaccaacagttttcttatgtattccaagctgggaccatgttatcatctccaacaactcttccatagttccatatccaccaggaagagcaacaaaggcatcggattctcgggccattgcagctttgcgctcatgcatgtctaaaacggttcttacttccccaactgtttctcctgatatctcaagaggcatgagagcttttgg

SEQ ID NO: 10739 - DNA, 565 bp, Gossypium hirsutum
  Clone ID: LIB3828-030-Q6-N6-G12
acacaaaacaatgcactatatgatctttccagagtatgataacaatgtccatatctggatgaagagcaatgaaagcagaagtatcattttaaaataatgtgataatccatctctgtaaatcacataatatatagataaactcacattatgccagtgtgaccaatgattcccacaaaagaaacaaatcaaatacgagatcgaccaccttagcaagccctcaagatggaagacaatgcaagaaaagatgacagaacataagggaacggatcgacttatccttttatcgcttcatttcttcaaaacattgtataaataggcagcaattcccaaaactatgcataataagacaatatcgatgcagaaatttcggctggatctcagctgagtgacagtgtgtttaagtctgacattggtattctttaggtcaccagctgccttatccaccttggtttcaatttcatccatcaaaggaacttgcctatccaattcctcattcatatcatgagccatgttctttaaagtatccaaaccttctgaaatcatatctaaaccttggtcctgcttt

SEQ ID NO: 10740 - DNA, 476 bp, Gossypium hirsutum
  Clone ID: LIB3828-030-Q6-N6-G2
ggcaaaaattaaccataatctattacaaagggctcaaagaaattccaagagaggttagtttaaattcaagactatttggttcaactaataaaagggaaaatgaaaaggaaaggagggacagcagttggcccccaactggtggattctaacattcattttctatgaaaatctgcaactaccccaactgggcatatcccccaccaatttctacgagcctaagcggagccaacgatgatgttgttaataggaataaagatgagcttgacgaaaaatccgacgaatcccatcactacaaaaccgatcgctgtacggaaagccaccttcgggaactctttacgaacaggcttggggcaacgcttgacgagggggacgctgtccttggcgaagtctctcaaaggatctaccacgttggcaagggcgtccatttttttttcccacacaaccaaaatcgtatgttaagatgttagagagagatt

SEQ ID NO: 10741 - DNA, 562 bp, Gossypium hirsutum
  Clone ID: LIB3828-030-Q6-N6-G3
aaaattaattcataaattaagctttttctaaatctgctacatctgtaaacataaaatacaaaaacaaaacaaacaaacatttacatggtactatttattgtgtaacctaatctgtcttccttttaattgtaatgtaaatgattatgccttacataaaaatacaaatgttttacattcattacgagaatataaacttattttattttagcaaccgaaattactgatattggcataatgacttagttggtcctccaatattataaaaaatttattttaactttctttttaatttttcatctcttttaatttttaaacttgtgttttttgttaaatcacctcaaaatgaatgaaaaaattaacattttttaactttgcatgaattgccacatggataacacatcagcatttaattaatttttttaatttaaaaattataaaaattattttaaaatcataaaaattattaaaaaggtgtaaaaattataatacttttaaattattaaaaattaattaaatgttgacatgccactcacatgataatccatgtgtatgccacgccaac

SEQ ID NO: 10742 - DNA, 561 bp, Gossypium hirsutum
  Clone ID: LIB3828-030-Q6-N6-G7
aatccaaattcaatatatatatataaaattgacatttatttacaatatcatataaatttaggtacgaatatacaaatactaacttccaaaaaattaaaaaataaaaaaagttatgtgcgacaccgacaccaacccggacttggaaacaacactattgcctacataacataaagggagaagaggagtgaaatgtaagcattatttgttttgttgatataattcagctattgcgaataagaggggtcttttggtgggatgattccaagccacaaacttcattttccaacatgttcttttcattggcttgtccccatatcactgtgtagaatcccactaaaatgattgttgatccaatcacactgccaagaaaaagagactcgccaagaaatatgacagtgagggcgactgcaacagcaatccctaagggcttgaacagggaaacatacacaggtcccttcttttctaagcaccatgtatgaattgaaattctgtacaaacttccaaatactgccgagcataaaatggcagctacttcttcattagacttcaatctccatgcag

SEQ ID NO: 10743 - DNA, 544 bp, Gossypium hirsutum
  unsure (1)..(544): unsure at all n locations; Clone ID: LIB3828-030-Q6-N6-G8
gattcaaacagaggaatgaacatgctgagttattatatgccattggngaaaagtaaacgatgaatggcaaatgtctattcaagcacgccatctgtttcgagtaaggacaaacaagaaaatgaacagtttgtgctgactgctgccgagtcaatctcgaaaattttcaaacataaatcaaaatgaagaataacatgtaaaaatccagatttctagatgtgaattggcttgtcataggtggccattgcagcttccttcaatgcctcactcatcgtaggatgtgcatggcacactcgagcgatgtcctcacttgatgcatcataattaatggcaagaactgcttcatgaatgagctctcccgcatttggtgccataatatggactccaagaattttgtctgtctccttgtcagccaatatcttaactattccttcagcatcatcaatagccttggctcggctatttgccaagaaagggaacttcccaacacggtaatcaacaccaagtgccttaacctgctcctcggtcttcccgacagatgcaacct

SEQ ID NO: 10744 - DNA, 237 bp, Gossypium hirsutum
  Clone ID: LIB3828-030-Q6-N6-G9
ggccccccaaattgtaatggaatgtaaccaataaaccccggaagaaggggggaaagggaaggaaacccagggcccccccgggggaggggaaaaggaaccaagggaaaaggggctccgcccgtaaagggaagaaaaaaacaggggaagtcaaaccgcccttttgggataaaaaaaaaaacccggcctggggggaaaaggggccacaaaactggggaaaacacccggccgcgggggcaa

SEQ ID NO: 10745 - DNA, 477 bp, Gossypium hirsutum
  Clone ID: LIB3828-030-Q6-N6-H1
aatcaaacatggccttgaatttgaaattaataaattatacccagatataataatcaaattaaattccatgaagatacccaaaactcaaaatcaagacaaaacccattcaagcaaacaatcacagacaacaagcatccatgatttccaggttacccaaaagttcagcattctaaaacttttacctaaatcctagaaaaaatatataaaagataaaaaaagtggataatattggtgattaaaaaaagaagaagaaaaaacgtaagttgtccttgagcttgcggatgattttgagacggagcttgtcgaagtcaccattgtccttgagctttgcaattacctcttctttcctaatcttcttggtttcttctcccatcggttgttttgcattcaatctctgcaatttggaaaagaagaaaacgtaggagaagatgaagctgagggcagaaaatggaaaataggaaagaaacggcggatgaa

SEQ ID NO: 10746 - DNA, 368 bp, Gossypium hirsutum
  Clone ID: LIB3828-030-Q6-N6-H10
agcaaagaaaacatatatattagcatgtacatgcattaattacatatggctacaaaacaagattcaaggaactttaggatattgtaaatcaaatattgttttgagctatttattcttcataattactctttttatccaacaggattttatagcaagcccttctgcaacatcattacttcttattttgtataattaatacgacgacaaccaactcttcctcattatttcatcttaatatggtatcatctccctactttggtggactgggttcactgtccataacctcttctatccctttgctctttacagtttcagcctggcaacatcctgatgcgcacctgggctgaccacactcagcacaagtccca

SEQ ID NO: 10747 - DNA, 470 bp, Gossypium hirsutum
  Clone ID: LIB3828-030-Q6-N6-H11
aaaatgaaaaaaattgtttttatataatatgaataaatatattaattacaattgcattgaatttgttggtatgctttaagcggaggcactaggggtttttgggacggggccggaacatggaatcgggtttaatttgccactagttataggcttgacattcaaacattgggatgttgcgggttcagctccgttgtgcttaatgtcaatgtccgcaagttccacattttgacatggcgaagaaccgctgcaaataaacttgatagcttctggaagcgcagatgtgccacggatgttcttgaagctaatgttgcttagtttaactttggattcttcatttttcttgcatttattccatgggcaatattgttgatcaattaggataggggaagagacattattcatggtaatatcctcaaaagtatttctgatactgccccaccatgttcgcctggccaagttttgattcgagc

SEQ ID NO: 10748 - DNA, 551 bp, Gossypium hirsutum
  Clone ID: LIB3828-030-Q6-N6-H12
agatgagcaagatttcatacaaacatgccaaattagataattttgtacaagcgaactcaaatatggaaaaaggaaaatccctaacttttttgcggggcatcaaaataaacatcaaacaaccataaagaatgtcaaaagagcgagcttttgcgtctttgactggtcggatgacttctacaatcacaatccattacctggatgcccaggacttgcagaagacttttggggcaaacttgcaggaccttccccaattcctatgtctttgacaccagagcttaatgatgatgatgaatcaccctccacttcatcatcttcatcctcaatgaaagaacccttacgtcgcagttcctttattttcaaaaactcatcatagtgtgctttcctttgctccttaaaactcttactattccgatcttcttcatcatgatccataggatcagcctcatcctcagaagaagtccaaccacctgattgcccagttgtttttctacttggaagccacatctttcaaagcagagcataattcctcagcatccacatcaatgacacaa

SEQ ID NO: 10749 - DNA, 503 bp, Gossypium hirsutum
  Clone ID: LIB3828-030-Q6-N6-H2
aaaatgaaaacaatattgtttaattccaaaatctggttttgcagtaagaaataaaacactatttccttttcaagctatatatatatgtgtatatatatagtttcagagtggtttggcttgcctttctataacttcattcaaccttcttactatattcgtcagtgctgccttcttgagatttaacttcagtatttgattcatcaaattccaataactgcatatcatgttagatcatatcaacagcatcataatccgaatatagaagacaaatcacttcaattattgtatttttctagtgtttgtttcatgaaaaataattcagtcaacggaaaatgaactcatggtcgaaggaaaattcgttctatttttgttttcggaaaatatcttccgcttgtgaaaaaggaagacagtttctgaaaggttaagtaaagcagaaaggatcaaaatcccattattatagggatcaatccctatgaagaaaggagaaaaaggatcaataccct

SEQ ID NO: 10750 - DNA, 563 bp, Gossypium hirsutum
  Clone ID: LIB3828-030-Q6-N6-H3
aataatagaaacataaatattcattttataaactataaaaacatcagcattgttggcgcaaaactcagacagaccacagagacaatggtctacgctcttaaaattcaagaaaccaggctgaagctaggggacgcaatctcacaccaggaaaaatcgtatttacagcaaatttgtttacgttcacatgcatgcagctacaaactaatggtcacacctctcgcaccatcaacgaaacgtgagggtgctgtcacctctgagtacgaagacgtatgccaaccgtgctttgttgggtcatatttttctccatcaccccaaagggcatatgcttcttctccatgaacggcgtcatctccgatttcgagttggttatcaggcattcttaatggtataaacaaccttattactaaaagtattattgttgtggacgctacattccaagcaataacaaacaaggctgctactatctgcttcacgaattgaacccctccattcccaccataaactgcaccccttgtttctcttgggagtatgagtctgcagagatctggctctgccaacagccc

SEQ ID NO: 10751 - DNA, 553 bp, Gossypium hirsutum
  Clone ID: LIB3828-030-Q6-N6-H7
gaacaaatggctctttttaatgtcaaatataattctaaaatttaatacctacctaagaattctgtatagttctacttattttccatgaaagcaatggactgctaagctcagcactaagaaaatcgccgctttcgtttacacttgtgaatcttcagttgctcgattacgtactgaacgatttctttcatggtagcggtccttccctcctttctgttccaaacttccgggaccaaataccttccgctggcattatattcgttcatttccatcagtgcagtgctgacagcctcgtacgccgtgtcaccatattcatttctcaactccttcagcttctcgtcatccttgtctattatttcggttttctgagcaatcggtgtatgcaagttgcctcggatgttgatcatcttaaacgggtgccatttcggatcctgcacattatgttgccataatgaacatgctttagcacacggttctcgccaatcttcgtcctggaacttcaacgagcaagcaactttgaatgctttttgatcaatctctcccattctgttcactc

SEQ ID NO: 10752 - DNA, 543 bp, Gossypium hirsutum
  Clone ID: LIB3828-030-Q6-N6-H8
aaaatgaaaaagaactgtttttatgtaatatgaataaatatattaattacaattgcattgaatctgttggtatggtttaagcggtggcacttagggtttttgggacagggctggaacatggagtcgggtttaatttgccactagttttaggcttgacattcaaacattgggatgttgcgggttcaggtccggtgtgcttaatatcaatgtctgcaagttccacattttgacatggcgaagaaccgctgcaaataaacttgacagcttctggaagcgcagatgtgccacggatgttcttgaagctaatgttgcttagtttaactttcgattcttcatttatcttgcatttactccatgggcaatatttttgatcaattaggataggggaagagacattattcacgataatatcctcaaaatgtacatctgatactatcccaggagattcgcctggccaagttttgattcgagctccattcgaagtattagtgatggtgcagtttgtgactttaactccctcaactggctcttcatttgggtact

SEQ ID NO: 10753 - DNA, 463 bp, Gossypium hirsutum
  Clone ID: LIB3828-030-Q6-N6-H9
ggaaaaaaacacttttaattaaatttttcccccccaccccgggggggggggggggcaaagctttaccatttcccaaaaggaagggggaaaacccgggtcatagaaaagggggccccccggggcccattaggggaaaaaaaaggggggggccccaaatggggccgaaattttgggaatccccgtccgtaacgcaagattttaggaaaaaattccccaaaaaactttaacccttggccttttgggcccctttttcctttttaaaattttgggggcctcccgtataaaaaaagggctaaaaaatttttttccgggggccccaaatggggccgaaattttgggaaaaccagtccgtaacgcaagattttaggaaaaaattccccaaaaaactttaaccccttgccttttgggcccctttttcctttttaaaattttgggggccttacggatcaaaaaaggctaaaaa

SEQ ID NO: 10754 - DNA, 541 bp, Gossypium hirsutum
  unsure (1)..(541): unsure at all n locations; Clone ID: LIB3828-031-Q6-K6-A10
tcgttatgttctttgaggaagacctggggtggttgatgggcaacaaccttaacatcaaatgatcttgaggagattcaaacattccttaattctgctgtttcttcaagttgtgagggtttaattatcaaaacattggattgagatgctacatatgagccatcgaagcggtcactcggcggggtgggattgangaaagactacatgganagtgttggcgactcattagatctagtacctattgctgctttccttggccgtgggaaacgaactggcttctatggtgcttttctcttggcgtgttctgatgacgctcttgtagaattccagagtgtctgtggggtgggtgctggattttctgaagcggagcttgcggaccgttctgccggtctccgctctgaagtgattcctgacccacagtcgttctgtcgttgttctgcgctgatgcagcccgatgtttggtttgagacttccctggtttgggaggtgtacgctgctgacttgaccattagccctgttcctcgtgctgctcttgcgattgtgg

SEQ ID NO: 10755 - DNA, 507 bp, Gossypium hirsutum
  Clone ID: LIB3828-031-Q6-K6-A11
cttcaagacatcctttatctaactgctcacctttaactcctccttccactccttcctttttggttcaatcgggctctctcactcttcacatccgttgactttgggggggggggaccctcccggcctggtaaactccttcatttcttttcaatgtttcctttgcaaggatatgcgtaagactattcgctgatcttgggacatattcgaaactgcactctttaaattttaaccttagctgatgaatatcatatatatacgcacttacccaagatttatctaggttcttttccttgcattttcttattattgataatgagtctccttctataataatactttcccatttaatgccaattcctgtttggagagctttctgacatgctactgcctccgccgcaaaaactgaagttattcgatgatggatctctaaacatgaaagggagactgaaccctctctatctctggctactattcccactaccgatctattttgtctaccatcatatg

SEQ ID NO: 10756 - DNA, 480 bp, Gossypium hirsutum
  Clone ID: LIB3828-031-Q6-K6-A12
ggcttattacggcattaactattccaagctccgtctttgggagttcgtcgagtacagtaaaatgctatacctggacggcgacatacaattatatgacaacatcgatcacttatttaatttgccaaacgggcatttctacgcagtaatggactgtttttgtgagaacaaacaggagcgcagaccccacaatacaacctcgattactgtcaacaatgtcccgacaatatcaaatgacctgacgagatgggtcaacaactcccttccctatacttcaacgccggcatgttcatcttcgaacccaacctcaccacctataaaaaaccaagtaatagtgaaggggaggcggaaccggcaaatttgcaaccgttgctaatggcggcagaattctcagaagttggccaagttaaagacgtgacggcaccatcagccgcatagaaaaacttggatagctctcattttagaacaataaataaataaagt

SEQ ID NO: 10757 - DNA, 540 bp, Gossypium hirsutum
  unsure (1)..(540): unsure at all n locations; Clone ID: LIB3828-031-Q6-K6-B10
gctggttacgcctccgccgncgatgccggtcctcactcctctggaaatcgagagcgcaaaagagggtgccgtggacggaggaggagcacaagctgtttctggtaggactgcnagaagtagggaaaggagattggagagggatttctagaaacttcgtgaaaactcgaactccgacacaggtagcaagccatgctcagaaatactttctccgacgaagcaatctcaaccgtcgtcgtcgcagatctagcctctttgatatcaccaccgatacggtgcaggcaattccaatggaagaagagcgaattgatcgacaagaaaactcaactcagccatctgaaaccaatgtgtttcccattatgccggcggcttttcccatggcctttaaccaggtngttccgccggttccaattcagaatccgactgaaaatctcacagtagcacaggggaatcaattgaataacaatgttccgacggcaaatctcatccgtccggttccaaatttcccagctcttcagagatccgatctcaacacaaacttaa

SEQ ID NO: 10758 - DNA, 567 bp, Gossypium hirsutum
  Clone ID: LIB3828-031-Q6-K6-B11
gctttagcacgctcgtaatttttgtgatgtgccagtacgaaatatgggttcttggaatgcaatgatttccggatactgtcaaaacagcaatgctgcggaggcattagatgttttgaatgagatgagatcggaaggggtactgatggatccggttactatagttagcattcttgctatttgtgcacagtcaaacgatattttaaatggaatgtcgattcaagtatattctataaaacgtgggctggagtatgatttgttcgtatctaatgctttgattaacatgtacgcgaaatttggtaagtttgcaaatgcgcagaaggtttttgataacatggtagtcagggatatggtctcttggaactcgataattgctgcttatgagcagaatgatgatccaaacagggcgctagctttattctacgacatgcaactaactggaattagtcctgattacctgacactggtgagtctatcatctatcgttgctcaattaggtgattctcggagtggtaagtccgtccatggatttgtaacgaggagaggttggattctgaaagatgtcatctc

SEQ ID NO: 10759 - DNA, 524 bp, Gossypium hirsutum
  Clone ID: LIB3828-031-Q6-K6-B12
tcgtcaaaagtacctcctgatgatggggagttggaaggtgaaaatgggctaatgtttggcagactgactgcattgcaagaatctcacctaataatggtacaatacttggatggattcttcttccaagtttaagagaaggactattagcggccggatataacggtattgatgtgggagatggcatcgcttgggatagcggcaataatcgcatttttgttaccggaaaactctggccaaagctttatgagatcaagctgcatccagctaagaaacactataacagtgaagacattgagaagctttgcttggcgtgaaaattaaggtatacgcatggatattgtacgttaaaactggagcccaaagttttccatttgaaaatacctgaattggaggttgtatttacacatttgattactagcattgttgtaaaatttgtatttacttgagaagctattatcggccagttctgataatactaataattcacatttttttatgttatattataattagtattgaacttg

SEQ ID NO: 10760 - DNA, 591 bp, Gossypium hirsutum
  unsure (1)..(591): unsure at all n locations; Clone ID: LIB3828-031-Q6-K6-C11
gcgttcgctgnaagaaaatgaaacggnttggcgggcatgctgggggacaacagggattggatttaagggatttgctataccaaaggaatctcaggataaggctgcaaagttttcatttcatgggactccagcagaattgaggcatggagatgtggttatagctgctattactagttgcacaaatacttggagatcctagtgtgatgctaggagctgctctggtagcaaagaaggcctgtgaattaggattggaggtcaagccatggatcaagacaagtctggctccaggttctggggttgtaaccaaatacttgcagaagagtggcttgcagaagtatttgaatcagttagggtttcatatagttggatatggatgcactacatgtattgggaattccggagatattgatgaatctgtggcatctgctatctctgaaaatgatatggttgctgcagctgtgttgtcaggaaacagaaactttgaaggacgtgtacaccctttgacaagggctaactatcttgcttctcctcctcttgttgttgcctatgctcttgctggcactgtagatattgattttgagacagaaccca

SEQ ID NO: 10761 - DNA, 432 bp, Gossypium hirsutum
  unsure (1)..(432): unsure at all n locations; Clone ID: LIB3828-031-Q6-K6-C12
cggccgcgtgggnaataattacaatgacggggggggggggcncattctccagttattaaacacaggtctcattcatgtgcgtctaataatccctttatacgccatggacatgaagaaggtctccaccgccatcattgttgctgccgcctcaatgagcgccgtcatggctgccggtgcacctggtgcttccccttcagccggtggttctagtcctagctcctctcctgcttccgccacagcaccaggaccagattccagcgtggctgccgcaaccttgcctgttcttggatcattggttggggcttccattgtttctttgttttctacgtgctacatgtatgaaaaatgaacatgtgaacgaatattttattttattttttatttttttgtaagaaacatgtgatgaatattgaaaaaattgaaatggagctg

SEQ ID NO: 10762 - DNA, 466 bp, Gossypium hirsutum
  unsure (1)..(466): unsure at all n locations; Clone ID: LIB3828-031-Q6-K6-D10
ggnaaactctcaatgtaaaatatggggcggggggggggggcaaattctgagagatcaagtctgaaaatgttgaaggcaggcctctggtcagggaaggtctaattctaattttgctgngaaaacagcagggcaggtatgtggcttaatctttcagcggatagctgatggttatttataagtatgtttgtatgcctcaacttgttaaagcttaactgtcctgtacaatggcagggcaactggggcagctttatcttctagaagatagattcactgaattgctatgctaagttgtgggatactcatgatgtggtttggaagcgtcttgggatatgatttgtagtgaaatgtatctcttgattatggtcatcagtaatcttttgcatctgagaaaattctgtgattggatggatcacataagttgactatttaaattgttttgtgccataaggccctgcctgttttccct

SEQ ID NO: 10763 - DNA, 544 bp, Gossypium hirsutum
  unsure (1)..(544): unsure at all n locations; Clone ID: LIB3828-031-Q6-K6-D11
natttctttcanattcccaacacccgggcatggagcgaggtcatctctttattcatacttgaacctgtatttgtcactgtaagctactcagccaacaacctgattgaaacccttgcaaaaggattccatatctcgatctctgtgtctcgactttgaaaccctatcccttgagttcgaccacgggcgtaaaggggctcgctcgcatctggttgatattgtcaatgccaaagccgatggcacattgaatcggattttaacattgctcaaaagtgtcaaagaccgcagcttgagaaaggctgctttgattcatataaaacctttctccagggtcattgaagcaatcgaaaaaggaatccgaaattcgctgtagaagggaacctgaaattcgctatcaagagtgcaatagatgctggaagcaaggatggatccaagggggtgggagcggtcacccctttgaaatttttaaattttttaaatttatatataaattattatgtattttaaatttgatgttcacattatataacattcgcttctcttggcc

SEQ ID NO: 10764 - DNA, 589 bp, Gossypium hirsutum
  unsure (1)..(589): unsure at all n locations; Clone ID: LIB3828-031-Q6-K6-D12
gcgttcggnacattgtgtagcactctgccggccagacgtgtgaattgtgcgtggccttgatcctaaggctaaacggttgtcgtttggngagaaacaatgtaacagccgagcctgaagttattcaccctcagttaccaccctcaacaactccaaactggcgtaggaccagatcaaaatctaggacagataaaggatggagtggatcgactggagcacatgatccttctagatgttcttggggtaatgctgcaacaaatgatagagaggatatatcttcgacattgtctgatccaggtccaatttgggatgctgaaccaaaatgggacactgaagctaattgggatgtggagaatccaatcgagttaccagcgccacgaaatgatctcgagtcaggagcaaagaaggaagccgccccaagagtcgaagatgaatggattgtaactaaggggccatttctcggcatccttgtgtgcaaccatgcatgtagaaccgtgcagagttctcaggtggtggctccaagagctgaacccgatgacaacaccatggatatgctcttagttcacgggagtgggcgactccggttgatgag

SEQ ID NO: 10765 - DNA, 428 bp, Gossypium hirsutum
  unsure (1)..(428): unsure at all n locations; Clone ID: LIB3828-031-Q6-K6-E10
caatctcggcggntccccttcaccggggattaaacgcgggtccctctcatttccggtgcgtttaataatcactttatacgccatggacatgaagaaggtctccaccgccatcattgttgctgccgcctcaatgagcgtcgtcatggctgccggtgcaccatctcctgccccttcaggcgggggttctagtcctagctcctctcctggttccgctccagcatcaggaccggattccagcgtggctgccgctaccttgcctgttcttggatcattggttggggcttccattgtttctttgttttcttacatgctgcagtaagctacatgtatgaaaaatcaacatgtcaacgaatattttattattttattatttttgaaagaaacatgtgatgaatattgaaaaaaatgaataaaatggagctttgaat

SEQ ID NO: 10766 - DNA, 636 bp, Gossypium hirsutum
  unsure (1)..(636): unsure at all n locations; Clone ID: LIB3828-031-Q6-K6-E11
ccatgnnnaaagtgatatgtgggaacatttacacaatncanaagncttgttgnatgnnnaccccagnnaacactgnaataagnatnncctatacnnattaggctctcctttaaaaacacctatnntcatttaatgtaggattgggggggcgtgtgtgggagaaaaattgattggggcaaannacccttgagnaannaacatatgttccagnaggnnaccaactntnnctcaaacagnagtcaaagnnaggcttacanntttccatttacagtgtntnnggattgnngcaatcagnacattttcagtcnntttgtgagggggtnngatcataccannactttgagaatcgaacggcgtcatttnnggagttgaggtctttctgagnnctgtacccnntgatgtgaannatatactactgtnnggaggaatanntctgagccgtnnttggtttgagaccagaannaatgaatcatatgnnctccttgttatnntaaactaatannctagcannataattgagaaaaactatcacnncgactggtattatgcnngtgtatgcattaaggtttcttgttnttttcattcagcagaaatgtgaacnncatattgttctaaattacttatataatantatga

SEQ ID NO: 10767 - DNA, 591 bp, Gossypium hirsutum
  Clone ID: LIB3828-031-Q6-K6-E12
gcgttcgaaaggagacgaaagaagggggggggccggggggggctcttttctgcttcaccatttttgtttcgtcctcactcaatttcgtctatggggctgaaaatatgagctacgtcgtcgtaggccatgtttactgtgacacttgccgtgttgagtttgagaccaaactcagcgaaccggtgggtggagcagtagtgaaactggaatgcaggaatcgtacagacaatcaccttaccttccagagccccaaatagtgactgacgaacgtggagactatcacattgtagtggaaggcgattatgaggaatcagactgcgacgtcgccttggtgaggagtcccaacccggattgcaatgatccctccgaaatgtggaggatatccagggtggttctcaccacacttgacggcgtcagcggtgaacttcggtttgccaacaatcttgggtttaagaggaaggttgctcttcctcagtgtactcaagttcttcaagagataggctattatgagcttagccaagaagctggagacattgccccttggtcagaactataatatgtattttcacttcaactttttctaaaagctcggca

SEQ ID NO: 10768 - DNA, 584 bp, Gossypium hirsutum
  unsure (1)..(584): unsure at all n locations; Clone ID: LIB3828-031-Q6-K6-F10
gcgttcgcggccgcgtgggcggncgcgtgggcgggggcgggggtgcataacgatcaagnatacgccaaagcacctggaagagctgttgttgatgttctcaaggccggcatggatctcaactgtggatcctatttgcagaattataccaaatctgcagtactgcagaaaaaactaccataatctggggggaccgagctctccataatctgtttgctgttagaatgagattaggccttttcaatggaaatccagtgccaaatccttttggaaatattggaatggaccaaatctgctcccccgagcaccagattctagcacttgaagctgctcgtaatggcattgtccttttaaagaacgatgctaaactccttccacttccaaaatctaccatgtcgcttgctgtaataggtccaaatgccaattcgccacaaacacttatcggaaactatgcaggccctccatgcaagtctgttactcctttgcaagctttggggagctacattaagaacaccgtgtaccaccccggttgtgatacggtttcttgttctactggtgcaattgacaaagcagtcgacattgcaaaa

SEQ ID NO: 10769 - DNA, 558 bp, Gossypium hirsutum
  unsure (1)..(558): unsure at all n locations; Clone ID: LIB3828-031-Q6-K6-F11
gtaacctccactgcttgntggcaaagcccttggggattggtcccaagtccgggctgttgagctaggccacatgcttcgggccatgtgggagtctagccgaagggtgagccagtggtggtgccggaaagttgacgtatgccatggccaacatgatcgggcaagtgatactgagggggggagtattcgtgaccaaagggtcggagtcgaacgagttcaaggacatggtggtggagctcatgacgtccgcgggcctcttcaatattggtgactttataccttccattgcgtggatggatttacaagggattgaaggcgagatgaagaaattacacaaaagatgggatgtacttttgacaaagatgatgaaagagcatgaggaaacagcttatgaacgcaaggggaagccggattttcttgatataattatggagaacagagaaaactctgcaggggaaaggcttagtttgaccaatgtcaaggcgcttctgttgaatctattcacagctggcaccgacacatcctcaagcataatcgaatgggcattagctgaaatcctga

SEQ ID NO: 10770 - DNA, 594 bp, Gossypium hirsutum
  unsure (1)..(594): unsure at all n locations; Clone ID: LIB3828-031-Q6-K6-F12
gttcttcaccgttttcgngaacagggggggtgtggggtgggttagtttcttcgtcttttcttcatgtacgatttggaaggatgaagcgaataagagatgatatatattctggttctcaatttaaacgtccatttgcttcttcaaaggctgaatcctacgcgcaaaaccaaatgcctggggggggtggcggtacaggtggaggggaaggggaagggggagggggaagtatgtcgcagacactggctatgaacgaggccttaacatatttaatggaagtcaaggagatctttcaggatcaaaaagggaagtacgacatgttccttgaagtcatgaaggatttcgtggctcgaaggactgacactgctggtgtcattgcccgagtgaaagagttattcaaagggcataacaacttgatttatggatttaatacctttttgccaaagggatatggaattacccttgacgaggatgaggctcctccaaaaaagactgttgaatttgatgaagcaatcagttttgtaaacaaaataaagaaacgtttccaaaatgatgagcatgtttataaatcatttctggatattttgaatatgtacc

SEQ ID NO: 10771 - DNA, 522 bp, Gossypium hirsutum
  unsure (1)..(522): unsure at all n locations; Clone ID: LIB3828-031-Q6-K6-G10
acaagtcacaatgttacagagagacactactgggttgactactgagaacaggaactgaaactacggctacaggctatggagcaacaagcgcagcttatggatgctttgaatgaaaaattgaaggaggagggggggcggcttangatacaagctggtcaagtgtctgctatgaatggaaatcctttcaatagaggactatctcctcaatatttaacccaccaacctgctccacatcactttggcgtcctgcagacaccgcatcaacaacaacagcagcagcagcagcagcagcagctgcagatgcctcattcatccaccaataacccgactttgaacggacagcctcaacctcactttatggattttaaccagagggcatagtttcatgttggaaggaaatgcttggtaagcataagaaaatccaatcactgtaagcatcttgtacatagaaatatgtggtatgcattgcaggttctgggattagtcccttttatctgtttctcatatggctttatcaccatt

SEQ ID NO: 10772 - DNA, 565 bp, Gossypium hirsutum
  unsure (1)..(565): unsure at all n locations; Clone ID: LIB3828-031-Q6-K6-G11
naaagngacgcttgccagttaggggggggcgggggggggcataacgcgatgtttgcgatctctcaagcaaaatcacaaggatgatgatgcgaaagtcaagagagcattccagactcttcttacatacataggaaatgtggccaggaatcctgatgaggagaaatcagaagggggggctgagtaatcaaactttccaggatagagttggatctgtaaaaggagtggagttcttggagctgtgtgggtttgagaaagttgaaggagaggagttcttgtttctctcaagaaacaaggttgacatgcaagttctcaactcagctggatctgagctcaactctgctatcaataatcccttttttggggtcctttaactctgaaaatttactttaataaaactatataattaaggcatatgcattcatatatctattttggcttgttcctctttggtttttctttggagaatgtggaattttatctgtgaatttaatgatgtaccaactgggtattttccgctcataactttcacatagtttggtttatttttaccgaacctcatttagct

SEQ ID NO: 10773 - DNA, 580 bp, Gossypium hirsutum
  unsure (1)..(580): unsure at all n locations; Clone ID: LIB3828-031-Q6-K6-G12
caaaaactccttcttcccttctttgttgttagggggtgttgatttagggttttttcaaaagcaaaaaaaaaaaaagaaaaaaaagngagagagtagcaaattaagaaatgcagatagcgggtgtagcaactgaggtattgatagccatcccttcagctggaaccctcaatttcagacactggcatcccaatcatttcttcctctcttctcctttcttcaaaagatgtcccacgttatgcattccaaagctaggaatggtccccgataagtaccgaggaggaagatgcttaactatgagagcctcgggggagtcaggtgataatttatcaccaattgctcctgtagaatttgaatctccggttggccagcttttggcacaaatattgagaactcatcctcatttattgcctgcggctgttgatcaacagctcgataaccttcagagtgataaaaatgaccagacagaagaaactccacaatctcaagatctcctctacaagagaatagctgaagttaaagaaaaggagagacagaaaacactggaggaaatcatatattgtttgattgtacagaaatttgt

SEQ ID NO: 10774 - DNA, 570 bp, Gossypium hirsutum
  unsure (1)..(570): unsure at all n locations; Clone ID: LIB3828-031-Q6-K6-H10
cccagcgtccggtttttctttgggggggggggggggtcatcattattaattgttactcagagggtagccatggatatcagcaacagcaatctgctgttgttgttggaactgtgtactgtgatacatgtttccagtctgacctctcaaggccaacccatttcatttcaggtgcgggtggggaagtggaatgcaaagatcggaagagctcaagggcaagctttaggcaacaagtngaaaaccaataggcatggggaattcaaggttcatttgcctttttcagtgagcaaacatgtgaagaaaatcgagggatgtgaagttaaactgattaaaagcagtgagccatattgtgcagtggcctcatctgctacttcctcttcactccatctcaagtcaatgaagcaaggaacccatgttttctcagctgggtttttcaccttcaagccagtcaaacaaccaaccttatgcagccaaaaaccaagtgttcatcccaaccagcttcttccgccgcccattcttcctccaaacccacttctaccgccgcccattcttcctccaaacccgcttctgcca

SEQ ID NO: 10775 - DNA, 348 bp, Gossypium hirsutum
  Clone ID: LIB3828-031-Q6-K6-H11
gctttgcattgtcatgatcccaagggtgtgtgtctttgctcgatcctagatctagaaactttgattcaattatgatgtgtaaatatactataattaatataatgaatatataatataataaaataaaaaaaaaaaaaaaaaaaaaaaaaaaaaaaaaaaaaaaaaaaaaaaaaaaaaggggggggggggaaaaaaaaaaaaagaggagccaaccttaaaaaaaaatccaaacgcgaggtcccacgttcatgcaaaagccactacctttaataaaagggcctgctcaggttaaatcccacgtggccggcccagttaaaacccctgggcctgaccaaacccctgtccccc

SEQ ID NO: 10776 - DNA, 575 bp, Gossypium hirsutum
  unsure (1)..(575): unsure at all n locations; Clone ID: LIB3828-031-Q6-K6-H12
naaagttcaaccatttctgctttgtttctcttagttcttcttttcaacttagtttgactttattttatggcattggcttcaacttttgtctgcttctttctttatttttattattttttacataattatgttagtgtgcaaatcgctttctttgggttgtgatttttgaagtgttaaggtctgggttttagctgtggaagatgctttgtcttaaaggttggtgagtgtgtggacctggtttttagtttcccatctcctttatatctttaacatgacgcctttttcttcgtttcccgtggtttggtaagctctaaaacagcttgcaattttgtctttttcctttcaacttctcacctcttcccaattttccactcttaatctttgtaatttcttcgttgctgttttcgctacttactttctctaactatggcgcttcatttttttcatgtctagattcaaagtgctttgcttgtaaacgctaaatgcatctccttggtttgttttctggctcaattccctgatcttttgcatgcatctttgaattttaacttggnaacccataanatatgttctaa

SEQ ID NO: 10777 - DNA, 528 bp, Gossypium hirsutum
  Clone ID: LIB3828-031-Q6-N6-A1
aaaatatatcaaagatcaaaactcatccattgattcattgaacagtagattctcaataataaaaacatgaagctgaaatgacaaagagaggctaatttctcaaatatatatacgtatgcgtgggtattttttttttctttggatctttctccgtttgacaaagttcaagaactaaactgcaaaaatcaaatccattacagaactcctgaagacctttattggaaaaacgctaatgaaactgcaaaaacacattcgcaaggaggggctcaaattccttaggtattcgttcttcttaccacctgaatgtgacaagctctagtcagattcaagctgcttaatccttgccctcagaggggctatttcttcctccaggggtaactttgtctgacccacctgcatcttcaaatccctgaccttgtttcttggcagtctccatgggcttccttcttatacggagttctttaatataatggggtaatttgtctataattagggataggaatagcaatccccccatgagagtagttt

SEQ ID NO: 10778 - DNA, 547 bp, Gossypium hirsutum
  Clone ID: LIB3828-031-Q6-N6-A10
actccatctagcaagaggaagcttcttgattgcaacagaaaaaggagtgtttgtatttacattgcaaagtctagaaattggataactatcagtcccatttgcacgcaagataaaatgttattcacctactcagggaggaaaaatgttgcgacgcttatcagaattcctcaatcatcctcaccatcgtcttcgttattggtttgattgtgtttttgagcattatacatctcagcaacctgctcagatgatgaagcttgctctggtgtcttatcttctcgaacacgaactaaacgtggaaatcggagagatatgcccttatcaggatccacaatcccaatagcagcacgatgaacagggctaatggtcaagtctgcagcttttacctcccaaacctctgtagtctcaaaccatacatctggcttcatcatctcagaacaacgatagtacgactttggttcaggaatcactttagagcggagactggcagaacgttcctcaagctctgcttcagaaaatccagtacctattttacagatactctggaatt

SEQ ID NO: 10779 - DNA, 540 bp, Gossypium hirsutum
  Clone ID: LIB3828-031-Q6-N6-A11
gaatgacaatagagttacggaatttattgatcatagtagcagaacatgggaagaaggagttaatagaagctgcctttccggagaatgttgccgagaagattctgagtattctgttgtcggaggtacctcatgaagatttccaagtctggcgcgctgaggcgtcggacgggtttacagtgcgcagtgcctataaactattacaaggtactaaagataatcctagagcttttgcttttcaagacgactataaggacttctacaataaattatggccactggatataccttccaagattaaaattacaatgtgaaagatctcgtggaatttcctagctacacgagttaatctggtatttaaaaagctaacaaatacaacagcgtgcccccggtgtggcttaagaccagagaatatggatcaccttttccggaagtgtcctgggttttttcacagagctcgacttcccaatgtagaatattttgttgtgcactatgggctatttggagagatagaaatgctagggttcataagaaatggggcaa

SEQ ID NO: 10780 - DNA, 552 bp, Gossypium hirsutum
  Clone ID: LIB3828-031-Q6-N6-A12
aaaaaaaagaatttttatttattattgatatagggttaaaattttttgtataagttacaaattttggtaatttttaagtgtgtaacaaacactccggtaaaactcagaagctttcattccttgaaaaaaaaaaggggtattccccctttttttactgtattttttttacaacatctataagaagttgcttttttttctttctttttaaccctctctttgtactttatttatttattgttctaaaatgagagctatccaagtttttctatgcggctgatggtgccgtcacgtctttaacttggccaacttctgagaattctgccgccattagcaacggttgcaaatttgccggttccgcctccccttcactattacttggttttttataggtggtgaggttgggttcgaagatgaacatgccggcgttgaagtatagggaagggagttgttgacccatctcgtcaggtcatttgatattgtcgggacattgttgacagtaatcgaggttgtattgtggggtgtggctccttgtttgttctcacaaaaacagtc

SEQ ID NO: 10781 - DNA, 490 bp, Gossypium hirsutum
  Clone ID: LIB3828-031-Q6-N6-A2
gacttaaaaattgagtgaccgttttatcattaagatcaaagttggatgagagttagtgtactttatcctaaataaattcctaaaaacactcccctcttgtttttcctaaccaaaaaaaaaatgttcacaaaaatcccacatggaattaggagccaatttcatgttgaaccgccatcatgagcaagctatcttgatcgagagccacgatgacgggcaaactgcccatcccacgagccatggccatcatgatctccttcaccagcgccgcgaactcatagagatccagcttcccattgcgatcctcatcgaacttatcgaatatcatgctgtgaaaattgtcaatatcttctttggacaccgtggattcatgttccaccgtgaaaagcaaatccagcccttctctaagtttcctccgacaaatcactccgttcccgttggaatccaacatttttgaagtacttttccacgcatttcttgaatgcttcttttg

SEQ ID NO: 10782 - DNA, 539 bp, Gossypium hirsutum
  unsure (1)..(539): unsure at all n locations; Clone ID: LIB3828-031-Q6-N6-A3
gcggtgaagggttactagaattcaagtgtgaaatccaagagcatcaccacgagtactaggatacaacagggtcacatacaatttctagcaggaggtaacatacaaatactcatatccctcccaacatatacattangaaaaacccaccttttttattcaagtaccattcaaggtcgattcaaccaagcagtggcatttaccatccccctctctgagtaccaccagaggattgcacattcagcctatccagcacagcattaaaatccaccgcctgcccactctcctccatcctctgaatcacactcgcaatatggtcacccctgaatcccatgctcactaatttctcaatcagatcactgtaaggatggttgcgaacatactgggaatggctactgttcctcatcataacattagggctaggaccaggttgaggagtctgaagagagacattggcagggggatacccaccctgtgagaagtgaggctgttggggtgggtgatgtgctctacccccttcgctatcatacatcatgtatgca

SEQ ID NO: 10783 - DNA, 535 bp, Gossypium hirsutum
  Clone ID: LIB3828-031-Q6-N6-A4
aatctcaaaataacaaaattgctcaatgtaacataaaatccgagacaaatacaaatgcgaacatccactacataaaaggtcttgaaacaaaactcaaaccatgtctaataatgtaggaaatggtaagttcccatcagaggctcttttaggagtgccctattgccaatactagcttaaggtttactcgtcttcctcttcatcgccatctccaccagcggccttcttggcagctgctctctgattctttctcttcactcttccaggacggccacctccgaacggacttatcagagagaagtcgatatgtttctgggagtcaaccctcaccataaaggatgggatgttaaccacctgccttccgactctgatgtgacgttgcctaatcaacacacgagcatggtgaattgacttggccataccagtcttgaacacaagtgtttgcaagcggcgttcaaggaagttctcaacggtcaaagccaagacataatcgagcttgttctgactctcatccaaaagtccatacctgttcatccta

SEQ ID NO: 10784 - DNA, 543 bp, Gossypium hirsutum
  Clone ID: LIB3828-031-Q6-N6-A5
acctgttgaaaaaacatggatcataaatatgaaaaagtactactgcaatgcattctggcaataatggaaatcataattcccacaaaagcacgtgttatattgtacttacaacaaagcggccaatacaataacatattacaagcggccaacacaaaaaagtgtagcatcatttggatcataacttctatccattcgcccttataacacaaataaaagtctgcaaagtccaaaccaaagaggctaaaattccaaaacttaggaaagtaaaattagtagtccctctaaatgacataatcagaccactcagcaatgtgtgaagtatgatccatggtaaaacttggaatcttgtcaagctttatagggttctccctccctcctaccaatctagccggattccccaccgcagtagtccttggaggcacgtcctttaacaccaccgaaccagcacctatcttagctccatcaccaatcttaatattccctaaaatacaagtaccggcaccaatcagaaccccatctccaacctttgggatgtctaccacc

SEQ ID NO: 10785 - DNA, 562 bp, Gossypium hirsutum
  unsure (1)..(562): unsure at all n locations; Clone ID: LIB3828-031-Q6-N6-A6
aatgatgaagattgattttatataaacaatgaatatatataaattaattacgctacccctcctcccttgagatttttaatgaatgttttatatggaatcagatgaatccactatacaaattacaaatgcaactactcacaacgcaaatgtaacttagagaacaaaacttttttttatatgaatattaaattattttcgactgccaagagttagccagctctgcactttcaagggcatatgacggaagaacctctgccaacagccattgtcacatgtaacctggataactccagaatgctcgcagacatcattcatctatctcaatatccgaatgctcaagcattatattctagctgacaacttcatatatcaattccaggaggcggcagtttccagaaattccatgaattataatcctcctgctcatgagaagccattggtggaaacatgccatgcacaagagcgtgaagagaactataagatttntgtgtcaacaacggcggttcacaacaacctcaccctttggattaataatngaagatttttcctcttgggattccaa

SEQ ID NO: 10786 - DNA, 560 bp, Gossypium hirsutum
  unsure (1)..(560): unsure at all n locations; Clone ID: LIB3828-031-Q6-N6-A7
atccatcaaaagtcgagcatatcggctgcgtcgcacaaggaagttgccatggcttcatcagaggatcggggatctccgggatatcgacgtcgtacccgcttatgtcttccaccatatgcagcatcgagttcaaggactgcaagctctcggtcaattcaattacttgagctcttaagacactgttggaagcttccattttgacgaagcgttgggttgtgaacttgatcttttcacagatctgggtgttatttttctgcaatgcactcacttcgttaactaaatcttcgagtagcttttgtttcttcatacgcgatcgcctcgctgattcacggttcgacagcatcctcttccttttcttctcgtcgatgttggcgtatcttgggtcggaatcggaggaacacgccggtttttgcacagtagccatctcaggggggagggaaatttttttaacaaattaaatgaaaatttagagattttaatttccttcaataatcacagaaactaaactagtaactacaacttagctntaaacgatcacattgatgaacaaagaggtagtc

SEQ ID NO: 10787 - DNA, 536 bp, Gossypium hirsutum
  Clone ID: LIB3828-031-Q6-N6-A8
gagggatgatgtgtttcttatttacaaatcatttagtcctcaaatcagattgaagaaagaaacacatcaaccctcaaaaaaaaaacccttagctttaactaaaataaaataattaaattaaaaaatagaagccagcacaaaaccctatttttccaatagcatgaatgaggtaagtgagcaacaatgccaccaccatcaacatgcatgcaatcccttggtctatcgaattccctccgtcgcttgttggggaagaggactgggcttgaatggaagcaggcaaggtgataatagcacagcaaacaatagcaacgaatataacgactaaacaacccatgggaactactgccattattcttccttttgcttttaaaaactatttgtatataaaatgcttgaactctctttctctctctctctgccggggtgaagaaaagctttagagtttttttttgtgtttaaagataatcaatctcatgcaatggctcaaaagagcctcgcagagagagagggtataaactagagaggatttttttttt

SEQ ID NO: 10788 - DNA, 552 bp, Gossypium hirsutum
  Clone ID: LIB3828-031-Q6-N6-A9
ggcagcaatgaaattgttgaaagcttgcggatgacttgaatacaaacaaatggtccaaaatattttatttcattaaatacatttggaactcaagctttctcaccctctctctccccatacaccagaattggatacagatttataagcttatttaaattaactgctgaaaggtggaggccttggcatgccttgcacgatgccgcaagtcaatacaccttccggcaagttgtactcatccttgagggatcggttaggggaaataacactagcataaagctgttgcccaaggtaatgcctgtcccatatctccgacctcaggttccacatcccgcagttgtcgaatgtcaataggattgctgaccaggagttggggaatacctgtatggtgtgtctgctcacggcgtcgagaagattgtagttcatcctcttctcagggctccatttcccaatgtccatgcccacggcaaagaatgagtagccagacaagtggtaagactgaatggcggtctcgggattctcgaagatgatttccacaaagtttctgtgtgtcat

SEQ ID NO: 10789 - DNA, 557 bp, Gossypium hirsutum
  unsure (1)..(557): unsure at all n locations; Clone ID: LIB3828-031-Q6-N6-B10
gatcaaanactaaatgaaacattaatctaacataaataaaaacagaaaacaacagaaacaaacaagacatgacagttttgttctgtttttagtctgtacatgaaaaacaaaggattcaaaaaccagttacctaatttaaacttatgtccctttttttttttctctaaatccaaatttaagctctaataataataagctttgtgtcgcttttgcttattatataattattgtcattcttaagcaacactgatgattttattgttatctccactgctaaagtttggcatcacctgaaatggagaatgcctggaagttgaagatgatgatgaatccatttgatcggattgcaaagacagcttgagtgacagcgataaaggatccgtcgccggatttaagtttgtgttgagatcggatctctgaagagctgggaaatttggaaccggacggatgagatttgccgtcggaacattgttattcaattgattcccctgtgctattgtgagattttcagtcggattctgaattggaaccggcggaactacctggttaaaggccat

SEQ ID NO: 10790 - DNA, 549 bp, Gossypium hirsutum
  Clone ID: LIB3828-031-Q6-N6-B11
aacagatgaaatcattatcttcttgttcttcgaaaaaatcactgttacattcgcatgcagtcataaatagatgatagatatgcttcctgaataattaattataaatatataaaatcaaatcaatccaatggtcacagtgcaactcgtgccggaagtatggtttaatgataatcaatccaagtttcggctcaactgctttagctttatagagtgtactccgttcttcttgtttctcggattcatgtttaccaatagtcaccgcaagagcaaaccccatctttgaaatgatgaaaccggttggaatcccgtacgatgatctctctctcggtgatgctagatatgtacttggttgcgttgtggcaatcaccgcaaacgctcaggttcttgaatattcgaataggagttttaggaggggtgctgataatcccgaatgcaatcgccaatctctcgctgtgactcataaggatatgctccttctcgtcttcttcgacatccaacaaaacgaaactgtagtctggaacatagcctagaactttcattttagcattc

SEQ ID NO: 10791 - DNA, 528 bp, Gossypium hirsutum
  Clone ID: LIB3828-031-Q6-N6-B12
caagttcaatactaattataatataacataaaaaatgtgaattattagtattatcagaactggccgataatagcttctcaagtaaatacaaattttacaacaatgctagtaatcaaatgtgtaaatacaacctccaattcaggtattttcaaatggaaaactttgggctccagttttaacgtacaatatccatgcgtataccttaattttcacgccaagcaaagcttctcaatgtcttcactgttatagtgtttcttagctggatgcagcttgatctcataaagctttggccagagttttccggtaacaaaaatgcgattattgccgctatcccaagcgatgccatttaaaacatcaataccgttatatccggccgctaatagtccttctcttaaacttggaagaagaatccatccaagtattgtaccattattaggtgagattcttgcaatgcagtcagtctgccaaacattagcccatatttcaccatttatatattccaattcattcaggtagcgtacattttga

SEQ ID NO: 10792 - DNA, 100 bp, Gossypium hirsutum
  Clone ID: LIB3828-031-Q6-N6-B2
aaatgttgttacctattttttaattggagacttatacaggatattccctacacattgaaaactaaggctccacactatatgatttataatctgaataaat

SEQ ID NO: 10793 - DNA, 549 bp, Gossypium hirsutum
  Clone ID: LIB3828-031-Q6-N6-B3
caaaaataatattactttactggctcttgcgtgaacaacatatgatgtctttgcaatatttgggtatcaaaccaagctccttaaacatgtaccatgacatggtccccttacattattagaccattttttataacacaaggcattgtcagaagccatgacagacactcatgaccaagcatcaacagggtatgatgcacatgctgccacacctcacatgatttttccccatctaacatgttgaaatacccattagtaccccattgagcttccaatgagcttttgctgagccattactgaacaccgtacagaacaccatctgccaactgcctgaacgcgctggttcacatactgcgtagtggacccacattagccactggtgaaaaccccactcttgtaaaatccataactaactgataacttgaaacgcaacactaaccggactgaccaacatctactgcatgcttcaatttttgttcgacacccaaggtcatggtgacagagtcaatgacttggacacccacattttcaggtgagaatttgcattcacca

SEQ ID NO: 10794 - DNA, 565 bp, Gossypium hirsutum
  Clone ID: LIB3828-031-Q6-N6-B4
aattctaacatgcaataacaagtgcaatttctaattctaacaaatcaaaataacatcatatacaatatgtacaaattaattgaattttgatgggttaaaatctatgttgtgctaccagacttgtctgacaatttcttgaacttcaccattgacttcattcatcactctcgaccattgttggccttccagttaattctatttattccaggatctcgccatttatccatttctcttgcattatgagtaccttcgttgtgctcggtcttgtgataaccagaccagatactgattcagctatccccttgatcggttgatggtgattggctttctcctcttccgtgggttcatcaaactcttttggaatctcatcctcttcaaggatgggcttacttggcgagttcaattcttttccctatcgcaaagaaagtgattttacttgctccttcccatctttccaagggttgttctttgtgtttctagggagactatccattttgcttttgtaacattgccactaattggttcatttgatcgtagaggttgtccattcaggattcgagtcgtc

SEQ ID NO: 10795 - DNA, 349 bp, Gossypium hirsutum
  Clone ID: LIB3828-031-Q6-N6-B5
aaaaattatagaatatttaatagtaatataattcaatgtacaccaatatgttgttgatcttattctctcaactctcaagcacacacataacaagcggaaatgaggcaatcttttaagtataatgaaatcttaatagattgctcatctaacaaggtttagtgcaatagcatctgcgaaagaagccatggcaatgcccaccatcgaaacctggctctactttgcaaatactatcacaattagcatcaaataagcatatccccttgtattcactacttttggtctcacatgttctaccttccactgtcatagatcccatctctgttgctagaagaaccaacataagaaggac

SEQ ID NO: 10796 - DNA, 554 bp, Gossypium hirsutum
  unsure (1)..(554): unsure at all n locations; Clone ID: LIB3828-031-Q6-N6-B6
aacacgaaatcaattgtgggtgggtgggcaggtaaataaataaatatattacttatggtcgtgaactttacagttatggttcacttttcttttatgagggatgaaataccaaaatagtaagataacgaacatatggatcgagatccttatttaaatttactggtactgcgtatctaactttctgttgctccctctgcctctgcctctccctctccctccgccgcaccgtcttcaatggtcatagctggtccgggtccaaaagacccttcaaatgccattgtgggtgaacttgctggtgccatttccggtgacattgcgtccacaatctcgtcaagaccctcttcattctgcccggtggcgtctgcatactctgaagtttcctggtttgtctgttcgggggaaggtgcgggggcgtcgtgacctacggcgctgttgattgatagaatcaggaccaatgagaataccagaagcaaagcaatcttggccattgatatttgtttttgtttgaaaaatgaattactaataaaacaaatgcaaatcgnacgcgtgggtcg

SEQ ID NO: 10797 - DNA, 518 bp, Gossypium hirsutum
  Clone ID: LIB3828-031-Q6-N6-B7
gaccaaaaaacatttggggttttattatctgattgatttgattcaacaaggcttgattgtaaacctctgaaacacattagctctttatattaaaacaacagttatgtggggtctagggctgagtaactgtactcataatcttcgacatctttttggcagctccagcagcaaatcgtccttgaagttcataatgagctggaccaactggtacacagctcccagggccattcactaaattgcaattgccggtagtacatgcaggaacacctcctgagccgtatcccacgccaatccctgaccctagtccgcctgatcctgacccgattccaactccagtcccaggtccattccagttgtttccacctgatccaattccgacgccatatccaacactatttcctgactgacctccatttccggtaccaaatccaataccggttcctaactggttcccatttccaataccatatccgataccagttcctaactggttcccatttccagtgccatatcctatg

SEQ ID NO: 10798 - DNA, 541 bp, Gossypium hirsutum
  Clone ID: LIB3828-031-Q6-N6-B8
gggagaaacgggtaaatgtctgccctaaaatttcaactttctaagggaaatgatgttgatgatctactttattttttttttcagctttttcaccattagaaggaaaaaagctttacttttcctctgatggattttggagatttttccatttacagtagaagaacagtaaaaaaaaaagaagcttccaattacgacctaatcattcgcccaccgcgtgcaccgccgcactggccactcgccacctattgggtattgaattcaacttctaccgcctccacttcaacccattaatttctctcttcttcttcttcttcttcggacaaaattcttggagagtttgccttattctcttgcattccgtttctttaatcccataattgcatacatacatatatgtttgatttagattagatccaccattgaagacttggagcttgttcatctgaaaagaaattgcagacttcatctgcagtactactgatgaaatcatgctcttccatcttcacaaattgcggggtttgatacgttgttttgaacaact

SEQ ID NO: 10799 - DNA, 558 bp, Gossypium hirsutum
  Clone ID: LIB3828-031-Q6-N6-B9
gattcaatgtaaatctgtttattttccattgctagagaactagatgaaccactgtcttggcaaatataatctaaatttccaaaattgatatcaacaatagagaatactacatagctattttgactctaaactaggaactctgagtcagcaagttccaggatcctagggacaccgatggattttgctcctttctggaatgaatttcctgcaatgtacatttctttcacaaagggatgtctatagagtgcttcaggaattcttcctgcaaattggttgtgatctaaatgcaaggatgtcaaccgggggagatgaatgatttcatgtggtattactcctgaaagtttgttgtaggataggtacaagatttccaagttggtcaagcctgctatctttgccggaaatcctccagttaagtagttattatttaggtaactgcaggcaaatgttttgaacaaaagtcgcagcaattatccattcattggatttaatgaaggtggtaacggtttgagtgaagttattgtcaacttacaggtttcgaagcgatgggaaacaaccata

SEQ ID NO: 10800 - DNA, 534 bp, Gossypium hirsutum
  Clone ID: LIB3828-031-Q6-N6-C1
aatataaatagaatatatattgaaatagaagagccactgaacaaaaaaaggaactcagtttctggttttaagaatctgatttcgacatggccatttaaaaaatccaactatattgatcccattctcttgtgcccaattctaacttactatatggtccaaatattgcaaaaactaatataatttttacatcattccaaccattttaaacgcggctaagtgagaagattcatccatccccaacatctcacttaattgcaatggcaatctgctttgatggtgggtgcggttttcttagattgacccacaaaaaattcaggattacaaccttattccgatttttgcaaaccttcgagctactccgaatataacagctttggttaagagccctcgatctagaatacatgcaaccgcgatagccccaccaacaactacaagtttgggaatgttgatcttccctggtttctcagacgaattgtgtgtttcaagctctgatgaataattactattgctttccaaggatgtcagatagtcttg

SEQ ID NO: 10801 - DNA, 499 bp, Gossypium hirsutum
  Clone ID: LIB3828-031-Q6-N6-C10
gcccgggtctttattttatttatacattcaatagctagtcaaataaacttaaataaagtcccaatagtccatttacaaccttaaataaacactaacaaatagcccaaacatatacaggaggcccaaagaccaataagcccaatttgcaaaaaggcccaaacttgaaagaacccaaaaggggaatctcagcagctgaaagcactaggggtttttagaacacaccagtgctgcaatcacggttttcacgagcaattttttccgtacggccgttgctccatccctgcattagaatacacgagaaaaggatagaaacagaatacggtagatgacaacaataaaagggatttttattttatttttattctgaaattttagctataaaagccgatgattgtacctacaaaagggattacgctcaatacacgcatgcacattagatattcaaaaatctagcccaaaatttgaaaggggaattccaaatttattctttattttcttt

SEQ ID NO: 10802 - DNA, 545 bp, Gossypium hirsutum
  Clone ID: LIB3828-031-Q6-N6-C11
gaaaaatgaaaagataaaagacatgccaatattatatatatatatccatgaattggtcatcatctaatgtaatcagcacatcttggtttaacaaaattcatgtctgcattttctattatctgaaactggcattgccttgccttcaatcccaacccacctctgtttccaatttttttattcaatttaaacttttgctgcaaacttaatagtttcagttcacaaaccccatttaaatgtgcagcaaccacggttatgaaatatttcgtcaaactccgcaaccatacactacacagcctaatcactgttttgcgccgatcaagttcctgatgacatactgcagaatgcctccgtggttgaaatatgccagttccacctctgtatcaaatcgtacagtgcaggtgaatgacctgccactgtctgtagccactgtcacgtcttggccaggtcgaatttcgctcacacagcttggaagatcaattgtgtagcgctcatggccagtcaatccaagagtgtcagcatcctctccagacttgaaacatagggga

SEQ ID NO: 10803 - DNA, 428 bp, Gossypium hirsutum
  Clone ID: LIB3828-031-Q6-N6-C12
cagctccatttcaattttttcaatattcatcacatgtttcttacaaaaaaataaaaaataaaataaaatattcgttcacatgttcatttttcatacatgtagcacgtagaaaacaaagaaacaatggaagccccaaccaatgatccaagaacaggcaaggttgcggcagccacgctggaatctggtcctggtgctgtggcggaagcaggagaggagctaggactagaaccaccggctgaaggggaaggagcaggtgcaccggcagccatgacggcgctcattgaggcggcagcaacaatgatggcggtggagaccttcttcatgtccatggcgtataaagggattattagacgcacatgaatgagacctgtgtttaataactggagaatggggatccgccggtgattgtaattattcccacgcgtccg

SEQ ID NO: 10804 - DNA, 506 bp, Gossypium hirsutum
  Clone ID: LIB3828-031-Q6-N6-C2
gaatacattaacatatagatatgtagtattaataataaatatttttttctatacatccgataataaaaaaaaccatcaagcactaatccgattttttttagaacatccaacgcccgctatattatgcattgaagtagccccttcaattacatttggctcagacacaaataaagttgatacaccgcaataaaaaataataaaccggagtttgttggaccgccatgaagagataagagttaagcgcagggcggtggcatctgctcgccgatgtagttaactttgacgttggtgcagttagaactgaagggagtgtcttcattatgatcgggaggaccggaatactctaagtgaatgtccttgagggtaatgccttggcatggaaatgttgggctgcaagctaggactatagcaattttgcttattgttgttcctctgatgtttgagaattcaacgtcggagatgagcacttttgagtccacactgcctttaatcgttgcatattcttg

SEQ ID NO: 10805 - DNA, 547 bp, Gossypium hirsutum
  Clone ID: LIB3828-031-Q6-N6-C3
aacattcaaacaatgaaggctttcaaattcaatattctgaaaaaaaaaacaatatccattggaaataccaatataaacaatccacggttcacgaattcaaacagtatatatatatatatatatgacagactgaatgaaagaatcaatcagatttttccaccaagtaaggggaccaagaaattcctgtaatctccagaagtatccccagtaactgcatcatcgagactggacttataaatgttcaaatattctgattttactttcatcatgtcgatttctgctctgcttattattgctcttgtcagggaaatcttcatcggttcccagtccaatgattgaagttcctacaacctctgcaaagtgcttctctggggaatcaatgcacaaaataaccattctcacaagtgattccaaatcacccttcccagatttctcgatgtccttatcaataggatttccatgttttttcttgtagcatgcaaatgtagtcctgagttgatagaagtttcttgtggaaagtataaaaactacatcatcatgggccaaa

SEQ ID NO: 10806 - DNA, 233 bp, Gossypium hirsutum
  Clone ID: LIB3828-031-Q6-N6-C4
aaaaaaactcaaacttgggaattcaataaccggggggggaacatacaagggtcccatatgagggacattcaaaaagggccccacattgggggatgggggtatattcaattggttaaagactatagggaatttggagcccttggatgaagggtcatatgtttttgatgcatttggagtcggtggatgaaggataggttcatatctccgcatccatatccgactatacttcaagc

SEQ ID NO: 10807 - DNA, 541 bp, Gossypium hirsutum
  Clone ID: LIB3828-031-Q6-N6-C5
agaaataaaattatatatttatttttataccatcagaaattaaacactagctaaaattaaattaaaataaaattcggttcaattcggttcggttcttttctgttctgttttaataatatttgtggttttttttagaagttatgaaccgagaaccgaatgaatacattacattgatattattagtctaatcaaaaccgaagcgaaggctaaattcgaatcggatttctgctaattttaggcatttttctcagcccttgtagatatcacacatcagcaaacacatggtattctttggaatcaacagctatgagcctcaaagatgcaatcgttgctgcaatggacatgagagcgaagataatgacattgagccaatgccagaacttttgcaaggtactcagtttatccttctttgccacaatgtacatgtggtttgctaggataaatgttagtggaaacgtgctcaatgcccctgtaaggctttcgaaatctccgaggaacggtagaagagcagacaccagtgtactgataacgaggtacccgc

SEQ ID NO: 10808 - DNA, 420 bp, Gossypium hirsutum
  Clone ID: LIB3828-031-Q6-N6-C6
gagaaacgagaaatgcagttttataaaaaagcatgcaacaacaacagcaaatgctaaacccttccaaatccaaacacgagaacaacaaaaaaaagaaagaaattgcaacaactggtaaattaaaggatgccaaactgaaagatctcagaaagcatggaagacagagatagagcttcgcaacgacccatttttattgagtgaagaaccaaagaaatggagtccgggcggcgcccaactagatctttatcttgatgttgttgacgagcttaaaagtgtcatcgaagtcgtcttcatcttcgggggtatcttcgcaacgttggctatcgccaggctgagcaccgccatggttgcacccatgatcgttttgaccggcgttgctggctttaactaagaaagaacacaccaccagcgtgatgaagc

SEQ ID NO: 10809 - DNA, 539 bp, Gossypium hirsutum
  Clone ID: LIB3828-031-Q6-N6-C7
cttaaataattataattatttatccaatgaattgaatatatattatggtattaataggcgtataatcaattaaagaaaacattaaatcagttaaatgaagaaaaagatatctacctacctctctatattacattcgtgcatggtcacatcgcatgttttgcaggtccacacatatttttcttcaacatgtattcttaaattataattataaaacatataaaaggaagtgaaatatttcaataagcaaacagaattcctaggccaatttcactgaaaaagctgttcacttgttaacagggtaactagtatccattgcaataccacaaagaccccttttatcagagactccacgttccatccttacatagccagcttcaccccattcagtaccccatgaatttttcactatccagtactttttattaagaacttctccatagccaactattgcaactccatggttgagttcatttccacaatctccagtgaacacacctccgaaatagaattgaaattcgagccctgctgcatcgatggcg

SEQ ID NO: 10810 - DNA, 529 bp, Gossypium hirsutum
  unsure (1)..(529): unsure at all n locations; Clone ID: LIB3828-031-Q6-N6-C8
tttttttttttttttttttttttttttttttttttttttttttttttttttttttttttaaattttaaaattttttttatttttttaaataaaatttaaaaaaaaaaaaaaaaaaaaaaaaaaaaaaaaaaaaaaaaaaaaaaaaaaaaaaaaaaaaaaaaaaaaaaaataaaaaaaaacagtgtaaaaaaaaaaaaaaaaaaaaaaaaaaaaaaaaaaaaaaaaaaaaaaaaaaaaaaaaaaaaaaaaaaaaaaaaaaaaaaaaaaaaaaaaaaaaaaaaaaaaaaaaaaaaaaaaggaaaaaaaaaaaaaaaaaaaaaaaaaaaaaaaaaaaaaaaaagaaaggagaaaaaaaaaaggaaaaagaaaaaaaaggagaaaaaaaggaaagaaaaaataaaaaaaaatgtaaaggaaaaaaaaaaaaaaaaaaaggggaaaaaaaaaaaagaaaaagatggaaaaaataagaaaaataaaaaaaaaatgttnggaaaaaaaaaagaanaaaagaaaaaaaaagggaagt

SEQ ID NO: 10811 - DNA, 550 bp, Gossypium hirsutum
  Clone ID: LIB3828-031-Q6-N6-C9
gaaaaatgcttggatttttacttttttccatttatttttacaaagagaatcaatcccatgtatgctatataaactgaattccgggaaactagaataatcctagattcttttacaaaccgatcccatatatgctttctctgtgctgtatcagacaatcaatggctttctctatgcacataaatcatatcatctttgcagtgagcgataccttgaaagctcacagagatggtaaggaagtatctatgtactgaatatgaactagtctaggcttctttaatgtatcactctatttagacttcttcatttgcatgcagcttcaactgatagcttcttcctgctacctggacatggatctcctccgaatacttcgggagccacggttaccgaacacgattgttttccgatgcaattcttttggaatgcgccataggacttgtgggcatggcagcttccttcacggaagtttccacaactcccctcaggcattccatagctagcaaagtttattttagaaattttctggccaggaggacaccacaaatgggcttta

SEQ ID NO: 10812 - DNA, 455 bp, Gossypium hirsutum
  Clone ID: LIB3828-031-Q6-N6-D1
aaaacttccgtcaatcatgattcattagcaacactgttgtctccaaagtctttaaaacaggttaacagtttcaagtttcccggagtttcggttttaggcaacaaaatcagtaggtgaaaatgttagctgatcctattaaagggttcaacatcaacttagcttcgccccatggtaatagttcaagcgaaggaggggaaaaagttgcatacacaaaccctcatcgatcaaagtagctcagctaactggtttaggctcaaatatgtcctctatcaagcctttcccatccatggcatccaaaaaaaagaaattcttgagaggatctcctttgcctgatattggtttgatcacctcctgtccaaggattcctccaatgatggcacaaactggagggtactcacttgtatccattagcagtctttctaggagtgcatcgggtatttgagactcggtcactg

SEQ ID NO: 10813 - DNA, 338 bp, Gossypium hirsutum
  Clone ID: LIB3828-031-Q6-N6-D10
ggaataaaggttgggttttatggttcaaaataatttaaataggtaattaggggatccaatcaattacagaatttttttagaggccaaagattacgggggaaaaaaaggagggggcacatggcaaaaaaaaaaaaaaaacaagaagctttgaaaccacaacaagagaaaacaacatttaaaaaaaaaaaaggaggggggaaaacttaaaaaaaaaaaaggtgccccaaaaggcctgccaaggggcaggaaaaaaaaaatttaaaaaggcgaggaaaaaaaaaaaacttataaaaaaccaatatctaaaaaaaaaaagaaaaacccacatacccgccctg

SEQ ID NO: 10814 - DNA, 466 bp, Gossypium hirsutum
  Clone ID: LIB3828-031-Q6-N6-D11
ggccaagagaagcgaatgttatataatgtgaacatcaaatttaaaatacataataatttatatataaatttaaaaaatttaaaaatttcaaaggggtgaccgctcccacccccttggatccatccttgcttccagcatctattgcactcttgatagcgaatttcaggttcccttctacagcgaatttcggattccctttttcgattgcttcaatgaccctggagaaagggtttatatgaatcaaagcagccttttttaaactgggggctttgacacttttgagcaatgttaaaatcccattcaatgtgccatcggctttggcattgacaatattaaccagatgcgagcgagcccctttaccaccggggtcgaactcaagggatagggttttaaagtcgagaacaaagatcgagaatggaatccttttgcaagtgggttcaaacaaggtgttggctgagtagcttac

SEQ ID NO: 10815 - DNA, 558 bp, Gossypium hirsutum
  Clone ID: LIB3828-031-Q6-N6-D12
gaaaaacaagaaagaattttccatacattgagaagcccacacagaaagaaacaagaccacggagttaaacaaagcaacagatacacaaaaacccagcaaaaataaaaatttacagaaaccctcattgcatgtttaatggcacaaatgggaggggtttcacatgtgatataatataatattcagacaaaatatgtcttaagcatactccgcatactcacagagccgtgagtcttgtagggagccttttgcattctagatatgacaagaacatttcaaataaataaaaaatctcttcatcagacatcatgatggccacggaagtgaccaattagtctgcactgttccggaagcaacgatgacactacttctccattgagggggaaatactcaccgtcaatgccacaaccgttatgcgtgcatttcccagccttaattttgacagattttaccttgacatattcaacatatggcagtgaaaggtgtttacccatctgtagtagcacaaaaaatctcatcaaccggagtcgcccactcccgtgaactaagagcatatccatg

SEQ ID NO: 10816 - DNA, 554 bp, Gossypium hirsutum
  Clone ID: LIB3828-031-Q6-N6-D2
agttaataccatcttttatctttatttattcactttagaataatacagagattaaattgccccgtttccgtttatttttaacgggactaaattgctcatgaccctatagtacgtatttattcctaaattaactctttccaagttacagaaagattgcaacaaagttaatggcaatacaatgcaggccagccaccaactgcagtgcagagccatatgaccttaacccttttcctgcagtttacttctccattgaaggaaagtagagaaaaattatgcatataagcttgactagatcggtagcggtttacgacctcttcatgatgtatcccataattaacccaatcaagccgatcaaggcgacaaacatgaaagacagattgcccccacttttgctgctttcgcgcttcaacagttccagctcttggcgaagcttgttattttgttgaattgctttatttttttcatcagtcagcttcgttataagagcttttgcctcaggagatttgtcttgagtgtcaagctgatccataaatgttcttgcagccataacaaac

SEQ ID NO: 10817 - DNA, 533 bp, Gossypium hirsutum
  Clone ID: LIB3828-031-Q6-N6-D3
gagacgtgtagaataattttcttttaagcattcaataaataagtctttacattgtaaggcccaattttagcccgggccatacaaaaaccaaaaaacaaaataaaccaaaacaaaaaaaaaaccaaaattaaagtccaatgtccataataatatcccaagcccaaaatccaaaataaaaagcctcaaaatacaaatcaaattgcaacggcccaatgacaaaaactagcccaggcccgaaagtttaatatttttagaactatagggttccctttcccccttgtgccgctgctaccttcgtgccagctttcacgcgcgccgttgcttcattctccacgtcgacatgcccactaatggcttttccacgccatacacacctacaacagactaacaaacaaaagagcaatggacagcaaataacagaaattacagcaaggaaatttgattttcttatttattttattcttatttttcagctataaaacgaaatgaaattgaatgtaaagggggatttttgggagagacgatacaaaatc

SEQ ID NO: 10818 - DNA, 462 bp, Gossypium hirsutum
  Clone ID: LIB3828-031-Q6-N6-D4
aacacgaatccgacacatccaactaattttttttaaaaagtggagtcaaggtaccgacaggtttcagttggaagctgcaaaggtttggttaaatgggaaattttgatccaaaagagggattggttggcagaagaggtgtacaaagaaatttttggttggaaaagcttggatgataccatggtggatgatcttgtagacaaggacatgagcacaaagtatggaagatggcttgattttgacatggaagcatttgaagagggtgtagaaattgagaagattgtattaacttctttagttgatgaattagtttctgatttattattattgctttaaggtagcctctcttcttcttttttagtattttttgaggttccattgttaaaatcttctttgctcagaaagaagatatatatatacttgctgtataattcaaaattgtgaactttgcatccatgaaaatcg

SEQ ID NO: 10819 - DNA, 497 bp, Gossypium hirsutum
  Clone ID: LIB3828-031-Q6-N6-D5
gaagaataaaccttcaaattcatgaaaaaacttacaaattttgaacatactgatgtcagacgacactatgttcaaattcaagtaacatagccttgtatatctattgttgaagtttaccaaggttatatgcatgcatgcatgctaaataagattaactataagactagatataggcatttgcggttaatttagttttgattcaaagatacgactcaaacagaatgcaaatcagattgcatgatccgaaatgtcacgcaccgtacagctaagcattagccagcaatggctgttcaagaaaagcttccattagaacataaatgacgatagtaataaaataaggaagcattccaaaggagagatgcacgtatcttcttgccaacatgctatatcattcacaggcagatttggaagaaagcggctctggtagatcgcaaaggcttgaaagccgggagagttaatccatggcaacaccgattcactgatcattcgcaagctgg

SEQ ID NO: 10820 - DNA, 553 bp, Gossypium hirsutum
  unsure (1)..(553): unsure at all n locations; Clone ID: LIB3828-031-Q6-N6-D6
gngaaagaaagaaagcctttaattagcatctctgaatattatacagtcttagctgcatttctctgctttaacaaatctcctgtatgaactgaaccctaaacatttaacattatttngaaaaagataattacatgttgaacgccatttttaaagatggctcaactctgaggattggcctcttttgaccgcaatgctttggtttttttagggaagataaaagccaagcaaccacttctcctatgcctgcggcgagtagtgctgatgctccggtagcttctgccgctgccactgctgctgctacggatgcttttggtgctgccactctttatagtcgatccgctgctgtcgctctcgctcgaccccgatctcttcttccaccaatctttatctacagtcttaccagatgcatctgctacagtcggctttggagaaacttttgaattactattcgtgttaggatcattcttcttactcttattcttcttcatcttcttctttttcttagaccctaacgaaactggaaacaccatttttagaagaaaccctccattat

SEQ ID NO: 10821 - DNA, 531 bp, Gossypium hirsutum
  Clone ID: LIB3828-031-Q6-N6-D7
attataaatttaatgtaaatttaaggaaaatcatccatccatacatagacatatgcatatatacagataatatttataggttaatactgtacatatcctatttaaacaagcaacgacatgaaggttccatcttaaaggatactacatagaaagaaaagcacaacatgggctatggggaaaaatagtaggaaactgatcaaatatgttcctggaatgaggaacaacgttaatggtggtgatgctgcttctaccactctaagattgcggtacgaagtgcgtggttagggatgagattgcgatgagcaagtggaatattcgtgcaaggagaggtattgtgcccaccatccagccatctccgtatctgtcgtaactcataggtgaatccatcggctgccacatgtgggtccgtcatgatttcctttgaaatgggacaaaagaaagaatcaggaggctgacgaagctctccagaccctgcatggaatgttgataagggtccaatagtatttctaatcggttcaagcaccttataca

SEQ ID NO: 10822 - DNA, 427 bp, Gossypium hirsutum
  Clone ID: LIB3828-031-Q6-N6-D8
gcataatctttccctataagtactatggggtaatatgctactgaatatacagaaaataaaattttaaaaaaattctttcactcaattcttcagatgtattaatcattgttcgtacctaaacctctcatccttgaaaagcaactctatgagagcatctctcaaatatggatttggatctgtgagaagccttttagcaaagtatgggtatgaagcagccagcactttaaaattcggatcggcataaagggccaacccttctagcacagtaagggaccgcaatatcagtgcataatagggagggacgttaaatgggtattggtataaaacagaacccaaaccatcaactagggtcttgaagtttaattcactaacaggggagctaagagcatcatcaaagaagtcccgaagtgccggcacaattggggaa

SEQ ID NO: 10823 - DNA, 556 bp, Gossypium hirsutum
  unsure (1)..(556): unsure at all n locations; Clone ID: LIB3828-031-Q6-N6-D9
aaaggaaataatgaatatattanttgtgaagtcggaatgtattgttatttggctagaaaattaaaactataatgcatcacattatgtaatatgttatattactgaaaagctgttgacatgaaaacttgaaatttcaattacagtactccatgcctatagtaggggtttaatttaatggtgaattaatccaacatgcacttgctaggagcgaaacccacctttttgtttgcgagatcaaattcccacaaatgattttgcattaagaggttgcccattatgttcatttcaggccaagctaccctaacaaacccaaggcatttcactcctttagaatcgtcgaagatataaccgtcgaccgccggctcgagcttagctcccccctcgaaatggatggccactcggggaatgatactctcatcaaaaatttcagctggtggagcattgaagcaataatccaaattacctttcgtcttgttatacatgcttaaagaaggttcgaaagcagcaatgactttatcgaacgcctgttccaccanatgcgttacggtagtacctg

SEQ ID NO: 10824 - DNA, 490 bp, Gossypium hirsutum
  Clone ID: LIB3828-031-Q6-N6-E1
cccccccccccccccccccccccccccccttttttctcgtttaaccccctttttttttttttggtttaaaccccttttccccggttccctcttaattttctcacttgtgaaaaggctcgtgacacgggggagacatgccccgggggtgcccatgtaccacaacaaaccgtagctctaaaactcaaaggagagctctaccccacctaccccaaggggggacacacaccaaaaacttgtgctaaaaattaacatcaggcgaaaactcccccaaaaagacccccggtcccgcgtgagaatttgaggtgaacatccccactaggacccccaccccgctgagaccccgccccctttatgtcaaaccgtgtccgggcacaaaacctgaaacccggcaaaaagctagatccacagccccccctgagcccccaggtccccagtgaaaacattgccccacgcgctagacagggcacccctcccaatctctagcgctaga

SEQ ID NO: 10825 - DNA, 430 bp, Gossypium hirsutum
  Clone ID: LIB3828-031-Q6-N6-E10
attcaaagctccattttattcatttttttcaatattcatcacatgtttctttcaaaaataataaaataataaaatattcgttgacatgttgatttttcatacatgtagcttactgcagcatgtaagaaaacaaagaaacaatggaagccccaaccaatgatccaagaacaggcaaggtagcggcagccacgctggaatccggtcctgatgctggagcggaaccaggagaggagctaggactagaaccaccggctgaaggggcaggagatggtgcaccggcagccatgacgacgctcattgaggcggcagcaacaatgatggcggtggagaccttcttcatgtccatggcgtataaagtgattattaaacgcaccggaaatgagagggacccgcgtttaattaccggtgaatggggatccgccgatgattg

SEQ ID NO: 10826 - DNA, 473 bp, Gossypium hirsutum
  Clone ID: LIB3828-031-Q6-N6-E12
agaataataatgattcaatttttattataggctaatgccgagcttttagaaaagttgaagtgaaaatacatattatagttctgaccaaggggcaatgtctccagcttcttggctaagctcataatagcctatctcttgaagaacttgagtacactgaggaagagcaaccttcctcttaaacccaagattgttggcaaaccgaagttcaccgctgacgccgtcaagtgtggtgagaaccaccctggatatcctccacatttcggagggatcattgcaatccgggttgggactcctcaccaaggcgacgtcgcagtctgattcctcataatcgccttccactacaatgtgatagtctccacgttcgtcagtcactatttggggctctggaaggtaaggtgattgtctgtaccattcctgcattccagtttcactactgctccaacgatgggttcgctgagtttggtctcaaactc

SEQ ID NO: 10827 - DNA, 537 bp, Gossypium hirsutum
  Clone ID: LIB3828-031-Q6-N6-E2
atgtagaaatctaaatattcttcaaaaacaatgcacttacattccctccctgggaaactcaacattcttaaaagaacccatctcaaaataactttcgtagtggggaaccccaacaactaaagctttgtcgacaattttccagaccccaacaatattgaacaaacaatggagtatgtagaaggaagctactgcctgccatttgtgtagcgaatacacattgaactcttaacttgctagaagagagtttagttatggttgtagtcggctgataaagggcctactagccaggtgcgatacttaaaacaagacacggatgtacagcacaagaagcttatttttacaatgtcacacccaaaaacttgcaaacagcttgagttatgtggcaggtttcccttctctcttcagcagttcctgtttggtagcagatatcgagacacgctgatgttcttttttctcacgttggcactctccacaccagattgagaaatctttctgatatttcctcagctcacgaaagaccgaacttctacaccacaa

SEQ ID NO: 10828 - DNA, 474 bp, Gossypium hirsutum
  Clone ID: LIB3828-031-Q6-N6-E3
cttaaaaattataattatttatccaatgaatggattatatatgatgggattaataggcgtaacaatcaattacaggaaaacatctaaatcagctcaaatgaacgaaaaagattttttacgctacctttttatattacattggggcatgggcacatagcatgttttgcaggtccacacatattatggttcaacatgtattcttaaattttaatcatgaaacatatacaaggaagtgaaatattttaataagcagacagaattcctaggccaatttcactgaaaaagctgttcacttgttaacagggtaactagtttccattgcaataccacaaagaccccttttataagagactccacgttccatccttacatatccagcttcaccccattcagtaccccatgaatttttcactatccagtactttttattaagaacttctacatagccaactattgcaactccatgggtgagtt

SEQ ID NO: 10829 - DNA, 345 bp, Gossypium hirsutum
  Clone ID: LIB3828-031-Q6-N6-E4
attcttaaattatcttccacctaaaaaagcactggacaaatatgaaatatcattgttatctcgatatacaatgtcactaatgaattccatacgtattattatgcgacatatcctacaacattcgcccccttttaagatttcttcttatcattccaaaccctttaccttaattttcttacctatatccccttacataataatcctcacatgtgtcctaacttaatcacgcttcacatcattactaatgtccatcccatttcccaattgaattgcatctatacaaacaatctacgagcctgctcattaaaaaatggccatcaaatcaccaccttggctccactgata

SEQ ID NO: 10830 - DNA, 304 bp, Gossypium hirsutum
  Clone ID: LIB3828-031-Q6-N6-E5
aatcagaacgatcaaatctgtactcaaatgtcttttgtttctcatcaagtgatcttgaaactcttttagccaaagataaaatatcaaattcctactacagttctggatctatgctcaagctcataatgatgatctaagaacttcatttcatgctaaaattatgaatcacggccggaaactgagaaaacagcagtccagcaaaacctggaaattatgattttatccaaggaaattcatgatcaccaaatggagcaccaagttgcaaagaacaaaatctgcaaaagctctctcaggtggtagatcc

SEQ ID NO: 10831 - DNA, 573 bp, Gossypium hirsutum
  Clone ID: LIB3828-031-Q6-N6-E6
gcctataatatttcatcattcagttcatttgctttcataaaactcaagacaatatttagaaagaaacttcaaagaaagaaaaatacaagtctgcaaatatccagaaatgcaacagcagttacagcaaaagtaaatgactaattctttcacatccaaaacaggaaaaaaaagcaccagcaactgggagttgagattttgaattgccaaaatggcaataactttccttctccttagtcctcatattcgggttcctcttcttcttcttcgtactcttcatcatcagctgttgcatcttggtactgctgatactctgagaccagatcattcatgttgctctcagcttcagtgaactccatctcatccatgccttcccctgtgtaccaatgcaagaaggccttcctcttaaacatagctgtgaactgctcactcacacgcctgaacatctcctgtatggatgttgaattgccaataaatgttgatgccatcttcagcccagtgggtggggatgtcacaaacagtcgatttcacattgttcggggatccactcaacaaagtatgaggagtttcttgttc

SEQ ID NO: 10832 - DNA, 561 bp, Gossypium hirsutum
  unsure (1)..(561): unsure at all n locations; Clone ID: LIB3828-031-Q6-N6-E9
agcgcaataacgttttattttcattatgatggtgattctaagaaactccacatcaaatttagagcatgaatagtaaagtgactgtttattgtttatgttggaacttggaacagaggtcttatcagctcaaatcatggcaagtaatcattagtggcctacgaaacagaattagagatcacatctcgccatccattcacattgccccttcttgaacctttggcggtcccattttgctatgggttaggctccatttaattctcatgccggtaaaattacgggttctgcaaattcaggaacaagcctgtgctgaaagtagtcagtaaggtatgttatagtctggaccgacgaatgcatttgattggattgaaatgggaattccgccacagagaagtataangggtgtcggctcgaggaatctgatgacttcatatcccaaccttcgacatccttggggacacagacatcaaaaagtatttgaccaagaaccccattgacatcaatgcttgagggttgaggcaaacggattaggctttccttttgttcatcttgcacagacccaaa

SEQ ID NO: 10833 - DNA, 494 bp, Gossypium hirsutum
  Clone ID: LIB3828-031-Q6-N6-F1
cggttaactcttttttctctcttacgattttgataaatatgtacatacatttattttgcatttgttccatgggcaatatttctgatcaattataataggagaactgacattggtcacggtaatatcctcaaagtgaatgttcgaaaaatgccaggttcagcacctggccaagttttgattctaacaccattggaagtattagtcatggtgcaattttttactgtaactccatcaactggttcttcatttttaaacaatccgagactgccaatactgataccatgtcgtggtccacaagttactccattgataaccaaatttttggaaccatccccaattgaaacacaatcatcaccagtttttatctctgagttaagaacattgaccccatctgatctcccaaggtgaatcccataataggaagtgaaccacaataatcatgacctttgcaaccttccattttataagcagtgggtccctggccgtcgaaaact

SEQ ID NO: 10834 - DNA, 512 bp, Gossypium hirsutum
  Clone ID: LIB3828-031-Q6-N6-F10
gaagaatagagattaaatttaaaattataccctaaatataatatttattcttagtgggacgtgtacccgaatttcatcacatattttacaggctagaaagtagaataaaaatgaacatagtttgttcctgaaatatacatggtagaaatttatttcttagcttcaagtccgactattcattttctttcttttcttatgaagtattcgtgtttaatgcataaatcctccatattcgtagaccaacatcaaaaagaaaagaaaaatcgaacatatccatgtcggacacaagtcaaattataatggtgatgggatgtttgtcgtctcctacaaccaagaaatgccttccttcttccattaccattaaaccatattcattagccctacttaaatgctcacaagggttaacttcaaactgaatttcacccatttcccctccacttaatatcacacttcgaaatccaatcaattgtttctttggcctcccatttccatgggttccatgccttacatac

SEQ ID NO: 10835 - DNA, 521 bp, Gossypium hirsutum
  Clone ID: LIB3828-031-Q6-N6-F11
ttttttttggcattgtataagtttacttgtttatttatttcgaagacttattcattgtgtatcatcatgttttttgttttgtaataataataacaaacacttaataataaacaaacaacgcgcgcgctcacatatatatatatccctctaggtcttaacacgggctgattggcctcgaatatcaaagggggtgcagccaaattggcaactggtgttttcgaaaaagcacttatagccgcatcctatcgagggagatgtcacacagcctgcaaggcagccgagataaccgcatttcatggagcaggacatggtactcttgccgcaatagccccccagttttgaggccaacgcatttgggggattcacttgggctgatgccgccttcgccaatattcctatgcagatactcaacaacagcaatcgtgccattaccggagacatggtggttggatcccagaccacgacccatattttagtatgctgctacggtcactaatggttaaaggacttgattcacccag

SEQ ID NO: 10836 - DNA, 530 bp, Gossypium hirsutum
  Clone ID: LIB3828-031-Q6-N6-F12
gatcaaggaatgatgtataaacatgttcctgcatggtaagattgcataaattagagacagcaattgctatccgaatattaggggacaatggtttcagtatttcacttttattagcgttctaaattcgaatgctttgtcaaattcagaaatcttttcttccggagaagccttgtactcgtccacgcccttcggtaaaaaccaatatggaagtcataaagaagatctggatggtcctcaaaaagagaagcaagctcagtatagacctcatttatgtccttgtgctccttccggtacatattcaaaatatccagaaatgatttataaacatgctcatcattttggaaacgtttctttattttgtttacaaaactgattgcttcatcaaattcaacagtcttttttggaggagcctcatcctcgtcaagggtaattccatatccctttggcaaaaaggtattaaatccataaatcaagttgttatgccctttgaataactctttcactcgggcaatgacaccagcagtgtcagt

SEQ ID NO: 10837 - DNA, 471 bp, Gossypium hirsutum
  Clone ID: LIB3828-031-Q6-N6-F2
aaaaaaaagcttcgtttggaaaaacatgggatggtcccaacacatagcttcctcaaagaaacagctcatgtttgatctcaactgtccctgaaaattctatgacaaggttgaaaatggagaaatcaaattgaaaaaggccccaagctttagtttctgcaacaatggcgttttggtcgaaggcgagacctcaccgatagaagcggaccttgtcatcttggccactcagagatgagatgtagatgggtagcagagcttcttgacggcacgttcaagctctctccaagtcactgtgaaggaaccaccaaggcccggtttttgatagtgttctgacaaatcctgctgtcattcgcagagccataaagagagttaggcccaaccaaaccccttgaagaccgagaacttttggagcaaagagcaaaaatgcaggaagagatggcactcaataacatcatagaacaagctgcataaggg

SEQ ID NO: 10838 - DNA, 570 bp, Gossypium hirsutum
  Clone ID: LIB3828-031-Q6-N6-F3
ataaaaatctaataaattataaaattaacaaaccttaattaaaattaacaaagaaagcaactagaatgaaacatgtggcaaagcaacatacaagagcaagtaaatgttagctagcaggtctattatttaattcagaagcgtccccttctaagtcgagcccatgctattgccgcaactgcagcacctcccaagtgagctgatcctgatatatgactatttccctctattatcctcaatatatctttcccaattagaaatatgcccagtaacatggcaggcactggtatgatgaaatcaaaataaagagtagcttttgggttcagaaatatatcaagcagcattatagcattaacagctccacttgcccccaatcctggagtccttgaagggtccatcatccgtgttgcttgtcccttagccaaaaatgcatggtgcaccaagtaaaacactgaaccacccattgccccagctagatacaacctcagcaaatattcaggtccaaagattcttcctatattatatccaaagaaataaagtccaatcatgttagacacaatgtgctcaatatca

SEQ ID NO: 10839 - DNA, 447 bp, Gossypium hirsutum
  Clone ID: LIB3828-031-Q6-N6-F4
ggcaaggaaattaaaatgataaacatatagtagaataataatgattcaatttttaatataggctaatgccgagctttcagaaaagttggaagtgaaaatacatattatagttctgacgaaggggaaatgtcttcagcttcttggctaagctcattatagcctccagcttcttggttaagctcataatagcctatctcttgaagaacttgagtacattgaggaagagcaaccttcttcttaaacccaagattgttggcaaaccgaagctcaccgctaacgccgtcaagtgtggtgagaactaccctagatatcctccatatttctgagggatcattgcaatccgggttgggactcctcaccaaggcgacgtcgcagtctgattcctcataatcgccttccactgcaatgtgatagtctccatgttcgtcagtcactattttttggctc

SEQ ID NO: 10840 - DNA, 544 bp, Gossypium hirsutum
  Clone ID: LIB3828-031-Q6-N6-F5
actaaattggatattgttatttaattttaattgaacttggagaagaaatcgaacaataattgattgatttgatcaggtatttcctcattgatccaatgagaaactccattgatgacaagagcttcttcaagaagggcacattccttttaaacccaccgttgtgaatataatctttgacacctggcattgtatatacgagatcatggtcccccattgcaaactttacagggacctggatctggcttttccaccatggtgctaatagttcccagtcgctataacagaaccaaccaaaaataaatgaatttagttaattataaaaaaaatgacactgtaatgaatatgaatttaatcgaaaatttttaacagtattaataattaaacttgtatttttaaatctgaaataaaggattgaattttaaatttacaaaaagtaaagggacttagagcgtattttaactaacatgaaaaacccataattaataattgggtaatctacattagtagtcacccaactattttttttcctttttgatcatccaac

SEQ ID NO: 10841 - DNA, 567 bp, Gossypium hirsutum
  Clone ID: LIB3828-031-Q6-N6-F6
gcgcctctcaaaggaaagttgtatcaatattaaatgattaaaactccttgcaaggagaatgaaaacaataaagaaagaaacatttcctcaatatccccaaacatctcgctcatatcttgaagttgaaatgcggttacatgatgagagttaattgcgagtggtctaacaaggcttgtttgggcggcactcgagtgttcctgaccacctcaccaggagtggcaccatgtgagccggcttatacgctatcatcttgtagcctccgaatttcttggcggccttcgggtctcctgattgtgtgaaaatggcaccgttcaacatcaaatcaccctctgatctccaatcccagttcttccactcttgctcagttgcatattccctcttgcaaacctgtttagctgcaatgttacgtggggctctaaatcggttgccatggctgataattgtagggtgactgctgcctccaatagcggacatgatccaatgacggtaatcgttgttcacaacatggacgaaaccaaatcggaccctaggcatcctttgtaccaaatttttaccgaagcgggtgaa

SEQ ID NO: 10842 - DNA, 474 bp, Gossypium hirsutum
  Clone ID: LIB3828-031-Q6-N6-F7
tttttttttttttttttttttttttttttttttttttttttttttttttttttttttttttttttttttttttttttttttttttttttttttttttttttttttttttttttttttttttttttttttgggggggggggaaaaaaaaatttcaatatggggggggggggggaaaaatttgggggttaaaaaagggggaaaaatttaaaaatttaacccaaagggggggaaaaaaaaaaggggttgggtttttaaaaaaaaaaaaccaaaaggcccaaggggggtaaacggttaaaaaaggggttcaaaccccttttataaaaaaaaaccttaacccctttttttaaaaaaattttttttaaaaaacccccgggggggggggggggcctttttttttttatacttttaaagggccaaaaaaaaaaaaaaaaatttggggaccccaaaaaaaaacgaaaaaattttggccttttt

SEQ ID NO: 10843 - DNA, 515 bp, Gossypium hirsutum
  Clone ID: LIB3828-031-Q6-N6-F8
aagaagcaaaaatatatattttaatatatatttcaaatccccctcatttgacacccaaatttactaattaaatttaccattttatggcaattgaggaaaaaaaaaagctccccaaagcaaagtgcagaaagattagaacgatgataaaaaaagaagagtttagaaagctcgctctttgacaatatcaatactcatttcacttgcatcggttgcttgcaattcaacttgaacaccatccaactctcttctgaatctatctttagagctcgcatataacattttgctcctcacccttgatgtatcaggagaccatgcaatgaagaagattttgcttttctggacattttcgtcggtagtgaagtcgaaatcaaagacagcgtaacgacactcgttatgaggcaaacaagcactgaagtcgtcgtatttttctttaggtccaccgagtttttcaaccatgacctgttgaatgttctcttctattttgaaaacgatgaacctgtagcttcttttggcct

SEQ ID NO: 10844 - DNA, 463 bp, Gossypium hirsutum
  Clone ID: LIB3828-031-Q6-N6-F9
aaaaaaggaaaagaaaaaaaaaaagggggggggggaaaaaacagagggggggggggcggccccgggagggggcccggcccggggggggggggggcccacccgaggggggggggagcaagggcagggggggggccagggggaaagggggacccggggggaaagggaaaccgctccgaaacccaaaacaaaaaagaaaaagccggggaaaaaaaaagagcggggggggcgaaaaaaaggggggagcccaaaaagacggggggccaggagggaaacccgcccaggcaggaaaaaaaacgagcccgcccaagtaaagaaagaggccaccccccgaggggggggggggggggtttggacccccaccagggaaactgtcccccccggagggggggccaccgaatgggggtgaaaaacacccggcccggggaaaagaggaggaagccccaccacgcgaaaagcccccccc

SEQ ID NO: 10845 - DNA, 568 bp, Gossypium hirsutum
  unsure (1)..(568): unsure at all n locations; Clone ID: LIB3828-031-Q6-N6-G1
agtaagctgagggaaaactatataactactagagaatttctgtacacacactcaagtgaatcagaaaagaagttataaaagtggagccaaaaacggcactggaaagaaataaaacatgcttactcttcttctccaccatcgttttgcaaaattatcgtttacaaacagacttacagcgttttttatcccggaaagaatggctggctgacggtgaacacctgctttctcatatgtcataatctatatctgttacattctgggccgcagagagctttacgagtctttcttcctcatcgtatctatcaaggttttcacaaggagcagggaagatggtccctattacacggccttcaacgaaggcacactggaatatatgcttcttcttatatgttatcccaatagatatatccctaaacgtcacgtttctgatgggaatatctttgcttccgtgtattctaacaggtacacgaactccgtgaccatgtatctcggtgaagctaatgtcccttattatntgngagggcctttcggtcaaagtcatcgtcagggtgctcattgtagtctgtct

SEQ ID NO: 10846 - DNA, 534 bp, Gossypium hirsutum
  unsure (1)..(534): unsure at all n locations; Clone ID: LIB3828-031-Q6-N6-G11
agctaaatgaggttcggtaaaaataaaccaaactatgtnngaaagttatgagcggaaaatacccagttggtacatcattaaattcacagataaaattccacattctccaaagaaaaaccaaagaggaacaagccaaaatagatatatgaatgcatatgccttaattatatagttttattaaagtaaattttcagagttaaaggaccccaaaaagggattattgatagcagagttgagctcagatccagctgagttgagaacttgcatgtcaaccttgtttcttgagagaaacaagaactcctctccttcaactttctcaaacccacacagctccaagaactccactccttttacagatccaactctatcctggaaagtttgattatttagtctaatttttctgaatttctcctcatcaggattcctggccacatttcctatgtatgtaagaagagtctggaatgctctcttgactttcgcatcatcatccttgtgattttgcttgagagatcgcaaacattcgcgcatatgttc

SEQ ID NO: 10847 - DNA, 574 bp, Gossypium hirsutum
  unsure (1)..(574): unsure at all n locations; Clone ID: LIB3828-031-Q6-N6-G12
cagcagtatggcttacattttcccaacttgtacaaacttacaataccatattccatcaacactatcatgcggtagaacaacttttcaccattcatcacacgaattgtgccgattagctcttaaaaaaatggtactttgattcaacatagctctctgcatcccataaaaatgaaccaaatgccactgcttccaacactagcattgtcaacccagagaaagtgagtgaaactacttcatcatttgaagtatcgagtgaaccgtcatcgagaattcgaatgtcaggcctcccgaatagtgcttgtgtttgcttttcaattaacgaaatagcttctttggatcttatagttgcgtatctctgaagtgtctcggaatccaaatacataacgtaagatctcagtctatattgttttccttcggcatctccgtatcctcctccatcatcgtcatcgtggggtgggattctaatcaaagaatctggatcccaaagctgcttccctggattaggatcttcaaatcttgcttggcttttaatgaaatcctcggnaagggttttcattgttctctcgagttgaaa

SEQ ID NO: 10848 - DNA, 508 bp, Gossypium hirsutum
  unsure (1)..(508): unsure at all n locations; Clone ID: LIB3828-031-Q6-N6-G2
agcaaacgaaatagagcttcttttcattcattatgaatctgactcacttccttacattaattatgtaatagtcacaatatatcctgagatagcagagatgctcacactgngnacagaaaaacaagtaaatattagtacttcactctatctattggcaagcaccaagtaaccgtggcggcaacaggcaaaacctacgacaagccatggctactttattctaaaaacacataaacaacaaaacatattatttcttaaagacaaaggcgcctctgcttccagggagctttggctttggtctctaatcatttacaattgcaagggttgcaggtgcagttgtctccacacttgcagccgttctcagccccgaattccatctcagctccctcaaagtgtgctttctggggtgctacaccaagaaccagagtctcagttgtggtcatctcggcagcgttcaggtctggatacatcttgcatcctccacagccactgccacacttgcagccagtac

SEQ ID NO: 10849 - DNA, 553 bp, Gossypium hirsutum
  Clone ID: LIB3828-031-Q6-N6-G4
agtagaatgtaggcactgcagttgaaacgatgaatgacaccggagtgttgtttacttggcctatttctttctaatgaaacaatgctgacaaaaacacacacatagagacaactgacaccatcattacaagctagatttgcaatatgtctggccataaaacctcaaaacttccaagttgcattaacacatcattcaatatgaatggtggagtagccacaactaataaaaaaacactcctcaagcaccaatgttctcaatctcagcacttttatccattctcttcacaatgccagctatgacctttccaggccccaattcataactctttttcagccctttggtcagcaaagttttcactgtggtttcccactgaacaggagaagtcacttgacgtgctagtattttctttatagtctcaggatctgcatgaggctgaacatcgacatttgatatgacaggtattcttggagttctaatctgggttgctgccaatgcagcctccaatcttgagactgctgggtccatgaaactagtgtgaaaagcaccagcaaca

SEQ ID NO: 10850 - DNA, 543 bp, Gossypium hirsutum
  Clone ID: LIB3828-031-Q6-N6-G5
attgaacttatgcatcttgattacagagccccagagctccaaaaagagggttaaagccaaaagaaaaagagaacagataatcaaaaacaaacacaaaaatttacattctgatagtgtcagagtttcaccagctatgacaatctcttcaacagaatatccaagtgtaagataaattgatcaactcgatgattatagatcataagttcataaccccaacccattcccatgtatgcttttggtaccaccacccccccaatcaccaaaagaacagcagatgcaaaagatttctgtgaaggatcggcaactacctgacaatgtaaagggggagaagagaggccgaaaagcggagtatcttgaatcagttatggcatgtagcagattcagaggaagtaatcaggcgttctacgggtaacgtcaggttctcctctccttggagctggctcaaactggatgaatgactgattcttgcaatcatcaacttccaagattgatgccatgttcccacagcgataacaataatttggggcgctaaatatagtaact

SEQ ID NO: 10851 - DNA, 570 bp, Gossypium hirsutum
  Clone ID: LIB3828-031-Q6-N6-G6
aaagaaaaaatgcctttgaagcacattcaattgagcacttgtttctctttaatatctccatgatttcttcatctttattcataatatcaaacataggcaaacacaacgataactgtaatcccctacccctaccaacattttattgtaactataactaacatagaataactagttggcctcttaaaacagacaaagaccagaccccaaaccaaaccaaactgctaaacaacaaaatagacatcattgaaaagacctcatccccagattgcatcattttcaattcttagaaaggaggagcatagagctggagaaccttctgtcaggacggtctgctgttaatatcatcccaccaagcactcacatgcttcctgctggttctcatgtattcctttcccatttgaccccccaagtactgagtaaatggcaggtgactcaggtcagcaaggctgaagaaatcaccggccaagtacttattctttggcaacctctcctcataaatatccagaactttgcctagcttttcctcgctttccttgatcaaattttcatcaggagggaaccccatcttgg

SEQ ID NO: 10852 - DNA, 537 bp, Gossypium hirsutum
  Clone ID: LIB3828-031-Q6-N6-G7
gaaccaaatataaaacttattattataatcaaggtttatactatttgattttctttcttttttccaaattgtttttccccttttctttaatctggactttaaaaaaaaaatcaagaaagaaaagcctcgacgctagaattcctggcggtgaggcaaagcgggcaggcttgcgtcactcgatcacactctgtacacaagcatagatgccgacacggcagcagcaccaccgacgccagacgtttccgacacgccttgcatgccggaccccatgaagccaccacccggtccgggtccacgtaagccgactcggcgtccaccgcttgcccttcaccgcacttcaccccctcctcccctctcctgctgtcgtgcatcgaggcggcagcccctccgctcattatagcctgttgaagctgcgcttgtaatgaagccgccgtagcctcctgtgccctggctttcgcctgccaaacctgcgcctccacgttaagttgcgccacgcgtgcctggcattatggaaaccggttttgccacatgggtatc

SEQ ID NO: 10853 - DNA, 542 bp, Gossypium hirsutum
  unsure (1)..(542): unsure at all n locations; Clone ID: LIB3828-031-Q6-N6-G8
attcgtaaattatctttcaatttaaaaagcaaaggacaaatatgaaataacattgtatctcgttatagaatgtcattaatgaatttgttaagattattatgcgaagatcctccaacattagtagcctcttcagctttcttcttccattccaaagcctttagcttcatttccttccctatatccccttccatcatcatcttcacaagtgttgtaacttcatcacgcttcacatcattactaatctccatcccaattccccattgattgcataaatacaaacaattcgtgggctgctcatcaaaaaaggccaacaaatcaccggcttggctccactgatactttccagtgttgaattccaaccacaatgtgtaagaaatgccccaactgaagggtgagaaagtacctggtcttgcgggcaccaattcaccatcaaccccctaccttcgatatctttataatactctccgggcaagattccagggttccccatcaccatatcaggccttacaacccacagaaanagggtggttgctgtttgcaag

SEQ ID NO: 10854 - DNA, 474 bp, Gossypium hirsutum
  Clone ID: LIB3828-031-Q6-N6-G9
ggaaatcaaatattggtttgagctatttattcttcaaaattactctttttatccaacaggattttatagcaagcccttctgcaacatcattactttttattttggataattaataagacgacaaccaactcttcctcgttatttcatcttaatatgggatcatctctctactttgggggactgggttcactggccataacctcttctatccctttgctctttacagtttcagcctggcaacatcctgatgcgcacctgggctgaccacactcagcacaagtcccaccacaaccctgacgggaacactttccactttcacatcccgactgtcctggcattagtgggatttttgggacttgggggatctgtgggacttgtgggatctgggggattaggggaatttgggggatttgtgggatctgtgggatttgtgggatttctggaattcttgggatttctggaatttgaggaaat

SEQ ID NO: 10855 - DNA, 453 bp, Gossypium hirsutum
  Clone ID: LIB3828-031-Q6-N6-H1
ggccaccccgaaatttttatttttggggggggggaaaaattttccaggggtaaaaagggaaaaattaaaaaaaagggccccccccgccccccaaagggaaataacaaaaacccttttttcaccccaaccaagggttttgtaaaaaaaaaaataaacggggaaaaattgggaaaaattcacattcacttttaaaaaaaactttaagccaaaatttccgggaaactccgggaaaaacccgggttttcaaaaaaaaacttttaaagaaaactggggaaaaaaatttttggtaaccgaaaaaaaaaaccccccccgggcttgggttaaaaaaccccccgggaaacccgggttttttaaaccccttgaagggaacccgaaaggtccgactcaaaaccaacccccttttggggacaaaaaattaaaagggcccaatcccagggggaaataaaataaaaa

SEQ ID NO: 10856 - DNA, 404 bp, Gossypium hirsutum
  Clone ID: LIB3828-031-Q6-N6-H11
gttaaaaaacaaaaaaaaaaaaaaggaaaaaaacaaaagaaaggggaaaaaaaaaacaaaaaagaaggaaagggcaaagaaacaagagcggggggagaaagacaacgcgaggggggacggcagggccaacccgggggcccgggcccggcaagggaaagcggacccggaccggggggagggcgaggttttagagggggggggaaaaaaagagctaggccttcccaaggggaaaaccggttccggggggaaaaacgcagaccaaaccaaggccaaacaaaaaaggggacggccggggaaaaagaaagggggggggaccccaaagaaaagagcaaaaaaaaatgggggggtttcaggggagaaaaacctcccaaaaagggaaaaaagggaggcccccaatttaaggg

SEQ ID NO: 10857 - DNA, 561 bp, Gossypium hirsutum
  unsure (1)..(561): unsure at all n locations; Clone ID: LIB3828-031-Q6-N6-H12
gtggagaacatttcttttatatattgtaacgcctcgtagaggcttaaagccgacaagatcgtggtacataaatgtcaataatgtcngaaaaataaaatagagataactaaaaaccatggctgcctataaagaggactgaagcatgtctaacttaaaactggttcaaatgggagaaatgaaatggtaccgatgggatcagtagaaatcgtgagttctaactgtctatcaaagctacaaatatcggaccaaaccgccgcacttgtcgacgagtaaaatcaagctgaaaatcaggctgcctgtagcagcaaactttgtacattgcttgtgaaactattagaggaaacgagtcaaccgcgcattagatcgatgtcaacatgagtgttacgcatatccattgttcgtgaaccaggccatacacctgctggtgaaggtggaatcagattttgactcggtgaaatgccagacggagatactagattgtcgacactctgattatccgagtcatttagacattcttgaccttccggtttcttgttctttgcctttggaccaccccattga

SEQ ID NO: 10858 - DNA, 478 bp, Gossypium hirsutum
  Clone ID: LIB3828-031-Q6-N6-H2
acgacccaatccattagaatcggattttttttttttgaaaaatcgagttcaagttgaatcaagattgaatttgagtaaatctaccgtgcccagccaagggcccttgacggatcttaagtcacaaacatatatatttaaagtttaaaaaaaaaaaaagcttatatcacaacaaaattcattccaacaaaaatgtcacctaaatcaggtccgagtgttcgctatgcttgcaattggagtctgattcttaccttcctgcaacttctccataatcgggttgcatcttcaacatttatcggaacaacaaactcgtgcaaaatcgtttaagttacaaatacagtacttaaagtgtcaaaaattttgcattctttcaacgagattcaagatccatttatcaaagcatgcaattgttgtcggaatgaggaaatgtcttctggtttgacagccataacaatccctgttagctgggaattttttagct

SEQ ID NO: 10859 - DNA, 475 bp, Gossypium hirsutum
  Clone ID: LIB3828-031-Q6-N6-H3
agcgtaaagaatattcaacagactagtatgaaattggtacatttgtgttacagagtgcacaaaattgttaaaacctttcaacaaggtactaaatttatagcaattgcattatcaagtgcctcatctaatattctcatattttccccttaaagatgagtatgatgggatatgctacaaaactggttctaacctgctgccaatggaattaagcttgaaaccaccttctaagcttcttagaaccttgcttttccgcgtcgggtgttccggatctcggctgtgagaacttagatctgtattgttcaattagcatatcaagtttgtctcccacgtctcggcctgatggatctttattccttttcggccttgtcctttttaaatttgtctctctttcctccggctttgccttttcttgtcgtgtcctctcttttgggtgcgaaactgctttcacctctttcaactttaatttgctggtctc

SEQ ID NO: 10860 - DNA, 404 bp, Gossypium hirsutum
  Clone ID: LIB3828-031-Q6-N6-H4
attcatataataattaaagataaaaaaaaacagctagcccattgtaattcaatcatatatcaagcggcttgggtattctttattttctttccctttggaaaaaaaccggagtttctataatctatatataaatctatgaggattctggcgccctagcttggatattcatggccttttttttccctaaaagaccattggcatcaagtttcatgggaagggccttaaacgttcggttgagttcatccctataagcgagaccacccccacccccattattgaacctgcgggaagggcctccctaattgcaggggccgcaaaagctgccgcccatgatatccacatcggcgcagtcgatacaataagggcttttttgataacctatacctatgccagcacccaatccg

SEQ ID NO: 10861 - DNA, 496 bp, Gossypium hirsutum
  unsure (1)..(496): unsure at all n locations; Clone ID: LIB3828-031-Q6-N6-H5
atcaaaacaatgattgaaaccatatagcattaaataaaacaaaaatagccattgttattggtacctaagcaaatactgctccatacaaaatcaatgagaaatagtatattttatatcaatatataaagctaattgctgtagaaaacatttgttatggaaacttctatggcatagcagaagtcagaatgtaggaactaagaagagaggttggtttcgttacacatatgttgtagctcaggcaggttccaagatgtgttaagacaactccctctttaagatatatcacttctcggcccccttggtatttaatcaagtgactaagctgtgcttttcttgcttctaaagttttccttcagtaatgcaaattttttcttgcattggtttacagtcttcccgggaacagcagtggctactcgttcccaacgctgactggtttcctttgnggaatgtcttcagagcctgaatcagtgctctttcttgtacagcagaccataca

SEQ ID NO: 10862 - DNA, 545 bp, Gossypium hirsutum
  Clone ID: LIB3828-031-Q6-N6-H6
aagaagaaataacagaagagatatttacagagggaaagtgtcacatatgttttaagtaaaaaaatgcagaactaattattttacaatgaactactggctgtctgcttgaataaggcttgatccttgagcagagcagctattaagtatctatctctcaccaatcttcaatatcatcatcatcagaaatttcactttcttcttcatctatactcattctttttacgctctcatcttccgactcatgagtttcaacatctctggcttttctgtaaccaacccattttaacacgggtctatactctgtagctataaccgatacttcggaaaagcttgacgatccaccatcttccataaacctctgccttagcatctcattctgattgtgagatgatgattgctctatctgccaaagctttggtttgcgaatagcatgccatcttgaaggtgatggatgaaaatttccatagagaactccacgaactgcgactgaagcagcagcagactgtagaacattctctatctcactatgtctatttaaagtcctt

SEQ ID NO: 10863 - DNA, 510 bp, Gossypium hirsutum
  Clone ID: LIB3828-031-Q6-N6-H7
attcatgtaataataataaataaataaaaaaacagctagcacattgtaattcaatcatatatcaagctgcttggttattctttattttctttctctttgtatagaatccgtagtttctataatctatatataaatctatgaagatttctatgaagattctggcgccatagcttgtatattcatggccttctttttccctaaaagaccattggcatcaagtttcatggtaaggtccttaatcgttcgtttgagttcatccatataagcaataccaccaccacacccattattgaacctgcggtaagggcatccgtaattgcaggcgccgcaaaagctgccgcccatgatatccacatcgtcgcagtcgatacagtaagggcttctttcataacctatacctatcccagcaccgaatccggtaggatcaggatcgatagaggttgaagaatcaggatcagcttcatgcggaaaaccgttgcttggttgaaacccatcggctccgtcagccat

SEQ ID NO: 10864 - DNA, 438 bp, Gossypium hirsutum
  Clone ID: LIB3828-031-Q6-N6-H8
agagctaaaaacaaaagcctctcattatcacaagtctatccataatagctaaactatagccataaatcatcccacaacattcactgcttaaacctatcccataacatcagttccgaccccccataataccatcgctgaaagcaaatactaaattaaagagacaacaaagagaatgcaaagattcctctcacataaaatctaccaaactcccccatgctcactaatcagcctctgcataggcagtttcaaggtgggcttgctccgcttcttggacctctttttcggtcttccttcctttcttggatttgtagtacacactcatgaatgttcccacagctccgtacttcctacgcacatgctcatacaggtcagcatcgaacatcctccagaaatccttctcgttcagctccgacactgcatactgtggctgaaaactat

SEQ ID NO: 10865 - DNA, 549 bp, Gossypium hirsutum
  Clone ID: LIB3828-031-Q6-N6-H9
acccttgaaataatttcatgtttctttcttattattttaataggaatttgatggattttaccagatcgtagcgtgttgaaggttttagcagaaatttatataacaaagaaaatcatatatattagcatgcacatgcattaattacatatggctacaaaacaagattcaaggaactttaggatattgcaaatcgaatattgttttgagctatttattcttcataattactctttttgtccaagaggattttatagcaaacccttctgcaacatcattacttcttattttgtataattaataagacgacaaccaactcttcctcgttatttcatcttaatatggtatcatctctctactttggtggactgggttcactgtccataacctcttctatccctttgctctttacagtttcagcctggcaacatcctgatgcgcacctgggctgaccacactcagcacaagtcccaccacaaccctgacggcaacactctccactctcacatcccgactgtcctggcattagtgggatttttgggacttgtgggc

SEQ ID NO: 10866 - DNA, 565 bp, Gossypium hirsutum
  Clone ID: LIB3828-032-Q6-K6-A10
agctgccaatcatcttgggggtggggggggggggattagacacatgtgcagagacctctgctgtcatttggtcccaagacttccatgaagcttcggacatgcccaattattgtttgtaaggaactacgatctggttaccacttaatcagtgaattttgttgtgagggctgtgctgtgactgcagatggtgcttttagtactgcatggcttaagaacttgcaaaagcccatgggttcattagtgctgtcccaagataatggttctaggaacaattataatccttttctattctttacacaaccaagttcaattcctggatctgttatgcagttagtaggttcttcgtatctacatcgtgctactgcatgggagatatatggaagtgctccacttgctcgggcaaatgctttggtttatgcaacttgctttgctgatgcttcaagttcatctgatgcagcattagtgcatgtgaaacttattcaacatctggcagtatttaaaggctacaaagaggcttttgctgctcttaaaactgcggaagagaagtttttatgtgtatctaaat

SEQ ID NO: 10867 - DNA, 572 bp, Gossypium hirsutum
  Clone ID: LIB3828-032-Q6-K6-A11
atcctgccacaaaacatttggggggggaatgggggatgaaaaattctgttggtcatattctcacaatgttgctccaagggcaaattcattgcatttgtttcaacagaggccgagacagatcaccctgagagtgaactaaagcctggaattgaccttctaggtcccgtgggggggggggctttgatatctatgaccgatatgaaccagtcaacgaaccttctcttgacaattgtttcatatcaacaagttatgatgctacaacacattttgaatcaactgtcagtgatgtacttaacatgtataccatgataactggaaaggttcttgacctcagtgtggatttgagtgctgctagtgctgcggaagaataattaccctgaagcatggtatttgccaatgtttgtgcttgtttaagcttcttaacagtgttgaatgttgctggtgggatttatgtctattacaccatgtttttttttactactcaagacactatatttaatgatttgatgatatttaaacgtttgttggagctctgtgtttttagatgaaatacatgaaaacgtctctgctaa

SEQ ID NO: 10868 - DNA, 578 bp, Gossypium hirsutum
  unsure (1)..(578): unsure at all n locations; Clone ID: LIB3828-032-Q6-K6-A12
gttcttgnttaattagccaagacagcagccatgtctctcctcaatgatctcatcaacctcaacctcggcgacgccactgaaaagacatagccgaaacatatggatcggtggatctggaatggatctgagaagcaaagcaaggactttgcctggaccagtggcggacccttcaaaactcccgaagtggaactacgatggttccagtaccaatcaagcacctggagatgacagtgaggtcattctttatcctcaagctatattcaaggatccatttagaaaaggaaacaacatcttggtgatgtgcgatgcttacacaccagccggcgaacccattcctaccaacaagagatttaatgcggccaagatctttagccaccctgatgttgttgctgaggagccttggtatggtattgagcaagagtacactcttcttcaaaaggatactaagtggcctcttggatggcctgttggaggattccctggaccacagggtccgtactactgtggtgtaggtgctgacaagtcctttggtagggacatcgtggactcccactacaaggcttgcctttatgctggca

SEQ ID NO: 10869 - DNA, 585 bp, Gossypium hirsutum
  Clone ID: LIB3828-032-Q6-K6-B10
gcgttcgtaattttgtttcatccatgttaatactagtactgggggccatatcatccgttgaaggtcaaggaggaggaggtggtggtgttattgatgttgttgcaaagtttggtgcaaaggcagacgagaaaacagatttgagtaagccattattggatgcttggaaagaagcatgtgcctcgacatctgcgtcaaaaattgtgattcctaaagggatatattttttaagtacagctaccttagatggtccttgcaagtctcctattgagcttcaagttcaaggcactgtgaaggctccggcagaccctggtgctttcaaggagcctaaatggattgctttcaatagaattgaaaatttcaaattgtctggcggaggagttttcgacggccagggaaccactgcttataaaagggaaggttgcaaaggtcatgattattgtggttcacttcctattaacctaagatttgattttttaaccaacgcaatgatacaagatataactaccaaagacagcaagcagttccaggctaatgttctaggatgcaaaaacattactttcgaacatttcaccgtatctgcacctg

SEQ ID NO: 10870 - DNA, 581 bp, Gossypium hirsutum
  unsure (1)..(581): unsure at all n locations; Clone ID: LIB3828-032-Q6-K6-B11
gcgttcgnattactgtcgggcgaaaaaaaagggggggggggggggggattaatgttaatatcgatgctatttctcttggcaggatcaatgcttatggtccagggcggagatcccaccctttttttcgaatggaacgtcacctatggcaccattgctcccttgggagtgccagtaaagggtattctggatggacgggcaattcccgggaccaaatcttaactctaccaccaacaacaatatcgtggtcaatgtgttcaataaccttgatgagccattccttgtaacatgggacggcgtgcagcataggaagaactcttggcaagatggtgttctgggaaccaactgtcctatcccccctgggaagaattacacctataaattccaggtgaaggatcagattggcagctacatgtactatccggtgacggctatgcacaaggcggttggtggtttcggtggcctccgtgttaacagccgtctactcatccctgttccctacgctgatccggctgatgactatactctcttagtgggagactttttcaacaagggacacaccagcctcaagaagattcttgata

SEQ ID NO: 10871 - DNA, 244 bp, Gossypium hirsutum
  unsure (1)..(244): unsure at all n locations; Clone ID: LIB3828-032-Q6-K6-B12
ccgggtcgnaccagcgtccgcggncgcgtgggctttacaacacggggatggggggtaaaaaaagcattttatctttgttgctctgcttttgttcttgttgtccttctttgtcgtgtttgcaggtctacggggggtcaatggagggaaaaccttgctatttcggtggcagggaagcaaccatcgggncagnaggggcgctggacggnaggcacgtgggggtgcgggggcgaccggagggctgcgg

SEQ ID NO: 10872 - DNA, 573 bp, Gossypium hirsutum
  Clone ID: LIB3828-032-Q6-K6-C10
aaaaaaaaaaaaaaaaaaatttttttgggggggggggggggagggaaaaaaaaaaaaaaaaaaaaaaaaaaaaaaaaaaaaaaaaaaaaaaaaaaaaaaaaaaaaaaaaaaaaaaaaaaaaaagggcccccccttttaagggccccattttttcttccccttccttcccccttctttttttttttttggggggccctaatttcattcccttccccccttttttccccccccgtgcttggaaaacccctccttttccccccttttttccctttccgccccttccccttttccccgttttggtttttgccgaaaggccccccccctttcccctttcccaccttttcccccccctttttgccctttgcccccccccttttacccccccttttcccccccggtttttttttttttcccccccctttccccttttccttttcccccccctttcccccctttcttttccttttttccctttctttttccccccttttccccttttttcccctcctttttttatttgggggcttcctttttggttcccttttttttttttttcggccctctttcccccaa

SEQ ID NO: 10873 - DNA, 573 bp, Gossypium hirsutum
  unsure (1)..(573): unsure at all n locations; Clone ID: LIB3828-032-Q6-K6-C11
cgcccttacagnattganactttaagtggtggggggggtgggctgaggacaacattctgagtcacctcaaaccattgagaaagttggcaacctgccgactttcttccagatcctaattctgatggatttcatgagcaggtgaaagagcttagggaaagggcaaaggagatcccagagggggactttgtagttttggttggtgatatgatcactgaggaagccctttcaacttatcaaacaatgcttaataccttggatggaactcgtgatgagacaggtgctagccttaccccttgggccatttggaccagggcttggactgctgaagaaaacaggcatggtgatctgcttaataagtatctgtatttgtctgggagagtggacatgaggcaaattgagaagacaatccagtacttgattggatcgggaatggatcctcatacagagaatagtccttatcgaggatttatatacacttcgttccaagaaagggcgacttttatctcccatgggaatacaggcaggctcgccaaggagtatggggatattaacttggctcaaatttgcggtagc

SEQ ID NO: 10874 - DNA, 594 bp, Gossypium hirsutum
  Clone ID: LIB3828-032-Q6-K6-D10
ccgggtcgacccagcgtttcgcttatctgaggtgattatgttgggggggggggggggggggagagaaatctcaagatcgtggtctcatatttgagaagtgaaagacaaatatcacgtataggtctctggggacgatcaatgggtgctgtcaccagccttctttatggagcagaagatccttcaatagcaggaatggggggggacagtgccttctcaaacttatttgatcttatgatggaactggttgacgtgtataaaatccggcttcctaaattcacggttaagatggctgtgcagtacatgagacgtgtaattcagaagaaggcgaagtttgacattatggatctaaactgtctgaaggtagcacctaaaacattcattccagctctatttggacatgccagtgaggacaaatttattcaacctcatcactctgacctcatatttaaatcatatgcgggagataaaaacgttataaaatttgatggtgatcacaactcctccaggccacagttttattatgattcagtctccattttcttcttcaacgtgcttcgtcctcctcaaatttcttctgcttgttcaagtaagctt

SEQ ID NO: 10875 - DNA, 579 bp, Gossypium hirsutum
  unsure (1)..(579): unsure at all n locations; Clone ID: LIB3828-032-Q6-K6-D12
gcaaaactaatanatttaggaagggtcgttaaaagggtgggcatatggagagatatatatggtatcgatgaaaaaaagttgcaagcatgattagagacgataaaattgacattttggtagagcttactggtcatacagccaacaacaaattgggaacaatggcatgtcgaccggcgcctgttcaggttacttggattggctatcccaatactactggtttgcctacaattgattaccgaataactgattcacttgcagatcctcctggtacaaggcagaagcatgtcgaggagttagttcgacttccggaatgcttcctttgctatactccttccccagaggctggacttgtttcaccaactcctgctctttccaatggcttcattacattcgggagctttaataacctggcaaagataacacccaaggtactgcaagtttgggcgaggatattatgtgctgttccaaactcccgtcttgtggtaaaatgcaagccattttgttgtgacagtgttaggcagaaatttcttacaacattggagcagctgggtttagaatctctccgtgttgatctcctcc

SEQ ID NO: 10876 - DNA, 580 bp, Gossypium hirsutum
  unsure (1)..(580): unsure at all n locations; Clone ID: LIB3828-032-Q6-K6-E10
ctagcatggngnatactagcaatgctgtagcgaggggggatgggttatccaccatcgtggaaaaaacttaacattccaaatgtcggcaacatcgacagcacggggttcaatcgtaagcttttgtcgactgaagatatgcttgagtggattagtcaagctgaccggaaactccttcaagggggaccaatggatttgaagcctaacattgtggttgctaaagatggtagcgggaaatatgatactattaacaaggcattggctgaagtccccgtgaaaagtcccgatcgatttgttattcacattaaggctggtacctacanaggaaaaaatcaacgtgaccaagcagatgactaatgttgtattcatcggtgatggcccaactaagaccatcatcacaaatgacattagtgtcgctaagaatccaccggttagaacataccgcactgcaactgttggtgtggatggagctggtttcatggctaaggacattggattcgataactcagcaggacccgaaggtcatcaagcagtggccttcagggccactgctgatagggtcatcatgttcaactgccatttc

SEQ ID NO: 10877 - DNA, 599 bp, Gossypium hirsutum
  unsure (1)..(599): unsure at all n locations; Clone ID: LIB3828-032-Q6-K6-E11
ccgggtcgacccagcgttcgccccgcgtccggngcaacattggggggggggaggttngggcataaaacgcagnaagcagtttcatggactgctcatatgatgattctctgtgtagtgttactgaacggcaaaaattcctagtgaagccaaaccttagagcttttgttaataaaataagggagcagtctcaaagggggggggggctgatctgctatggtggaaaggtcttgctcgaatcatggaagctaaaggatatatcagagagggggatgataagatccatgttcagataaaatttccggaaccaacaaaaggggactggaatttcttcagtctgagagtgataagggtttccatggttacccagaagcagatatgctttactcaatgagaaaaccgagagcttattccagtttctccgattggggaaagggctgggctaatcctgagatccgtcgtcagcgtttagacaaaattcggtcttcaaacaggaaaccacgaaagccaagaataaggaaatcaagaaaacatttctcggatactagtacttctcggggtagaatatctgcaaaaatctcgcaaaagaagtgagctagcat

SEQ ID NO: 10878 - DNA, 589 bp, Gossypium hirsutum
  unsure (1)..(589): unsure at all n locations; Clone ID: LIB3828-032-Q6-K6-E12
cggccgcgtgggcggccgcgtgggggtgacggggggggaagnacaatttggttcatcttttcgggaatctcatgttcgaactcattcgacacgacgtggttgagccaattctcttagaagtggatcagatctatcatttagcttgccctgcgtctcccgttcattataaatacaatccgggggggagctatcaagacaaatgtgatgggtacgcttaatatgttggggcttgcaaagagagttggggctaggtttttgctgacaagcacgagtgaggtttatggcgatccgcttcagcatccacagaaagagacctattggggaaatgtcaatccaattggcgagaggagttgctatgatgaagggaaaaggacagctgaaaccttagctatggattatcatcgaggtgccggtgtcgaggtgcggattgctcgtattttcaatacctatgggcctcgcatgtgcttggatgacgggcgtgttgttagcaattttgttgctcaggccattcggaagctaccaatgactgtttatggtgatggcaaacaaactcgcagcttccaatatgtttccgatttggtggatggac

SEQ ID NO: 10879 - DNA, 576 bp, Gossypium hirsutum
  unsure (1)..(576): unsure at all n locations; Clone ID: LIB3828-032-Q6-K6-F10
cccttgtcaacccacgnattataggggggcatgcggggaaaactaggcgtcgtcaaattctagcgatgttaaggagctgataaggacaggtttccaagccgggctagtcgagataaagatgtgttggcccgttcagtgactgtccaagagttgatcaaggatgagaacaacaaaggggggcttggtgtttgccaagaggtgttggacttagccattgatgactttcaaaagtcattcgacatgctaggggaatacgacatgagcaagatcggaaaataccttttggaattgaagacctggctaagtggtgcattcactagtcaacagacatgtatagactcattcgcgcaatcaagtaacgaatcatcgcagaagatgcaatcaatcttgaaaactagcatggagattactagcaatgctttagcgatgcttaatgggttatccaccatcgtgaaagaacttaacattccaaatgtcggcaacatcgacagcacggggttcaatcgtaagcttttgtcgactgaagatatgcttgagtggattagtcaagctgaccggaaactccttcaagcaaaa

SEQ ID NO: 10880 - DNA, 484 bp, Gossypium hirsutum
  unsure (1)..(484): unsure at all n locations; Clone ID: LIB3828-032-Q6-K6-F11
tcggntccaggggttgacgatcgtggggggggagggggtggcgataaagccgtggtcgcgatagcagtcgtgatcgtgaccaccatcgtgatagcagtcgtgagcaccatcgcgatcgggaccgtgatagtgatcgtgaaagcgaccgtgatagcgatggtggtagtgatgacgggaggggggaaaaagaagaagaaaggaaaaaagaagaaagacgatggtagcggtagtgatgatgatcattagatcatcattatccataaacaacatgcattatcatcatctccataactccaccacgcctctcttgtttgcaagtggagagcgtgaatgaaatatatattgatatgaaaataaggtatttcttttttcttttcttaattaattagtatttgttatccgaatactacttaatttattttttaaaatatgtaagtgtaaattttaaagataaataaaacattgcattagcattattcatgtg

SEQ ID NO: 10881 - DNA, 584 bp, Gossypium hirsutum
  unsure (1)..(584): unsure at all n locations; Clone ID: LIB3828-032-Q6-K6-F12
gcgttcgnaatttttngtggatgatgaaggcggggggggggggggggtcaacatcctgctgtttttggcaaccatgggaagctgatgggaaaacgaatgaccctggagaaggagcgcgagccaagtaatcatcagctgggtcgaaaggccgacatcggagctaaagacgatatagatctaacgggggggggggggtctgctatagaattgatcgcttccaagaatagacttatcgattcacgtcaccatatctacatgaacgataccagccctatcccccgcaagcatccgtgacactgataagcttgctagttgtttacagcttggtttgagctttacggaatatggtgtgcctaagaataaaactggaaattaacatgttagtaaaaccctaagcatatatatacacatatatgcatatgaagttatgaacatgttaagtttccatctccataacaaaatcagtgtgttcagttcagttatataaacaatatctgtatcaaaatctgggtctgcaactacctaattaagatgtgtaattagtgtaatacagtttgcatgaaataaagataccaagcttacct

SEQ ID NO: 10882 - DNA, 565 bp, Gossypium hirsutum
  unsure (1)..(565): unsure at all n locations; Clone ID: LIB3828-032-Q6-K6-G10
tgnttcccgnccacacaacgaagtggggggaacggggccacccaacaatcatttagcttctgctttcttccatcttctctaccttcaatccattgttttaagaggaaactgggagggggatttcagataaaactctctctcgccttctatacataagcgtttagaggtaattgcgggcgggggacagtggaagaaatccaactgctgttctgctaaggttgattgatggtcattatggatttaaaaggtataacttgggttggtcatgtatatcagaaatttgaagccatgtgcctagaggcagaagaaattatgtaccaggacacagttaaatatgtggaggatcaggtgcagactgtaggtgctagtgtcaaaaggttctactcagatgtaatgcaggatgtgatgcaggatttgcttctcccatcttcattggagcctgtgaaagcagtggctgcctctgacacggcaatagagaaaaatgttgggacattcaaaaagcctcaggtaggtttaaaggtggctgctgtgaaggatgagggtgagcagttaattgaagattcag

SEQ ID NO: 10883 - DNA, 576 bp, Gossypium hirsutum
  unsure (1)..(576): unsure at all n locations; Clone ID: LIB3828-032-Q6-K6-G12
gcgtttcgcaataaatagtatcattatcggggcgggggtgggggggtggcgacactagaanaaaaccaggttgcaatggtggtttaatggacattgcattcgatttcattaagaagaaggtgggatcactactgagtccaattacccttaccaagctaatgatggaagttgcgatgctgccagggggggttctccggcagtggctatcgatgggcacgagaatgtgccagctaacgacgaggatgctctgcttaaagctgttgcaaaccagccggtttcagtggctattgatgctgggagtatggatttccagttctactccgagggggtattcacgggagaatgtgggacagagctgaaccatggggtagcagcagtggggtatggaacaaccttggatggaaccaagtactggatagtgaagaactcatggggagcggaatggggtgagaaaggttacataaggatggaacgtgggatcagagacaaacaaggactgtgtggtatagcaatggaggcttcatatcccatcaagaactcatcttctaatcctactggaccttcatattctcccaa

SEQ ID NO: 10884 - DNA, 600 bp, Gossypium hirsutum
  Clone ID: LIB3828-032-Q6-K6-H10
aaaaaaaaaaaaaaaaaaatttgggggggggggggggggggaaaaaaaaaaaaaaaaaaaaaaaaaaaaaaaaaaaaaaaaaaataaaaaaaatttaaaaaataaaaaaataaaaaaaaaaaggggcccccttttttaggtttccatttttttttccccttccttccaacttttttttttttttttggggggccttaatttaattcccttgcccccttttttccaccttgttatttgaaaaacccttttttttccccatttttttccttttgcaccccttccctttttcccctttttgttttttcccaaaaagccccccccctttcccctttcccaccttttcccccctttttttgccaattggccctctttttttaccgcccttttttcccctgggttttttttttttccccccttttttccttttttttttttccttcccttttcccccccctcttttcctttttttcctttttttttttccccttttcctccttttttcccctttaatttttaattgggcgccttccttttaggtttcctttttggttttttccggcctttttccccctaaaattttttttagggtttttttccctt

SEQ ID NO: 10885 - DNA, 594 bp, Gossypium hirsutum
  Clone ID: LIB3828-032-Q6-K6-H11
cccggtcgacccagcgttcgcaaaatgcactgctgagtgttgggggggggggggcggggtgtagagagacactatgagacatggatacagggatcctaggtccagtagcactgcatggacttgaccaagcaaatgggacctgtccaggcaaaaatggacttaccaggttggtcttaaaggagaggccatgggtggggggggaccaaatggattttcctcagttgagtggatggcggcatcattggttgcacaaaaaccagagccattaagatggcataaggcttattttaatgcacctgagggtgatgagccgttagctttggacatggtgagcatgggaaaaggtcaaatctggattaatgggcagagcataggtagatattggacagcatatgctcatggtgactgcaatggttgtaattatgctgggacgtttcgaccaccgaagtgtcagcttggttgcggccaaccaacccaaagatggtaccatgttcctcggtcttggctgaaacctacacagaatctgttggttctttttgaggagctgggaggagaccccacaagaatctcacttgtaaaaagatctgtgtccag

SEQ ID NO: 10886 - DNA, 303 bp, Gossypium hirsutum
  unsure (1)..(303): unsure at all n locations; Clone ID: LIB3828-032-Q6-K6-H12
aacagctggcntcgatcttgtccaagtcagtcagtgcagatcaacctgaagggctcgagccatgaagcttcggcaggccgcactagatgccatacaaatgcatgggaagttcgtacacggctttgaatagcttagttgaaactttatcttgcattagaaagtaaatgagcgtgaaatatgcaacgaattttatttaatagtaataaattaagataaaagaagatcatcaatcatgcatgttttttctttataaatattataattaaataaaatcatcatcaataatgtatgtttttcggttgt

SEQ ID NO: 10887 - DNA, 503 bp, Gossypium hirsutum
  Clone ID: LIB3828-032-Q6-N6-A1
agaattcagccatagcttcttcttttttattcctctcatatccgtacgtttccatccagtatgcacatacaatacaccacataactcaagaatcccaaactaaaaaaaaattaataatgccaataacaacttaagcgaggggaaaaaaacgggggacaaacatatttttggtaaaaggctagcggcaggatccttgaccaccactttacagccctgtgattagtggttgcagttgctgtgagttgatcctcctctttctgaggcgctcggcgataatgaaggcgagctcaagagattgggaggcattcaaacgagggtcacagtgggtatggtagcgtgaacccaagtcatcgaatgtaacagtccgggatcccccgatgcattctgtcacattctgtccagtcatctctagatgaactcctccaggatgacttccctcttgctcgtgcacgtcaaagaaagctctcacttcagcccttatggaatcgaaggggcgagttttg

SEQ ID NO: 10888 - DNA, 553 bp, Gossypium hirsutum
  Clone ID: LIB3828-032-Q6-N6-A10
caccaaacacaataacctaatcaccatatataatcaacatattttttcaatcagttgtgttaaataaaagaccatccaattttcagcaatcatataatcagccttataattaattcatcaaaaaggaatgggcaaaacacccgcttaccctactttaattatgctcctcggggctcaggcgtttaagagggtatcggattggatgggatcttccacgtcatgaggatggtcaagagacataacgtgattcttgaaagaacatgcagcttcttccctctgttctggttgccccagcttgtcaaatacaatggccatcaagtagaaagcttcggccattaattcatgatgctccaaagcttgcaactcatctgcagcttgccttaagggatccagcacaagttctggatttttggaaactgagaagcttggatctgagagataacattttgcttctgtaatataggcccgagcacagagttccaaacctccatggccaagaatcattggaaaagcaccatgtaaaaagattaaagcagtctttgcatgattggat

SEQ ID NO: 10889 - DNA, 481 bp, Gossypium hirsutum
  Clone ID: LIB3828-032-Q6-N6-A11
gaatgacacccgagcaagcaggcagcaagtcgtcatttaaaataggcttagcagagacgttttcatgtatttcatctaaaaacacagagctccaacaaacgtttaaatatcatcaaatcattaaatatagggtcttgagtagtaaaaaaaaacatggggtaatagacataaatcccaccagcaacattcaacactgttaagaagcttaaacaagcccaaacattggcaaataccatgcttcagggtaattattcttccgcagcactagcagcactcaaatccacactgagggcaagaacctttccagttatcatgggatacatgttaagtacatcactgacagttgattcaaaatgtgttgtagcatcataacttggtgatatgaaacaattgtcaagagaaggttcgttgactggttcatatcggtcatagatatcaaagaatatctcatcaacgggacctagaaggtcaattccaggct

SEQ ID NO: 10890 - DNA, 492 bp, Gossypium hirsutum
  Clone ID: LIB3828-032-Q6-N6-A12
gggcgaacaatcaactaaccattttatttaagacacgataaattcgttcatgtgaacatatcagcagcagcataagactttaaactaaaatgattaaaaagaagtcacacaatttaaatggcaaaccagcaaaccaaagcaataaaatacaagttcaaccactggcccaacaaagaaagatgagagagggggttattaatctgaataggtttttccttctcgtctttcacaaccttcaatttccaccccctcttaaggcttccagagaatgggggtctcggcaatcattgatgtaacaacgtaaggatccatgtttgatgctggccttctgtcttcgaagtagccttttccatccttctcagtgtcacgaccaacacggatggaggctcccctgtttgcaacaccccatgagaatgagttgatatctgcagtctcatgacgaccagttagacgtctctcgttaccctctccgtaggcggcaatatgctcctt

SEQ ID NO: 10891 - DNA, 551 bp, Gossypium hirsutum
  Clone ID: LIB3828-032-Q6-N6-A3
atatagcaaagaaaacatatatattagcatgtacatgcattaattacatatggctacaaaacaagattcaaggaactttaggatattgtaaatcaaatattgttttgagctatttattcttcataattactctttttatccaacaggattttatagcaagcccttctgcaacatcattacttcttattttgtataattaatacgacgacaaccaactcttcctcattatttcatcttaatatggtatcatctccctactttggtggactgggttcactgtccataacctcttctatccctttgctctttacagtttcagcctggcaacatcctgatgcgcacctgggctgaccacactcagcacaagtcccaccgcaaccctgacggcaacactccccactctcacatcccgactgtcctggcattagtgggatttgtgggacttgtgggatctgtgggattagtggaatttgtgggatttgtgggatctgtgggatctgtggaattcttgggatttctggaatttgaggaaatggtagaacgaaaccacc

SEQ ID NO: 10892 - DNA, 526 bp, Gossypium hirsutum
  Clone ID: LIB3828-032-Q6-N6-A4
tttttttttttttttttttttttttttttttttttttttttttttttttttttttttttttttttttttttttttttttttttttttttttttttttttttgggggaaatttttttttttttttttttttttttttttttttttttatatttatttttttttttttaaaaaaaaaaaaaagggccaaccccccccctttttttaaatttcccaaaaaaaacaaaccaaaaaaaaaaaaaattttaaaaaaaaaaggaaaaaaaaaaaaacccctttgggcggggggaaaaaccccccccccaaaagggtgggtatttgaaaaaaaaaaaaaaaaattgtggaaaaaaaaaatttaaaaaaaaaagggggaaaaaaaaaaaaccccaccccaaaggggggaaaaaaaaaccccccaaaaaaccccccgggggttttaaaaaaaaaaaaaaaaaaattggaaactttttttaaaaccaaaaaaaaatatggggaaaaaaaaagcggaaaaaaaaaaatattttccggg

SEQ ID NO: 10893 - DNA, 512 bp, Gossypium hirsutum
  Clone ID: LIB3828-032-Q6-N6-A5
agcagaaatttatataacaaagaaaatcatatatattagcatgcacatgcattaattacatatggctacaaaacaagattcaaggaactttaggatattgcaaatcgaatattgttttgagctatttattcttcataattactctttttgtccaagaggattttatagcaaacccttctgcaacatcattacttcttattttgtataattaataagacgacaaccaactcttcctcgttatttcatcttaatatggtatcatctctctactttggtggactgggttcactgtccataacctcttctatccctttgctctttacagtttcagcctggcaacatcctgatgcgcacctgggctgaccacactcagcacaagtcccaccacaaccctgacggcaacactctccactctcacatcccgactgtcctggcattagtgggatttttgggacttgtgggatctgtgggacttgtgggatctgtgggattagtggaatttgtgggatttg

SEQ ID NO: 10894 - DNA, 252 bp, Gossypium hirsutum
  Clone ID: LIB3828-032-Q6-N6-A6
ataaattgacatctatatagtgtgatccataaacaaaaatctattacgggtcaagggctcaaggcctacatgcggttgaagacccattttaacctattatatgttactggaattcgaaaatgagtgttcaaagacatgcatgtgcttaaaaccagacggcacagttatacctatattcgtatatgtgttgtgttgctgtatctttagggacggagaggttcttatactcgaattggtaacccataattgagg

SEQ ID NO: 10895 - DNA, 474 bp, Gossypium hirsutum
  Clone ID: LIB3828-032-Q6-N6-A7
gtaaatgctggctcaacctttcacatttaataatttatgatgtacagattccgcatatcaaatggttgcgcaaggagaaagtttttgttctctcaagaaacaaaaattgttaagcaagaaagacttgcccaaatttagtagattataaaacttctctaacctccttaattaactttatgtctcaggagtctttctctttttgtcagatgctgaagccgcctcagattgagcttgaccaaatacagacccgcaggtggaacatttcttgtgatgcttgcagaaaattgacaaacatacagaacatatgtagcccatgtcaatagtgtttttatggcaaaaacatgaggcgcgaaaatcaacaccaacaggctttggaagatgtatgaaactgcgagaatgcaagtcagtagcaaaaatagtcatgagatactgaaacagcccatccaaattttgcggtttatgatgtacaccacc

SEQ ID NO: 10896 - DNA, 546 bp, Gossypium hirsutum
  unsure (1)..(546): unsure at all n locations; Clone ID: LIB3828-032-Q6-N6-A8
gaacccggaaaacacgaaataaatttcgatcgtctctagggcagtaccaagctttaccaattacaactaacaagcgtcttcaataaaaccctttgggaactatacccgctcaagcaaagctaataatctaatggccaggaacatgcttctttcaagcaaacatcataaaccaacagcaaatgacatgttaaagctgccattgattgaaactggcatcatcaactctcaatgttacagcttgtgcctaacctaccggtacaacaacctaactatagataaagcagtgtttgatttaattgcttggaaatttcactgctgcgaaccggttacaatgcatcaggcgaatcaagaatcgcttggctgctgttcaaattgctgctgctgtggctgaccctgaggccatggcatgaaagccatgggcggtcgaggctgctggccaggatacaatgcagcttgatcaattggctttcccattatcatccctgggggatcccancagggtgctgtgggacatagtaataaggaatatcagcaggtgaaccaact

SEQ ID NO: 10897 - DNA, 467 bp, Gossypium hirsutum
  Clone ID: LIB3828-032-Q6-N6-A9
caaacaccaaaccacctaatatttgaacacatatgaacaggactaacttaaggaacataacccaacaaacttccaaacatataataatcaaccactgaaccggaaagcccatgttgcacaacatggttactttgaaaaacaaccaacataaacatggccctaatcagaaaggacttgactggtttcaccgcaccacgcttaaaaaccgaggcttgggaggctgtccttcttcactaagcccccctgaccaaggaagggtgatacattcttacgctggtgacctcaaacacaaatcaccggacctaatttagggacctggaccacggtcccattggattaaaaattcttctttaggtgtttaagtatcttgatatagctgaaatctttctttaacccctgggacagttgtcaggctttatgcgaccattcctttgctgaatacaaatatgcacatactcctttgcacc

SEQ ID NO: 10898 - DNA, 526 bp, Gossypium hirsutum
  Clone ID: LIB3828-032-Q6-N6-B1
agtataattgattgtacaattattaatctttgagattataaagtatattaaccatttccaataaaggtcccccaaaaggcccctaaataattccacggaataagcaaaactagtttggttcaatgggaaacctgattcaaaaactgcaaaacagtaattgctaaaccaagtttggaaaaattccccttggaagctttcaaagtgagagcgttgctcggggaggatactggaacactcactgaatgaacgggcggcgggctcaaaggtgacccaaagggagccgaggccggagctgtttcaagtaagcgaagcacattgatgtctactttctgtccagcttgacagtgtccaagaacaccacagaaaaaaaaatggtgacctttagtagttattttaatggagtcattgtcagtggtatatgtagccaaaggggatgaggtattgcaagccctgtacatcgaatgggttacccgcatcacattgtgtaactgagcattgtacctcgaaaagaataacgtcaccaact

SEQ ID NO: 10899 - DNA, 535 bp, Gossypium hirsutum
  Clone ID: LIB3828-032-Q6-N6-B10
aaaaaaaaaacaaaatttatttgcgaaataaaaataattataagagttacaacgtcatcaaaaaaaatatacctctgctattgattaagcggtcggggtagattttgctgggataggggcagaacatgcagctggattttgtttgccactaactttaggcttcacattcgaacattgtgatactgcaggtccagtcggtccactatgcgtaatttcaatgtctgcaagttctacattttcacaaggcaaagtagcactacaaataatcttgacagcttctggacgcgcagaagtgccgtgaatgtttttgaaactaatgttgcttagtttaactttcgattcttcatttattttgcatttgttccatgggcaatatttctgatcaattataataggagaactgacattggtcacggtaatatcctcaaagtgaatgttcgaacaagtgccaggttcagcacctggccaagttttgattctaacaccattggaagtattagtcatggtgcaattttttactgtaactccatcaact

SEQ ID NO: 10900 - DNA, 426 bp, Gossypium hirsutum
  Clone ID: LIB3828-032-Q6-N6-B11
aaaacaaaggggccaaagcattttatttctttaaatccattgggaactcaagcttttctcatcctctttctccccatatgggggatttataccagccttggatacagatttataagcttatttaaattaactgctgaaaggggggggccttggcatgccttgcacgatgccgcaagtaaatacaccttccagcaaggtgtactcatccttgagggatcggttaggggaaataacactagcataaagctgttgcccaagggaatgcctgtcccatatttccgacctcaggttccacatcccgcagttgtcgaatgtcaataggattgctgaccaggagttggggaatacctgtatggggggtctgctcacggcgtcaaaaaaatgtagttcatcctcttctaagggctccatttcccaatgtccatg

SEQ ID NO: 10901 - DNA, 448 bp, Gossypium hirsutum
  Clone ID: LIB3828-032-Q6-N6-B12
acaaaggcaatgtggtttgatttttcactaagtatttgtaatggaccaaatttgcccgacccacataaacaaagaacaaaaaaaaaaccaaaaataaaattaaacccaaaacaaaattagacagtccatttacaaatctaacccagacacaagcccaacattacaaggcccgattgccccaaaatatttgaaattttcagaaaccctagggtttctatccactccagcgccgcagcctcggtcgccccgcaccccacgtgcctccgtcagcgtaccatctgcccgatggttgcttccttgcaccgaaatagcaaggttttccttcattgaccctccgtagacctgcaaacacgacaaagaaggacaacaagaacaaaagcagagcaacaaagataaaatgcataaaatttaatagcaaatacacagtgttgtaaagcccacgcgtccg

SEQ ID NO: 10902 - DNA, 486 bp, Gossypium hirsutum
  Clone ID: LIB3828-032-Q6-N6-B2
atccattccacctttctataataaatgggtcaaaagaggagcagtatattgtacaaattacatacgtatctttatagttcaaattaactacgacaagaaaaaaaaaaaaaaaaaaaaggaaggggggggaaaaaaattaatagaacttaaaatttatctgaataaaacccctggaagaaaaaactagcagtggggcgccttatgtaattgcagtacaaaatttggtatatataaatggggaacacgatacagacgagggaaaaagggggctgatcaagtgctgctttgtttttacgagcagatattagctttggcaataataggctgctgaaagagtaaaatgattgacgatatttcaaaagagtttgatagcaagaaaataaaaagtcattgcgttttagctgctattagttcctagttcccttgttagcaaaaattcacaagtcttatacacgattcactacttacgtaactatatgccacttt

SEQ ID NO: 10903 - DNA, 449 bp, Gossypium hirsutum
  Clone ID: LIB3828-032-Q6-N6-B3
ggaaggggaaaaagcacccaaatctggggggggatttgcactcccaaggggagggcccaaaccctagggggggagggggccccgaacccggggggccacccccgggcaactgacagggccccggacccggggccccccccgggaaacccggaccggtccccgcagggggaccacatggccctaaagggagcccgaaaaaaactgggggcaaccaaggacaaagctgaaccccgggggaaaagggaaaaccggtaacaatcccacacaacaaacgagccggaaaactaaagggaaaagccgggggggcccaaggggggagccaacccacaaaaatggcggggcgcccactgccccgtatccagccagaaaaccgggggggccagctgcataaaaaaaaccaccaacccccggggaaaggccgttggcacatgggaccccaggggggcttt

SEQ ID NO: 10904 - DNA, 550 bp, Gossypium hirsutum
  Clone ID: LIB3828-032-Q6-N6-B5
gcccttcaaaggattaaatatatacttgcgccagactaacactcgtacccaaattcaagtaacaagacagcatgggacaatccagttaatcttagacaaaaagcatttccaccaaaaaaagaaaacatctgtttaacctttttcaggcaatataatgttacaggttaccgaagggaatataccagagatgtagttttcacctgtgggtcaaggagagcgaggaatttgtccaaaaataaaggggtaagcttataagcttttatccttctctctcctgatttctgagatctaaacagagggtagcttaccttgaaaccgagcaggaacccgaactccaaagaaagcagtgacttagtccttgtaggagctttgagttcatttggacaaaactcatcttgaagggatttttatttattctacaagtgaaatataaagggcaacagccatgccagatgctagtgagagtaactgcactgcagtatttttcaatgttgttttgccattgttattcatttctgcaagcactccagcaacagcaatgtatataaat

SEQ ID NO: 10905 - DNA, 572 bp, Gossypium hirsutum
  Clone ID: LIB3828-032-Q6-N6-B6
aaactaaacttttcaaaagttctttatagatgaattttatctatgaattgaagttacaactagttagtttagttacaataaaggagttctcttttaggaaaacacaaactaaaaaatctcggcattattcataatagtttggatgagatatgcaactacatactattagagttcatcacgataacttacttctggaggtgaaatatgtttggtcggattttgcaagaggtatgttgtcgccaacgatgcatgtaaagctgcaccgtatggaaaaacatcttcatttactctgaagtagggtgaatgtcccgagtgaactgctccttccgtctccttcatcccaagaaagaaaaaaagtccagggatcgactcagaaaagaatgcaaaatcctctcctcccatctgcggctgcatttctataatgttctcaaagcccaaaatctcccctgcaacctttctgaaatgctcatgcaactctttgttgtttgagttcacagggtacatggacctttcgtcgaagatcactgtcgcattgcatctttgcacgcttgcttgtttcgatataacctcct

SEQ ID NO: 10906 - DNA, 537 bp, Gossypium hirsutum
  Clone ID: LIB3828-032-Q6-N6-B7
agacaacttcatcctttttttactcttatttttcttcaagtattcacaacatgggtatagatataaaaatatgacctcttcacatacgttaaaaaacacataaaataatcttaatcttaatcacactcatgtcacacgtgcaattccatttaacagtctttgccccaccattacctgtgattgctccaagcaagttggctccatcgagctttgcaccttctaagtgctgataaatcaaaacgagaaaaaaatacaaacaaaaattatgtaacgaattccggtaaggtatctgaaaaaatataaagactgataaatcttttgacttgatctgcatcaatgttgcatgcaatccagaaggtttagataacaagcatccatcatgttgtgtgaaagtttttagataattgcacactaaaaaaacttcatatacttactgtatcaggaagattaacatgatgtaaataagtccttcggaggtttgcaccattcaaattcgcattgcttaatttcgcaccctggaagacatgttcattacaa

SEQ ID NO: 10907 - DNA, 570 bp, Gossypium hirsutum
  Clone ID: LIB3828-032-Q6-N6-B8
gaatgaatcatttgaatcgatcaatggcttacaattgttcgtttatacatatcaaaaggctaacactgaattggtgtgcaatatgttaccctaaaatggagtttaggccttaaagaaatgaacctcttaatgaatatatatatatacaacaatgaatatggaaagttggaatttgatttgcattccattcatctgaaggtaagtaccaatccagaaactaaagcttctttgattaatggaagcccgggggccttaaatttacggtgggagattcgggagaagtggtatagataccgtcaaaatgaagatttatgtcccctccagcttcaagatcatccatgtaagacatatgggataacctccgagaatcccgccaatcaaggtattgatcttgcccttgtatgcttctctcggataagttattgtactgacagtctgcaggatagcggttgaaatcgggaggctctagaaaacttgcttggggctgtgaaccgtgcaagccacttcggtcccaccaatggctccatgtatggtgtgccaagtcatttgcatcatgatgctgaagtacac

SEQ ID NO: 10908 - DNA, 560 bp, Gossypium hirsutum
  Clone ID: LIB3828-032-Q6-N6-B9
caaccaaagctttattgttattttatatgaattttttacataaaattggtttatcacttgtaataaccaaaatttgcccgagctttaaaattgaaaacaaaaaaataataaataaatgtttatttattaaacagtccttttacagcccaaaagttaaaacccaaacccaaaacccagctaattacccggtacccattacaccctacctagcccagaactaaagtggcccaattggcccaaactattacattaaggcaggaaaccctagggtttctgccttttcctccttgagccgtcactgcttctagaagattcggggagcgtctgtccatcttccgaatcaaggccaccatcgatcatgcccccatcaacgtttcttcagtcacgtcgtttcaccttgcgtcgtttcagctacccttcataggtgccgtgattccaggccctgtatctcgttgagacgcaaatcgacgccgtgatcagtgccctttcttctcttcgatcgcctgcaaaaggaaacaagagggagcagaaccaacaaatatggcaaggaagtaaaataa

SEQ ID NO: 10909 - DNA, 476 bp, Gossypium hirsutum
  Clone ID: LIB3828-032-Q6-N6-C1
aatagatggataatgtcttaacaataaattttcaactcttctttgtttatgacatcaaagcatcacaacaatgaatagatgttatgagaagttgaatcccataataagttctgaaaatctgcaactatcaagtaaaacactacataacctttgagatgcccccaggaattcaaaaggtatcatcccttctttctgcaatcaaaagatgaatatcagggtagaagaccaatcgagctcgacgtttgaactgccccttgattttgccaaaccattatctcgaagttcctgctcctcaatcgaacacttaattcctcccacctcctggtaacaaactagctaaggagggaactccctggtttctcatttcttcttgtgctcgtctcatttcttcaggatccatgttttccactaatttgggcattaaaaacaccaccaccagcataaatcccaccatgagacccattggggcttttcac

SEQ ID NO: 10910 - DNA, 496 bp, Gossypium hirsutum
  Clone ID: LIB3828-032-Q6-N6-C10
ttttttttttttttttttttttttttttttttttttttttttttttttttttttttttttttttttttttttttttttttttttttttttttttttttttttttttttttttttttggggaggggggggggaaccgggaaaatcgggagggggcccggggggggaacaaattttccttaaaggggggggaaaaaaagggggggaaaaaaagggaaaaaggggttcccggggaaaaaaggtaacccggtaaaaaaccaaaaaaaaaaaaaagggggaaaaaaaaagggaaaagcggggggggccaaaagggggggcaaaaaaaaaaaaatgggggggggcaaaaggccccttttaaaaaggaaaaaacgggggggcaaattgaaaaaaaaaaagggcaaaccccggggaaaagggggtttgcaaattgggcccaaggggggttttttttttcacaaggggaaagggaaaaaggggagggcctttaaccggggggccc

SEQ ID NO: 10911 - DNA, 512 bp, Gossypium hirsutum
  Clone ID: LIB3828-032-Q6-N6-C11
gccattcaaaactaagcctaatttaagatgcaatttattattgcaaacaaactgctgctgcagtattatgttttctttatcatcaatgataccaacaatgtttgcttctacaagaacacctacacgacacagcacatgctattcgcacatgatatgacagacagacgctacatctaatacaacaaaacatctaaaaccactaaagccaggcactattcctcttacacacaccagcaccatttcatcagaatacaaagacaagttaaattcagcttcttcaagtttgtttcctcgagtgcatttcaagacctttagagcttcacttctctatcaaagatccaactgaatggaatacagggtgcttccttggccttttcttgtgctctctcctccagccttctaattctcgaagaaagtgcacacacatagtcctgagctttacgcccctcggctgaaaggccagttagctcctttaccttccatcgatccaccaggtgctctactatatcaac

SEQ ID NO: 10912 - DNA, 561 bp, Gossypium hirsutum
  Clone ID: LIB3828-032-Q6-N6-C12
aataataatattggtactctttaccatatcaaatgtaagatcacaaatgaattagtttctctttaaggagaagatggagccattcaggaggtggggttttgatacttccatctgaaaggcaccgaaaaatcaccatctctcctgctaataattttctcataaatattcttctatgttgctgttggctaattaatacatatgtaaggcatgcctaaaaattttaaaggttgattttcccctcaaatgaccctaaatctaatagatcaagacaattttctcttcatctacgaactgatacaacaatgggtcttatgtgtacaaagaataagcaaaagtaaagaaaacaaaaatctatcacatactagtttagttctagttcatcaatagtgatgtcagtatttgtcccatcgttttctcagatgcgtcaccttcattctctatagcaatacccgactctagcactgcagcatccagagtcaacttcctttttgcaatctcataaacattctcatcaacagtacctttagtaaccagcctgtatatagtaactggcctaatttg

SEQ ID NO: 10913 - DNA, 472 bp, Gossypium hirsutum
  Clone ID: LIB3828-032-Q6-N6-C3
aaaaaaaaagcagttgtacggtgtgatagtctttcatttcgtttttaaaaatagaatgtacaggccaattttggggcctaaattcagacctactaacctaataccattacaaaaggcccgtttacaaccttaacccatcaagcccaatacccattacaaacaaactaacccactaacccaatactatcagcccaatacctaaaattatccaaacccctagcccaattaaacctatcagacccactaaccaaaccctagccacccatacccttaacctgcagcgccgaacctaccctctgacagcactgcagcaccgccccaccggtcatgtcctccaccgacccctctgcagcatcggccatgctctctacacggcggccggcgccggcaccggcgagcctcggtggcagtccggtgaccgacccctggccgggtttctcccttccccttccccttctcttctctccttccc

SEQ ID NO: 10914 - DNA, 350 bp, Gossypium hirsutum
  Clone ID: LIB3828-032-Q6-N6-C4
aaaaaaaaaaaaaatttttttccccggggggggaaaaaaaaaaggggggggaattttttgccccccaaaagggggaaaccttggggggtttttttggaaagggggggccccacccgggggaaatattccccccctttttttaaaaaaaaaggggggggtttttgggggggaccttttttaaaaaaaaggggccctttggggggaaaaaaggggcccctttggggaaaaattgggaaccccccttgggggaagtttttgaaataaaaggaacacccccctaaaaaaaaaccttaaagccccaaccaaagaaagaaaggccttttttttttggggggggggggggggccccc

SEQ ID NO: 10915 - DNA, 502 bp, Gossypium hirsutum
  Clone ID: LIB3828-032-Q6-N6-C5
cttatacgtgtctttatatcgttctttatgttaaaagtgcatggttctttgtcgtcttttgcatagaggctattcatgaactgatttcctttaactattctatgataaaaattaaatacttgaattgttatcttgttgcgagtctttctttttggaatcaagtttagattagatagttttgtttatctttgtagctgattagcgttgtttaaggtttggctctgtttctgtgcttgtgtctagttattttgttgtcagcctttgttttgaagcgttgtcctcttgggaggaagagtttgctgggttttttgtcgtgtcttttttgaatcttgtctggtggtttcgtcttcctgagtaggcatatgcttctttctttgtcttggggttttcccttagtttccagtatggaagaggatcttaacagtttattagagaaattaaaattctcaaaggaagaaacaacaaaaattgttagcacgaatttggattacaataataccca

SEQ ID NO: 10916 - DNA, 557 bp, Gossypium hirsutum
  Clone ID: LIB3828-032-Q6-N6-C6
actaaaaaagagccaaacataataaaacttaaatccgtaaaaaaactacacataatatttgcaaaattagaaagctatacctatacctttatatgataaaacatccataaaatattatatttaatagtttaagaaaatcaaatctccatagaaatactcaaacttttatactttataatattttgaatagctatgactttacttgaaagataagatcgcattccatagttgttgtttcaagactttagagcatgacttctctattaaaaatccaactgaagggaagacttgacgcttgctttgctcttaattgaaatctctcttccaattttctaatttttggagcaagattacatacaaaatcctgagctttacgcccatcagctgaaagtccagttaattccttcacgttccatcgatccaccaagaactccacaatatcagcatagtcggaagcagtgtaaaccccaagtctttgtgcaacagccgagaagtggtcgaaaaggttttcgtcttgcccatcgtacatcaagtaagcaggcatcgtgattttcttc

SEQ ID NO: 10917 - DNA, 494 bp, Gossypium hirsutum
  Clone ID: LIB3828-032-Q6-N6-C7
atataacaaagaaaacatatatattagcatgcacatgcattaattacatatggctacaaaacaagattcaaggaactttaggatattgcaaatcgaatattgttttgagctatttattcttcataattactctttttgtccaagaggattttatagcaaacccttctgcaacatcattacttcttattttgtataattaataagacgacaaccaactcttcctcgttatttcatcttaatatggtatcatctctctactttggtggactgggttcactgtccataacctcttctatccctttgctctttacagtttcagcctggcaacatcctgatgcgcacctgggctgaccacactcagcacaagtcccaccacaaccctgacggcaacactctccactctcacatcccgactgtcctggcattagtgggatttttgggacttgtgggatctgtgggacttgtgggatctgtgggattagtggaatttgtgg

SEQ ID NO: 10918 - DNA, 551 bp, Gossypium hirsutum
  unsure (1)..(551): unsure at all n locations; Clone ID: LIB3828-032-Q6-N6-C8
gaaagaaagacaattctacaaataccatagagcctgttgaagaagatacaaaagagtaaacccaaagtttcatattttaaacagctaaaagcaattaaaaactctcatgatgattgacaagcagaagttatttgtgctggttctacttgatccttgactggcttttatgcaagactgatgatgagaacttgaaacaaatgttaggaataagtcccaaagatgtcatcagattctagtttgttggtgctttcttctagcatcatctcttggtacctacattctttgctgcaaaatgctttctcacttctgtacatgtaaatgtcttttcctggagaaagattctttttacaagcataacagtaggtaaggaaattttctgattggtaacttgaccagtttctcttcggagaggagaaaccaacaaccccacaacagctttcaacaatgcaatcatcaaagatatgnggtggttcttggattacttccatgagatatgacacaggtgtaatcttctgagagttccatttcagaagctgggagattcccaatga

SEQ ID NO: 10919 - DNA, 566 bp, Gossypium hirsutum
  Clone ID: LIB3828-032-Q6-N6-C9
aaaccaattgattgaaattcattgataaaactagagaaaaacagggattaaaaagttcataatcgaaggaaaagatagctatagaacacatagttataagagttttaaggcaaacataatatataagagaaatgtcatgtaaaatgagatgaaagagattttaagggtaagacaaagtagcaatgtgattatgagccacagttccaatccacagtttcccttcaacttctctaacttcactcaccaacctcatcaccacaccttttctatcttcaaggacttcgacgatttctccattttcgtcgaaaagcgagattacagtgtacatcttcatccccataattcttgctaaaatcttcattttaatgggtaatctgaagtataaactcctcatccatgggttatgaaccaggatctcttgtgcttgtgttctacaacaatctatggctacccagaattgacctttgtcgtttattcttacgttgtctggaaaaccaggcaaatgtgcaaccagttccgttgtccctgctcttggaccttcaacccagtatttcattagcctgcaa

SEQ ID NO: 10920 - DNA, 543 bp, Gossypium hirsutum
  Clone ID: LIB3828-032-Q6-N6-D1
ggtaaggaataattgcatcttgttaaaacagtctgacgtgcaatttgagaatttcgtgataaaactaatttcatttctctattacatcggatgtatgcactttagcctaacaagccgtgtgtggaccgtgatgaaagcaggcgaatctctcttcgaccagttatatatatttctttacaggtcggccatatgcaacacgcaaaactaccaaaactacttacatcagaggcttacaccacataaaccatgccaacctctagcaaagatactggtggcaccttaagtgccacatctggtcctcggcaattccttctcaagaaattgtacccaaagttaatggccaatctcttaaaaacagatgatccttgctttgctcgaacatgtgagtgccctagtatgaatgcagtcccggcttcttgggctgctaacagaatcttgtagctcctctcgcaactgcaactccatgttggtcctcacatcagattcggagtcatcatcgatggcaaatctaactcttctttcaacggcatgcacaggctccat

SEQ ID NO: 10921 - DNA, 496 bp, Gossypium hirsutum
  Clone ID: LIB3828-032-Q6-N6-D10
aaatacgtggatgctgcatttacattatcaaagtaaagctcggaaatccgcataattatgcttcgagtttaaaatgacttggaacacttcatactgaaaatactagaatcaagaaaaaaaacagcttaatgtttcctggggtcactcacgtggaacgaggcctccggtgacttacccgttttaggatgcaaaggcgtagccgcttactaagggcttctagcttttctaatttctcatgtttcggctttggggttgttgaatctctcttcttctgtttcttctgcttcttctgcttctttttttcctctttgggtggatcacttgatttttgctgcgtgcttttcagaggtgttgcaagcacatcaagagtcacctgatttccgttattagcagccgtacagtctgctgaagattcttcatcactgccccccagtgaagagcatcttccccaactttccctgtttgagcttgtatatgagcaacattcatcactttg

SEQ ID NO: 10922 - DNA, 546 bp, Gossypium hirsutum
  Clone ID: LIB3828-032-Q6-N6-D11
ctcaacttctctttaaacccatctctttctcattctctgtacattaataacaattattaaggggggaaaaccaaaacaaaataaaagaccattctttttttgggttttttttttcacaatatggagtttagtcaatcttattaaccccaactcgactcatagacaaaacattcctaaaccccgcatccaaacacatccccattccctctcctctcgaaacgccaccgttttgctgttgcatctgaaccatgtaatctctcacctccattcttatcatttcttgcatcaccgccataaactccgcactgaaccccatcacctcgcctccctttccatcattttttgcttcgttcctcgtctgagtagactcggtaactgggagggttgaaactgacaactcatacgattcagccccaggtaaagacaaactcagtgaagtcggtggatcgttagaagaagacgccgccgcttcgaccccaggtaatggcataacattgacgtcaacgctgactccgccggtcctcgggatgggcttgtacacgtgtg

SEQ ID NO: 10923 - DNA, 506 bp, Gossypium hirsutum
  Clone ID: LIB3828-032-Q6-N6-D12
ggcggaatcataaaaaggcctgcagattaagtggttccatttcatcaaattttagggttcttaaaaggaccttaatacatgaaaactttaacccccccttttagcaggcaagccaaccaacaatgcccctttcacaattactaaaaacagaagccatgcttgctaatccaaaaactaaaaccggcctcatataatttacaaaccagggctaaatctctaaaagttcctttagttcatgggggaaaaatgcaaaggcaattcagggtatcgatttcgggagctgatagcatcatttcttcttaatccgctattcttcaaatcatattttaccgacgtttgccaccgctttttttccccaaaaaattggaatactatttgaggggaatatggagttgcaacctatagctctatccactagtcttttggggatatgatctcgataggtggaccttatgggaggattgtcccccggaatgctaatgacttcgaatccaagtttaaggaac

SEQ ID NO: 10924 - DNA, 558 bp, Gossypium hirsutum
  Clone ID: LIB3828-032-Q6-N6-D2
aaacttcaaaactaaatataaaaattaatgaatttaaatttaatacataaacattgattcaatatgtaatttaatacataaaaaaacacacacacacacagagacacaaagtattacaatttctaaaacaaaattcatcctggtgagaatataatgccaaatcatcatcacctctcattgcaatgcctgcatatataacttagtgaagtactttgatcttgatcttggttaagagttgttccagcaataaagaaaattgttaaacggaatctcggtcacctgacagttcctgcatcatcatggtgctccaagatcttgtaaacctccattggagcagcatagccattgatcaatgagaatgtacgtgaatgtgaggcacataatatgaggctcagggccacaggtctaagaaatttggccatcataactttaatagaattatcgtagggattatatttgtctcggaaaagatcagtaaaactctcaatgacagcagaagcagcaacacaaacaagagggtatatgggataaaggaatctttcttctttgtgcggctgc

SEQ ID NO: 10925 - DNA, 530 bp, Gossypium hirsutum
  Clone ID: LIB3828-032-Q6-N6-D3
aacaaagaaaaatcatatatattagcatgcacatgcattaattacatatggctacaaaacaagattcaaggaactttaggatattgcaaatcgaatattgttttgagctatttattcttcataattactctttttgtccaagaggattttatagcaaacccttctgcaacatcattacttcttattttgtataattaataagacgacaaccaactcttcctcgttatttcatcttaatatggtatcatctctctactttgggggactgggttcactgtccataacctcttctatccctttgctctttacagtttcagcctggcaacatcctgatgcgcacctgggctgaccacactcagcacaagtcccaccacaaccctgacggcaacactctccactctcacatcccgactgtcctggcattagtgggatttttgggacttgtgggatctgtgggacttgtgggatctgtgggattagtggaatttgtgggatttgtgggatctgtgggatttgtgggatttctggaa

SEQ ID NO: 10926 - DNA, 525 bp, Gossypium hirsutum
  Clone ID: LIB3828-032-Q6-N6-D4
agaatgtaatatgatttgataatggtagataggcattgcgtttataaatgccaaattaaatttacaccatatttgaaattgcacaaaaaaaattgaaagtttgtcgatcttgggtggtagtagcggctgtggcggcggtagcattggtggtggttcatttgacacggcggcaaagggtgattccatcgccaacagggagcatgcaaatctcaatcctggggtcaacagcaagagccttgttgagttccaaaacgaagtctctgtagtacctaacatacttcctaagcggagcatcgggcggtgccaccaccgacccgttccacagtgtgttgtcgtagccaatcaaaccaccaaccttcaccaactctatcaacctcttgtggtagttgaggtagttgtctttatcagcatccacaaagatgaaatcatacgacccatgattcttttcatcttccaccaatttatcaagaacaggcatggcagggccttctttgaattcaattttgtgtgcaacgccagcttttt

SEQ ID NO: 10927 - DNA, 552 bp, Gossypium hirsutum
  Clone ID: LIB3828-032-Q6-N6-D5
atgtaatgtgaacttttatccgatttaataacacaaaaagcaaatctccatagcagaaacttggaagttgatacagttcaagcatttggcatcccttgtttcaactgtgtaacaatcttattaaaattaatgtaagaagagccatcagggcttgtagctatttcagctttcttcttccaatctatggcgttttgccttaaaccttgccccttcatcccttccatcaactccctcacaagactttcaactttctcccttttgacatcactgtcaatctccatcccaatgccccacttggtgcacgagtagaaacaattcatctgttgctctgcaaaaaatggccaacaaatcattggcaccccttcactaacactttccatggtggaattccacccgcaatgcgtcaaaaaccctcccactgaagggtggctcaataccctctcttgtgggcaccaccctacaagcagacccctgtcgcttatcgccgccgtgaattccttggataatattctttctccaccgccatcgacaatgtccggcctaataacccac

SEQ ID NO: 10928 - DNA, 455 bp, Gossypium hirsutum
  Clone ID: LIB3828-032-Q6-N6-D6
aagtaaaggggggaaagggaattcccaatgggagggggccccttaatacttcccccaaaacccattggttatatgacccgggagccaaccccggcaagacccgggtcatcataccaaggggggtttgaaacttgggtcaacatattccgggggaagaactttttcgattttatatatatagcccaagaaatatagcaaagggcataacttactaggaaaaatcggattaaaaaggccctccactttaccaaattgagctgatctcttcaacagttcattcttttcggctttgaatttaacaaaccgagaacctttcccctctttggggggggtatcttctaaaatcggctggggaaaaataaagggaggccccggctttggagataatggaggcatcaatgcccatactgaccaaaggggttcctttggtttgtcaaaattttgcaaaggaaaaa

SEQ ID NO: 10929 - DNA, 540 bp, Gossypium hirsutum
  unsure (1)..(540): unsure at all n locations; Clone ID: LIB3828-032-Q6-N6-D7
aaacaccaanacaaaacgagagaataaaattataatccgtacatatacataccatccgtccagtccacgacaataccgaccgtccaaacaaagaataacaaaatgttaaatatagcagcaaaagtagacgtaaaaaaacgcatcattgactcaatgcaacctcgtcagttcctccactctcttggacagctcctccacagaaactcccattcctttagaaacttcctccatttttccacggctcagatcaaggaatgattcaatcaagtctccatccaaaaagtttttggcttctgcagttctcttctcgttgttgaatgacctccattgttcatggctcaaccctcccacgccctttatcaccttccttaagttcgattgcagcttctccagaaacacatactgatcatgcggaagtgaagcaatcacgccaattgcaccattgacggtgccaaaaataacggtttgaatctggcccacttctgaatctggcaaccgcatcacaagggaaccatgacggaacctattcacaaattcccc

SEQ ID NO: 10930 - DNA, 463 bp, Gossypium hirsutum
  Clone ID: LIB3828-032-Q6-N6-D8
gggaactaagttcccgaccactttgatgggattttattggttcttttttttttagtttcattcaaatgggacaggttcaccctgaacgaaaaaaagccggaaggggcaccaccgttcggccaaagggctaacttgactggaatcgctgcaccttcttcgggggttgaatgaccggcattggtatttatatctggtttgacaaaaccagggcaaacacagttgatgcaaaaatttggatgcttcttggccaaaatccttgtataggcattcatagctacttttgagattgtataggcagaaagaaaggttggccaacccttgctttctaatgaaccctccttgaaattctttaaaaactcggggattaactcggcgattttctctcctgtatcaacatcccttaatgcttctttgcgctgttcgctcggtatgtactgtagcttgcccatgctagaggaaaatt

SEQ ID NO: 10931 - DNA, 436 bp, Gossypium hirsutum
  Clone ID: LIB3828-032-Q6-N6-D9
ctcatctctaactcaaataaacaaaagttccaaagcactgatttcagtctcaaaacaaaaaaaaaaaaacatatgctaaaaaaaaaaaaaaaaaaaaaaaaaaaaaaaaaaaaaaaaaaaaaaaaaaaaaaaaaaaaaaaaaaaaaaaaaaaaaaaaaaaaaaaaaaaaaaaaaaaacccctccaaaaaacccccgggtgggacccgcccagtggtttgaccggggggatgccggggggcccaccctttgcgtataaaaagggtgtcttaaaaaggaggggggaataaaggggggggatagttacctgggtgaaaatagtttttccggtcaaaattatcttcccccaaaaaatccggcagcaaaaaaagggaagactgggggggggtaaagaggggggggacctaacaaaaataagaagtgggctaacatggcggg

SEQ ID NO: 10932 - DNA, 541 bp, Gossypium hirsutum
  Clone ID: LIB3828-032-Q6-N6-E1
catatcaaaattttcttcccctcggtatttcttaagccacggcggagattctgcgatggcggccatctctggtgaggcaatcaaatccctcgattcgtacagcagctggcatctgcccgaatttcaccctcacgcatcctccccttgaggagggtcccggggatgttagtggaggtagcaccggctgctcgtcgttgaatcgggcatcttggattaccggattcgacgccctgctcggcggtgatccacagaaatacggtggtgatgaagccatttggtcggtggggttctcggccccataccctccctcggagaggattatatcaagaagctctgcaccagcttttgaatcagccatctcagtctgataacagctgttggtagaccatctaaaggttcgtataggcttagggcaaaccactgaatcgaatcctccctcttcaaatcttcccatggcgtttggtggttggtttataaattctgtttaatttttcagacagagcaaagatcagaacaccaacaaaccctaagctcctccaat

SEQ ID NO: 10933 - DNA, 550 bp, Gossypium hirsutum
  Clone ID: LIB3828-032-Q6-N6-E10
aattagtaaaaaagacataattagaacagtgatatgataataagcatacaaatggcgttggtatcaataataagctgtttagactccagggaccatgtcgggactatagggaacgccggaactcgaaatccaagtctcagattcgaaatagacgcgaggagtccatttgttggcttcatttatatctatctttttgatacctttccatgctaccctacgactggtatcggcaccgggtcccctgtttccaaactcggcaatgaaagaagtggctattcctatggggcctgtcatgggggcataaccctctggttgaatgatgtcgtcgatctgagattgcattatgatagacctagcgaattgtttccagggacgccccaagtacgccttgttcgtatccttcactgggatgtaatcaggggcacccgagatggtgcagttttgaagcacaatggctgagtttgttccaagatcattccttccttgtgcagtaaccatgcaattttggccaggccctggctttctcatgatgagcatacagttctggaaa

SEQ ID NO: 10934 - DNA, 549 bp, Gossypium hirsutum
  Clone ID: LIB3828-032-Q6-N6-E11
attatataaaaaaacttaaaattttattagagaattaaaaaaaggtgaaacgaaaattactttaattctcttaattagtagttctcaattgtcatctatccaacatgaaaagcatcaacttcagttaaggacctcaaaatctgcaattgcatcttcctcagcccaacagcgaactccaaagcctcgttcatggcagctcgagcaccggccaaggcgtcctcaaggtcttgattaaccatgtaatacgaacatatttggccaagtatacgatcatgcctttcttggaacctcacaactctttcttcagcatgttccaatgcctggctaatgatccttagcttctctatcgaaacttgctgcctttgccatttcttcaaactcggtaggacgaaaatgaacgaagtggaaaagccgataaccgcgaaaattatccgaacatagtccatcaataagcttctgtttatttggagaatgggaaatgaaagtctagtttatgtaaagggtggagattccttgcttctttccattaacaagttcttgggtgctttt

SEQ ID NO: 10935 - DNA, 441 bp, Gossypium hirsutum
  Clone ID: LIB3828-032-Q6-N6-E12
gaaatacaaaatatttttttctttttattttattgcttgaacttacaaacaaagcctaagtgcagcctttcaaaggcattattaacgccttcaatagggttatagctaagcagcaggaccaaaaacaagaagatgaacatatacttcagccaggccaccaaaggccttcaaaaagcaatcaatacaaaacttgacttcgtgcgaacaactgcacaatgtagatgttaacgctttgaactaataaaaaataaaataataaaagaggaaggaataacacatcttcccatagatgataataataaaaataaatgaattggcaaattacagatgctcttcacactgtacatacttgttttggttattcttctctctttaagctccttttccttcatcttcgttcaaaatgcgttgccggaaatcacccaccataagaggcaaccc

SEQ ID NO: 10936 - DNA, 431 bp, Gossypium hirsutum
  Clone ID: LIB3828-032-Q6-N6-E2
ccacacgggacacccccacccatgaaacacggggcgcgacccacggcccttggaaccgggggaaggagccgggacaaaaaaagcgcaaaggggaacgaaaagggctggggctactcgcagacaaaacgacaaccgggggaacaccggaaagcgcggaaaagacgacaaaaaaacccaacagtcagagggagagaggaactgccgggggccccaggggaaaaacaacacgaaggaaccccacagggccaacagcaacaattaaacgccagaaagctgtcgcggcgagctcaaaaaaaaaaggggcaacaccctctgtcagggaaagggcaaaaccggcacaaagagggcatcaccttcagcatgcaaaaaggggaaccagacctcatccattacactatgctcggccactagagcagaaacgagactcacca

SEQ ID NO: 10937 - DNA, 510 bp, Gossypium hirsutum
  Clone ID: LIB3828-032-Q6-N6-E3
aaaggaagaaaaagatatctaactacctctctatattacattcatgcaggggcacatcgcagggtttgcaaggccacacatatttttcttcaacaggggttcttaaattataattataaaacatataaaagggggttaaatatttcaataagcaaacagaattcctaggccaatttcactgaaaaaggtggtcactttttaacaggggaactaggatccattgcaataccacagagaccccttttatcagagactccacgttccaaccttacatagccaggttcaccccattcagtaccccatgaattcttcactatccaggactttttattaaaaacttctccatagccaactattgcaactccatgggtgagttcatttccacaatctccattgaacacacctccgaaataaaattgaaattcgagccctggtgcatcgatggcgaccgatacagggtgctgagaaactgctatttgcagagctggctcattggtgggagggcccacg

SEQ ID NO: 10938 - DNA, 537 bp, Gossypium hirsutum
  Clone ID: LIB3828-032-Q6-N6-E4
gaggctaaaaaaaccatcctctatacttcatattatactataaacaaagtaacaattattacaagcataaaattgatctctccaaaaatagagctttgcctttactaccttacttccataatttagaagtagtgggaaaaaataaaaaattaaaaactattattttctcgtacatctttttcttttcccatttcttttgtttctacaatttcacaatgaaataaaactctttttaagtttgtatggggttcattttacctagctcttctttgatgttgccgcattttgttttcttttacaagcagctcagcatataaaagctcgttccacgaatttggcacaccgggaaggcaccaatggctgcagtcctgggattttaggggggctactctttcgtcttccggtaatgtttgctttgggtgtttccggtagatagatgggtggccattctttctgaaatcggtcagccgggtgatatttaggtaggtgacgtgcgttttcatccccttcagcactgattctaacaccaacatcttt

SEQ ID NO: 10939 - DNA, 398 bp, Gossypium hirsutum
  Clone ID: LIB3828-032-Q6-N6-E5
agaaaaaaacaatgtctcagattttgaaagagtgaaagagttgcagttaattgaatgtgcaggcaaaaagatcacgaaaaggaatacaatacattttttgttgaattgaaatggcgaaaaacaagggtaattgataaaagaaataaaagagtaacctgaagaagaataatcagaagaaatgaagtatcttaaagagaatgaaaacgaggaaaccgaagaagatgagcaggaaaaggtagtccaccattacgaaaaacatggttgatccatgatttcgtttctgctgcttattgttcttattcttcgattcatctatttcttcaagttgcgccattgaaccgatggatcttcggatttcactgtaaccaaaatttggggatctcgacttttggtttcgc

SEQ ID NO: 10940 - DNA, 543 bp, Gossypium hirsutum
  Clone ID: LIB3828-032-Q6-N6-E6
ccctaaaaagagtgattctattaaagaattaatgttgccaaataaagtgaacaagctaaattcaaagaaagacaacttagaaaaaagttttagaaacatatcaggcaatacaccacatatttgagtccaatgttcttccgcaatacaccattaaaaccgaaacattgaaacatgtcagtccgcaaacatactttctccccgggctcgaagcagagtgattaataatataaccattcctaggtatcacaccctacgccattatcttagcagacctgacatagaggctgtctacgaccttgccaatgttggagatggtttccaatgttgtggggtagatggcatcggtcttgggatcgtcaaatataacaagacatccggcaccctgatccagagtccctgcaaacttcttatctaaaatcatctgagaaagtttcttctccacatggtctacaggcagttcaatgagttcggcaatatgagcgatctcaacccttgagaatggctcaatcaatctgcagagattctgctccagtagagtgtcat

SEQ ID NO: 10941 - DNA, 419 bp, Gossypium hirsutum
  unsure (1)..(419): unsure at all n locations; Clone ID: LIB3828-032-Q6-N6-E7
ataaagatagttttttttttaaatttttattgttttaattgttttttttttaaaagaaaaaaaaagaaaaattaaaaaaaaaaaaaaaaaaaaaatggaaaaaaaaaaaagaaaaaaaaaattttnaaaaaaaaagggggggaaaaaaaaaaaaaggggggaaaaaaaaaaataaaaaaaaaaataaannaattgtgggggggggggggagaaaattagtggaaaaaaaaaaaaaagaaaaaaaagggggggggaagggtttttaaaaaggggagggaaaaaaaaaaaagggtttttttttaaaaaaaaattttttaaaaaaaaaaaaaaaaaaaaaaaaaaaattttattaaaaaaaaaaaaangggggagaaaaaaaggggggaaaaaaaaaanataaaaaagaatggggggaaaaa

SEQ ID NO: 10942 - DNA, 558 bp, Gossypium hirsutum
  Clone ID: LIB3828-032-Q6-N6-E8
ctatgtcataatccatatattttacagttttagaacatcaaaaagttagaacattgtaatgacataccatcccaaatattacaaacaaaaaagttacgaaaataccatcaacaaaaccatgatttttaatggtcagcaagaaatcttctgacccattccaaccgcacatcagaaggtaaactaaagaaaacaagcatttgagttagatgatctggaattttactcaatgctcgaaaccgctcatccactgttaaaccttctatttcacataaggttggatataagtttgtagctttttcttggatgatctggaattcttctgacttttgttgaactaccacatcggaggcaatattcctactgatttgttcgccaatgacccgcatgttttccgccaataaagtggaagcatcatgaaatgaagaagaaaaatgatcacttgcatctaaattcttttttttttcttctttgaagatgaggaacccccttggtttctatctggttgcggctccgtagtagaaacatccatgtcatccaaagagacatcagcttcgcagt

SEQ ID NO: 10943 - DNA, 533 bp, Gossypium hirsutum
  Clone ID: LIB3828-032-Q6-N6-E9
atcatgaaaattaattaattaactctatattacaaaaataccttcctcaatattccattacaaataccaagcttcacttgactataaatacaatcactttatttttgtaatttgcacataatattcacaacaatcacacatccaaacacaaaagctacaatggaaatccacctcacgcttaagctaatagacaattatgctattgataacttaatcctttcgttcggacaatcaccggagcagacgaaagggtaactctcgatccacaaatgctccgaccgaccgaccttgattgatcagtgctaccaatatcttccatttcccctaacagtcatccggttaaaagaaccattgcgggtcatagttgaaagtaccgcaagtaaaacaaccactgctgctgctgctgctgctgctgctactgctgctgctgctataatccaagtgttgccaacaccttccatttccactaaccggtctctcgcaaggagcaccattgtcggtggttgctccacaaattaatataatatcatcac

SEQ ID NO: 10944 - DNA, 524 bp, Gossypium hirsutum
  Clone ID: LIB3828-032-Q6-N6-F1
cttagctaaatcataaaattcccaaaaaagtcaataaatcgttaaaaattaccacatccatactctacctaatgaggcaaatccagaacccataattgcccacttaccaaaatcatattattgcaaataagggtcattcatttaagctaaaacaacacttcttcgaaaaatccacaacaccttttattctcttaaaaaacacacctcatccaagtgcaaaaccaacacaaatttgcatcacagtcagcagaaagaaagggcaaaacttggtattgattgaataagacttagttcttctatttttttattttagtttcagcataaagcaagagtgaagcctcactttgggtcagtgaaaaagctgttgatactgggcatgatttctggcgtcttgttgcggacatattttctcaagaaatgttcaaaatatttttctccctcagcaaagttgtccaaaaccccagcagccctgttctccttggttaccctgacttcagggttgatgcagatatttcgcaccaact

SEQ ID NO: 10945 - DNA, 532 bp, Gossypium hirsutum
  Clone ID: LIB3828-032-Q6-N6-F10
aaaagattaaaaaactatttaattaattagtaaaaaatgacataattagaacagtgatatgataataagcatacaaatggcgttggtatcaataataagctgtttagactccagggaccatgtcgggactatagggaacgccggaactcgaaatccaagtctcagattcgagatagacgcgaggagtccatttgttggcttcatttatatctatctttttgatacctttccatgctaccctacgactggtatcggcaccgggtcccctgtttccaaactcggcaatgaaagaagtgtctattcctatggtgcctgtcatgggggcataaccctctggttgaatgatgtcgtcgatctgagattgcattatgatagacctagcgaattgtttccagggacgccccaagtacgccttgttcgtatccttcactgggatgtaatcaggggcacccgagatggtgcagttttgaagcacaatggctgagtttgttccaagatcattccttccttgtgcagtaaccatgcaattttg

SEQ ID NO: 10946 - DNA, 378 bp, Gossypium hirsutum
  Clone ID: LIB3828-032-Q6-N6-F11
acatgaataatgctaatgcaatgttttatttatctttaaaatttacacttacatattttaaaaaataaattaagtagttttcgggtaacaaatacttattaattaagaaaagaaaaaagaaaccctttttttcatatcaaaatatatttcattcacgctctccacttgcaaacaaaagaggggggggggggttatggggaagatgataatgcatgttgtttatgggtaatggtgatctaatggtcattatcactaccggttccatcgggttttttcttttttcctttcttcttctttttcttcttcccggcaacactaccaccatcgctatcacgggcggtttcacgaacactattacgggccccatcgcgatggggc

SEQ ID NO: 10947 - DNA, 536 bp, Gossypium hirsutum
  Clone ID: LIB3828-032-Q6-N6-F12
aggtaagcttggtatctttatttcatgcaaactgtattacactaattacacatcttaattaggtagttgcagacccagattttgatacagatattgtttatataactgaactgaacacactgattttgttatggagatggaaacttaacatgttcataacttcatatgcatatatgtgtatatatatgcttagggttttactaacatgttaatttccagttttattcttaggcacaccatattccgtaaagctcaaaccaagctgtaaacaactagcaagcttatcagtgtcacggatgcttgcgggggatagggctggtatcgttcatgtagatatggtgacgtgaatcgataagtctattcttggaagcgatcaattctatagcagaaccatcttctcccgttagatctatatcgtctttagctccgatgtcggcctttcgacccagctgatgattacttggctcgcgctccttctccagggtcattcgttttccatcagcttccatggttgccaaaaacagcaggatggcgaa

SEQ ID NO: 10948 - DNA, 546 bp, Gossypium hirsutum
  Clone ID: LIB3828-032-Q6-N6-F2
tttttttcgtgcatggctgcgcaatgaggctgtcaaaaaattgcacagcgaactatgacaacacaaagcatgatataagagcagtatgaataggccaagtgcgggatgtacgaacatagacaaaacaattgccgcagatattggaacaaataacggattggctcttagaatccttacaaccttcaatgaaaagaacctcgaagaaagattcataaaccagtgaagaaacaaaaagccaaagtttccttcccatagttgccaccttgtttttatgaaaacatgtaaatacgcagccacgtagaagaccaattgggataccaatatcagtagaataacaatcccattcgccaataggtagcaaattatcaacacaatggtgaagctagagaatggaggaaatggttgagatactagaaaggaaaagaacaaggaaagcaagatggggacagcaacaaaaggcaaaaacgggaatggcattcttaaattggactccacagctttcagtatagaaggaatcggccttgcatgtgcttgtcgcatcagagc

SEQ ID NO: 10949 - DNA, 395 bp, Gossypium hirsutum
  Clone ID: LIB3828-032-Q6-N6-F3
gtaattcataatagagaatcaacaaggggaaaaggcagaacaagaccccaaatacaagccgccaaagcggggggcggcacgccgaccctcgcagcggaaacaaaaaaagaacagaacgaaacaaaaacacaaggccaagagaagcaagaaaagccgtgcaaccacgagaaaaaaacaaaaaacagaaacaacggaagcacttccggccataaggagaacctcaccggccgaactggctccgggacgaaacatgttcccttggcttctgaatcttcaaaaccaccataggcacggtacacaggcctcctgttcctagggaacctagacctctcggattccgcaggtctcaagcgaggaatcctcagggggagccattttccgcacagcagtcggag

SEQ ID NO: 10950 - DNA, 385 bp, Gossypium hirsutum
  Clone ID: LIB3828-032-Q6-N6-F4
aatatatattgctaaattaaccccttaacattacattatctatcaaaatggctaacaaacaaatggcactgattttaatttttgtcctacaaaattagaagggagattttcttcaggggggaaacggggtttggagagggtaaagtccaaatatcggaagggcaggcaccaccgggataactaatctcaggagccagggaagggccatcagggtcggctccaaaaacgacaaaaaaggttgggtttggttaaaaaccgccttcctcgggggggacatcgaactggaacaagggggaacctttctccaaaagatctggatagaaatggcgaccccatgcgctgaatagaaaggtcgccatggaaaaacgtttaccggctaggctca

SEQ ID NO: 10951 - DNA, 442 bp, Gossypium hirsutum
  Clone ID: LIB3828-032-Q6-N6-F5
cagaaacattattcattgtgtatcatcatgttttttgttttgtaataataataacaaacacttaataataaacaaacaacgcgcgcgctcacatatatatatatccctctaggtcttaacacgggctgattggcctcgaatatcaaagggggtgcagccaaattggcaactggtgttttcgaaaaagcacttatagccgcatcctatcgagggagatgtcacacagcctgcaaggcacccgatataaccgcatttcatggagcaggacatggtactcttgccgcaatagccccccagttttgaggccaacgcatttgggggattcacttgggctgatgccgccttcgccaatattcctatgcagatactcaacaacagcaatcgtgccattaccggagacatggtgttggatcccagaccacgacccatattttagtatgcc

SEQ ID NO: 10952 - DNA, 530 bp, Gossypium hirsutum
  Clone ID: LIB3828-032-Q6-N6-F6
ccatcttcaatgcctcaaagagtgcaatgcaaaattatacataaaatgatggaaatgaatctacaatgaagaattcaaccaaataccaaagccgccaagccgccaagccaccacttgccgccacaaacactaacactctgtttggtaagaaggaaagtaaaggaaaattgaaaggaacacgtctaatctaatgactcgaccaagaacatatagcatacatcgatatgatcgtatgcatgaatttcaaccattagattactactcttttactttctttcctatcaaatggggtaccttaacgataatgaaatctactacaaactttcagcattatgcattttcaatgagattgctagttggtgtttacccttttgaatcgtatctcattcaatcgaggaactgttcttccattgcatttttggttttgcaattaacccttgaaacgaactacaatacaggagatatcatccttactgtctcggttcagtgactcggttattagccttttagctgctcgaagcgggtccttg

SEQ ID NO: 10953 - DNA, 534 bp, Gossypium hirsutum
  Clone ID: LIB3828-032-Q6-N6-F7
ataataaatctagttagaccacagtttagaagtattactgatgggtgctacaattcaatatattgagactccccaatacatttgtaacaagaagaggtaattttggaaggtcggttttggataagactttcatgttttcaaaaaaaaaaaatcagcaatacaaacattcctgacaacaaattattcacaacagttttgattaaagaatggtgtgcttgcaaaatctttcaagttgactaatttatgccctatcgggaaatctacataaggctctagaaaaagggagcaaagaaaaggggagtttaaactttaaagcaccagcctttatatagatagatggaggttacagctgagaagttgaccaaaccaaataatttcaggtctgcttcgactgcatccactctacgaaattatccaggatcaatggccaagcaaggtccggattataactactgaagtccgggaaacttatcatttgtattcttcaattttttctgccagagaaagtgttgttgcaagaactggaaattttaa

SEQ ID NO: 10954 - DNA, 515 bp, Gossypium hirsutum
  Clone ID: LIB3828-032-Q6-N6-F8
gaaaatccaacttatgccataaatgcttggagacaaaactagttacatctttaccacatgtatgctgctcaactaaaggccagaaaacggtgcatagggaatcataaaaacagcctaaaaattttaaaacaaaacaagtcctaacaaacaaaaacagtaactacagcaaagcaagtaaaaaacggaaaatgaaacgtccccagatctgaaaatcccttcatctccaaaagccttccaaccctcccctgtgcatcagtagacatagaggccaccagatccttacatcatattaggctcattacactagtaatcagcctcttcatcaagttgtaatagccaattttggcccaaaaaaactcaattcaataaagcaaaataaaacccaaacataaataacaaatggcccaataccaaacccaagttacctaacccaacaacccaaatgaaaccctagcccattacaaagaaaagaaaacagcaacagccagcccccaagcatgctactgccaaacttt

SEQ ID NO: 10955 - DNA, 436 bp, Gossypium hirsutum
  Clone ID: LIB3828-032-Q6-N6-F9
aaaaaggaaagcccccatcggggttaaaaaattccccttaaaaaaaaaaaaaagggaactttccatccccaaaaattggcccccaaaaggggggacaaaaaaaatttccccttaaaaaaaaaggcaaaggggttggccagttcaaactggaaaaaaaaaaaaaattcctaaaaaaaaaaaccaaagccccccccggggttattaatttttggccagggggtagcccaaccaaaaaattggcaaaaaattccccacttttgaaaaaaaaaagggggttcaaaaaaaaaaaaattgggttgggaaaaaaaaagggggaaaccaaaaacccgggggaagtttccccaaaagggctgttaacgggaaggggaacccttaaatggcccaacccaacattggaaacaaatggacagaccgcacattggggggggggggcccc

SEQ ID NO: 10956 - DNA, 504 bp, Gossypium hirsutum
  Clone ID: LIB3828-032-Q6-N6-G1
agccgaactactcgtcaaatctattgcagtccatatagtcttgaacaaagcttagaagagtcgaagttcacacaatagaataagcaaaaacacacgataaaaggaaacaaatcattgggtagcaaaatgcaagccctccactcaaacattacttatttagtactcatcttcaccttcctcatcaccctcgcctgactcagcaccgacttcttcataatccttctcaagggcagcaagggcctcacgagcttccgagaattctcctttttccataccctcacccacgtaccagtgaacaaaggcacgcttggcatacatgagatcaaacttggggtcaatgcgggagaacacctcagcaacgctggttgagttggaaatcatgcaaacgggtttttggaccttagcaagatcaccaccaggaaccacagtcgggggctggtagttgataccacacttgaatccagttgggcaccagtcaacgaattgaatagttctcttgggctt

SEQ ID NO: 10957 - DNA, 541 bp, Gossypium hirsutum
  Clone ID: LIB3828-032-Q6-N6-G10
actcaaatatagtaaacatatatacagatatatcgcaggggattacatataggtattttaaggtcttgttcttatcagaccattgtgacctttcgatattaacttcttgtcctttagcaacattattgtaaatcttattatagaagtctaagtttgggtacaatttgatcagcatttcagcaaggttttacttaaagatgtatacaaagctgccatcctccacttaaagaagctcccactctgaatccaacaaatcttgagttgatgatctccttgtagcctctcttgtttgtgcagacattgagctccccttggagtcctcgtcacattttccaacatccccataccatttagcaagttgtttgtactccattttccttgctgacctcattcgtgaagaaatagcatcacgaatctttttctggtaagggctgtgtttgccttgcctatgaggatgacaatgaagttcagcttcattcacaatgatacaactttcatcaactcctgttttatccaatgggtggaactgttccactttctt

SEQ ID NO: 10958 - DNA, 555 bp, Gossypium hirsutum
  Clone ID: LIB3828-032-Q6-N6-G11
gaaagaattaagtttttttattaaaaaatacagaaagtttacactactataaataaccaaaaatatatgtcttgataaagagagagagagagagattttcacactgttttagtttcggctgagagagttgttgtgaccattcatcatcaacaccatcatccatcataattagttcacagtcacacctctcttcaccacttaaaccatcccttttttcaccactttcggaccaaacaaagccaaattctctaagcttggcaaaaaaaccctaaccccactaaaaggtcccccccccccttttcatttttttttgtgaaaatggaggtagccaacactaaaaccaccccatacccacaatctgagtcttcatcagagacacacaaccccaacgaggccacgaccaagtctttaaccctcctcaagagctgcacaatccaccatcatatggtggtttcttacaaagagtgcctcaaaaaccatgctgccagcttgggtggacatgccttggatggttgtggtgagttcatgcctagccctacttctaccccgactgac

SEQ ID NO: 10959 - DNA, 561 bp, Gossypium hirsutum
  Clone ID: LIB3828-032-Q6-N6-G12
gaaaccaaattgaagtatattattgattattcaatcatgatcatatgttgcgtgatacaacttttggaaacacagaaaaacaacacatttgaaaggaaagctataatttatgtttagagttcatccttgggagaatatgaaggtccagtaggattagaagatgagttcttgatgggatatgaagcctccattgctataccacacagtccttgtttgtctctgatcccacgttccatccttatgtaacctttctcaccccattccgctccccatgagttcttcactatccagtacttggttccatccaaggttgttccataccccactgctgctaccccatggttcagctctgtcccacattctcccgtgaataccccctcggagtagaactggaaatccatactcccagcatcaatagccactgaaaccggctggtttgcaacagctttaagcagagcatcctcgtcgttagctggcacattctcgtgcccatcgatagccactgccggagaattcaccttggcagcatcgcaacttccatcattagcttggtaagggtaa

SEQ ID NO: 10960 - DNA, 438 bp, Gossypium hirsutum
  Clone ID: LIB3828-032-Q6-N6-G2
ctatgttgtttatttaaataacagccccaaaccagccacacaaaggcacaaggaaccggaacccaaagggaacaacaaaaaaccggaagaccaaaccgagggaaggcgaaggtatacagcaaaataaaaccaaaaaaaaccaaaagaaaaaggaaaaagcaagcaccgaaagaaaggggaagaaacgccgaacaagcaaccacggccccaagcaccaaggcacaacccccagaaaaagacccaaaaaaaaacaaaaaaaaaacccaggaggcaaaaagaaaaaaaaaaaacgaacgcaaggggcgaccaaaaaaagacaaaccgggaccggcaggcggaccagctgaacccaaacagaggcccaagagagcccggcgaaaaaacggacagagccgggaccagagcgaaaacaaaacccggtcacaaggccgcccaaaa

SEQ ID NO: 10961 - DNA, 552 bp, Gossypium hirsutum
  Clone ID: LIB3828-032-Q6-N6-G3
ggttcaattacatggcacaaggtttctttctggttgcgattaggttacatatatatgggaaatttgttgcatcattccctcactaattcttctcattttctgtgttaccattgctttcatcatattgaaatgctttagcaatctttttcaggtctactaatctatcctttcccattttcctatacaagctaccgacaatttcagtatcaatttctactttcgattctggggaagctgcaacctcatcaactaaggtagaagttgtcccatccacactcttggaatcatctcccgcagagcttttaaatttttcaaccagtttagccacccccgactgaaagttagggtctgttattattttgttcaattgttccccttgtactccgccatcttgcaatgcaataataaagtcggacataactgaagccggaaataccctcatggattctggggatgctgcaagctcatcagctaaggcagaagttgtcccatccacactctcggaatcatctccaacagagcttttaaacttctcaacgagttttgacttaa

SEQ ID NO: 10962 - DNA, 497 bp, Gossypium hirsutum
  Clone ID: LIB3828-032-Q6-N6-G4
acaaaacgggtgaatgtcacttttatggggggactatattaaccagcagaattaagctcaagattggggctaccacagctttaatgattgaataatttttttcacttagctggttttgggatggcatcatcactaacaggggcctgagtaatgcgggcagaaaaccccgatgatgcttttcctgaggggagggaagaccatgccagcgctgtcatgccgagggtaattgctgcggctatcgaaccccaaacccatttttggcttctttttttcctttggctatcacgccgggccatctctatagcctcttgggtcctctgagacatttcctgatttacagccttgtaatagggcaaccgggccaacaatcgggcgacttcaaagttcttcaatttaatttgagaatccatctccatttgcatttaaacccttgcaacgccttttcccacagataaagaacaagacgggcaacactcttttgctggcccaattcttca

SEQ ID NO: 10963 - DNA, 564 bp, Gossypium hirsutum
  Clone ID: LIB3828-032-Q6-N6-G5
gtcaaacaatcatcatttgatttatctacacacaagtccaaacatagcaagaacaggtctaagtttacaacttcaccaatacgtctttcacttaacaattgaatcaaaagtatccagtaatgtgacggcctatgtaatctctaatattcggaaagttgaaatatagtacaaaaatgagcctattgaatttaatacgggttagagccttgctgtgcactgtaattgtggtaagcacttggtggagcattgaagttggcgtaaggcccttgctgagaattaagtggataggggatttgctgcacagtcaaattatgatatgggccttgatgagcttgcctgtttgaatagttctgttgagcactcacattttgataggggctatattgagcactcattttctgataggaactttggtggatgttcgtatttggatatgaatcctgttgtgcattcatgctttgtccagaagaagccatgaacgactgaaaaatgctctgagcacttgtatgctcagaagatcgagggaactcttcaaagccaccagtttgaggatcatcaagcttt

SEQ ID NO: 10964 - DNA, 544 bp, Gossypium hirsutum
  Clone ID: LIB3828-032-Q6-N6-G6
aaataaagatgtctgattctattattttggcaaactcagagagcaataaatgtccagtacaaaactgcagggttcaacttctaaaatttaaaaacaaacacaaacgtttcttatttgtgaacattacagtcagaaattgcacaacactctccccctgagagagcaagttgaacccattaaggcaaaaatgaaagtgcatcaatgcttgaagtgcctcacatttgttaaaagcaatgaaactccatacttgttacaacagtccacagcatccccatctctaatgctccctccaggctctgcaatcactccaataccactttcacaagcttcttccactgcatctttccaagcaaatgggaaaaatgcatcactagctaaagcagctcccttgacctcatctcctgctttcctcaaagctattctcaagctctccagacggtttggctgcccgcttcccattcccaacatacggttgtcctttgctattacaatagcattgctcttgacatgcttaacacacagccatgcaaattctgcatcacaa

SEQ ID NO: 10965 - DNA, 515 bp, Gossypium hirsutum
  Clone ID: LIB3828-032-Q6-N6-G7
tgttctaggcctgttgggtcctgtagattcgggtcagggtttaattattgggcttgggttaatagactgtggtttttatatttatttgtttgtttttggtttgtttgtaatgggctcgggcacatttggcccactacactatatattgtgtttttgttcttttgtcaaaaaaaaaaaaaaaaaaaaaaaaaaaaaaaaaaaaaaaaaaaaaaaaaaaaaaaaaaaaaaaaaaaaaaaaaaaaaaaaaaaaaaaaaaaaaaaaaaaaaaaagggggcggcccccctttttttttttttttttttgcaaaatttttaaaaaaaaaaaaaaattttttaaaaaaaaaaaaaaaaaattttttcttaaattttttttccctaaaagcctttttccccccttaaaaaaaaaattatttttttggaaatttgcccccataattaaatatccccttttgttaaagggcccttttattaaaaaaccgcggttttaacctcaaaaaaaaaaaaaaccccccccc

SEQ ID NO: 10966 - DNA, 563 bp, Gossypium hirsutum
  Clone ID: LIB3828-032-Q6-N6-G8
agtgagatctcgtggaatcttttttaattaaatccgagatttcatagaacaaatggctcaagacaacatgggaaatgagactgagttttctacccttaaactgtaaccacaatgaagaaacagccaaacttcatgttggtttacatgttccataagcaacaaaaacaaaactaccattaaaacaacataggagaggccaaaaagaaaaaaacaggggatatattttttaaggactcgttgccggacagccagccgttttcaatggtgttttaagcatctttcttctccacgagcttctcgatcagatccgctgcatcttgaacagtgacaatgctttgggcactttcttcttccacactgattccgaactcctcctcgagtcccatcacaatctcgaccgtgtcaagagaatcggctccgagtgcagcaaacttagattctccggtaacagaagaatcttctggtagtgctagttgcttcctcactatgctacaaactttgtccaccgtctcaggtttggccgcacaagaaacccggaggcgcataggtcccggtcggattct

SEQ ID NO: 10967 - DNA, 557 bp, Gossypium hirsutum
  Clone ID: LIB3828-032-Q6-N6-G9
ataacaaagaaaacatatatattagcatgcacatgcattaattacatatggctacaaaacaagattcaaggaactttaggatattgcaaatcgaatattgttttgagctatttattcttcataattactctttttgtccaagaggattttatagcaaacccttctgcaacatcattacttcttattttgtataattaataagacgacaaccaactcttcctcgttatttcatcttaatatggtatcatctctctactttggtggactgggttcactgtccataacctcttctatccctttgctctttacagtttcagcctggcaacatcctgatgcgcacctgggctgaccacactcagcacaagtcccaccacaaccctgacggcaacactctccactctcacatcccgactgtcctggcattagtgggatttttgggacttgtgggatctgtgggacttgtgggatctgtgggattagtggaatttgtgggatttgtgggatctgtgggatttgtgggatttctggaattcttgggatttctggaatttgaggaa

SEQ ID NO: 10968 - DNA, 436 bp, Gossypium hirsutum
  Clone ID: LIB3828-032-Q6-N6-H1
acagacaacttacacattaggttcatttaattaaaaccacccttgttttaacaagcaaattcaaaacttttgacagggggttatgctacaaaagaccacaccaaacatgtcttcaagatgggtgacattttcataaacactctgcatgcttaagggacacactggggacacaatttggattaggcgacctacaaatggcgcctggtaccagaattgattgaaaatgtgagtgcgtactgaatcattgggaactccacaccttgcaaaccgtccagcactacctattggggctttcgcactctaagactaggcgacttcatctgccctaccaccagtgcattgtagaggctccagcgttaataacaacatgactgattaacgggcttgcttttggattatagctcaaacaatagtatgccaagctggatgccttacg

SEQ ID NO: 10969 - DNA, 364 bp, Gossypium hirsutum
  Clone ID: LIB3828-032-Q6-N6-H10
gggggggggggggggcacccgggaaaagggggaggggaaccgggggggaaaaaaggtttccaaaagggggggggaaaaaaaggggggggaaaaaagggaaaaaaggggtccggggggaaaaaggaatcgggaaaaaaagcaaaaaaaaaaaaggggggaaaaaaaaaaaggaaaaacggggggggccaaaggggggagcaaacaaaaaaaaaagggggggggcaaaaaggccgttttcaaaaggaaaaaaagggggggccagcggaaaaaaaaaaacggcaaaccccggggaaaaggggggtagggaaaaggggccaaagggggttttttttttccccaggaaaaggggaaaaaaggggggccc

SEQ ID NO: 10970 - DNA, 561 bp, Gossypium hirsutum
  unsure (1)..(561): unsure at all n locations; Clone ID: LIB3828-032-Q6-N6-H11
acagctngaaaaagaagacttttggattcaggaactgcacataaaacaatggccatactaggaaccgctcccaacatgaacctgatagggtttcgatttccccccactgatacaaactgaaatcacaccaaatacaaatctctgtttcactggtgcccgtgtatccggttattaaaagtccggggacacatgcaagacatttcacccttcgggcctaaattgaaggaccctaagaatttagaaactcacctatctttcgatcactaatttacagtagtctattaacctcacttaaccttttttcttttttataaaattaaaataactcattgcctatagcattgaacagcgaacaccttttgccaaagcactccatttttgaaatgctatggcactcaacctaaccctaactaaacgccaattctttgcactcttcttttttattttcttctttggtgcttgcttctgtatggttaaattactagatgcaagcgctatagagttcctttgtgagtgtttcaatcttattagcctccccagtttggctgtgctgttgttgaa

SEQ ID NO: 10971 - DNA, 498 bp, Gossypium hirsutum
  Clone ID: LIB3828-032-Q6-N6-H12
ttgttttagcttttagatcagcggggggaaggatggtgtaagctacgaggtaattgaagtgatcagaatcggtttctatggagctttgtttgcagaacagaatgattctacttgttcatattttctgtcatctcctctttttttgttttattttgaaattgaatgctttatgctaaaaaaaaaaaaaaaaaaaaaaaaaaaaaaaaaaaaaaaaaaaaaaaaaaaaaaaaaaaaaaaaaaaaaaaaaaaaaaaaaaaaaaaaaaaaaaaaaaggaggggggcccccccccttttttttttcttttttcccccccaaaaaaaaaaacgttgttcaacgggtctttttttctcatttcttaaagcttaaaaacaaaaaacccccccggagatcggtcttcctttttttctttaataccatcccagacaaaaaaaaacggggttcattacccgcgtcatttctctttaaaagaaaaaaaaaattttaaacaactttttcaa

SEQ ID NO: 10972 - DNA, 397 bp, Gossypium hirsutum
  Clone ID: LIB3828-032-Q6-N6-H2
gggccaaaatattttatttcattaaatacatttggaactcaagcttttctcaccctctctttccccatacaccaaaattggatacagatttataagcttatttaaattaactgctgaaaggggggggccttggcatgccttgcacgatgccgcaaggcaatacaccttccggcaagggggactcatccttgagggaacgggtaggggaaataacactagcataaagctgttgcccaagggaatgcctgtcccatatctccgacctcaggttccacatcccgcagttgtcgaatggcaataggattgctgaccaggagttggggaatacctgaatggggggtctgctcacggcgtcgaaaaaattggagttcatcctcttctcaggactccatttccc

SEQ ID NO: 10973 - DNA, 554 bp, Gossypium hirsutum
  Clone ID: LIB3828-032-Q6-N6-H3
gaataattataaattgcttcgaaaccacaatgagtactagaaataatattatccaaatacataattagtagtacaccacatagtaacaacattgtccaagtgcataatattacaccacataaaagtatcaatatcttgatacaacatgcggtgtcttgattctttctctatttatgaagtttatttatgaagtttacttgtacaagagatgtttgaaaatgcgtagaactagaagaaaaaaacaaaaatcagaaacaacgttgttacttcctgtcataatgaatcttttatcggttgaactggctctttgatgaaacattttcctttgttttctgaatcttcaaaaccaccataggcacggttcacagtcctcctgttcctaggtaacctagacctcttgtattccgcaggtctcaagtgaggaatcttcagggtgagccattttctgcatagcagtcggagcaatcatgataggcattgaaatcttaaatcccaggacagtggtggtcatgtcaatcttgttaacatcaataagaatgcggggtcgaaacttc

SEQ ID NO: 10974 - DNA, 257 bp, Gossypium hirsutum
  Clone ID: LIB3828-032-Q6-N6-H4
aataaattcaattcttcaaatgatcttcaaaacaatagtgggtgcaaaaaaaatgtaaacagagtacttcatatatttatatatatataaaaaataaaataattatatatagtgtcttcgacgattcaatgcttccaatgaaatatttatggcaaaatttgtacccacatcgatcgaaggcaaggcaccccattgtagttcacaaagagcatgtaataaccaggttcttcaagctcccatgaatggcaacattgcac

SEQ ID NO: 10975 - DNA, 553 bp, Gossypium hirsutum
  Clone ID: LIB3828-032-Q6-N6-H5
agatggtaaaaaaaccacttctcattaaaaagaattgaaagaattggtccacacacgatgaaacatttctctttctctgatgctttatcgttttatccgacaagagaataaacatatgttgatagaacaaagctcatgtcgaaaaccatttagaagcatttcctgtggacaattgatggacccgattcatcgtactctgccttggagatccacatttgttggaatgtgctaagggaagccaagatcgagccgccaatccagacactatacttcctctcaggtggagcaacaaccttaatcttcatgctgctaggagctaaagccgagatctccttggtcattctatcagcgataccggggaacatagttgtaccaccactgagtacaatgttaccgtacaagtctttcctaatatcgacgtcgcatttcattatcgagttgtaagttgtctcgtggatgcctgcagcttccataccgatcatcgatggttggaaaagcacttcagggcatctaaaacgctcggccccgatggtaataatctgaccgtctggta

SEQ ID NO: 10976 - DNA, 547 bp, Gossypium hirsutum
  Clone ID: LIB3828-032-Q6-N6-H6
gccttgaaaaaaatatgttgttttataaaagatgtaaatgctcaaatttgactgggacaataaaccaacaacagcccattactacccaattgaaacttattacaaattaacccaatacctaagcccaagtagcccaaaatctaaaaaaaaaattcagcaaaagaggaagagaaaaccctaggtgccgcagtctccatgtgcgtccccggcgtgcactccgctcgagggtcggcttccacccgctccttgcaccaaaacaaaaacctgcccccgttgactcctagcagacctgcaaagtaacccaaaaaaagaggcaaacacagcgaaaatgcaacagcagaagcaaggccgaatagtgatataacattaacatgtatttggctataaagacacacaaaacagattgtaaaaaaggaggattcgatattaacaaaaaaaaacgaaaaaatagataaaaaaaggtgatttgcgatttcaatttttcttttagttttggaatctcatttcttttctggatgttttttagtctttcttttcttttgcataa

SEQ ID NO: 10977 - DNA, 532 bp, Gossypium hirsutum
  Clone ID: LIB3828-032-Q6-N6-H7
ggcgaccgttaggccaaggctgaatggtaattattttattactactttggtagtaattctcaaacaaaacatcaattcaatgcatttaaaaatcattcagctgaacaaacgtaagattgaaacacaagagttcaaaaacagtagcagagcccttgggcttcagcagggttgaacaggttatgttcacatgacaaatgaagtcaccaaatttccagcctttccaacaatgtctcagttattaaatgaaacggctccttcccaaaacagttgagaggacaaacaatcgggcattcctttagttcctatattggttcaattatgcagcagcagccaatggtacagctctgtagcatgctcgctttgcagcacggacaatatcttcaacctgtggcacagccatcctctcaagatttgctgcatatggcatgggaacatcagctccagcaattctctcaactggggcatcaagataagcaaaactctcctccacaactgatgcacagatttcagcaccaacaccatgctgtggaaa

SEQ ID NO: 10978 - DNA, 564 bp, Gossypium hirsutum
  Clone ID: LIB3828-032-Q6-N6-H8
gatgtaagtcctcaaacactgataataaatattgtacaagtacaaaattcaaaaatgccaccagatgataatacggtactacgtaaggcataaattttattaaaggcagcaaagatagttaaaaatacacgtggatatgccttgatgttgtgatgaagtctcggactggattcgtagggttttaactggatgcagtattgcaagtgttgataccgtctttgcaatcgttggtcagttcgttgaaagtctcaatctgtttcttccctctcaagagaacttctgtatcgacagagaccctcatgtaaccgtcaaattcaactggtactccgttgttaaggttttttgtttctgaataccactcactgttctcatcccaaagatccttatattcatcaagaaagtgagttgaatatttgtctttaagaggatcaaagaaggatgtatcaggttcatttgttgcaatataaacattcctcccatcttcaatcttattctgcaaggttgagataagggcatcaggtgaggtatcttgggcaagattaggccacaggtccctgttcctca

SEQ ID NO: 10979 - DNA, 563 bp, Gossypium hirsutum
  Clone ID: LIB3828-032-Q6-N6-H9
aaaccaatctgctctttaatccgatatataaaaattagtttgttatttttcaagtaaaatagacaaaatacaatctgactcttaatacaaaaacctccacgatacttttactaacatccaaagattgctagtgattgtggcagaaaaacatttaaaattagacaaattcaatccatctgcaagcttataattgtcaggtaccagatgctgaagccattacataacactttttaccaagccaccatataaattgtatatccagaaatatgcaccaactaagccggaaacttgtttgcggtccatttttgagaaataacttacgaaagcagccattgagaagtgttatttttggtttattgtgtatcttcccatcaaggataagaggatctaagtgtcaagtgtcaacggtgatcttggcatcaagctgagagaattcttggaaaaaggccttgaaatgctcatatgaatgcttcacatcatcaacagcacacatttctcgtatgctatgcattgataattggggagcaccgacatctattgtgcggatccccacaccactagct

SEQ ID NO: 10980 - DNA, 524 bp, Gossypium hirsutum
  unsure (1)..(524): unsure at all n locations; Clone ID: LIB3828-033-Q6-K6-A10
gttgcagtacatgagnanatgggggggcgggcggggggggtgatacaagatctgaactggataagataattagcctcctcccattgtttgttcggttttcggtggagaacatctttgacctgtttccaacagagctttacggcgaggaaggtccgactggaccaaagaaaggataggggggtgggagatgaaagaagttgataccttatcttgctttgtgtacattcatactggcatggtattcatagtccatagaccttccactgtttaaagtcagcatggggaactggtcgagaacaaaggatgtgcccatgctcccggcatagagagaaaccacaaattgatgaatcaaaatacagaatgcagaatgcagagtgcagaggtagtatgcatccgtgtggctatatacaaattcttttaaggtggatagagaataggttgaaatgggggaagttgtataaaaatgtgttgtttggcattgatccgtaaatatatagtgttatggttaaaggttgtttgctttt

SEQ ID NO: 10981 - DNA, 397 bp, Gossypium hirsutum
  unsure (1)..(397): unsure at all n locations; Clone ID: LIB3828-033-Q6-K6-A11
gcgttcgtgnaaaactgtggatcaanaaccggggggggggagtcggcttatagctttacaagtaaccaacaacaacagtaagggttgtcaagtgaacaagggtaataagattcacgagtgttcaatctgtgggtcggaattctcgtcgggtcaagcccttggaggtcacatgagacggcacagggggggggctgccaccaccgcaagcaatcaagttgtggtgagcgttggcaatggcgatggcattaaacccagaaatattctatctttggatcttaatcttcctgcaccagaagatgatctaagggattccaagttccaattcggagcaccccaacaagctattgttttctccacaccagctttggtagattgccattactaacccccccccccc

SEQ ID NO: 10982 - DNA, 583 bp, Gossypium hirsutum
  unsure (1)..(583): unsure at all n locations; Clone ID: LIB3828-033-Q6-K6-A12
cccgttcgacccagcgttcggtttggttngaggtttnaggctggggggggggggggggccagaaaagctagctaccaaaaatgagaaggggatgagagaagagatcagaaaaaagaaggggttgaagctgaaggaagcggcagcgcagaggtataatctctccattgtttnnggatgtcgagaaaaatcaatagagaggggggggagagaaaactcaaatcaacagtaggcatctccatttcttctcttctgcttcttcttccaacaattaggtttcttaaattggggttccaccattgctagctaacgttcaacggggtagttaacgagtcacctcagctttccattacgattgtaacggaaaaatgtctgtaagtgtccgatttgtcatttttataaagtttagtaattgagttgtaactttttaaatgttagtgattttttgttattttaatcaaaattgagtggttgttggtgaaaaaaaaaaaaaaaaaaaaggcggccgcccttnnnttttttttttttttttttttttttttttttttttttttggggtttttttttttttttttttttttttttt

SEQ ID NO: 10983 - DNA, 579 bp, Gossypium hirsutum
  unsure (1)..(579): unsure at all n locations; Clone ID: LIB3828-033-Q6-K6-B10
tcggcanagttataacactaagggcggggggggggcgggcttctaagcctcactttgtcaacatcatcatcagcttccccatcccatgccccttattcttcaccttctgcaaatatacaccataaagttcaggcaccttttttcgagggatatccctaccctgaaaataagggatcggtgggatatgatagttatattgttccttgggcccagcctcagcctcaattccgaagacagtttcaggcagaatctctaactcaaacccagtcaaattctctgtttctgggccaacaacagccccaatcattgttacaacctcaatactcatctgggtatcccctaccgcaatgggccgctacacccggttatttcaccggccgaaatcacctttcctctgcgaataacatgcattcaacccaaaaacccaacgctgcctcaacaaatcccatggaaggaaacggacccttgcagcactctaattcttgggcgacgcctatgctggcacagaaaccttatattccgccctacagattgtttgaggatttgaatgtactcggagatggcgatggaaggcttaag

SEQ ID NO: 10984 - DNA, 591 bp, Gossypium hirsutum
  Clone ID: LIB3828-033-Q6-K6-B11
ccccgcgtccggaaccactgcctggggggggggggaatccgcttcctggctctttccctttccgtcactgctttattcacttgctcctccggccatggtcacacttacgatccttataacgacaaggcacggatgatccaccacggtggtcctatgctcaacgggaccgttaaatgagccatcatgtggtacggaaattgtggcaaggaaataaagaacaccatgagaaacttcattaaatcattgaccgtcccagccaaagccaaacttcaacctcaagttacctgttggtggaaagtagtggaaagttaccaatcaatgataccagacgcaaagcctgggaaaagccccaaaatcaaggtcaaagtggtgaaacaatcaggagagaaaacatataaatatgggaaagttttgactttgcaagggcatatcccggagcttatcgagcatgtcactaagggcgatactgaactcttaccggtcatcgttgctgcaagggatgtctctattcaaggaatttgcaacgggcaatgtgcagatcatttacttactgaggatccccatccgcgaccatacatcatagtcggtaac

SEQ ID NO: 10985 - DNA, 521 bp, Gossypium hirsutum
  Clone ID: LIB3828-033-Q6-K6-C10
tacgagaggaagagaatttagcgaaacttgggatattctctctgtttatgcttggatagatattgatgttggctactgtcaaggaatgagtgacctatgttccccgatgattatgcttcttgaggaggggggggatgcattttggtgcttcgagcgtttaatgcgtagattgagaggaaatttccggtgcaccgatagttcggtcggggttgaaacacagctttgtagtttggcgacggtaactcaagttatcgacccgaaacttcatcagcacttagagacgctaggtggaggtgattatctctttgctttccgaatgctaatggtgttatttcgtcgagagttctcattttgcgattccttgtacttatgggagatgatgtgggctctggaatatgatccggacatgttctaccagtacgaagattcgggttcggatatggagaaaaccgaaggtgctaaactaagacagaaatcgacacgaaggtgcgggaaatacgaagagggaaaatatgaaggtg

SEQ ID NO: 10986 - DNA, 577 bp, Gossypium hirsutum
  unsure (1)..(577): unsure at all n locations; Clone ID: LIB3828-033-Q6-K6-C12
cggcttttngaagttgcaatttatggcgggggggggggtacattacaaatgtctaagccgccacaatttcggtacaagagtggacagtacatgtttgtccagtgcccggctgtctctccatttgaatggcatccattttcaatcacctccgctcctggtgatgactacctcagtgtacgtgtgcgtcagctaggtgactggacccaagcactcaaacgactattctctgaggtttgtgaacctcctgtagcggggaaaagtgggcttctcagggcagatgaggcaactaaaaaaagtttgccaaagctcttaattgatggaccgtatggtgcaccggcacaagactatagtaagtatgatgttctgttgcttgtgggtcttggaatcggtgcaacaccattcatcagcattttaaaagatctgctgaacaacattgtcaaaatggaggagcaggcagattcagtctcagataccagtaaggcatcagacgtaagtgttgcgagcagcaatgaatcaaccactccaaacagagttccatcgaaacgaaagaaaactcttaagaccacgaatgcttact

SEQ ID NO: 10987 - DNA, 558 bp, Gossypium hirsutum
  unsure (1)..(558): unsure at all n locations; Clone ID: LIB3828-033-Q6-K6-D10
gcgttcgggnagtagtgcggggaacagttgcaggatggggggggggttaccggaggcggctacggtgaactgcgcggacaacactggggccaagaacctttacatcatttctgtcaaagaatcaagggcgtctcaacaggctcccatcggcttgcgtcggtgacatggtcatggccaccgggggagaaaggaaagcccgatttgaggaagaaggtgttgcccgccgtcatcgtccgacaacgcaaaccttggcgtagaaaggacggcgtctacatgtacttcgaagataatgctggtgtcattgtcaatcccaagggagaaatgaaaggatctgctatcactggtcccattggaaaagagtgtgctgacctgtggcctagaattgcaagtgctgccaatgctattgtttgaaaggtttccatggttttgtttgctactgttgatgttatctttcaattacttacaacatattttgagagattttgatcagacaatgttacatctagttgtctaaaacttatttctggtttctttttatggaattacaacagttttagc

SEQ ID NO: 10988 - DNA, 588 bp, Gossypium hirsutum
  unsure (1)..(588): unsure at all n locations; Clone ID: LIB3828-033-Q6-K6-D11
cgnatttggnagcaaatcaacctttggtgtatggggggggcccttttctcaaatttccttgttttggcataatatatngagaaaatcgatgctcaaataattgttcaaaagtcagctgcgtgataaatatcagtaagagatcattgtttggtgcatgtattgcttatacacctaacttggggatgccctattttctttggttgagtcctattcatttctgaactaaaatgcaaatgctttcatgttgtttgaatgttggcttcgacatttgttccttgcctcttcccaaccatctgccttgttatttgcatgaatatatgatctttgcattgaagttgacataatttgcatttcaatctatttggacccaagtaaactatatccgggttagggatggatttggttaggaagcttccctcacagattcaggtagggtatgggtttttaccccctggatacctataccataaccggattatttttaattggaaaaatataattttgtttggtgtttgagaaaattatctcattttgaagttcaaacataagaaagcaacaaattggatgctcataaagcgctaagtctca

SEQ ID NO: 10989 - DNA, 578 bp, Gossypium hirsutum
  unsure (1)..(578): unsure at all n locations; Clone ID: LIB3828-033-Q6-K6-D12
nanatattacaactgnaacaggcaaggacattgaagatgctcatggagatgtctttcggggacttgaggtggtggaacatagttgtggaatggcaaccctgcaaatgggagagtatgtccccaatgtagctagtggaatcgatacatatagtgttagagaaccactaggtgtttgtgctgggatttgtcccttcaactttccagcaatgattcccttatggatgttccctgttgcagttacatgtggtaatacttttgttttaaagccatcggaaaaggatcctggggcatccataatgctggctgagttagcaattgaagctggtctgcccccgggtgtcttaaatatagttcatggcaccaatgacattgttaatgctatttgtgatgatgatgatatcagagctatatcatttgttggttctaatactgctggcatgcacatatatggaagagcttctgctaaaggaaaacgtgtgcagtccaatatgggggccaaaaatcatggcattgtcatgcctgatgcaaacaaggatgctacactaaatgctctacttgctgctggttttggtgctgcg

SEQ ID NO: 10990 - DNA, 583 bp, Gossypium hirsutum
  unsure (1)..(583): unsure at all n locations; Clone ID: LIB3828-033-Q6-K6-E10
gcgttcggtcggcgtgatttaccaatgtaggagggggggcggggggtttacgggttgctagtcttggccatggnaatccatgcctatgtaaatggtgaatacgccggttctgcacatgggagcaaagttgagaagagctttgttttgcagagagctgtaagcttgaaggaaggggaaaaccatgtgggtctcttgggctacttagtgggactccctgatagcggagcctacatgngagaaaaggttcgctgggcctcgttctatcaccatccttggtttgaacactggaacactggacatatcacaaaatggttggggccaccaggttggaattgatggagaaaagaagaaattgtttactgaggaaggctcaaagtctgttcagtggacaaagcctgaccaaggaggaccattaacatggtacaagggatattttgatgcaccagaaggggacaacccagttgccattgttatgactggtatggggaagggtatggtttgggtcaatggtagaagcattggccgatattggaacaattaccttagtcctcttaagaagccaacacaatccgagtaccacatc

SEQ ID NO: 10991 - DNA, 581 bp, Gossypium hirsutum
  Clone ID: LIB3828-033-Q6-K6-E11
gcgtttcgggcaaattttctataatcgccttgtgtggtggacggtgtgtgtaaactcctcactcaactactcctatggggctgctgaagaaaattgcattatatggttgtaggacatgtttattgcgacacttgccgtgttgaattcgagactaaacttagcgaacccattagtggagcagtgggggggattggaatgtaggaaccgtaccaacgaagcgattacattccagagcccagaaatagtggctgacagtcacggagactaccacatcatagtggaaggcgattatgaggaatcagactgcgacattgctttggtgaggagtccaagggctgattgcagtgatcccaccgaagcgtggagaaaatccagggtggttctcaccacatttgatggtctcagcaataaactgcgttttgccaacaatcttgggtttaagaaggacatagctcttcctcagtgcactcgaattcttaaagagatgggctattatgagcttagtcaagaagatggagactttgagcttagtcaagaagatggagactttacccattcgtcagaactataatatgtatttt

SEQ ID NO: 10992 - DNA, 476 bp, Gossypium hirsutum
  Clone ID: LIB3828-033-Q6-K6-E12
tcggccatgcttctgctacaaacggggggggagcgggggggtgaaaaaggacttagagactacgatttccccattttgacccatggctaccattcctgatgctgatctggagttgttggtgttgaaagctgcgtcaaactgtatggactcccctagtacctcttctctgtgttcgaatgtggcaggcgtggtgataacccataaggtgcaacaaaaaatacggatctgctcctttgttcctctactgaatacccaagacattgtctgaacacatgaaagctgtcttcttcttcagaacaaccacgtggacaccttgcagtagtggtcactctcttttgtctgaagttaacaagtgaagggatgtagttccaagatattcgccatacgagaattaggatttttgttggtaactgtaaactccataatttcctgtagaaatctttggtatcagtctgtaataaataattactaggatc

SEQ ID NO: 10993 - DNA, 590 bp, Gossypium hirsutum
  unsure (1)..(590): unsure at all n locations; Clone ID: LIB3828-033-Q6-K6-F10
gcgttcggcaccatgnaagccctctctgngggtgtgggtgggggcgatgttgaaattcaatgtcaagaacgttgctgttaaggatctcaagcgtggtttcgttgcttcaaactctaaggatgatcctgcaaagaggctgccagcttcacctctcaggtcatcatcatgaaccaccctgggcggaggggaagacggatatgccccagtccttgactgccatacctcccacagtgctgtgaaattttccgaattgctgaccaagatcgacaggcgatctggaaaggagcttgagaaggagcccaagttcttgaagaatggtgatgcagggatgataaagatggttcccaccaagcctatggttgtggagactttctctgagtacccaccacttggacggtttgctgtcagggacatgcgtcagactgtggctgttggtgtcatcaagagcgttgagaagaaggacccaacgggtgctaaggtcaccaaatctgctgccaagaagaaatgagattgcatttgatagtatcagagccttttgattttggttatctttgtagtttggtacttgcagttttttagaccaattttga

SEQ ID NO: 10994 - DNA, 608 bp, Gossypium hirsutum
  unsure (1)..(608): unsure at all n locations; Clone ID: LIB3828-033-Q6-K6-F11
cccggtcgacccagcgttcgcgnattcgacgctccaaaaactgggggggggagacgaccgggtcccatatctctcctcccaaatcctcacccgatcctccgccaccttaacctcctccccctcctcttccaaaaagttgctgatcggctcgtcaagctcttcgccatcgaccctgaaggccagaagcgtgaggggggggggggagctggccagaccttacttcgtgccttgactaacagcggcctgatcgaccccgactctcaccgcctcgaggagatcgacgcttgctccgccgaatgcgaggtcaacattgcacaggagtggctcgagaagcttccgccacgtacctatgatgaggagtatgtgttggtgaggaattcgaggggtcgcatcttgaacaagcattccaggcttggatgtcaggtcgtgcttacgcctcatctccaaggtatggtcgtcgccgtccccgaggctaagccgtgggatattccataaatatttgtaggggaaaaagagatgaatgtgggaacatttagtgcatttctgttgttttcctggaagtaataataattttgttactttgaatgaaaaaaaaaaaaaagggcggc

SEQ ID NO: 10995 - DNA, 572 bp, Gossypium hirsutum
  Clone ID: LIB3828-033-Q6-K6-F12
cactaaaatctcacggggggcggggggggtattcttaagggatctatgagtgagtgtgcgaggttgctgtgtcatggacgtcgaagcaagttctagtttctcttcaatttctccaccggtgtttgatggagacaactaccaggtttgggcagttcatatggagggggggggggaagctttggatatttgggaagtagtggaagacgattatgaaattcctactctcccacaaatcctaccatggcacagatcaaattgcaaaagaagaagacaaagaaatccaaggcaaaggcctacttgttcactgcaatctcatctactatcttcactcggattatgactctgaagtcagcatatgagatatagaattatctcaagtcagagtatgagggagataaaagaatcaaaggaatgcgtgtgctaaacttaattcgagaattcgagttgcagaagatgaaagaaacagaatcaatcaaagagtattctgataggttattggacattgcaaatcgaatcagattacttggttcttagttcaaggactcaagaattgttgaaaaaattcttgtaac

SEQ ID NO: 10996 - DNA, 435 bp, Gossypium hirsutum
  Clone ID: LIB3828-033-Q6-K6-G10
caaaaatcccactaatgccaggacagtcgggatgtgagagtggagagtgttgccgtcagggttgtggtgggacttgtgctgagtgtggtcagcccaggtgcgcatcaggatgttgccaggctgaaactgtggggggggggggatagaagaggttatggacagtgaacccagtccaccaaagtagagagatgataccatattaagatgaaataacgaggaagagttggttgtcgtcttattaattatacaaaataagaagtaatgatgttgcagaagggtttgctataaaatcctcttggacaaaaagagtaattatgaagaataaatagctcaaaacaatattcgatttgcaatatcctaaagttccttgaatcttgttttgtagccatatgtaattaatgcatgtgcatgctaatatatatgattttctttgtt

SEQ ID NO: 10997 - DNA, 579 bp, Gossypium hirsutum
  Clone ID: LIB3828-033-Q6-K6-G12
ttcgatagcctccccccttttgctggggggggaggggggggtgctcccttcgtcatttatgcgccaccatgaacggcgatctgcgcattcgaactccaaggagtgatttttcagccttgagaccccatttggacttcgatttcaacgaagcgaaggggaaacgatggctaacttacggggggcggggcgtgtgctggcactaggcgtgagggtggcgtacggggctgtcgacgtagaggcacgagcggcgttggggttgagacgttggcatcgtatggaggcattgtccggttgcggcgcaagcattaggctagagttttttgcttgctttaaattttgggccacttaggcctattgtatttgggctcgggcttatttgtaaatgggttgatttgggcttgtatagggtattagtttgggtcaaaaccggtaaatggactgttataggatttaagttttatttgggttttatatttattgttttgtgtttgcaatgggccgggcaaattggtctgcttacaaaagtctttaccatttatcgactacacacgatactatatgagattctatttggtacct

SEQ ID NO: 10998 - DNA, 581 bp, Gossypium hirsutum
  unsure (1)..(581): unsure at all n locations; Clone ID: LIB3828-033-Q6-K6-H10
taactggnaaaggtacaaattgctgcggggacagggggggaaccttgatgggaacagaaacacctacccctaacaaaaagagtacgcctacggcagaattctggtgcaataggttctggtgaaacagtagaagaagcagccatcacaacagcctataaagttgctgaagctgaaagtaggtggtttttagccgctgaggccgtgaaggaggcagaaagagtctccaaaatggctgaagataccgattcaatgcttcagctagtgaaagaaatctatgaacaatgttcacgaggggaaactgttattttggtttgagtctttagctgcctaggatgtaagtgatagttgtctttttctttataaattttggaatctgtgtatgtatgtgaattgtggatccattgatcttgttcaatgaatcaatgcatgggcattgaaatgcatttatgaccattcaaagatccatgatgaatcatgtagttagtatattacaaggtattattgtacaattagcccgttataattagagtggaaaccagttttgacttttggaagcaacatgtagacaagggggaatgtac

SEQ ID NO: 10999 - DNA, 506 bp, Gossypium hirsutum
  unsure (1)..(506): unsure at all n locations; Clone ID: LIB3828-033-Q6-K6-H11
tcggnaaaatttaccggtttacaaaaggggggaggatcgtttggaataaaatacatctagaatatcatccctttgagttgcaatgtcttgcatttgttttgtacagtcttcattcttgtgtaaacaaacttttgtcatttggtgagtaaaaaaaacaaaaaaaaggggttttgggtatttggggggtttaggacacttaattttgttttaatttaattttggtccagctacattagttaaaaagagattcaaaatgggtgtttaattttatttttgattgaataaagtgttttaaatttttattaaaaaaaaaaaaaaaaaaaaaaaaaaaaaaaaaaaaaaaaaagggggaaaaaaaaaaaaaaaaaattttttttaaaaaaaaaaaaaaaaaaaaaaaaaaaaaaatataatataaaaaaaaaataaattaaattgagtgtgatttttaaattaaggtggggttaaaaaaaaaaaaggggtgggttttgttaaaattggttttg

SEQ ID NO: 11000 - DNA, 565 bp, Gossypium hirsutum
  Clone ID: LIB3828-033-Q6-K6-H12
ccctcctctctttagaaccactctttgtatatcacccagaaggacaaaagaaaaaaatggaacaggcagccaaatctattgtttttcttgcatttgttctacttttcttcccttcatctggggtagctgatccattgacttataacgttcttaactatggagccaaacccgatgacaattttgactcaacccaagccttggttgctgcatggactttggcctgtggctccatcaatcccgcaactatttacgtcccgcctgggaggtttttggtgcgcaatgttgtttttcgtggacagtgcaagaacaatggtattgtttttcgtatcgatggcacgcttgttgctccatcggattataaggttattggaagtaccggaaactggcttctctttgagcatgtaaacggtgtttcgatttacggtgggataattgatggtcagggcactggcttatggacttgcaagaggtcaggcaaaggctgtcccagcggggcaacgtccttaggcttcagcaattcgcggaacattgtaataagaggattaacatcgctaaacagccaaat

SEQ ID NO: 11001 - DNA, 534 bp, Gossypium hirsutum
  Clone ID: LIB3828-033-Q6-N6-A1
aaaaaaaaaaaatggttctttataattatttgacgtcttcttgcttcacacagaacatgggaagctgctgcagtaattatagtataattaaaaatctctaaacatttagccgccggttaatagcagacaagattttacacggttacgatattccagccagtctccttaacgaattgaccatatggggcagtcaaccgtcagcctggttaccattccaagtgatcggatgagccaaaatttgactccgacccacaacaaataaattctcctccccctattgcaagcgaagcaaacttgcttgaatttgaagcttttgtagaggtaattgaatttccaactccatcaccctggtgatcagccaagatgctcccgataatcttgttgattttcatggcttccctcgttgccagcagcctctgtgtttaccaaaaagtgtcgaaacggtggtttgtaggtagcggaagcggccatgaagttgaatgcgtggtttgcctcggcaaggtctgcaaaggggaaaagctccggtcgttacca

SEQ ID NO: 11002 - DNA, 461 bp, Gossypium hirsutum
  Clone ID: LIB3828-033-Q6-N6-A10
gagaaaaaaacctttaaccaaaaaactttttattagggggggaaggccaaaaaacaaatttttataaaacttcccccatttaaacctattttttatccacctaaaaaaaatttggttttagccccaggggggggaaccaccggggaactttgaatttgggaatggggatttagaaaaaaaaaaaggggggttttttttagggcggggggaggggcacatcttttgttttcaacaaagtccccatggggatttaaaaaaggggaagggttatggactttaaataccctgccgggatgaagggccccaaaggaagaaaagggttaaacttttttaatctccaacccaattatccttttcctttggaaaaaggggacctttctcgccaaaaagatctggggaaaacagggaaaaaatgttctcccccgaaaaccgtaaaaaaaaggggggggggctaattattt

SEQ ID NO: 11003 - DNA, 390 bp, Gossypium hirsutum
  Clone ID: LIB3828-033-Q6-N6-A11
ggggggggggggttagtaatggcaatctaccaaagctggtgtggagaaaacatagcttgttggggtgctccgaattggaacttggaatcccttagatcatcttctggtgcaggaagattaagatccaaagatagaatatttctgggtttaatgccatcgccattgccaacgctcaccacaacttgattgcttgcggtggtggcagctgctgccctgtgccgtctcatgtgacctccaagggcttgacccgacgagaattccgacccacagattgaacactcgtgaatcttattacccttgttcacttgacaacccttactgttgttgttggttacttgtaaagcaagaaggggagtttcagactggggttcttgatccacatgtttatca

SEQ ID NO: 11004 - DNA, 458 bp, Gossypium hirsutum
  Clone ID: LIB3828-033-Q6-N6-A12
agtctttttactgatattgttttattctttgtatatggtgaatttcattacttgttttggaagggataacttttgaatcaaaaaaaaaaaaaaaaaaaaaaaaaaaaaaaaaaaaaaaaaaaaaaaaaaaaaaaaaaaaaaaaaaaaaaaaaaaaaaaaaaaaaaaaaaaaaaaaaaaaaaaaaaaaaaaaaaaaaaaaaaaaaaaaaaaaaaaaaaaaaaaaaaaaaaaaaaaaaaaaaaaaaaaaaaaaaaaaaaaaaaaaaaaaaaaaaaaaaaaaaaaaaaaaaaaaaaaaaaaaaaaaaaaaaaaaaaaaaaaaaaaaaaaaagagggggggcgcccccccccttttttttattttttttcttccccccccaccccccccttttttttgttaaaaaaaccaaaaaataccacctcctataaagaaaaaccccccccggttgaccactttttat

SEQ ID NO: 11005 - DNA, 373 bp, Gossypium hirsutum
  Clone ID: LIB3828-033-Q6-N6-A2
ggaaggtatttatgtatatcccacaggcttcataggataccatccatgtttatctcttcttctcaaaccttaagaactgtaaattacaactgaataattactaaaaatacaggtatagagtatccctataaggctcttatattgactaattgcctgttctgtttccactctcaataactggctcaagaatggagcataaaccaacttatttaagtgacaaacaagcacttttgagtacaaataaagggcagtatttaggttttacaaacacttgttcaggacaacgccagcatacaacatcgaataatttcagttgacatgtaatgtaagggcgggtgtgcaggggtcgaggcatatgcaaatatttacaggc

SEQ ID NO: 11006 - DNA, 492 bp, Gossypium hirsutum
  Clone ID: LIB3828-033-Q6-N6-A3
aaaaaattctaattattttatgaaaataggagggggggaaaagtccatattaaatatcccctaaaatagaaaaccctaatgcctataacaaaataacccaaaaaaaaccccatgttcttaattttttcccccaacttgaaaacccaccgagaaaagcctaaaacctataataatatcaacattaaatttaaaggctttcctatcacccgaatgcccattgattctccctcctaaccccctttttttcctcgggggggaaaaccttcttgatgttaaagggcttgcaaatctccccgggggtctttccctttatcaaatcacccacagtttggcaggtcaagcccaacaagctcttgatattcaaatagttccctcccaagatgaggtcaaaaagggtattttggtcaaccttgacaaaaacaacatcccaagccttgagttccccatcgggagtcttttccttgtcggcagcagcatcaacatgctttttgc

SEQ ID NO: 11007 - DNA, 357 bp, Gossypium hirsutum
  Clone ID: LIB3828-033-Q6-N6-A4
ggaaaaaaaaaaaaaattccccaactaaaagggggggtaaaaaacgggaacccaaaaaaaattgggggggttttttaaaggggcctttaacaacggaaaaccattttttaaaaaaaaaaaagggttttttcctttaaagggaaaaaaaaagcttaaaacccaaaaaaaaaaacgggctaaaaaggggaaaaattggttaaaaaacaaaataaaaaaggggtaaaaccccaccaaaaaaaattttttaaaccaaaaaccgaaaaaaaaggggcgggaaaaaaagcccaaaaagttaattcgagggccggggggcagcccccccttgaagaggggaaaaattaaatcctcccccccaag

SEQ ID NO: 11008 - DNA, 383 bp, Gossypium hirsutum
  Clone ID: LIB3828-033-Q6-N6-A5
aaaaatataaaaaaaaaaaaaaaaaagcacaacgggctttttggggaaaaaggagggtaaaaacccaggggaattttttaaaaaaagaaaaaaaaaaaaaaaaatttccaaaccccgaaagggggaaaatttaaaagggggggccccccccaaaaaagggcccaaaaaaatttggaaaaaaaaaaggggggaaaatgtttcccattgggggggggaaaaaaaaattaaaaacgggggggaaaaaaaaagcgcccccccgggggttaaaaaaacaaaaagggggggtaaaaaaaaaaaaaagaggggggtaaaggggggaaaaaaaagggggggaaatcggggaaaaaacccgggggaaaaaaaaaaaaaacaaccggggtttt

SEQ ID NO: 11009 - DNA, 450 bp, Gossypium hirsutum
  Clone ID: LIB3828-033-Q6-N6-A6
gaaaaaaaaaaaaggggccaaaaagggtttttttaaaaaaaaataaaaaaaaaacaaggtttttaaacccttttttcccccaaatttaaaaaggggggacagatttaaaagctaaaaaaaaaaaacggggaaaggggggggggcttgggaggccttggaaaaggcccaaaggaaaaaaaccccgggggaggggggaccaaacctggggggagggggggggggaaaaaaaactagaaaaaagggggggccaaaaggaaagcctgccccatggtcccaacccaagggtcaaaaacccgaaaggggaaaaaggaaaaaaaaatggcaaacaaaaagggggaaaaacccttttggggggtttggggaaccgggggtccacccggaaaattcggacggggaccggggggggaaaaaattttccctaaagggaggggaaaaaaaagggggggaaaa

SEQ ID NO: 11010 - DNA, 524 bp, Gossypium hirsutum
  Clone ID: LIB3828-033-Q6-N6-A8
gaaaaaaaattacctattgggaacttgagtataatttaggaaagaactgacaaaaattgtgcaaacaaatgtgaaagtaactttttttatttttaaaagtaaattactacaagacatattttacaaaaactatggatgttgcttttattattattttcattgtttttattatttttagctgctttagccgcctctttaaagaaaatttgggtctatgttgctttctaaacatcatcggggtccactatgccgttttacgcatcctccctccgacagatttagtagcaacttctacttacgattctggagaaactgcaatctcatcagctaagccagaatgtggcccatcgacagattcagtagcaacttctacttctgattctggagaagctgcaatctcatcaacgaagtcagaagttggcccatccacactctgggaatcatctccagcagagcttttaaagttttcaacaagtttagctgcccctgaacttaaaactgcatcttcagcttccggggatgct

SEQ ID NO: 11011 - DNA, 565 bp, Gossypium hirsutum
  Clone ID: LIB3828-033-Q6-N6-A9
ggtggggcaaaatcttttttttataacgtttgaaacagaggatgatttataatctgtgatggaaggccaaccatggttgtttaggaagaatttaattattttttgaccggatttttaagccgacaacgagtagacaaattacgcttgtttcatctctgttttggattaaaagtggaccctgtttaccagagtttgataaaaaggatcttctgcatgctgtaggggtcacgttcggtggagtgatcagatcttcggttttggatgtggaaaactggggcatggtctccaagactgtttacaccttcactgaagcagatgctgaaagaattctcaggatcccgctggcacgatcaccgcatgaagattttcttatttggggaggggagaactcgggtgaattcacggtacgaagtgcctatcaactattacagagatcgactgataatcctagagcttatgctgtataaaacctctacagaaaattttacaaaacactttggagcctgaatataccaacaaaaataaagatcacaatatggcggctatcatggaactatctgcctac

SEQ ID NO: 11012 - DNA, 123 bp, Gossypium hirsutum
  Clone ID: LIB3828-033-Q6-N6-B10
aatggagttggccataatccatcttaatataagtagaatagttttaaatgaataaatcccgtcaaattgatggttatggtttgtaaaggaatcacctcaattgatggatcacagtaactacgc

SEQ ID NO: 11013 - DNA, 472 bp, Gossypium hirsutum
  Clone ID: LIB3828-033-Q6-N6-B11
gtctcaaattttgcaaaccacctacattaaacagtccagcaagatttagttttggggttccagatggctggaagcaagaattttttgttcttatttccataggcattgaaatttccgccggttttggggtcggtgagaacttcgccggggttgccaggggcagcaccacgaccgaaaatgcctttgcaaacggtggctgggccgagttctttagccttgtttgaatggtagagagcatcgttcattgggttggtgattgcatcaaccaatgcacccgcgaaggcaacaaccatagcatctgctgccatgttgccgcttggtggtttaaggactggtccctttggacccatgtcagccgggaagaaaggccatccgcattctccagggcactccgtttctgggttaccgactatgatgtatggtcgcggatggggatcctcagtaagtaaatgatctgcacattgcccgttgc

SEQ ID NO: 11014 - DNA, 555 bp, Gossypium hirsutum
  unsure (1)..(555): unsure at all n locations; Clone ID: LIB3828-033-Q6-N6-B2
aagccaaaatttaagttacttctttatattataagtatcaccgaaaaaccaacccctcgggagnaaagcaaaccaagggtttgaaaagcaaatggcaacaaatgcctgctttgcgaaacccaccaaacagaggtcacgaaaactcgatagcttcaaacaataacaaagcctttcctcgttaccactgctccataaaaatactaaatagcagctactaagcttaatccaccacgcgagaataacccatctgggatggtggacaccatctgctttaaagttatatgctaattactgctttgtttcaatcagataaaccagctttactcttgagatgctgcttgaagtccatgatgtccccttcccatcgtgttgcagcttgattttcacacacccatatctcctcggctacctggtttatcagccggaaatcgtgactcaccagtaccaatccaccatcccactcgttcaatgcttccgccagtgaatcgatcgtctcgatatccaaatggttagtgggctcatctagcagcagcaagtggggttggtcgaaatgct

SEQ ID NO: 11015 - DNA, 462 bp, Gossypium hirsutum
  Clone ID: LIB3828-033-Q6-N6-B3
aacaaaaacccaaacccccatcactgggatctatttataaagccctaaaataaagggcccggcctagggaatctaaataccccaacccagggttttttaagggcccaatgggaaaaccgggcaaaacccgggggaaaccggggggggaacaaaaggccgggtttagggaacccagggcccgccaaaaatttttccccggcggcaacaagggcccgggggcccaaacccttcaatccttcaggggggatttcagcaaccggtactagagaggacagccccccctggggatcttcaacaacatttctctggggggggaggcgaaccctaatccttctggggacacttgggaccccccgggtccaaaggggcttggtcagctggacataaactctcacatcctttggccccaggggtttttcggcaaacctccggatccccttgatagcccggggggccttcttc

SEQ ID NO: 11016 - DNA, 526 bp, Gossypium hirsutum
  unsure (1)..(526): unsure at all n locations; Clone ID: LIB3828-033-Q6-N6-B4
gtgaaaaaagcatcaaggcatcttatttatcaccgaaactacctagataaggttactttggatgggcggtgtgacgcatccgacaccttctaaagcaaaaaaaaaaaaaactaaaaagtttaattatttctagaaagaaaaaaggaaagaacatcatttggcttctttgatgagattttcagcttgagccttgtcaggaagggatgggatggctcctttttgagttgtagaaattgctccacatgcatttgcaaacaccagtgcctccttcagcttattttcatcgttgaagagatttggatctttggctacagcttgtagaaatgcaccgacaaaagcgtcgccggctccggtggtgtcgacggttttcactttgtagccgttcacctttcctttgaatttattactgaagtatctgcaaccttctggtccatcagtgacaataangcaacttgaagttgtcattccataaagacataacaacatcatcctttttagggtctcctttggtcagaaattccacctc

SEQ ID NO: 11017 - DNA, 559 bp, Gossypium hirsutum
  Clone ID: LIB3828-033-Q6-N6-B5
gatgatatgcttctaatccatttaataaacaaagcatgtttacatgatgttaaattttttgtgctttgaatcaataatcttcaccataaccccagaatttctggtataacaagcagttaattaccatactttcttattcaatcgctttattaattaagattacagagggaaaaagacttctctttttaatgagtagaaggggaaaaattaagcaagtccttggattgaacccaaggtttaaccaaaaccactgactcaaaggtcttggttaccccaccttgcatggctttaatcttgagataatacttgatcccagcaaccacctgtttctcagctcccaccacttgagagaaaaccaacgccgtcgacggcccaccattggccaaactgaaacgcaaccgcccttggctccgcctgttatactcctccaccgagaacctcccaagctcttgcacctctttgttgttcttcacatcgtttatcctcatcctccctcccaacccatcaaccactgttatcaccaacaacaaagacagaacaattacaacctcagctttcg

SEQ ID NO: 11018 - DNA, 531 bp, Gossypium hirsutum
  Clone ID: LIB3828-033-Q6-N6-B6
aaaggccatgttctttagtgacgtttgtgggaaaagcccgttaatggtcatgttctatcagacacaaattatatcagacacttaactaaaaacaactgagcaacattgctctacctactgatgtaacatggctttgaaggctgccctaaaaccatccattctttcatgcaatgtgtggtagttgaccctcaccccaaaataggctccaatatatattctcattgaaaattgcatttcgaatagtggtagactcttcaaccgcattttgctcaaccaactgaggtacctttgttttgcaatgtacaaatctctgtgaatcaatgaagaaaccagtagtcaacttagggcaatctcttactttcaactgcatcatttttgggaatacaaaatgatatcctttgggacaaaactgaatgaggccaggtagttcttcaagtaataacccttttaagttatcaaatttcatcttctcttcagctaccacttccactttttcttctaattcgaatacttgttccaatttagaattcc

SEQ ID NO: 11019 - DNA, 523 bp, Gossypium hirsutum
  Clone ID: LIB3828-033-Q6-N6-B7
atggaaaacaaaatttataatcatctttctttaacactacttacaacttttgtgaggggataatgtacaagttgcccttagccaagtcaacggctagtagccttaactcccatcttttttagggtgcttgtctctcagaagcttctgagtttgagataaaatctgtcgtctttcatatttacaattcaagtttgatgtatcagtctgtcctctcaacaacaacctatccattaccttcgctgtgcagatgctgttaccatctcatctccaagaacaggaagctttttaggttttgaggtctgaatgaattaaacattgctggtccgaatggaactgcgtaataattcttctgattcattcttttgcgaagcattcatcttcaacttctcactttccgacaacttcttcatttcgttctcaagctgcttacagttctcttcatgagctttgttaaacaacctcacgaagttaagtagagttgaagtaacttgttcaaagggacaacgagctggatcctctccaa

SEQ ID NO: 11020 - DNA, 236 bp, Gossypium hirsutum
  unsure (1)..(236): unsure at all n locations; Clone ID: LIB3828-033-Q6-N6-B8
atacataataatggaaaaaataaaaaaaaaaaaaaaaaaaaaaagggaaaagggaggggaggacagaaaggaaaggattggtgtggggggggggggggggnannaaggaaaatggaaagaaggaaaaagaaaaagaaatatataaatntgaaggtnaggggggggggagaaggtaaagtttttttgaggaatggaagnnnggnggntttaaatttaaggtgggagatggggaaaaa

SEQ ID NO: 11021 - DNA, 550 bp, Gossypium hirsutum
  Clone ID: LIB3828-033-Q6-N6-B9
acagaaaaaaaaaataatgttctgaaaatatttcaagggaaaataataataactatcatacaacataaaattccccagatgatatctatgaatagagctcttcatacactgaaactatattaccggtgacaattattataaaactaaaagagagggtgaaaacttttagagtaagatgagaggtaaacgaaagcaaatatatcacacatccaaacgacggtccaattttaccaaggtcaacaggatcgcagtaaaacagggcccacagaggagctaagcatatcgctaagagctacctggacctcatttgaaccatgctcacaacttatcaagctcgcaagaagtgggaagaattgaaccaagttcttctcgaacaaggtgtctcccaaactacaaatggcctggagagtcgccacaatcagtggtgcacgggaagccaattctctccgtttcccagaaactgaaggaatcaaccactggctttgctcctccggagatgtttcagaagtctgcccagaccgtgcagtttctatataaaacaggaatacct

SEQ ID NO: 11022 - DNA, 545 bp, Gossypium hirsutum
  Clone ID: LIB3828-033-Q6-N6-C1
agtaataataaagtgatccaaaagcttttatttcattaaatattatacagaactcagcttttctcaccctctctctccccatattctataattggatacagatttataagcttaattaaattaactgctgaaaggtggaggccttggcatgccttgcacgatgccgcaagtcaatacaccttccggtaagttgtactcatccttgagggatcggttaggggaaataacactagcataaagctgttgcccaaggtaatgcctgtcccatgtctccgacctcaggttccacatcccgcagttgtcgaatgtcaataggattgctgaccaggagttggggaatacctgtatggtgtgtctgctcacggcgtcaagaagattgtagttcatcctcttctcggggctccatttcccaacgtccatgcccacagcaaagaatgagtagccagacaagtggtaggactgaatggcggtctcgtgattctcgaagatgatttccacaaagtttctatgtgtcatgttgaggacaataggtgccaaagttacct

SEQ ID NO: 11023 - DNA, 326 bp, Gossypium hirsutum
  Clone ID: LIB3828-033-Q6-N6-C10
gggggaaaaaaaaaaagggggggggggaaattttggaaaaaaaaaaaaaaaaaaaaaaaggaaaaaaaaaagggggggggaaaaaaaaaaaaaattttttaaaaaaaaaaaaaaaaaaaaaatgggggaagaaaaaaaaaaaaaaagggggaaattttttttaaaaaaagggggggtaaaaaaaaaaaaaaaaaaaaaaggggggggaaaaaaaggggtaaaaattttttaaaaaaggggaaaggggggggggaaaaaaaaaaaaaaagaaaaagggtttttaaaaaaaaaaattttggggggtggtgtaaaaaggggggggggaa

SEQ ID NO: 11024 - DNA, 505 bp, Gossypium hirsutum
  Clone ID: LIB3828-033-Q6-N6-C11
gattactaacaatgaaatgtatatgtaaaggggtaagcacttcgcgtgtccaaatgttccctaggacgtcaatttttgaaaagcacagacacagatttcagtaatcaaagtaacaccaacaagtcctacaaatgaccaaacatacagatatataatatatttatatatttatatatggaaatacaaagcaaacaaaacaatggacatcaaatggaaagctacatttacatttttcaaaagtacaccaacagtggaaaaaaatttcctagtcctaaaaaattatatttttgctcctctttttttaaagggttcacaactacagagacagatgggaacagtagtagtcagccgctgcaaactatagtcgttgcttgacccgcctaccattggcatcacttccgtcaaggatggcttcgttcccatgcctgcatacaatcactgagtgctcgttgactctagccacatgctccaacagctcggtcaagacagacgggcaactttcctt

SEQ ID NO: 11025 - DNA, 540 bp, Gossypium hirsutum
  Clone ID: LIB3828-033-Q6-N6-C12
aatataaaatcctctctttgactatattatttaagataaagatgaacatcataaaactagcagcaagttaattaacttacaaaacagttcgttgtgaacataatttacacacaatctctgattattattgaaagcaaaggtaatgaataataataaagaacagcagcttcaaatcttcaatccgcattcagcagcatcgagatgctagaaggtttctttacatgaaaatttggaaatatagggaaaaaagagaggcaaaaaacccatcaagtttatgcttttcaaagttggtcttctttctagtccacctacccatgaatgggctaggcctgccctacctctcaactctcatttctcttgctcgccggaccattgaatttaatttcccaaaaaccatgatggcctcttcggtcacttttgtgggtattcaacggtagggatagagacctaaatgccttttttcctttcatatctcctttttctattctaaggctgtacggtggctcctgtcttctgggcctactattgcaaaattcttat

SEQ ID NO: 11026 - DNA, 513 bp, Gossypium hirsutum
  Clone ID: LIB3828-033-Q6-N6-C2
ggaaggagcccatttttacccgggccctaaatagaaacccaaaatccaaaataagacagtctattacagtagtagcccaaagccaaaattaaatacacccaacgggcccaaagtaaaaaaacctggcccaaatgactttaacaatttcgacagaatggagcaaaccctaagccccagcgccgcatgccaggctccaacaatgcgcgccgttccaccttcttgcacgccgccaccggccaagggttgccaaccaccggtcgtccacgcgtttgacgcctgaaaccgccgcgtggctccgtcgacggagatcctttcgtcgtcgtcggggttgggctaaagggggttagacttctcctttttctctttaggctccccctcactggtgtcattcaccacacttaaaagcgggattaaaagcccgtctttcgtctttgcccgtcaactattacggcggcacgatcggaaaagtgggaaggagggacggcggcggggttccaatgctaagcctggaac

SEQ ID NO: 11027 - DNA, 561 bp, Gossypium hirsutum
  Clone ID: LIB3828-033-Q6-N6-C3
aaccacactaattttatattaattttttataaatatatttgttagataaaattttcatccaagtgtactataatctaagattatataaaattaagaaaaaaaccctagaagccaagagtgctatccctggtatcctagcgagaacagtggctgctgcggcttgggatgaaagaaagtggtggcaacgacgggtttgggggagacgagatctccctattagcagaggaactcattcaactgtcggtcaaaagctcgatgttggaaccaaaaggtaaaacatctctgatttgttcgacgttctgcttcgagtgtggtagagcgggacatggtctccatgaatgtacagaaataattccttcgcagaagttgatgcagcacgaatactccaaattcctctggcacggacacctcatgaagattttcttatttggggaggcgagccgtcgggtgatttcacagtccgaagtgcttataaactattatagagaatggatgaaaatcctagagcttatgctttacaaaccatctatacaaaattttacaaacaactctggagtctaa

SEQ ID NO: 11028 - DNA, 58 bp, Gossypium hirsutum
  Clone ID: LIB3828-033-Q6-N6-C4
aattaaagtgatccgattattttttcttaaatgcagctcaaattttaaaaaataaaat

SEQ ID NO: 11029 - DNA, 552 bp, Gossypium hirsutum
  unsure (1)..(552): unsure at all n locations; Clone ID: LIB3828-033-Q6-N6-C5
atgcttcatattgctactagactgtatgagcttgccatgaaatacagaagacaaatttgggaacaacttgaatccagaattacaatagaaccaaggaaagcttaattgagaacttaaaaggtttttctacatataaagtccttctggaaccccttctttcttcttaaacatcaccttttccttggccttcttaaagtctgcatgtgtcaccttcatgcgtcgctctcttaaagcaagcaaaccagcctcagtacatattgcctttatatcagctccagagaactcatcttttgtcatcacaaattcttccaagttcacatcatcagccaatgtcatccttgatgtgtgtatctgaaaaatgcgcctccttgttttgatgtcaggaagggggaactcaattttcctatcaatacggccaggacgaagcaaagctggatcaagactttcaattcggtttgttgcaagaatcactttgacgtctcctctcgaatcaaagccatccaattggttcagcaactccaacatggtcctctgaatntcacgttcaccacc

SEQ ID NO: 11030 - DNA, 555 bp, Gossypium hirsutum
  Clone ID: LIB3828-033-Q6-N6-C6
aaagagacaaaagttaggaattaaatcgtaattaaaggagggcaacattttgtactaagactataacgtgacgacgacaggagtctaatgctgaaaaatcaccagaatttgtgcccattgagttacaaggttgaataagcggtgatgaaacttgtcatatgcttctactttcttataaaacaaacgatactcaagcaagtgaattgccaattatgagaaataatgaatttggccagacaaggttacaatgaattcagattcccctgttctaactttggcaaataaccctgaaccgaagaaaaataattcaacgcttacagtgatatgcttagaatctctaatgagtatattttcaggagaaatcaaagggaatattatcctagttctgaactgagagataattaatttttaccagaataatggacataaactgtcatacaacataataggggttaatttaaagaataaactgtacttaatggctaaaccaaaaacttcaaaattgtatatgaagaaggatcgtgagtctagtttcatgaaaaatatcggatctta

SEQ ID NO: 11031 - DNA, 204 bp, Gossypium hirsutum
  Clone ID: LIB3828-033-Q6-N6-C7
gctatcaaaccatcatccgataatctatgatgtcgccaatgggctaaaaattcatacataaaaactaatagaaaatgaaaaatgttgaaaccagcttttttgttcccaggtgcttcagacatttgtgtcatccacccagaaaagactttgttttgacatagttggaagtaaaaattaattcctctgttcgctgcatacggcaca

SEQ ID NO: 11032 - DNA, 573 bp, Gossypium hirsutum
  Clone ID: LIB3828-033-Q6-N6-C8
aaacaataacctttcaatagatttgtcttctagtgaaccaagcagcaaaatatatcagtatgaaactaccaaatgagaaaaagtctcaaactcagttccacatttcatcaattcaccataataacaaacaaaaatttctctcaggtaaatctaacaagccaaacacaattcagcttcatcagcatttaaaattcctagctctttgaggattgcttttccttagtcttctggattttcagaaccttcttcacaatcttttgctcttccactaagaaggctcgaattatcctttctctaacagcacttccagacaaaacaccaccataggcacgattcaccgtcctacggttcctaggcaaccgagaccgcttgtattcagcaggtctcaagtgaggaataccctgaattcgctttccagtaacaggacacttaggcccactcgctctcttcttagtagtctgatagatcaatttcccaccggggggtcttaacgacacggtgttgattggatttggtagcatagctatggcgagtacggtaagtgagcctttgaaccatttttgatagttttta

SEQ ID NO: 11033 - DNA, 578 bp, Gossypium hirsutum
  Clone ID: LIB3828-033-Q6-N6-C9
aattctggaattcgcacatattcatttaatatttaagaaatacaaattaaatagatcgagcactcctccatgcaccgtcttagctcaattaaaaaaaaaaaatgtgaagcttaatccaagctgtgtcgaagcacgcatttgtttaggcacatttgagttggacggccaaagtcttcctgagatgggtacatgcgtcattttggttactgaaaggaatgctatctagtgggatttggcagctgggcttccccaagcaatacttctcaacgacttgcttggattctggcgctgtgcaatttccaataaagtaggctccgcaagcgccaaatggatcaccatagctcgcaaactccactgccacgatttgcttcttgcctggacatttcaattcagcccttggtttcaaatcattcactttggcttggagactaccatttttggtttcgaacaatctcggggatggtgggtgaatttcactcacagcactgcagattgtatccctgttgactgttactatatggacatctttaggattgcctccttcttcctcaaggaggacaatcaggttctttggcttc

SEQ ID NO: 11034 - DNA, 543 bp, Gossypium hirsutum
  Clone ID: LIB3828-033-Q6-N6-D1
caaaaaacttatatttaaattattttatgtatcactatttagcaatttaacattatttcaagagaaaatatatgttacaattgtcacttgttagagcagcatgaacataggtggtcatgaaatcccccattatctgaagcaaaggaagaccttccacagcctgcgtattcctcttacgatttcggctactgttcgagccatgaaagccggaaaaaaaaggccggggatttggcttttgctggaccaatttctgaaacataagaaccggatcctccattgctgcaatggtccagactgctcctttttctaagatagaaggttctgcaactagcatccccgattaactgtaacttatccaaactttgaaggctaaaataagaatgatgtaattcaaatcccaaactgtaatcaagcttaggagttctcctttcatcagcatacttgtgcagaacaagctttatagcgtcttcgacactggcccctaatttcaccatgggttcggactggtcctggacttctttcaacccatacgttgatcacaac

SEQ ID NO: 11035 - DNA, 539 bp, Gossypium hirsutum
  unsure (1)..(539): unsure at all n locations; Clone ID: LIB3828-033-Q6-N6-D10
gctaaaactgttgtaattccataaaaagaaaccanaaataagttttagacaactagatgtaacattgtctgatcaaaatctctcaaaatatgttgtaagtaattgaaagataacatcaacagtagcaaacaaaaccatggaaacctttcaaacaatagcattggcagcacttgcaattctaggccacaggtcagcacactcttttccaatgggaccagtgatagcagatcctttcatttctcccttgggattgacaatgacaccagcattatcttcgaagtacatgtagacgccgtcctttctacgccaaggtttgcgttgtcggacgatgacggcgggcaacaccttctttctcaaatcgggctttcctttttttacgggggccatgaccatgtcaccgacgcaagccgatgggagcctgttgagacgccctttgattcctttgacagaaatgatgtaaaggttcttggccccagtgttgtccgcgcagttcaccgtagccgccaccggtaaacccagcgacattctgaacttgttcc

SEQ ID NO: 11036 - DNA, 537 bp, Gossypium hirsutum
  Clone ID: LIB3828-033-Q6-N6-D11
aaaaaaagctttctcaaacagtgaaatccaattttgaaaaacatgttaaaatcaggacttaaatgtttgagatggtaacaaaaaagtcctacacaaaattctctagtctctaaagctaaaaccactgccctctctcatattaacattcaatccaaccattttgattcctttgtcaaactcgaatgaatccctaccccaactcccattcatccgaattatccatcactatctctataaaaaataatcataatcataatcataatcataatcataataatttctccgcgacaaaaataataagcttactctacggggttttcaagtagaagccatattctggtttggtcgacttgatcggttacctctccctctcccttcacgacctgttgaaccccccctaggtcgactgctatattcacctctgtttccatattcatttcttccaaagcttcgatttccaccaaagttacgtcccctgaagctgtcatttcgaaatgttcctcttcgtcctgggaaactacctcttccactaacaac

SEQ ID NO: 11037 - DNA, 534 bp, Gossypium hirsutum
  Clone ID: LIB3828-033-Q6-N6-D12
accacaattgccagtaatagcatgcattacatccgcaaccactataaatgtgaccgcgaacaaaaatgtgtccacaaccatagttaaataacattaaggacaatcttatttcccgttttcccgtcttataaactagcagtatagggaatcagttgaaaggtggttaagtgaagatcttgacattggtacatggcagacctacaactcctgaaagaacaatccaatcatggttataacttctgcgatgttggcatcgctagggaaactctgctgccgctaggtaaatccttccattgttgagtaactgttttaatctgggtgaaaaagttaactccagccttgccgtaaaagttaaggtcgcctgcgaaagatgctttattgccagtaaatgagaaaaatggcaagggaactggtatggggatattgatgccaacctgcccggcctcaacctctgtctggaatttcctcgctacagcaccggatgtagtaaatatagaagcaccattaccatatttgtttctgttaacaatgttt

SEQ ID NO: 11038 - DNA, 426 bp, Gossypium hirsutum
  Clone ID: LIB3828-033-Q6-N6-D2
gggaaaaaaaaagggggggggggggaatttaaagggaaaaaaaaaaaaaaaaaaaggggggggggggggaaaaaaaaaaaaagttggggggttttttgggaaaaaaaaaagggggggggggggaaaaaaacccaatttttggggggccaaacccctttttgggggggggggggttttttcaaaaaaaaaaagggggtttttcggggcgggggggaaaacccgaaaatttgggggggggccggggggggcaccccgttttcctaaaaggggggcgaaaaaaaactggggaaaaaaaagggaaaaaaattttccgggggaaaaaggattccccaaaaaaaggaaaaaaaaaaaaggggggggggtaaaaaaggaaaacccgggggggccaaggggggggcccaacccacttgggggggggggggccaa

SEQ ID NO: 11039 - DNA, 366 bp, Gossypium hirsutum
  Clone ID: LIB3828-033-Q6-N6-D3
aagttattctcattttgacaaagattaacattaatattaggaaagtacatagtacaaacctcttatggcataacatgcgaggattaacaaaatctctcatttaaggtttcactgaataaaaataagtgaaacacaaataaccaacagttgttacttagaaggaaatgtaactataattcaataattaaatatctttgtttgtaatatgcatcaattgcctccaccaaacccttctcctcgtcctaaaccaaaatgaaacttaccacttccaccaaaatgcaagttaccgctaccacttccaccaccttttccactaaaccctccttcccctcctgctccaccagcaacattagcgctaccacttcc

SEQ ID NO: 11040 - DNA, 536 bp, Gossypium hirsutum
  Clone ID: LIB3828-033-Q6-N6-D4
gtaaagaaaaaatgaatgtattattgtgttatttggctagaaaattaaaactagctataatgcatcacacattatgtaatatgttgtattattgaaaagctgttgacatgaaaacttggaaattcaattacagtactccatgcctatagtaggggtttaatttaatggtggattaatccaacatgcacttgctacgagcgaaacccacctttttgtttgcgagatcgaattcccacaaatgattttgcattaagaggttgcccagtatgttcatttgaggccaagctaacctagtaaaccctaggcatttcactcctttagaatcgtcgaagatataaccgttgaccgccggctcgagcttagctcccccctcgaaatggagggccactcggggaacgcgcgtctcatcaaactctccagctggtggagcattgaagcaataatccaaattccctttcgtcttgttatacatgcttaaagaaggttcgaaagcagcaatgactttttcgaacacctgttccaccagatgcgttacg

SEQ ID NO: 11041 - DNA, 558 bp, Gossypium hirsutum
  Clone ID: LIB3828-033-Q6-N6-D5
gtaagtaagatatatccaaaataatcatatgatgattgtagcaacccaaatttacccgggccgatacattaacaaataaaaacaaaaaaataaaaataaaatagcttttgtacagtccagtttacaaacccaatactatagcccaaaatccattaacccgtaacctagctaaactacccaaaacgcagtacctagttacaacccaattagcctaaacttttggcccaaaatctattaacccgttacacccaaacccaaacaagacccaacctaaataaggcccaatgcctaaacagaatctggaaaccctagggtttctagaagcttcgcgccgtaagcaccccatcagtcacacctcttcaacctcgatcgttccatctaccctcatcgacgccgtgattccaggtctcaaatctggccgtagttgaagtcgaataaaacgcatatcagcgccagcaccgtcatcatcagggcctaatcatcttggcccactgatttcctcgctagatacctgcaaaaaggaagagagaaccaacagcaaccaagaaacaaatttgg

SEQ ID NO: 11042 - DNA, 167 bp, Gossypium hirsutum
  Clone ID: LIB3828-033-Q6-N6-D6
ggggtataaaaccgggaatcaaaaatcagcaaaacatattttgaaggttaaaaacaaaatataagggggcctatttatttcttcaaaaggaaaattataaagggggggggggcaagtccaacaagagcccgaaacccccccaatcatcaaagtccaagcgggccccg

SEQ ID NO: 11043 - DNA, 536 bp, Gossypium hirsutum
  Clone ID: LIB3828-033-Q6-N6-D7
attccgcagctatacttgaatttcataacgaatatataatttccatcagtttattaaaggaaatatatatgacagcgattctgtaaatgatgaaaacaaatgtctgtattggattcaagatcataattacctttttaacagactatatgcaggtaaatctttcactctggagacactttcaagtgaaagttcgtgctctaaccgtgttcttgtagacttcagaatttcgttgaattccatgtatgaagcccgtttcacaagccattgtgcatccatcatctgaaaggtcacacaataaagatcgtcgaatgccatttcatcttctgcaagtagttccaaaaatcgtctcccagccctagaagatggtttccctgattgcagatccaacatctgtaccaacataaatgaaatattgatgccagctacagcaaatggatattcccattcagatctattcccatcttgtttgtgcaacaacctctggaaagatgcggatatttcttggcaaaaaagatgagatctctaatgatatgaat

SEQ ID NO: 11044 - DNA, 549 bp, Gossypium hirsutum
  Clone ID: LIB3828-033-Q6-N6-D8
gttaatgtctctatcaattgtacataatttttattagtataataataaatttaacttttgatgtttacattgtaatgggccaaatctgcccgggcccgtgtaaacacaaaacaaacaaaaacaaaacaaaaaaatacaaaaaatatataaaacccaatacatgacccaaaaaaaacttaatatcctagcccaataagcccaatcccgaatagcccaataagcccaaaaacttcaacactttcgggaaccctaggtcaccctcttgcgccgcaacagcctcgcaacgaccgtaccacctccgtaccctagcctagacccgtacccgagcgccaacgcacagccccgtgctccgtacctgcaaaagaaaacaaacgaaagcagcaacaagccaatacaaaagcagaggacaaaaattgttgttttctttagttattcggctatgaagcctttgattttcgattgtaatacgactacgaacagattacacaaaaaaaagaggaatcaaatacaaagaagttgaatattctgcaaaggttgttccctgttttc

SEQ ID NO: 11045 - DNA, 574 bp, Gossypium hirsutum
  unsure (1)..(574): unsure at all n locations; Clone ID: LIB3828-033-Q6-N6-D9
aaagcaaanaatccttcgattaagtagaacaacacagaaatattattaaaagttaagactgctaaatcttactaaccacaaattttgattgtcattgtatccaagttttatctgatttctcaacattcttcgttcagcagtatgtgtatatatttaaacaacatatcaataaaatgaataggcaagtaagccagccaggaagggtatgggaagaagatgcaatttgagtacatggtatcttatccgacatgatctaagtccaatacaagcaaataccatcttctgctacggcctccttatcattatcagagtgctgcagccacggttcttcttgccgcctcacgcttcatctcgtcagctttaccgctacctctgaaatacatgtaaacttgctgaataacccagacactgagcaatgattcaatgcagaaaaatccaaaaccaatgaagtagaatatccccaccaaagcattgtggccaatgagatcaatcgcaggcaaaatacctgcaagggatttgcccttgaaaataattgggggagcaactgaagcaaagatgcaaaagccaatatgca

SEQ ID NO: 11046 - DNA, 487 bp, Gossypium hirsutum
  Clone ID: LIB3828-033-Q6-N6-E1
gtatagaatccgtagtttctataatctatatataaatctatgaagattctggcgccatagcttgtatattcatggccttctttttccctaaaagacattggcatcaagtttcatggtaaggtccttaatcgttcgtttgagttcatccatataagcgataccaccaccacacccattattgaacctgcggtaagggcatccgtaattgcaggtgccgcaaaagctgccgcccatgatatccacatcgtcgcagtcgatacagtaagggcttctttcataacctatacctatgccagcaccgaatccggtaggatcaggatcgatagaggttgaagaatcaggatcagcttcatgcggaaaaccgttgcttggttgaaacccatcggctccgtcagccatggtggagattccggtcctcttaccataggacgccgataaacatactgaaaacagtaaggttatggaaacccaatttgctgcgcctgcc

SEQ ID NO: 11047 - DNA, 539 bp, Gossypium hirsutum
  Clone ID: LIB3828-033-Q6-N6-E10
ctggaattcgcacatattcatttaatatttaagaaatacaaattaaatagatcgagcactcctccatgcaccgtcttagctcaattaaaaaaaataaaatgtgaagcttaatccaagctgtgtcgaagcacgcatttgtttaggcacatttgagttggacggccaaagtcttcctgagatgggtacatgcgtcattttggttactgaaaggaatgctatctagtgggatttggcagctgggcttccccaagcaatacttctcaacgacttgcttggattctggcgctgtgcaatttccaataaagtaggctccgcaagcgccaaatggatcaccatagctcgcaaactccactgccacgatttgcttcttgcctggacatttcaattcagcccttggtttcaaatcattcactttggcttggagactaccatttttggtttcgaacaatctcggggatggtgggtgaatttcactcacagcactgcagattgtatccctgttgactgttactatatggacatctttaggattgcctcct

SEQ ID NO: 11048 - DNA, 549 bp, Gossypium hirsutum
  Clone ID: LIB3828-033-Q6-N6-E11
gttgatctcctcgactgctgctttaattttatttattttttcttttttgttttattgaacgcttagctcagttcccagaaaagaaaaattattgacatatactataataataatgactcaattcttattatgggctaatgccgagcttttaaagaaagttgaagtgaaaatacatattatagttctgacgaatgggtaaagtctccatcttcttgactaagctcaaagtctccatcttcttgactaagctcataatagcccatctctttaagaattcgagtgcactgaggaagagctatgtccttcttaaacccaagattgttggcaaaacgcagtttattgctgagaccatcaaatgtggtgagaaccaccctggattttctccacgcttcggtgggatcactgcaatcagcccttggactcctcaccaaagcaatgtcgcagtctgattcctcataatcgccttccactatgatgtggtagtctccgtgactgtcagccactatttctgggctctggaatgtaatcgcttcgttggtacggttccta

SEQ ID NO: 11049 - DNA, 475 bp, Gossypium hirsutum
  Clone ID: LIB3828-033-Q6-N6-E12
gatcctagtaattatttattacagactgataccaaagatttctacaggaaattatggagtttacagttaccaacaaaaatcctaattctcgtatggcgaatatcttggaactacatcccttcacttgttaacttcagacaaaagagagtgaccactactgcaaggtgtccacgtggttgttctgaagaagaagacagctttcatgtgttcagacaatgtcttgggtattcagtagaggaacaaaggagcagatccgtattttttgttgcaccttatgggttatcaccacgactggtagattcgaacacagagaagaggtactaggggagtccatacagtttgacgcagctttcaacaccaacaactccagatcagcatcaggaatggtagccatgggtcaaaatggggaaatcgtagtctctaagtccactcttcactccaacgtttcctctccgtttgtagcagaagcattggc

SEQ ID NO: 11050 - DNA, 509 bp, Gossypium hirsutum
  Clone ID: LIB3828-033-Q6-N6-E2
actctaaccttgttacttcttgattgaaaattttgatgtaattcacaatataaaactgggttttggattccaagatcagttacaaagaatattcagccaaaaaccaatctaaaccattggctggtaataaaaacctaatttaccatagtggtaacatcatattctaaggccaaactgaaaatctgactgtagtcatctacaaagggaacattgagaccttctgttacatttggggcaagctcgtcgtaatcacgtctgttagcagctgggaatattatgggcctcacttcactcctctttgctgctattgttttctccttcacccctccaataggaaaaattttccctgtcagagtcacttccccagacattgctagatccttcctaacaggcttcttcatggcaagggatagcatggaagtgatcatggggcaaccagcactgggtccatccttaggggtggccccagcagggacatggaaaatgaagcttggaattggcaaagtatg

SEQ ID NO: 11051 - DNA, 573 bp, Gossypium hirsutum
  Clone ID: LIB3828-033-Q6-N6-E3
agataatatgtcgaggtctttcatcattcaaacacgcaccataaaagttcaacaagcaatgcactttacaaactaaaaagacatgctttgaaacagggactcgttcggactcatgactgatagaatcttaaagttactcacaaacgctaggactaggaaggttttataacttaatgtagactaacaggtttattcgctacaaacaccgacaatggttgtgcctacaatgggaatttctagttcttgcttatagcggtagccttacgcactggatacgacttttttcagtagaacaaaaacaggcttacatgatgatctcctacccactccagcatcatgtcatctctttcagaaataataatcttcggtgtgtgggaaaagatcatgtatgatggtagctagttccggttcctgcatttttccatggccctcggagcgagtccaatggcatcagagcttttcatgatcctcaaccttttgcaggtgtcagtgaacatctcccatggaacatcacccacaagcatccagtcaccatctttatcctcgtaagtaagaacatattctgatccatga

SEQ ID NO: 11052 - DNA, 551 bp, Gossypium hirsutum
  Clone ID: LIB3828-033-Q6-N6-E4
atgaataattgtttcttttataaataagataataaaagccagcacaataatttgagttctagcaaaacaaaaaacataaccaacacaataaattaaagttctagcagaacaagaaaacatgaaaatcttaaatttgaaggactcctcaagaaactactattgcagcatcccaaaatagtttatattttgttaaatgcaacaatatcacagctctgaacgtattcattaattggttccactgtaagatgttcctcaatcagagtatcaaccgacactaaatcatccacaattgtcatcataatttgcaatttcttgattccgtaaccaacaggcacaagcttagaagctccccaaagtagtccttccatttgaacacttcttactgcttcttcaagctttttcatgtctgtctcatcgtcccatggcttaatatccaataataccgaggactttccggattctttcttcttggaagaggccttaactgcagctgcacgttcttcagctgccttcttttcctcctcagtctcttcaccaaacaagtctacatc

SEQ ID NO: 11053 - DNA, 561 bp, Gossypium hirsutum
  unsure (1)..(561): unsure at all n locations; Clone ID: LIB3828-033-Q6-N6-E6
tttttttttttttttttttttttttttttttttttttttttttttttttttttttttttttttttttttttttttttttttttttttttttttttttttttttttttttttttttttttaaaaaaaaggggggggaaaaaaaaaaaggggggggggaaaaaaatttgggaaccggtgggaaaaaaaaaaaaaaaaaaggggccggcaaaggaagggggttttttatttggaccttgggaaaaaaaaaaaaaaaaaccggggaaaagggggttttggggggcctaaaaaaaagggggccggggccaggtttaaaatattggggggttaaaaaaaaaatgggggggaaaaaaaaaggggttatttttgattgggaaaaaaaaaaaaaaagggggggcccccttttttttttttttttttttngaaaaaaaaaaggggggttattttttttggccaagaaaaaaagggccacaacaaaaggaaaaattttggggaaaagggggtttattaaaaaacattaaaggggaaaaagaggggaaaacccttttttaaacattttttttt

SEQ ID NO: 11054 - DNA, 517 bp, Gossypium hirsutum
  unsure (1)..(517): unsure at all n locations; Clone ID: LIB3828-033-Q6-N6-E7
tttttttgttttttttttttttttttttttttttttgttttttttttttttttttttttttttttttttttttttttttttttttttttttttttttttttttttttttttttttttttttttttttttttttttttttttttttttttttttttttttttttttttatattaaaattttttaaaaaaaaataatttaaattttttttaaaaaaagggagggaaagggaaaattaaaaaaaaaaaaaaaaaaaaaaaaaaaaaattttaaaatttttttttaaaaaatgttaaaaaaaaaaaaaaaaaaaaaaaaagggaggtaaataaataaggggttttaaataaaaaaaatttttttaaaaaaaaaatagaagaaaaaaaaaaaaggtgtttaaatgtaaaaaaaaaaaaaaaaataaaaaaagaaaaaaaaaaatttttaaaaataagaaaaataaaaaagggaaggaaaaaaaaaaaaaaaaaaaattggggaaaaaaaaaaanttggnggg

SEQ ID NO: 11055 - DNA, 548 bp, Gossypium hirsutum
  Clone ID: LIB3828-033-Q6-N6-E8
agaattgctaaaatttctctctacagcactacttgagctattatccattctatgatatcagattagtcaggactaaagaaaagcagaagatgaaagagttacttacacctttaataaaaaaagggggaggagggatttccttccggtgcttgggagctatctctcacaactacaaacatctcagcttcagaaaagctatatgtaaatctacttctacatcatcattgttgcaaagagattagatcctatcatgcacgagattttaagtattcacttgtgcattcttaagtcaggggagttatgccgcaagggtgagagaggcttccttgctgaatctggatcagtgaaatcaatcttcttctcaattggactgcatatcttgggacttgattttcgcttgtttgtcttcgtagatgcgctaccagaatgcttcccatcagaaccatggaggtttttttctttgtggtattgcctcaataatcttttgttcgcttcatccaatatgttgttttcttcaaacagaactttgacctcatcttcagctttac

SEQ ID NO: 11056 - DNA, 543 bp, Gossypium hirsutum
  Clone ID: LIB3828-033-Q6-N6-E9
cgggggcaaaaaaagactccaaagcttgcttatatattgccaactgtttacagttcactatacccaaaaaagctggataaactttaagcatagggattaacaatgaagttgttcacaaaaaaaaaaaaaaagaattcttgcctttttcaaatacgatttttaaattgactccaacagttgcttgttgatttcaaagccgcacagtaattattcaaccacatggatgcaaatttcaggacacaaagttcaccggttaggaaatcatgacccatttgcctccaaaaagtgaaagtgttactcattgagggggaattgaaaggaaaaaacttaatggctgtatcatatttctgcattaactgagtgatgggagatgataacattttatgtgccttgaactttttccggctaccctttaggggacgccgagctaaccggccataaatttgtgcagcttccaaggccaagtcactaagttcttgggaagagttccaacataaaagacgagcaaatgcacgtagtgcctgtggaagacccttccccttt

SEQ ID NO: 11057 - DNA, 500 bp, Gossypium hirsutum
  Clone ID: LIB3828-033-Q6-N6-F1
tttttttttttttttttttttttttttttttttttttttttttttttttaattgcccaaaccccacgattttttaaaattgcaaattgtttaatgatttggcggcatttccttgagaatcattctatgggtgaaccttatgaatatgggtttacagggaaacaaccaactcaccagtccaaatgatagaattatttacttattatatttaacttggtcggtctatttttgatctatctatcaagggcaaaagtgacaccactgctacgacttggagcggtagcttgagaaggaggggaggaactagcagtactaccatttatagaagcttcagttggggcacttgcagggctgccactggcggatgaagcgtcgacagaaaccagaccagcaggggcaatcaaaaccaaagcaagaacaacaaggtggggggtagtttttggtttcaaatgggggccctgtattttttaagcaataattttttaaaaaaatttaagggag

SEQ ID NO: 11058 - DNA, 511 bp, Gossypium hirsutum
  Clone ID: LIB3828-033-Q6-N6-F10
atcaaattagcattctttgaaggaattcaactaaaattgacacgggaaaaagcaaacacacaatccgtatgcagatgacagtctcaaccaaatgaacacacatcaaaattggtctaaaaaactgcaagtaccaaactacaaagataaccaaaatcaaaaggctctgatactatcaaatgcaatctcatttcttcttggcagcagatttggtgaccttagcacccgttgggtccttcttctcaacgctcttgatgacaccaacagccacagtctgacgcatgtccctgacagcaaaccgtccaagtggtgggtactcagagaaagtctccacaaccataggcttggtgggaaccatctttatcatccctgcatcaccattcttcaagaacttgggctccttctcaagctcctttccagatcgcctgtcgatcttggtcagcaattcggaaaatttcacagcaatgtgggaggtatggcagtcaaggactggggcatatccgtttccaatctg

SEQ ID NO: 11059 - DNA, 513 bp, Gossypium hirsutum
  unsure (1)..(513): unsure at all n locations; Clone ID: LIB3828-033-Q6-N6-F11
cattcaaagtaacaaaattattattactntccaggaaaacaacagaaatgcactaaatgttcccacattcatctctttttcccctacaaatatttatggaatatcccacggcttagcctcggggacggcgacgaccataccttggagatgaggcgtaagcacgacctgacatccaagcctggaatgcttgttcaagatgcgacccctcgaattcctcaccaacacatactcctcatcataggtacgtggcggaagcttctcgagccactcctgtgcaatgttgacctcgcattcggcggagcaagcgtcgatctcctcgaggcggtgagagtcggggtcgatcaggccgctgttagtcaaggcacgaagtaaggtctggccagctaggccgacaacctcacgcttttggccttcagggtcgatggcgaagagcttgacgagccgatcagcaacttttttggaagaggagggggaggaggttaaggtggcggaggatcgggtgaggatttggga

SEQ ID NO: 11060 - DNA, 513 bp, Gossypium hirsutum
  unsure (1)..(513): unsure at all n locations; Clone ID: LIB3828-033-Q6-N6-F12
gagttagatcctttgtattttccaaggttgaaatagaagcctcaaatttttcaggcactgttacaagaattttttcaacaattcttgagtccttgaactaagaaccaagtaatctgattcgatttgcaatgtccaataacctatcagaatactctttgattgattctgtttctttcatcttctgcaactcgaattctcgaattaagtttagcacacgcattcctttgattcttttatctccctcatactctgacttgagataattctatatctcatatgctgacttcagagtcataatccgagtgaagatagtagatgagattgcagtgaacaagtaggcctttgccttggatttctttgtcttcttcttttgcaatttgatctgtgccatggtaggatttgtgggagagtaggaatttcataatcgtcttccactacttcccaaatatccaaagcttccatatacacctccatatgaactgcccaaacctggtagntgtctccatcaaacac

SEQ ID NO: 11061 - DNA, 232 bp, Gossypium hirsutum
  Clone ID: LIB3828-033-Q6-N6-F2
aaataggccaaatgatcattgaaatgactaaataattattggaattatgtagttattacactaaaataatgatacagaatgtaataaaaatggcgagcttttcctagccaggaaacatatacgatcaatcagactttccccgtcatttaattagggacaccaatagcaatggggggacccaattcctggactatgtttgatcttccaactcttttatatgcctctcgaaatt

SEQ ID NO: 11062 - DNA, 566 bp, Gossypium hirsutum
  Clone ID: LIB3828-033-Q6-N6-F3
aacatgaggatccttgcttcataccaacaaaaaacagatcaaatttggcttattacacactcaaaaccctgatatcctcctcttctatggaaacaccacaaactataaaactaaagtttcctacaaggttgtttatgttcaacttcaattctttttcacagtggccgacttgatgatatccacgaactcaggcttcagagaagctccaccaaccaaaaagccatccacatctggctgtccagccaattccttgcagtttgctccatttacagaacctccatatataattctaactgatgcagcaatgtcagcaccaacattttgattaagccatttcctcaattcacaatggacttcctgagcctgagcaggagttgcaactttcccagtaccaatggcccacacaggttcataagccaaaacaacattatcccaatttgttactttatcagcaattgctttggtctgtgcagcaacgacagccatggtagagcctgattctcgctgttcaagagtctctccaatgcaagcaatcactttcaagccttgagaaagcgcatacgcta

SEQ ID NO: 11063 - DNA, 284 bp, Gossypium hirsutum
  Clone ID: LIB3828-033-Q6-N6-F4
aggccttgtttgggtcacatgaatggcttagccattcctcccttattcaacacaacgttcttattcagggttcggttagctgtaaagcctattcaatggaatagctattacagccttattcctcaaaatcactgggtggcaattcaacgccatcactaatgaatggctattcaacacttccagtaatacacaaaattatttttctttccttttctacccatctcacatctcttcaaactccctactcccatctgagtttttttcaacaaatctagattatcgtg

SEQ ID NO: 11064 - DNA, 545 bp, Gossypium hirsutum
  Clone ID: LIB3828-033-Q6-N6-F5
aaaatgaaaaagactgtttttatgtaatatgaataaatatattaattacaattgcactgaatctgttggtatggtttaagcggtggcacttagggtttttgggacagggctggaacatggagtcgggtttaatttgccactagttttaggcttgacattcaaacattgggatgttgcgggttcaggtccggtgtgcttaatatcaatgtctgcaagttccacattttgacatggcgaagaaccgctgcaaataaacttgacagcttctggaagcgcagatgtgccacggatgttcttgaagctaatgttgcttagtttaactttcgattcttcatttatcttgcatttactccatgggcaatatttttgatcaattaggataggggaagagacattattcacgataatatcctcaaaatgtacatctgatactatcccaggagattcgcctggccaagttttgattcgagctccattcgaagtattagtgatggtgcagtttgtgactttaactccctcaactggctcttctttggggtactttc

SEQ ID NO: 11065 - DNA, 568 bp, Gossypium hirsutum
  unsure (1)..(568): unsure at all n locations; Clone ID: LIB3828-033-Q6-N6-F6
aagactgaaaacaatgagtattaagaaaggggatttaagttttgaaacataattttcatacaaacaactaacaagaaaattgtgtttttaaggagggctaggtccagtatgtaaagaggagacaaatcacacaattaatttaaagaccaaagtcacaggngaatgaagccctcctattacatacgtagtagcactttaacccatagcatatttttgggtccagctccgagcggttgtctcatacttgttcctatccgtcttgtacatgtgggcaatctccggcaccaaagggtcatcaggatttggatccgtcaggagtgagcagattgacagcaacaccttggatatggtgagggcagggctccactgttcctttaaaatatcaaggcaaatgctaccgttgctgttaatattagggtgaaatacctttgtcctgaatgcaaccttgggtggtttaaatggataatccggagggaaatgaatggtgactagaaacaccccaccggcatacgggctatctggaggacccataatagttgcttgccaatgaaacatgtcttcagcaaca

SEQ ID NO: 11066 - DNA, 486 bp, Gossypium hirsutum
  unsure (1)..(486): unsure at all n locations; Clone ID: LIB3828-033-Q6-N6-F7
aaaaaaaaaaaaaagcccccacacatattattcttcatttctaggaacctcatacagcacactacatagtaaaaaaaaaagggtgtttatgtctctcaaattagaagttgaaatttcaaataatttagggggtcacaaaatgattcaactgatttacctttgttgagtgaaactgtgaccgcaagattggctgagccaagctcctttgttttccggggggagtcattttcatcctaacattaatcaaagcccaatagattgcgaaagatacagcgagttcaatacacaagggagtctacaagcaggattcgaaaacgaacataatttgcatcatactggggtgtttctagggaacattcatgacttggatggactgcaacatgtttgaaacggcaattaccaggtcgccaaatttgatcattcccctggccttgagtaacaaaaagggtttgttaagggtgctttccatatcgncggaaaaaccca

SEQ ID NO: 11067 - DNA, 554 bp, Gossypium hirsutum
  Clone ID: LIB3828-033-Q6-N6-F8
gcaggaccagtgaagagaaaactggtttgagcttcagtacatctaaatacatttgtctaaagccaaaatacataaaagtctgaatacataattccagatgacacatactagaaacccacaagatggtggattctgagaccagcaaaagcttatgcacactacttgggatgaatactaccaaccgggtcagggaaaagcagttcgaaataaatcccattcgaaataatgtcaagcaactgagacttacctgcaaaaattatctgatatatttcatgacagatcttcatctgaccttgaccgcgtcaggcgtctgcgtctccttgggcttggagatgcatcttcacctacatcacttattacacgcacatcatcttcatcatcgtcatcttgcaaacccaagagattctcgccccaaaggaacctccgctcagatacagctcctccagggtgtcgatgccttgaccaaaccctggacctggctcttgattcaccaacattgtcgactgaaccaatctgaaacagaaagaaagtagtccaccatgggtgaacttgct

SEQ ID NO: 11068 - DNA, 483 bp, Gossypium hirsutum
  Clone ID: LIB3828-033-Q6-N6-F9
caaagagaaaggaactgccattctttcaattgaaaacaaactttcttaaatatcataatacattctgacatagcagaaaagcccacattacacataattaagaaccaaatcctcatgaagatttgctgatacatactaaagtaatagaatttatttagttaaaaagacaaaggcctctctgcttctctttgttgttcattttccccccctcttatttacaattgcaagggttgcaagtgcagttgtctccacacttgcatccattctcaaccccaactcccatctcagatccctcaaagtgcattttctgagttgtcacaccaagaacaatagtctcagttgtagtcttctctattatgtcagggaacatcttgcatcctccacagccattgccacacttgcaaccagagctgcagccacagtttcctccgcagcaagacattttcagttttgtttttagaaaatagaaactggaaagatttt

SEQ ID NO: 11069 - DNA, 550 bp, Gossypium hirsutum
  Clone ID: LIB3828-033-Q6-N6-G1
aatcaatgtaaaaaatattttttattcgcaactgctctaaaataataataaacaaataaacaaatttaaacatactataaaatcaattaataaacctaaaccttaatcctcatactcttaatgagctgtgaacctataaaccataaaatgcttatatccctcgaggcttaacaatctgagatggaaaatttgggtgattcactgcatcagggaatccttgagtctcaaggcaaaaccctgcatgttttccatacacagttccatttttgcccttctcattcttcaacatattgcttgtataaaactggacccctggcatattggtccatagctccattttccttccacatttgctttctacaaccacagcaactttcctcaagtgtctcgaccgcctcgatttatggagcacgtagtttatgtcgtatccgtggggtaattggtcgaacttgctgccgatctcgcgaggccggcggaaatcataaggggtttttcgaactggaacgatttcgcccgttgggattagttcagagtccaccggtgttatctt

SEQ ID NO: 11070 - DNA, 481 bp, Gossypium hirsutum
  Clone ID: LIB3828-033-Q6-N6-G10
aacaaagaaaacatatatattagcatgcacatgcattaattacatatggctacaaaacaagattcaaggaactttaggatattgcaaatcgaatattgttttgagctatttattcttcataattactctttttgtccaagaggattttatagcaaacccttctgcaacatcattacttcttattttgtataattaataagacgacaaccaactcttcctcgttatttcatcttaatatggtatcatctctctactttggtggactgggttcactgtccataacctcttctatccctttgctctttacagtttcagcctggcaacatcctgatgcgcacctgggctgaccacactcagcacaagtcccaccacaaccctgacggcaacactctccactctcacatcccgactgtcctggcattagtgggatttttgggacttgtgggatctgtgggacttgtgggatctgtgggattagtgg

SEQ ID NO: 11071 - DNA, 571 bp, Gossypium hirsutum
  unsure (1)..(571): unsure at all n locations; Clone ID: LIB3828-033-Q6-N6-G11
gaacataagcagcagtcttctgttcaaccaataatttaatattggtacaatcccatgagataaatcgatgaacacaaccaaagtcaaatcgatctcatgttagaaataaaaacttatgaagctagctcggcttaacacaatagagaacatacaaataaagccaaccagcctcattgaaggcagcatatagggagggcagatgtcgttagggccaaaccctatccaatctgctatagtcgtgatatttcgagtgatatcttcactctttagagctataacattgtcctctgctctgggtagctttctatagcctcctcgatcatgagtttttgagacaacagtcaagtaaatgaactggaaactcaaatcacatgcaggacaacacattggttcttaatccatcaaataacacattgttgtaggtttggagcacttgggataatctacaatgtttcccccttcttccatcacagacctttcccaattcaacacnattagaatcaaatgcttgcttgcctgctgctgctaaagaaattatttaatggacactcaaattattatcgtctaaaaa

SEQ ID NO: 11072 - DNA, 554 bp, Gossypium hirsutum
  Clone ID: LIB3828-033-Q6-N6-G12
aggtaccaaatagaatctcatatagtatcgtgtgtagtcgataaatggtaaagacttttgtaagcagaccaatttgcccggcccattgcaaacacaaaacaataaatataaaacccaaataaaacttaaatcctataacagtccatttaccggttttgacccaaactaataccctatacaagcccaaatcaacccatttacaaataagcccgagcccaaatacaataggcctaagtggcccaaaatttaaagcaagcaaaaaactctagcctaatgcttgcgccgcaaccggacaatgcctccatacgatgccaacgtctcaaccccaacgccgctcgtgcctctacgtcgacagccccgtacgccaccctcacgcctagtgccagcacacgccccgtaccttgtaagttagccatcgtttccccttcgcttcgttgaaatcgaagtccaaatggggtctcaaggctgaaaaatcactcctttggagttcgaatgcgcagatcgccgttcatggtggcgcataaatgacgaagggagcattctgggggttaact

SEQ ID NO: 11073 - DNA, 558 bp, Gossypium hirsutum
  Clone ID: LIB3828-033-Q6-N6-G2
gataaatcgacatcatacttaacacaaaagaaggcatttcatgattataaatataagtgtaaaaaaagatatatccctcctttaacttgtaaacatacccttttctctatgtatactgctgtctcagctacctttgtaattcatgtccataactctagttggaaagcagattgataacagcgtcaaaatggatgcgcagattagtaagattagatctcagccacgatttagtgtatcccaattgggaatatcctctgtagcttcgttcaccatcttcacaagtttcaccacactttcaggaacacctggagggggcaaagagaggttccttggaggaggcccactaaggtacgatctcttatcgaaacgccattctccaatctttccatatgttaattctcccttcaaattgtagtcacatccgtaagtataatggattataaacttcttccctacttccgtatcccatggtggctggagcatgaagtctttatgaagtatgtggtgcacgtcatgcagtgcagatgccacagcatacgcatacatttctagcaccca

SEQ ID NO: 11074 - DNA, 553 bp, Gossypium hirsutum
  Clone ID: LIB3828-033-Q6-N6-G3
aaatgaagttggcatatgaagattaagagatataaaaaagttcaacgtaatgtcgattgtagtacatcatgatcatcatcaaaacacaaacgtctaaaaacgaacgtacatcatatgggtgaaaaagcatccatgctaacaaaatataaccagacagaaaacaaaactaaattgcagcgaaggttatgccgcacaatcacagttactctctcttagcttacagtttgtcctcgtactcggaaagtggggtcatctgttccttcaatcctttcctcttgcggatttcggcgacatgggctgctgcctgagagccaggttccaatgggtctgatgacatcatatcccagtgatcaaacacacattgtgggaaagcttgtcctgatgttgcagccctcaaagtgctagagaatccaaaggactcaatgacaggaaggtatgccttgatgttgtaaagtggagtgccaggtctttgcatttcctcaaatacatgtccacgcttctggttaagaacactgtaaataccaccaagtgcctgctccggggcttggatctc

SEQ ID NO: 11075 - DNA, 363 bp, Gossypium hirsutum
  Clone ID: LIB3828-033-Q6-N6-G4
ccacaaccatcgtaaaatttactttgggtttataaaacaaagtaaaaaaaaaagatacagagactttatttttggactaaccatgaccaaaatcatggaattcagcagaaacatgcgaaccccattgtttgcagaagctattatttttaactaatatgttttgctcactagctagagacaaataatttattttgttcaaaatagaagagcttaaaacttcatattttcaaccgcatcatttttatgaaaaacaactctttaagatatgcagatgcataataatactgttgaaagacagatgaaatacccaagttcgacagaacaaagcagtttttcattttcccttgaacttgctgctaatgg

SEQ ID NO: 11076 - DNA, 555 bp, Gossypium hirsutum
  Clone ID: LIB3828-033-Q6-N6-G5
atgaaaactggggaacttcaattattataactagaaatctacaagtacaaaataatataaaaattttcagcactaatatgacaacaaaggcacaagtaaccaggaacatacagtttcccgatcccatatcaggaaagaagaaaaacaaaaatttagtgacagtaattagttcatatactgaaatcacaaaccattataaatttcattctgcagctgcattctcacttttatttccctcacttgttgtggtacctggcaaagttcccaaaccggtttcaccttcttttacttcttgattcgttgaagaagtgtcgggattattctgggtgtttccatctgtatttgtgtcgtaattgctgctcccgttgctgtcgttgaagctgtgagtagcattgttctcgttctcgttctgacctgcattttcgttattggaggcctgaacggcattgttctcatttggacttgagttttcgttgctgttggtattggtctgaatggcatcgttgctctcgttggtggtggtgtcggtgtagctctgagaagcattgttttcgt

SEQ ID NO: 11077 - DNA, 428 bp, Gossypium hirsutum
  unsure (1)..(428): unsure at all n locations; Clone ID: LIB3828-033-Q6-N6-G6
atctaatgaatcaaanatagattacgatccaaaatttacagataatgttcctcctataaaggagatcattaatgtcaaagcttgtttcaaaagtccaaatgtccctatgattgctcaacataagaggttaaagccaacatgtataccctcaatgtttgctaaagttgctaccaaggcaagggaagaagaggcaactctactggagaagtaagaacaaacattcctctcctttacttgctccaagaggtaccttgccttgttgaaaaaaaaagcttcattaaggagcaaaacattgattaagccaactttacaaaaacatgtaattaacacatttctccatgataatgggtctgatgggcatagttagctttgttaagccctatgacaggcaactagtactcaaattccatgttaatctcttgaggagc

SEQ ID NO: 11078 - DNA, 554 bp, Gossypium hirsutum
  Clone ID: LIB3828-033-Q6-N6-G8
aaatcaaaaaggatagtgttataatattatatatatatagcagtaagaaaaggcagataggccaggcagtatcattttctctctcttttcaaccaaccatctcactttataattgactatggctatgccacaaagaataggaaaaccatcaggaaaaatatcaatacaaaaaatatcttcatcatcaaccacctgtttgacgatatgctgtttaggtacttgagcaattgtccttgtgctccctccacgtttgctaaggtgtcgtccatgttttcatcaatcctggttgaaaatggtgcctagctcatgaattgtagattctacattttgaagagcttcagctctgctcttcatgtaactgtcctgctgtggaaccatttgttgctgttgctgctggagcaatggctgactctgaccatccatatgctttctcggaaacaattgtgatgaagatttattgccattggcccattgaggaaggttgtttgaagctccagctgctgatttgatggccaaagggcgctgccgtacaaaaggatttggagaatctttcg

SEQ ID NO: 11079 - DNA, 277 bp, Gossypium hirsutum
  Clone ID: LIB3828-033-Q6-N6-G9
caaagcttcatcttaattaaagttgattatcccccatcaaagagacaaacaatcccacccatattttctatgtaaattaaaagtttagagtttattaatggtgtgaggagcaggaaaaaccaagaacggccttccacaagatgagattgggggatcacaaaaaaccgcatggaacgcatccttgagcttgcgcagcccattggtacccccaatccctaggaacagcgatatcaaagccaccacaacggggcacatgcaaagcatgtatattcggggg

SEQ ID NO: 11080 - DNA, 470 bp, Gossypium hirsutum
  Clone ID: LIB3828-033-Q6-N6-H1
aaaacaacttactgctcttttgattgaaatgatcggttaaaattaatctcagggctgcttgattcaaattaaatgcaatttgaatgaaagattttaaagctttttgaaattaccaattagagggtgatatacaaagggtccatcaatgttttttaaaataaagaataccgggcgggtttttccaacttgccaggggtattgaaaagtcgatcaaacatatggaatccattcatacagcagcagataaaacgggccacgtgtagtcatcgttattgcaagggggattgcatggataagggcagtctataagcttcgattctttccgattggagtaccaatcacccactgactcggccatgggcttattggtgattcttggagaattgggtgaatgccatgccaaatatgatgtctggcaatgagaaaagccagaatttataaacatacccccttcctcgtttctttgaaac

SEQ ID NO: 11081 - DNA, 547 bp, Gossypium hirsutum
  Clone ID: LIB3828-033-Q6-N6-H10
acataaaaaataaactttttaattgttacatcacataattcactgatcatctatgaatttatatactgttacctcattaaatagaatccacataaatacatatagtaaaaataactttgaaatatatataccccaataccatacacatacgcatacccaacattccgcccaaatatcatagatcccatcccctagtatccatagaaatgtaggcttttcgtcactaatgccatgggatggggctaaaagagtttcttcattattatgattctaaaatgtacattccccttgtctacatgttgcttccaaaagtcaaaactggtttccactctaattataacgggctaattgtacaataataccttgtaatatactaactacatgattcatcatgggatctttgaatggtcataaatgcatttcaatgcccatgcattgattcattgaacaagatcaatggatccacaattcacatacatacacagattccaaaatttataaagaaaaagaaactatcacttacatcctaggcagctaaagactcaaa

SEQ ID NO: 11082 - DNA, 556 bp, Gossypium hirsutum
  Clone ID: LIB3828-033-Q6-N6-H11
tttttttttttttttttttttttttttttttttttttttttttttttttttttttggttttttttttttttttatttttttatttaaatttaattaaaattaaatttttttttcttttttaaaattaaattaaaacaaaattaaaaaaaaaaaaaaaaaaaaattacaaaaaccttaaaaatctgtttcccccccctttgttaatattttggaaaaaaaaaaaaaaaaagttttctaaaaaaaaaaaaaaaaaaacaacccaaaggggggggttttttaaaaaaaaaaaggggggacccaaaaaaaaaaaaaaaagaaaaaaaatgggttaaaaaaaaaaaaaacccaaaccccccctggtgggggggtaaaaaaaaaaaaaaaaaaaaaattttttcaaaaaaaaaaaatattcaaaaaaaaaaaaaaaaaaaaaatttcccaaaaggaaaaaaaaattttatcacttaaaaaaaaaaaaaaaccccccaaaccaaaaaaaaaaaaaaaaagggggcccagggggggggaccaaaggaaaataaaagaggggggc

SEQ ID NO: 11083 - DNA, 558 bp, Gossypium hirsutum
  Clone ID: LIB3828-033-Q6-N6-H12
aatgaacttgtacttcaattttgaattccgaatttcattctgtgtctataatcactacaaacatctctaatcgcaataatcgtgagtgaaatggtatttgaaattcatgtccttatggtatttttatggataaaaaaaatcaggcgtttgtggatagttttgaagataaatattactacaagcagcttgagggctgaacaaaaccagaagcggttccatcagcattactacaggatgcttcagctgctttgtttctgtaagtgagcttcacgtcctccagctttatattactgcaaggatattctgagctacaatcaaacttcactgctacttctgtcgctgatgttccatggatgtcttggtatgtcacatcgctaatttttactcccgaaaccagggcagttcttttcatctgggcagtactgttgatcaatgacgatggggttttggacatcggtcatgactgcatgctgaaaaagtatgttcctagcaaaaccagagctttgtctcccccatgactttattctcaccccattttcagtgccagtaaatgcaact

SEQ ID NO: 11084 - DNA, 332 bp, Gossypium hirsutum
  unsure (1)..(332): unsure at all n locations; Clone ID: LIB3828-033-Q6-N6-H2
aatataaaatcctctctttgactatattatttaagataaagatgaacatcataaaactagcagcaagttaattaacttacaaaacagttcgttgtgaacataatttacacacaatctctgattattattgaaagcaaaggtaatgaataataataaagaacagcagcttcaaatcttcaatccgcattcagcagcatcgagatgctagaaggtttctttacatgaaaatttgngaaatatagggaaaaaagagaggcaaaaaacccatcaagtttatgcttttcaaagttggtcttctttctagtccacctacccatgaatgggctaggcct

SEQ ID NO: 11085 - DNA, 547 bp, Gossypium hirsutum
  unsure (1)..(547): unsure at all n locations; Clone ID: LIB3828-033-Q6-N6-H3
agctattaaaccaanatctcattagcttatgaaaattaattcaataataataataacaaattagaacactcctaaaggaaatttatttaccatattttgaagcactactacataattacaattcgcctaaaaaatatgtcaactactactatttttgtggtaataataaaattacagttcgtaacaaaaaccagatgcatagaaaatcaaatccaatccctgctaaacatttaacttggaagtaaatggtttctctaagccaaatcggaccaatgaggtagcatcgtcttctccgtagctccggtccatcggctgtaagctttacttaaatgctttatcagctgttattccacttcgatctggtatgagtttcttcatgtaatacttggatttacgggataggtttatctttttcctcctttcttccggtatcatgttgatcgtacattcagtaaagccgcgcctaacaaaccagtcagcagtgcgagttgtcaacaagaaaagcatatccaatccgagagaggatgccttcttctcgacgtaatcg

SEQ ID NO: 11086 - DNA, 389 bp, Gossypium hirsutum
  Clone ID: LIB3828-033-Q6-N6-H4
ggccaaaacggggggaattccctaaaaaggaaacccggaaaaaggtttagacaacccccgggaacatgggcgggacaaaatctcacaaaacatgggggagggaattgaaagataacatcaaagctcccggggcaaacaaaaccaggggaacctttcaaacaaaagcatgggggggccttggaattttagggcacagggcaacacacccctttccaagggggccaggggaagcaaaacctttcatttctcccttggggggggcaaggacccccgccttttttttgaaggacaaggaaacccccccctttttaccccaagggttgcgttgtcggacaaaaacggggggcaaaacctttttcccaaaaaggggctttcctttttttacgggg

SEQ ID NO: 11087 - DNA, 554 bp, Gossypium hirsutum
  Clone ID: LIB3828-033-Q6-N6-H5
cacggttgaattttggacgcttaaagcaattttgtgttaaatctctttcagtagttcaaggtccctctctcctcaaagtataatgtacagatgcaagctttaaatgcaacaagatcgtgaagctaccaaaacctgtaaaatccctttgcttagtaaccaccaagggtcgtaaagtgcactagaccattagaattattagttcagttcctcacaaaacttggaattctgatttggttccttaaacatctgtacaactgtgtctaccgaaagccgatgatcttccccttgatttgcagccaagacattttttgccaagtaacttctcaccactgcagttcagtcaagcattagttgatttacacactcaactctgtacaagattcatgccgtacggcagcaacattcttattttccgggaatattttcacctgaataaatggtctattgaacatctaactggaatcaataaatggtctattgaacacctaaaccccgatccttggcaaatgacctacctgccacctcacttccttgctcttcaaccttattcctcg

SEQ ID NO: 11088 - DNA, 526 bp, Gossypium hirsutum
  Clone ID: LIB3828-033-Q6-N6-H6
caaaaccaatactcaatatgttggaagaataagacattatattttaatatttattacacaaaggcacaaaattttacagttctatccataaaataaatggtaaaaggaatcttttgcttttgacatattttattgtatttttgtagcatgtaatttgccaattcacctttctcattcagcttgaagacccttcaaactgatctcgaagcatttcgtacttcttaagctctgccttggaaagggatggtgaaagctctctcaataccttcacaaaatcatcatattctacaacaatggagtcagcttgatccatggaagatgaatctggactcaacaccttacgctttgcagcatgaaaccaagcatctgcacacaaggcatacatatctgcaccagtaaagtttggtgggcatctctttgcaattgagtagagggatatatcttcgtgcaatctaaactttctggtaagtgctttaagaactcgctctctgtaagatgcatcagagttaactccaacgtatagcag

SEQ ID NO: 11089 - DNA, 545 bp, Gossypium hirsutum
  Clone ID: LIB3828-033-Q6-N6-H7
acagaaaataaatatttcttttcttttttatcaaaaaaagatattacatttgagaaaagcactatgtgcacatgagccaatccataaaacttatgtgctgttctcagttacatggggtgattctcaattccctcttctaccttacagaaattttatatgaggaactgccaaaatgggtttaaaccgaaacaaaaactgtaaaccattcttctataactcgtcagaacatgcagtgtgcgaccctgaggtatatcagtcaccttgtaggcagtacagttgacgaatatttccagaagcatataaccagtctttgaaatacacatgaagagcactggatagttctcttttccgattttcttcaaggggagcttctctcaacatttgctttatctcacttaaattcttttgatttctctgttgagatgtcatgtacgcatcaggtaatgggaacgggttatcctttgtcgatccagtagattcattttcaaaccagtttggaatcaggaaattggtgaactgatcaggatctaggcatgtagctgact

SEQ ID NO: 11090 - DNA, 408 bp, Gossypium hirsutum
  Clone ID: LIB3828-033-Q6-N6-H8
aaccccaaaaatttttaaaaaaaaaaaaataatttttcccccaaaaaaaaaaaaaaaaaaaagggggtttggcccccgggagagagggggaaaaccctgggggggggggaaaaaaaaaataaaaaaaaaaaaaaatttttaaaaaggggaaaaaaaattaaaaaaaaaaaccggggtaaaggggtaaaaaaaaaattttcaaaggggggtgggggaaatttccccttttttttccccctcccaaaggggggttttcccttttaaaaggggggttttttttgggggggaaaaggttaaaaaaaaaaaacccccctggggggggggtttttaagggaaaaaaattggggaaaaaaggaaaacccccgcaccgggggggccccccgaaaaacccgaacgggccccgggggg

SEQ ID NO: 11091 - DNA, 310 bp, Gossypium hirsutum
  unsure (1)..(310): unsure at all n locations; Clone ID: LIB3828-033-Q6-N6-H9
aaagagtataatataccgatagagtcgcatgatgaatccaggataaggacaatgttatttaggtaaatgcttatacatangaaaacatagatatcaagtagattaattagataaatcgccaaatatcttctaggactttgattgagttgggaccttcagaggctgaaatccatgcttgagacatgcttcccaaactttgtcaatgttagacatggtgtaaccacattcgtgctcttcccatccttccagagcatgcagtatcccagctatgcgccatacacttatcactctccttggcaaccagttctcg

SEQ ID NO: 11092 - DNA, 499 bp, Gossypium hirsutum
  unsure (1)..(499): unsure at all n locations; Clone ID: LIB3828-034-Q6-K6-A10
ggggataggacccaagnagcacggcttgtttattcaaagaagcggtttgcgtaggagagaggacanttaacantgaagattgtttcatactcaggcttgaaactgcttcaaacgtcctcaaagaacaaagctcgggtggggacggggataatccatcacaccttctggggatatttcagcctatgaagtgggcttcttatgaaattcttggaccgaaagctggtgatgatgaatccatccttccggaaagaccgtgttttttgggagacctctgtggnatcagtggttcatgactacgngcgaatcggtggcgttgatgttgcccattgtgggatttccatgacgacgctttactggtntggcgngtcccttactctcgtggaggagattgctgaaccatggtggattggtgagggtggtttcattatttgtggcttgtctgatgaaactttcctgcctccagctcatcttatgcagagagctgctttgattaagttga

SEQ ID NO: 11093 - DNA, 573 bp, Gossypium hirsutum
  unsure (1)..(573): unsure at all n locations; Clone ID: LIB3828-034-Q6-K6-A11
tcggnaaaaaananagaggcgtctgtgggtggaggtggaaggttaattactgtcggtgtttttatctgtacgcttcagttcgggtgttaggttgctccaggaacagcccaatgatgaccccaaaaacatggacgctattcctcccattgatgcactcaaccctaccgtgaatggaccgggggggggcattcacnaagatcatgttgtcccaaaggtgctgaaattggtactcttggttttggttttgaaggtggtcctgataaatgttgttcttctggatgttccggtaattgtaatcctggtggtttcgttctaccatttcctcaaattccagaaatcccaagagttccagaaatcccacaaatcctacagatcccacaaatcccacaaattccactaatcccacagatcccacaagtcccacagatcccacaagtcccaaaaatcccactaatgccaggacagtcgggatgtgagagtggaagagtgttgccgtcagggttgtgggtgggacttgtgctgagtgtggtcagcccaggtgcgcatcaggttgttgccagcctgaaactgtaa

SEQ ID NO: 11094 - DNA, 581 bp, Gossypium hirsutum
  Clone ID: LIB3828-034-Q6-K6-A12
gggacaccaaagactctttggaagcggggggggggggggaggaccaattaagtctctgcatctatcacattagctttcaatacgtgccaagaacactacttttttgcaggcgtacttccgtggggttgcactcaaaccagtctcattggatggcaaaacaaatacgctcccgaggagcgcggagggtctccattcaatgccacatcacctgcactcctattatcataagaaactcaagttcgacacatatcaaaggaagaatcgtttcacttgatatgacacacaaaaccttgaaaatacatgatcaccaaagctgaaaccgaggtgggggtagaataaaccggatgcgcccctctctctatgtgcaaaataacctaccaaaaacccaaccactcatatagatcttgaaaaaaaaaaaaaaaagcccgccgttgtacactgaccaagctgacatactctctcttccaaggtaatacctaaaccatatcatcacttacttgaaaaacactgcattgaatatgacaaacaagacgactatgaaaaccatcaagcatgcacaacctattcacattcactatcat

SEQ ID NO: 11095 - DNA, 519 bp, Gossypium hirsutum
  unsure (1)..(519): unsure at all n locations; Clone ID: LIB3828-034-Q6-K6-B10
gcgttcgcccacgcgtccgaacaacaaacgtgggggttcgttagaaatagaaaatacaagcactaattgtctgatggctacaaacttctatcatgccgacaattagtgaactacactgactatttnattctactgaaaagcatagcagctgagccatttcctctaaccattattaagctgggggggagatgacggtcttcacattcctaagtaaatgagtgaataaaattcatccatcaacctaaagaagcatcgacaccctatggcaactcaaatggaacgttacgtcagtgtaactaactttcgatttcagtttgacaaagtgcagctaactatgcaagagattggatttcattctatgttgttacgactctccgtttcttgaaatacctgtgttcgacacccgtttgggatgtgcatattggaacatcggtgtggagatgttacagttcaaggacctttcttctgcctgaaaaagcgttggaaattttaaacatacgtgtggtgggtgcctgcctg

SEQ ID NO: 11096 - DNA, 580 bp, Gossypium hirsutum
  unsure (1)..(580): unsure at all n locations; Clone ID: LIB3828-034-Q6-K6-B11
tcggttttttngtgaggaaaaaaaagctggagggtggggggggtaagtgggtgaaacaaaaaaaaaatggagggcaaagaggaggatgttaaactaggagccaacaagttctctgagagacaacctattgggacatcagctcaaacagacaaggactacaaggagccaccaccagcaccgtggggggagcctggtgagctcaagtcatggtctttctacagagccggcattgctgagtttgttgctaccttcttgttcctttacatcactgtcttgactgtcatgggtgtgtctcaatctaagaccaaatgtactactgttggtattcaaggcattgcttgggcctttggtggcatgatctttgctcttgtttattgtactgctggcatttcaggtggccatattaacccagctgtgacctttgggttgttactggcaaggaagctgtcccttacaagggcagtattctacatgatcatgcaatgccttggtgctatctgtggagctggtgtagtgaaaggattcgaaggagacagtagatatgagatgttgggtggtggagccaatgttgtgaaccatg

SEQ ID NO: 11097 - DNA, 567 bp, Gossypium hirsutum
  unsure (1)..(567): unsure at all n locations; Clone ID: LIB3828-034-Q6-K6-B12
gcgttcgtaggtggctggtgcaacccttcgggggggggtggggcgtgacatacctatgttcctcaaaatcgccgagtaccgtgctggtattgtccccgtctcttacgtanaggcctgccgaagcaggggggatacgattcaccattaatggattccgttacttcaacttggttgggggggggggcggcgcgggtgcaggggatatcgtgaaggtgaaggtgaagggaactaacaccaattggttgagcatgagccgtaactggggtcaaaactggcagtcaaacgccgttttggtgggtcaggcactctcgttcagagtcacgggcagtgacaggcgaacctgcacttcgttgaacgtggcacctgcaaattggcaattcggccaaaccttcacgggaaagaatttccgcgtttgaatctcacacttgcccctttttagtaatatcttcacttattattttccttttttaacccagctcttcaaatttcctttattttcccaggaaattttgaagtagtgggtagttgggtaaaagtaaaaagggggttggggggtgttcggtggaa

SEQ ID NO: 11098 - DNA, 550 bp, Gossypium hirsutum
  Clone ID: LIB3828-034-Q6-K6-C10
gtcgtctctactgctgcttgtggttctgctggctggggtgatgctgttgataatactacttttcagacttcaaatttgattggttcggcatctggaaatctaatgtatttggaagagtctccttctggtgatggagatctatgtcaggaagaattggaatctaatgaggtagtttctcaaggatgtcttacaggcttagagacacgagaagaaacaaatccagtggaaggtgctccagcagatatagttttcacttcatgcgaatcagtctctcacaactgttccaatttagaagacgatagtcagcatttatcactggttcaaccaaccaaaaatcgtttgacttccattgatttaactgcgacaccgacttctttagaattgagtaatcaagagtctgaatcatatatttgagtaagctgatgggaagaagagcagatatggtgtcttcaccaagtcattgcttatctgaaaaagaaacttctttcgagcagtccttagacttccctacccatcagcttgatatcgggaagcctggctatagttaaaa

SEQ ID NO: 11099 - DNA, 582 bp, Gossypium hirsutum
  Clone ID: LIB3828-034-Q6-K6-C11
gcaaaattcccataaggggggtggtcgggggcaccatttttgtttcgtcctcactcaatttcgtctatggggctgaaaatatgacctacattgttgtaggccatgtttactgtgacacttgtcgtgttgagtttgagaccaaactcagtgaacccatcggtggagcggggggggaattggaatgcaggaatcgtacagacaatcagcttaccttccagagccaagaaatagtgactgacgaacatggagactatcacattgcagtggaaggcgattatgaggaatcagactgcgacgtcgccttggtgaggagtcccaacccggattgcagtgatccctcagaaatatggaggatatctagggtagttctcaccacacttgacggcgttagcggtgagcttcggtttgccaacaatcttgggtttaagaagaaggttgctcttcctcaatgtactcaagttcttcaagagataggctattatgagcttaaccaagaagctggaggctataatgagcttagccaagaagctgaagacatttccccttcgtcagaactataatatgtattttcacttccaactt

SEQ ID NO: 11100 - DNA, 186 bp, Gossypium hirsutum
  Clone ID: LIB3828-034-Q6-K6-C12
tcggcttttaacaatcagctttgtgggcgggaggagggttaatatagttacacatatacttttatcaaggttgtacatttaagtgacaactattatttttttttatatctcggtctataaaatttgaaattaagatccaaaaaaaaaaaaaaaaaaaaaaaaaaaaaaaaatgggggagggggggg

SEQ ID NO: 11101 - DNA, 329 bp, Gossypium hirsutum
  unsure (1)..(329): unsure at all n locations; Clone ID: LIB3828-034-Q6-K6-D11
tcgccccgcgtccngattttatgagtgggggggggagttgagtagagatttaacttccaacaatgtcatgattgtcctagaagagacacatgctaaataaggtcctaacttatattagctggttttagattaggttcatgtctggacctaagctacagtagggatagttttagacgggggggggtgctctgcaacctatcattgtagtaatatgcacatgtccatgatgctattttttttaaaaaaatttttggttctttttctgtaaagggaactttagcatcatggtacttaaggtggaggcataaaataactgaagttaatatgac

SEQ ID NO: 11102 - DNA, 422 bp, Gossypium hirsutum
  Clone ID: LIB3828-034-Q6-K6-D12
ataacaatcaccggcggctccgcatggcaccgggggttaaacgcaggtctcattcatttccggtgcgtttaataatccctttatacgccatggacatgaagaaggtctccaccgccatcattgttgctgccgcctcaatgagcgccgtcatggccgcagatgcacctgctccttgcgggggcgcaggtggttctagccctagctcctctcccgctttcgccccagcagcaggcccggattccagcgtcgctgccgccactttgcctgttcttggatcattggttggggcttccattgtttctttgttttcttacatgctacatgtatgaaaaatcaacatgtgaacgaatattttattttattttttattttatttgtaagaaatatgtgatgaataatgaaaaattgaaatggagctttgg

SEQ ID NO: 11103 - DNA, 612 bp, Gossypium hirsutum
  Clone ID: LIB3828-034-Q6-K6-E11
cctgggtcgtcccagcgttcgggcaagaacataattagaacctggggggggggggggggcatagacaaaatcaaaacctcagtttgcttatttatttgtaaatagagccgcagagaatacattttttttaagcaaaaagaaaaagcagagctttgaatatctaaccaaaatggcagcagaggaaggtcaagtaatgggggggcgcacccttgattcatggaaggagcaacttcaaaagggaggccaatccaaaaagctggtggtggttgatttcactgcttcatggtgtggaccctgccgttttatttcaccctttctggctgaactggccaagaagtttcctaatgttatgtttcttaaggtggatgtggatgaactgaaggaggttgctgctgaatgggatgtggatgctatgccaactttcttgttcctgaaggaaggaaaggctgttgaaaaagtggttggtgcaaagaaagaagagcttcagcaggctgtgacaaaacatatggctactagtagtacttctgcttgatggtgataattattagtgctaccttatcatgtttttgaggaactttttatcatgtacctcatatttgatttcctggtacc

SEQ ID NO: 11104 - DNA, 598 bp, Gossypium hirsutum
  Clone ID: LIB3828-034-Q6-K6-E12
ctcaatctcaggcgcccttaggctgtgcattggggggggattttaatcgagtgatgaatgtgatcacctcattactctggccaaggataagttagagaaatcaatggtggcggataatgaatcaggtaaaagcgtcgaaagtgaagttcgaaccagctctggcatgtttcttcagagggcggaggatgaagtagtcgctgatattgaagctaggattgcagcatggaccttccttccagttgagaatggggagtccattcaaatactacactatgaacatggtcagaagtatgagccacatttcgattattttcatgacaaagctaatcaacagctcggtggtcaccgtattgctactgtactgatgtatttgtctgatgttgagagtggaggggaaactgtgtttccaaatgcagagggacgactttctcaggtgcaggatgaaagttggtcggcctgtgccaaaaatggatttgcagtgaaaccccgaaaaggtgatgcattactgttcttcagcctacatcctgatgcgacaactagatacagccagtttgcatggaagttgcccagtgattaagggtgagaaatggtcagcaac

SEQ ID NO: 11105 - DNA, 584 bp, Gossypium hirsutum
  Clone ID: LIB3828-034-Q6-K6-F10
gcgttcgcggccgcgtggggagcggccggggggggggggggggggtagtacaacaacttcaaagttctagcacaaatttttattttctctaaaacatcagtgtcctacaggaccacaagtatgattcttcaaagaaatgaaataacatatgactataatgctcaatgtcctcccatctcccggggggggggggaaccaatgtcaaaattgtctagaacacaagtacaaaactacctcgtttagtagtttatggctttagacatatctagctttattagcatattcagtgtttctctcttcctttttgggtttttatgaaataaatatgcatacatgggttgtgcatgcaaagaatgaccgaatttacctgtaagtacttcaaatgatacaaccatgtaagacatcatgcagctgcagactgtttgtgctcttcatcttcaagattcaaagcatggagcaactttggccatgattctcggactcctccaggaagatcaaattctaacagcttcccacgactgcggtagtaatcctctacaggtagagtcatcgcctggtatatgcggagccgttgcttaacaact

SEQ ID NO: 11106 - DNA, 600 bp, Gossypium hirsutum
  unsure (1)..(600): unsure at all n locations; Clone ID: LIB3828-034-Q6-K6-F11
ccgggtcgacccagcgtttgncatcccccgcatgtaccactcctggggggggctcgcttggtgaacacaaaaatcctcattgctggaagcaacacgaaccccggttacctcgatgatgcattgttccccactgaagtccgggtcgagaaattctcaccacattacttgtgacccgaacttggccatgttccgacttgggagggggggggagaagtccaataaccaagtgaagtacggtccatgaaactcacagtacagatccgtggaaatggcgaaatcgaccaacaaaaacttcaagtgacggtttactcaccaccatttgtgacccatgggatctccatgaatcagagattgattcaattgggaattgtggaatttaacaaaaatgttgctccaaatacaaacaacattgttcttcaagctcccatgaatggcaacattgcgccacctggttattacatgctcttcgtaaactataatggggtgccttgccgccaatcaatgtgggttcaatttttgccatagatatttcactgaaagcattgaatcgtcgaagtcgttatatgtaattattatattttttataaataaaaatatttg

SEQ ID NO: 11107 - DNA, 277 bp, Gossypium hirsutum
  unsure (1)..(277): unsure at all n locations; Clone ID: LIB3828-034-Q6-K6-F12
gcgtttcgacccagtccaccaagtagnagggtggtgccgtgggggggagaaataacgaggaagagttggttgtcgtcttattaattatacaaaataagaagtaatgatgttgcagaagggtttgctataaaatcctcttggacaaaaagagtaattatgaagaataaatagctcaaaacaatatggggggtgcgatatcctaaagttccttgaatcttgttttgtagccatatgtaattaatgcatgtgcatgctaatatatatgattttctttgtt

SEQ ID NO: 11108 - DNA, 580 bp, Gossypium hirsutum
  Clone ID: LIB3828-034-Q6-K6-G10
gcgttcgtgcaggttctaagggtcaacgagggaggagcttggcattttggtgtaaccggtgtcaggggggccgtcccttgagcggagcgcgccccaaggacgcacatggaggctgcagcgcctagggcttccttggctgaaggtgctcaagctgcgggccattctaatgagctagggttttttattggttattttgattttagtttctaatgggcccgggcagttttggcccattacacagagcatgcttaaaaggaaagtacagccgtcattcggttacagctacgtgtcaaaacacctcgttttgaaactaagccttccccctaaaacacagcgttttcattaaaaggactcccttccctaaaacgtgctgtttcctgactacataatgaactaagcaaattaacagaaataaacaaaaattaactactgttttagcccctctaattaatagactgatgagaaccctgttgaatcaagattatgcgatgataggcattgcctttcagtataaataggagtcttgttggttgggtgaattagttttgcggttttcatgcgtttcttgcaatccgatctg

SEQ ID NO: 11109 - DNA, 56 bp, Gossypium hirsutum
  Clone ID: LIB3828-034-Q6-K6-G11
gttgatgggccatgcttgtttcattgaccaattaagaatagaacattcaactgtcg

SEQ ID NO: 11110 - DNA, 580 bp, Gossypium hirsutum
  unsure (1)..(580): unsure at all n locations; Clone ID: LIB3828-034-Q6-K6-H10
gcgttcgctcatcaagttgaaacaggttgggggggggggggggcgaggaaaaaagccgtacaactcgcgctgaagtgctgagtaaaaccatggacagcaccagccttacttcgcganaaacttgaactggctgaggttttccttacaccttctgggaatgtgaagtaccaggtttgctgggggtgggggtctgagtaagttgttggtgaagtttggagtgacccaacctgccactgaggcttcttgagttagctttctttattttccattcatcgctttcccgaaactagtttatcgtcttgtttttagctattgttatattctctggaaaatggaattgagaactctgtcggatcgatatgttgcttgccttgaactagacttggactatattttatgatcttttgttgtgctgaggaaaatggtgttttcattttatatggataactgttctttgggtacaagtttgattggtatgtgacatgttttgaagaatatacatccagtatcatggtcctagaaaataatcgtgtactattgtcggattgggtatgtaatgctatatgtaattttgaacact

SEQ ID NO: 11111 - DNA, 585 bp, Gossypium hirsutum
  unsure (1)..(585): unsure at all n locations; Clone ID: LIB3828-034-Q6-K6-H11
gcgttcgcgnatgttactgtggttgagcgctgggggggggggggggccagaatcgtccccaatttcctcatggggatcatcacaggagcagggattcagggaatattcatgcttgtttctggctacttcaggctcccaaacgacatcccaaaacctgtgtggcgttacccaatgtcctacatgggggggcatttctgggctttacagggacaataccaaaatgatctgaagggcctgttgtttgataatcaaccaccggagcttcccaagattcctggcgaatacatccttgaaaacgtgttccaaatcgacgtcggacggtcgaaatggatcgatctaagtgtgatattcagcatgatcataatttaccgcatcatcttcttcttgatgataaagatcagcgaggatgttaccccttggatcagaggtttggtagccaggagaaggatgcaacaaaagaatggaacacaaaatacgatggttgcgccctctctctcgcaatctccttcgctgaggaattatgtcgcaaatcgagctaatggaaggggtaaaaggtagacaacagggtatgcatgcattcatgcg

SEQ ID NO: 11112 - DNA, 587 bp, Gossypium hirsutum
  unsure (1)..(587): unsure at all n locations; Clone ID: LIB3828-034-Q6-K6-H12
ggggacatgnaatcaggnatggnttatgatagagttgagacttttgcaacacttccaaggttgtgacgattgaggatcaaantgagaaatctgaggatttgaagccaacaaaggatgcagagtggaattcaagggaaagatatgttatatgaggagaaattaaaaccaaagaaggatgcggagctgaagcccatgaatgatatatttggtgacaatttaaatataataaaagacactgaactgaagccaaagacggatgcagagctgaagccaatgaatgatatttttggtgacaatttaaatataataaaagacactgaactgaagccaaagaataattctttcaatagcaaggagttaaagccggtgaaagatgaggaatcaaagccaatggaggatattctagagaccgaggaattgaagcctgtgaaggattacaaggtgaaaacattgaagactgatgaggatcttaagtttgccaaagatatggaggaaatgaaatcaaaattaagtgaccttgaatcaaagctaggcaaggctgaagcaaccatttcaaaactgacagaggagaggaggttaactgttca

SEQ ID NO: 11113 - DNA, 545 bp, Gossypium hirsutum
  unsure (1)..(545): unsure at all n locations; Clone ID: LIB3828-034-Q6-N6-A1
ggagctaagaattgcatcccaatttgttgngaaacatgataaagatgttataacaaatacaataccatttgttcctgaagcagcaaagaagccactctctgtcaatggtaatcattcttttaccaatcaaaagaaataaaatcaactgaccaaacattcaatcacttgaagacccgtcatcatcatgatcttcatgctccgtaacaactttctctatgaacctctttcgaactccttcgagaacagatgcattgctcccactttgaccatcattcagtacaggatctgattgacaaagaactaaggccacaccttcaggcgtgcatctgcggccaaaactatgcaagcctacataatttgctttcaccgctccgttgttatacaccaagagtgtgggaagattacgatctgggtagttaggaatgcaatctgtagatattatcttgacaaactttgttgcagggtatttaactgccaattcttccaaacactgcaagagcagcccacactctggaaatccttctttgtagagaatgacaacaacc

SEQ ID NO: 11114 - DNA, 561 bp, Gossypium hirsutum
  Clone ID: LIB3828-034-Q6-N6-A10
gtaaaactattctttcctctatatatctgtacacccattcttcttcaacttaatttctttgtattttaacttctacccaaaaaaggagaaagaaaaatccaacttaatcattgcagctctctcttaagatgagctggaggcaggaaagtttcatcagacaagccacaaatattgaaatcaacctcatcaatcctccatgtttcttcaatcttcctcttgtgattatgggacttgccatatctgtaaagcgtcgtcatggtattcccactatgggctactttaatgccatcgatttgcttgtagtcttgaaccactgattccacagtggtctcccaaaatactcggtctttcctgtttggtggtttcatcatcaccagctttctgtcctcgaatttcataagaagcccacttctttggctgaaatatccccagatggtgtgatggattatctccgtctgagccgagctttgttctttgaggacgtttgaagcagtttcaagcctgagtatgaaacaatcttcattgttaattgtcctctctcctacgcaaaccgcttctttg

SEQ ID NO: 11115 - DNA, 480 bp, Gossypium hirsutum
  Clone ID: LIB3828-034-Q6-N6-A11
atataacaaagaaaaacatattttttagcatgcacatgcattaattacatatggctacaaaacaagattcaagggaactttaggatattgcaaatcgaatattggtttgagctatttattcttcataattactctttttggccaaggaggattttatagcaaacccttctgcaacatcattacttcttattttggataattaataagacgacaaccaactcttcctcggtatttcatcttaatatgggatcatctctctactttgggggactgggttcactggccataacctcttctatccctttgctctttacaggttcagcctggcaacatcctgatgcgcacctgggctgaccacactcagcacaagtcccaccacaaccctgacgggaacactttccactttaacatcccgactgtcctggcattagtgggatttttgggacttgtgggatctgtgggacttgtgggatctggggg

SEQ ID NO: 11116 - DNA, 517 bp, Gossypium hirsutum
  Clone ID: LIB3828-034-Q6-N6-A12
gaaacaaaacataactcatttattgggcttgcagtgataataaaacaggctacagacggtatacgtttgattctaacccaccggagattaaacctaaaactacccttgtctggacagtatttcaatgccaactatttacatcacagtttacttactattgccctagcagctaagcgcaatcggactatggcggcattctgcatgggccagaaccgcttctggagcttgctcaccacatatgttacttaccttgcgttgagcacatgctcatgcttcaagggaccagatgtgctccctttaaacgttatcttattagtgatccaaaagtaagcccctgttttcggagatccgtatttttgataaccttccatctgggggacaatcattaccatgctcactcctctctagtacagcgctgactataccatggctattctggatcgatacccagaggcttactacctggccctctatcaatcatcccaatgatttggaacctttatacccataggggttc

SEQ ID NO: 11117 - DNA, 554 bp, Gossypium hirsutum
  Clone ID: LIB3828-034-Q6-N6-A2
aattatgaaacagctatcgaatcttctctatttcgatttctgagagttgctcggaggatatgatggtttgaaaatacgaaagacaggggagtatacagttaagagtgggtacagaatcctatctacagctcatttacaagaccatacatatatttcctctatgaataatgattacaaagatttctataaagccttatgggcactaaacattccaaaaaaaaataaaaatccattgctggagactgattaacgatctgctgccccattttggtaatctggcacgacggaagttgagtgtggatgttgcttgccctctgtgtaagacagatctggaggatacagctcatttggtatggtcttgtgatactcaatagcgtgtttgggcttcattacaagtaaaggttcctccactagaagcttcgttgtgctgtaagaggcgttttgttagaatgtttctgcaacagatgagcaaacagagatgaatcattactttgtcagtttggggactttggcatcgcagaaataagctaatccacaaaggggtcaaatttttt

SEQ ID NO: 11118 - DNA, 556 bp, Gossypium hirsutum
  Clone ID: LIB3828-034-Q6-N6-A3
caagcacaaaaggccagaaaaggctatcaaattttctcactatatcgatgaacaaaaagtgaaaatcgcaagcctcggagtagctcaaatcacaatggtaataaacttaccacaaatcaaataaaagaatctacctaacaaccctccttttttaaatcatattatagggttgttccacttgtgaagagtactaattcacatattttacatacatgacaaaaggcagctggtgctgaaagccgcgctattgactaggttttcttctcgcttgaggcacacacacctgtgatatttgtaatattgaacctggtgggatcaatggtgcatcttctataatcattttctaatcagtcaagattctaaggctgaactgaagattatgactttatcagagggctgagcccttcgccttcccaaccaagcttaagcatctgatccaccactttcaggctcaaagctgggtctgtgaaaattatcaactgtttatctgcagttgagactagaagatttgtgttatcctcgttcaaagcaagagctgtgatatcctgtccttctc

SEQ ID NO: 11119 - DNA, 548 bp, Gossypium hirsutum
  unsure (1)..(548): unsure at all n locations; Clone ID: LIB3828-034-Q6-N6-A4
aaaaaaaatactctagttaatgaaatggctagaatatgggagttcctttatacagaccatgtctngaaaaacaacaaaatcattgtataaaactctaattctgatccatgtctttgtacatgtaaagtactgacctgatctttagtacaatacctaaatctctgtaggtacaataactgctaaaccaaaatccaccaacaatcaactagagtgatactttacttatcactaacattcagacacgtgtagtgtatactataccgtcaaatatttgagaacggctgcacggatcttctccatgaaagccgctgcttgcttctggttatccatgtttgcatttgctatgttttcatctagaagtgtcaataaggatctatttagttcattgccttcaaccatctcgagcaaggttgcttttatatctttggatgacaaaatcttggtgaggcttttcttcgcagttataagttcggcttgcattttatcatatgcttcggtgccttcttgtaaggccttttgtaatgcctccagttcaatcaatctgtcct

SEQ ID NO: 11120 - DNA, 555 bp, Gossypium hirsutum
  Clone ID: LIB3828-034-Q6-N6-A5
gaactaacagttaataaatagataagcatcaataaacatttggactataatctacaacacagctctgaagatctagttaaaaaagatatatcacaaaacagctattagatttgatttcagctaatctaccacccatacacaaggtctagttgccgtgtgggtaggaacgggaaagaactcttttggtctttcaatctacttctttgcataagtaatcagcatctggttttgctgtatcttgaaaccttgtagtgcctgcattgcaactgttgattgcatctcgttttcatactccacaaaggcaatacctggttttgcttccaccattcgaacgtccttcaaaccagggtattggttgaagagcatttgcagcatcatcgcagttgcatcatgaggaagattctgaacaaatagaatgttatttggtggtgcaggtgcttctgggactataggtctagcacccaggtagggtatttgtgatagaggaggtgttgcaccgtaagcacccgcataagatggattcaaacctgctgcagcttgattaggatcaagttg

SEQ ID NO: 11121 - DNA, 561 bp, Gossypium hirsutum
  Clone ID: LIB3828-034-Q6-N6-A6
gttatcaaagaaaaagcactattaacatgcttaatatattattttaagtataatctttagatccttcacttatatttaacagaatagtaaaagatatcaaatccatggacaaaccaaaaggaccctaaattctaatctatataaaatccccacccccaaaatgctctaggtccggatgagtaccaccaccaggcctccgtggcggatttctgataaatcgattaggctcaaaaccaggaacaccaggtggaccatatggatcaaaacgagcaccaggaggaacacccggttgtgcgccagggaaaccgtgatctccaccaagtccaccgaaccaacgaggatcatttggtcctagaagcatgtcgccgccaccgaaatcacccctggtaggatacattccagcaccaggcccaggaaacaaatatctaccacctaccggattaacgggaggaataactacccctgacggatgaggctgagggcctgtcggttcatttattctaacaccatcaccgttcacattgcgccttgaccctgtttctaagctagatggattgcttg

SEQ ID NO: 11122 - DNA, 521 bp, Gossypium hirsutum
  Clone ID: LIB3828-034-Q6-N6-A8
attaaagctgaaacaggggatcaaaatgacagaaagacgaatgccagaaataggtcaacataaattttcactgacagccaatcatgatgtacaaatattctaccattcttggcttaatcctcaaacttatcgaggaggagatgaacaatttttgaacaggaaatggccggggtgcatcagccaaaaaaaaaaaggcagcttttttatgggtggaaaaatatcagaccatgtttgtcatacctacctgcaagatattcatgtgcgggacgctcatatttgcggccccggctcgacagtttctccttaggaatgcatagaggtagtttatgacgagtttcttgaggaaaaatgagttctttttggctctcacatctccatgtgccaggaaatatgtaaacccaaaatcgattgcttctcgcaatgctgaaagctcatattccaaacttggatctatttctgatgacatgatgctagaaggcaacgctgctgaagcagcttctgagttggatgtttctgcttct

SEQ ID NO: 11123 - DNA, 557 bp, Gossypium hirsutum
  unsure (1)..(557): unsure at all n locations; Clone ID: LIB3828-034-Q6-N6-A9
aggtaaatatgcaaattccattcaaagagaaaccatacatagatgcaaccggtaaacaaagactagaaattatttaaaaggccatcaaagggcacaatccttcacgtaaaaccagaaaacccacattaaggaagaccttaaggcttagaacccaccacgaagacgaagaacaaggtgaagagtggactccttttgaatattgtaatcagccaaagtccttccatcttccagctgtttcccagcaaaaatcaacctttgctgatctggtggaattccttctttgtcctgaatcttcgctttcacgttatcaatcgtatccgagctctccacttctaaagtaatggtcttaccggtcaaagtcttgacgaagatctgcatcccacctcgaagacgtagaaccagatgaagagtcgattccttctggatattgtaatcggctaaagtccgcccgtcctcgagttgctttccggcgaagatgagacgttgctggtctggcgggatgccttccttgtcttggattttggctttcacgttgtncgatcgtgtcagagctctcg

SEQ ID NO: 11124 - DNA, 111 bp, Gossypium hirsutum
  Clone ID: LIB3828-034-Q6-N6-B1
gaggcaaaaactttgtaggtatatccacgtaaaacgagtgtatcagagctgacaaatgttgatgcaggcatctaaaacgcaccaagtaggtaacaataagcaaactccttc

SEQ ID NO: 11125 - DNA, 565 bp, Gossypium hirsutum
  Clone ID: LIB3828-034-Q6-N6-B10
ttttttttttttttttttttttttttttttttttttttttttttttttttttttttttttttttttttttttttttttttttttttttttttttttttttttttttttttttttttttttttttttttttttttttttttttttttttttttttttttttttaaaaaaaaaaaaaaaaaaaaatttaaaaaaaaaaaaaaaaaaaaaaaaaaaaaaaaaggggaaaaaaaaaaaaaaaaaaaaaaaaaaaaaaaaaaaaaaaaaaaaaaaaaaaaaaaaaaaaaaaaaaaaaaaaaaaaggaaaaaaattttttaaaaaaaaaaaaaaaagaaaaaaaaaagaggtttaaaaaattttaaaaaaaagggggaaaaaaaatttaaaaaaaaaaaaaaaaaaaaacccccctcttgaaaaaaaaaaaaagaggagctgctaaaaaaaaaaaaaatttttttttagggggggaaaaaagattttaaataaaaaaaaaaaggttttaaattttgggaggaaaaaaaccttttaaaaaaaaaaaaaagggaaaaaaaaaggggggggggg

SEQ ID NO: 11126 - DNA, 553 bp, Gossypium hirsutum
  Clone ID: LIB3828-034-Q6-N6-B11
gataactaaatacaagcatatatctctaggataatttacacacattaattaacaccataaaacataatccaaattaagtgaaacaaagagttgagagacacatcagtgaagtagatccacaaaaggacaacatgtagaaggaaactatgaaaagatgcaaaataatgattagatcattttcaagctctggtcttgaaaggaatggccctgatgattatctggtggtaaattgcagcaagagcagctccaatgaagggtccaacccagaaaatccaatgatcatcccatgcatggtctttgttatatataatggcagctccaagactccttgctgggttaataccagttccagtgatgggaatggtggccaaatgaaccaagaacactgcaaaccctataggtaggggagccaaaataggaacgtgagagtctctggcatttctcttggcatcagtagcagagaaaacagtgtagacaagaacaaaagtgccaatgatttcagcaccaagaccatcacctttggtgtagccatggttcacaacattggctccac

SEQ ID NO: 11127 - DNA, 511 bp, Gossypium hirsutum
  Clone ID: LIB3828-034-Q6-N6-B12
aaaaataaaaatagtatatatatataatgactaagaccaagagctgcgggctacattttttgccttgatttgcagccgcttcagcccccttaacaacattttaccactagctggactttgtactaactattagcaccacctcaatcaccaacaaaataaaaggaaaacgccgacccaagattacggtgaaaaacaaaagttactacatatgcttcactttaatcactttgctaaactatctatcaccatttttttttttgtaaattccaccgaacaccccccaacccccatttttacttttacccaactacccactacttcaaaatttcctgggaaaataaaggaaatttgaagagctgggttaaaaaaggaaaataataagtgaagatattactaaaaaggggcaagtgtgagattcaaacgcggaaattctttcccgtgaaggtttggccgaattgccaatttgcaggtgccacgttcaacgaagtggaggttcgcctgtcactgcccg

SEQ ID NO: 11128 - DNA, 516 bp, Gossypium hirsutum
  Clone ID: LIB3828-034-Q6-N6-B2
caaagtgaagatcaaagcaattcgtacaacaggtatgaacaatcaaaatcttacaaaatggatctcacgatccatgtaattcatattcctacaataaaagcactaggctgtggtctttttctttttccttttacagtatatatatgatacataatgaattagacaagggatatataatgtcttggccataaaaatctcgaatgttacaggttataatggatgctgaggccggatcaagaactctgagatgagtcaacctggctccagagcttctcggcatatgttttatcttcttctttctcctctatgacataattagttgcttcgtttacttcctcgttgtcttcatctgatacctcttccgtcatattttctgtaatttctacttctgcaaggctctttgcttctcgttctgaaagttcagctaatgcctccctcatagcctgtgctgttgctggtctgtcttttggcccgtatttcggtgcaggcacaacaaatggtaaggcaacatcatcc

SEQ ID NO: 11129 - DNA, 422 bp, Gossypium hirsutum
  Clone ID: LIB3828-034-Q6-N6-B3
caagcacaatcaacaccagggaaaataaacaccaaccgatcgggtccaggggttactataccaaaatacatggggacattgaatgaccaaagagtgcgaaacaaaccctttaccaataaaccgtggtaacagaactgaaacaggactctgaatccaaactttgggaggcagatgtgatgggaacacagtaaaaagggggatggtcgcaaaaattaaaggggggggggagggaaaacttccaaaaccttattgtaaacagggttttaaaaaaacaaacggaaggggaactatttgctggggggacacccagaaacattcaccaaactaagggttgtcactcccatcacccaaaaaaagggatttttcttctttccccgggaatttaaagaaaaaccacttttgaacttgacctttccagattg

SEQ ID NO: 11130 - DNA, 568 bp, Gossypium hirsutum
  Clone ID: LIB3828-034-Q6-N6-B4
aaacaagactcaaaataatatggcagcatactccacacattccaaaaaccaacgagaaagttttatgtttatgctagcatgataaagtactgaattatcatgattatgacaggaaacgagccatccatgactcgaaacgagaccatgcgaggcggactgcagcttcatcctcatcagccattcccatgcccttcctccgctttataccatcgggggacctgttcatgaaggcatgtgcattgcctggataaatatgcacctcatatggagtttttgattctttcagtttttcctccaaagccttcgcagccgtcacatctgaaaacccaacaaagttatcaagttctccaaaatgagcttgaacaggtgctttggcctgggcagggtctgccagttcaggtgaaggaaccccataaaaggcagcaacagcatcaacttgaggaactaagacagaacttgcaatagagagagcaccccccatgcaaaatccggtcactccaaccttttttgaaccattagctttaagccaatcaaccgaagcacagatatcctttacagcaccttgcca

SEQ ID NO: 11131 - DNA, 548 bp, Gossypium hirsutum
  Clone ID: LIB3828-034-Q6-N6-B5
actaaatgaaacgactggctcctttcatgaataaacataaaagttattctcatatgccatttcaagatgcaggcatccgaaagacaccagcaaataggaaaaataaaaacaaaattcaaagatcaaatgctagcaagagggttcttaacaatcagaaacttgaaaacaacagcggagaggagatcaggaaagtggactagctttatttaaattcaggcttttctgggtatgtgcagccagacctttggatgataacgttggatgcatagcaaccagctcttacgcaatcctcaatggacttcccttgaaccaattgtgaaagaaagcctccaacaaaggcatcacctgcaccatttgtatcaacaagcttttccttgggtaacaaaataacagggaactgcttcactttcccatcctcggcaacaattactggatctgcaccctgagtaataacagtagtcctcttgtatgttccagaagctttcggccactgtgaaatcttcagggctatctctgcaacatcatcagtctcccagccatgaaccttt

SEQ ID NO: 11132 - DNA, 544 bp, Gossypium hirsutum
  Clone ID: LIB3828-034-Q6-N6-B6
gggtaaccagagctaagatgttgaagggtaaaactaaaatccggttacaagcaaatatgagacaaatttaaagtacaagataggaagatacaaaagcatcatagttgatttttcaagatcacctcatccatccccaatactcaaaactctagtgctcaaaaagtagaagagatgtgtgagatgatacatacaaagcacaaaggggttgaaaagataaatgtataactcagttaactgtgacttttccaaccatacctgcaccctggtgaggagaacagtagaaactgtaggttcctttctcagtcaaggtaacagcgtaagtctcgtctttggcattgagtagctcttcttcaggcatggagattttggatacgtcgacgccgcttgggatttcgtcctcatcgaacacaacattgtgtgggaatccggcattgttcttgaacacaatcttctcccctgggcttacgctgaattctttgggaatgaaagccagacccccatcgtcactgccgagcaagacttcaatggccatggcattgctggc

SEQ ID NO: 11133 - DNA, 569 bp, Gossypium hirsutum
  Clone ID: LIB3828-034-Q6-N6-B7
attctgtaacagttaaagccagatactccattacttgcatgttagctatgttaagaaccttccagaccattattgtacaaatcaaatgtttttttttattaaaggaagtacaaatcaaatgttggtatataattgtagccaaaacaatatctgtaaccacatccacaagccccacactgatttgcttttaaggccctctggcataaaagattcaccaatcaagtttcttgaggtgagctttccacctttaactatttaccactagcagacaactctatattataatcctctatccaacatcaattttccaactctttccacatccttcaccctctctgcatcgctatatatcttcatcaataactcaaaattatgttggttatctggctctagctcgaaaagtttttgacctgcaatatctcctatttgtatgtttccatgaaccgaacaggcatatagcattgctccccacacagttagccctgccttaaactccattctctccactatcatgttgaaagcctcatctatcagccctgcactctcgtaaagatttaccatgcaagcgt

SEQ ID NO: 11134 - DNA, 487 bp, Gossypium hirsutum
  Clone ID: LIB3828-034-Q6-N6-B8
aaataatagcaaaccaccagtatcattctaaaaaaaaaaagaacacaagtacattatagtcgaaattatgagtaaaaaaaagttttcaaataaaatttcatttattgagatgctaggttatcccagccagagatagtcaaatgaaaccaaacgggattctagcaggtggcaagaaatatgaaactccacacaatttagccattttcgcaatctcaactctgtcaaaaacacgtgtgacatcttctatcttcatgtactcgcaatagcatggtgcttgttccttcatcttttggcaacaaccagctgatggaggtggcttcttgtacgcattcaagcatgagctatactccaaggggttatcacatttcggcgctggcgctgcctctgcacccgaaaataacaccaccactagagtcaccacgcacaaaacaataagggaaaacctcttgatgtttttttaaataaaaatttagctagctgggcgcga

SEQ ID NO: 11135 - DNA, 549 bp, Gossypium hirsutum
  Clone ID: LIB3828-034-Q6-N6-B9
gcaaatcgaatattgttttgagctatttattcttcataattactctttttgtccaagaggattttatagcaaacccttctgcaacatcattacttcttattttgtataattaataagacgacaaccaactcttcctcgttatttcatcttaatatggtatcatctctctactttggtggactgggttcactgtccataacctcttctatccctttgctctttacagtttcagcctggcaacatcctgatgcgcacctgggctgaccacactcagcacaagtcccaccacaaccctgacggcaacactctccactctcacatcccgactgtcctggcattagtgggatttttgggacttgtgggatctgtgggacttgtgggatctgtgggattagtggaatttgtgggatttgtgggatctgtgggatttgtgggatttctggaattcttgggatttctggaatttgaggaaatggtagaacgaaaccaccaggattacaattaccggaacatccagaagaacaacatttatcaggaccaccttcaaaa

SEQ ID NO: 11136 - DNA, 540 bp, Gossypium hirsutum
  Clone ID: LIB3828-034-Q6-N6-C1
cgaaaatagatgctaaattattgaataaagttcaatatatgatgagtacgagtacatacatatatgtatatataagttaaaatcatatcgaggagtatgctatgcttgcatgattaaaactggatatgatcttgggatttaaaaatccttattcggtaagagggaagcccatttttttaagaacttgagcacatccagggacagctaccttttttttgaagccaagattgttagcctttctgctaggctcagctaagccatcatcgctagttaactccacttgtgccttttcaaatgcttccatcttctcgttacaatctgcccttggactgctcactgtgctcactgcgcaaatctgttcctcgtggtcgccttccaccgggatcttgtacacaccgtttgcgtctgtttccgcttcgtggctgtacgtaacagtttcgtccccttctttcctgcactccaacttcaccttggcacctggtatgggttcgctgagtttggtttcgaactctacgcggcaagtgtcgcaataaactttgc

SEQ ID NO: 11137 - DNA, 577 bp, Gossypium hirsutum
  unsure (1)..(577): unsure at all n locations; Clone ID: LIB3828-034-Q6-N6-C10
cacaaattacagttgattcttcaaaaaaaaaaattacacttttcaacatattcaagtaagataaaataatgtctcatatcactggatttggacacacagcatctcattccatgatgccatgagccatgaaactcattctcgtataatatagcaaagccaagtgccgtgatatacttgngaaaaaggaagagcagaattttatacaccaacagaatgagaatgttgagaaagaaaaaaagaataaaccactgaccacaagacaatacatacatacatacatacatacatacacacgtatatatatatttgctattcactaagatggagaatttaacatattggatgaaatgaaaattttcaacaagcatatccaaaaggatgtgtccttgccttttgtctttttaagagtcactccaactatcttcgtcatcatcttcatcacttccagccaatgcctggcgaattgcatttgctttctccaagattgctgctactcttaagttggttttaggaccctgaatactgggtctggtaaccacagcaggcttcaagttgaaggactttgttcgtatctgtt

SEQ ID NO: 11138 - DNA, 528 bp, Gossypium hirsutum
  Clone ID: LIB3828-034-Q6-N6-C11
agtagaataataatgattcaatttttaatataggctaatgccgagctttcagaaaagttggaagtgaaaatacatattatagttctgacgaaggggaaatgtcttcagcttcttggctaagctcattatagcctccagcttcttggttaagctcataatagcctatctcttgaagaacttgagtacattgaggaagagcaaccttcttcttaaacccaagattgttggcaaaccgaagctcaccgctaacgccgtcaagtgtggtgagaactaccctagatatcctccatatttctgagggatcattgcaatccgggttgggactcctcaccaaggcgacgtcgcagtctgattcctcataatcgccttccactgcaatgtgatagtctccatgttcgtcagtcactatttcttggctctggaaggtaagctgattgtctgtacgattcctgcattccaatttcactactgctccaccgatgggttcactgagtttggtctcaaactcaacacgacaagtgtcacagt

SEQ ID NO: 11139 - DNA, 108 bp, Gossypium hirsutum
  Clone ID: LIB3828-034-Q6-N6-C12
ataaaaagggagttgatactaaaatgtacaacccgggaaatagaaaaagagtaagttgggaaacaaagggccaagctcaaaaaaagcatgaggggaaaaaagagcaaa

SEQ ID NO: 11140 - DNA, 531 bp, Gossypium hirsutum
  Clone ID: LIB3828-034-Q6-N6-C2
gagccaaacgaaccgtttcggttgttttttatttatttaatttttactacaaggcggaaagtgattcaggccgccacgtcagctccgaaatatcagccgccggttcaaacaaccctcctaacgccacaaaatcaccggtattattactatggatattgttattggtatctgagtcaacgccgattccgaattcaaacggttcgtagatcggaatcgggaactcactccccatcatttccccaaatccaacgccgcctgaccctccaccttcatccacatcaaaggcggtctcaaatctctgctccacctcaaccgacggtaaactcggtggcaaacccagttcatcatccgaagcttcaaatagaaaccctaactccggcctcgactctccggaatccaatatcgtttccggtaaagccacctgttccggaaataagatctcttcttcgaaactcctgatgaccgaatcgagtccctgaatcgccggatctggtccactaaccggatctgaatcgtcgaggatgttcagca

SEQ ID NO: 11141 - DNA, 387 bp, Gossypium hirsutum
  unsure (1)..(387): unsure at all n locations; Clone ID: LIB3828-034-Q6-N6-C3
ggaatgatctagtttcgatgtaatattcttcatttctaccactaccaccagtttagattatttttggatactttctggggaaggggtttnccccgggaaatgaattttccggcgagtttgtgtattaccggcacatgggatttctctctttttttttacttttttttgggattattttttggggttaaaagctgtgaaattagagagaaaaatgagaatctgtcggtgatcctttaaaatcaattttatttggctactatgtaacccttctcttttcatgatctttgggtttaagtcatgaatgtatgcatggcatgaataaatcagacttatatttttcccagttaaaaaaaaaaaaaagggcgggcactcgcgcccacgcgtccg

SEQ ID NO: 11142 - DNA, 316 bp, Gossypium hirsutum
  Clone ID: LIB3828-034-Q6-N6-C5
agaagaacacaaaatatgagtgatattaatttgtagataaagatagtattacatagtcgcaaaaagcgacctagtacacaacgcacaactctaaaattaggataactcctctgctatccctacggatggattttaaacatccatttttattctgtagctatcattattttggcttccactagctgatgaacattccatgccaaaatttcacttgacgctgctgcagtcagtgctagggctgatcttgtaagggatgttgacaccgcacttgcctggtagtccgcttgcaaggccaaagttgatgccaggaatgccg

SEQ ID NO: 11143 - DNA, 568 bp, Gossypium hirsutum
  Clone ID: LIB3828-034-Q6-N6-C6
ccagcttcaaagtctaatcgtacaaatcatattataataatgttgttatcagataaaatgtgaaagaagatgcatacattgacaatacaataatcagctatccttggctccttcaggctttttttggttggaatacatacctacaaaggaatggcaaaaggagaaaagagaacagccctacacaccaatattgatttgtctgccatatatgtaatccaatatgcatttgctgttagtagtttgtattgaagaagtcaacgatggatacattctttgcggatccacccttcactctataaatcttgctatacacatctaggggattcttctcgtatatgtttctctacttttgtgcattagtatcacatcgaaacattaaaaagaaagccgtttgactggaatgtgaaaaagattagttcatacattatagttactcctttcctgagttctgacaatacttacctttatttcctaaagttaattagcttcatgcccatgataaaaccttggcattaagaataggataacttaaatggaagtcatgccactagtagaagtggcaagtagt

SEQ ID NO: 11144 - DNA, 320 bp, Gossypium hirsutum
  Clone ID: LIB3828-034-Q6-N6-C7
tttttttgtttttttgcgaaaaaaatgtgattatctattactaggagagaataagagaatagggtgggatcgcataaaagaaaatttattgacaatcattcagaaaagataccaaatgtactaggcttgggtatcaaatattgtacgtaaaaaagggagaacaaatgcatataaaaatagcatttttagcaaggacggccgattgtgcagcttagtggtccggcatactttgtgagctcggggaccatttgaccaggtttgaaaggcatcattttgtcggcgccaaattgcttgctggcacttggattacctgatggtgt

SEQ ID NO: 11145 - DNA, 222 bp, Gossypium hirsutum
  Clone ID: LIB3828-034-Q6-N6-C8
aataaaaaaagttatattaaaattttaaaataataaaaaataaaataaaaaattatattaatatataattcggaccgggccgggctcgggccaaaaaaccttacccgaggcccggcctgttttctaaacgggcctcgtttttttgcccaagcccatttttcgggcctatatttttatctaaaccctcctatttttcaggcagaccttcgagccgggccgggc

SEQ ID NO: 11146 - DNA, 529 bp, Gossypium hirsutum
  Clone ID: LIB3828-034-Q6-N6-C9
atcaatgagtgtgaccgatgccattaaccttaaaaaacacaatatcctcttaaaaacaacattagaatactaatatcaaacttaacaaaactccattctgcctgaagttccaagtaaaaacccataacataaaatttgacatgaatatcatcacatctagaaaagagatgttcctttccccttcttgtctccaccaatttcaaagtgcttgcacctcttgatcggatgctgtgagacatgcttgcaaccctggcattgcagccgtagcacaatcttcttggtggtctttgccttcttgtggaagactggtttggtctgaccaccataacctgattgtttgcgatcgtaacgtcgcttcccttgagcagccaaactatccttacccttcttatactgtgtaaccttgtgcaaagtgtgcttcctgcactccttgctcttgcaataagtcttcttcgtcttaggtacgttcaccatggttgcggctggtgagagatgacccaagctctttttcggtgtacccacgcgtccg

SEQ ID NO: 11147 - DNA, 574 bp, Gossypium hirsutum
  unsure (1)..(574): unsure at all n locations; Clone ID: LIB3828-034-Q6-N6-D1
ttttttttttttttttttttttttttttttttttttttttttttttttttttttttttttttttttttggggtttttttttttttttttttttttttttttttttttttttttttttttttttttttttttttttttttttttttttttttttttttttttttttttttttttttaaaaaaaaagaaatattaaaaaaattttaaaaaaaaaaaaaaaaaagttttttaaaaaaaaaaaaaaaaaaaaaaatttgggggaaaggggattttaaaaaaaaaggaggttgggggggggggaaaaaaaaaaaaaaaaaaaaggggggggaaaaaaaaaaaaaaaaaaaaaaggggggggggggaaaaaaaaagaaaaaaaggtttttggggggggggggaaaaaaaaaaggggtttataaaaaaaaaaattttaaaagggggaaaaaaaagagannnnnnnnnaaaaaaaaatatattgggggggggaaaaaaaaaaggggggggggaaaaaattttttttagtggggggggaaaaaaaaataaaaaaaaannnnaaaaaaagaaagggangggttt

SEQ ID NO: 11148 - DNA, 326 bp, Gossypium hirsutum
  Clone ID: LIB3828-034-Q6-N6-D11
catattaacttcagttattttatgcctccaccttaagtaccatgatgctaaagttccctttacagaaaaagaaccaaaaatttttttaaaaaaaatagcatcatggacatgtgcatattactacaatgataggttgcagaggagtcttaagcgtctaaaactatccctactgtagcttaggtccagacatgaacctaatctaaaaccagctaatataagttaggaccttatttagcatgggtcttttttaggacaatcatgacattgttggaagttaaaacatctactaaattgcaaggcctactcataaaattcggacccgtggg

SEQ ID NO: 11149 - DNA, 424 bp, Gossypium hirsutum
  Clone ID: LIB3828-034-Q6-N6-D12
ccaaagctccatttcaatttttcattattcatcacatatttcttacaaataaaataaaaaataaaataaaatattcgttcacatgttgatttttcatacatgtagcatgtaagaaaacaaagaaacaagggaagccccaaccaatgatccaagaacaggcaaaggggcggcagcgacgctggaatccgggcctgctgctggggcgaaagcgggagaggagctagggctagaaccacctgcggaaggggaaggagcaggtgcatctgcggccatgacggcgctcattgaggcggcagcaacaatgatggggggggagaccttcttcatgtccatggcgtataaagggattattaaacgcaccggaaatgaatgagacctgcgtttaataactggggaatggggatccgccggtgattgttattat

SEQ ID NO: 11150 - DNA, 526 bp, Gossypium hirsutum
  Clone ID: LIB3828-034-Q6-N6-D2
aaaagaaaccattattgtgatttaatataaaatttttaaaaaaatctagccgcaataaatttactatatttttaagtcttatttctcttcctaaacagtcccaccctcctaaaaaaagaaaaataaatcagaaaataaattagctgctgtagattacatcaatacgacattaatagtgttctaagattgaacggccttgccacaaaatagtgcatttggaggaatatcagtttcagtatacaagcttttctcgtcgttccagactctaagatagacttcttggcctaagtaccgctttgaccaggtttgcgacctcaagttccacattcctttgttgtccaatgagaccaaaattgaagtccagcttttaggataaacctgaacagtgttcctagatactgcatcaaccaggttgtacctttttcgtcttcttacgtcgggtgtccagttgccaccgccatatccggcaacaaagaagttataaccgtcaagatgccaagactggatgggtttttcagtgttctgg

SEQ ID NO: 11151 - DNA, 559 bp, Gossypium hirsutum
  Clone ID: LIB3828-034-Q6-N6-D3
gcataaacagatcaccttgctaaatacctgtggttgtgttattattggtgtattagacatccaccataattctcacattacgggcttttatttacctacatataagtctatgttctatgtcaaaacatggcttaggatattctataatataccactatgccttgtgagcgtaggagcttatacgctcacaacttacatcctcctatcgggcgagaaaacacacctggcgtactttctaattacgaacaggaggtaataggcgtgcatatgcgtataatgctctatcattgtgaactatagagttagctgggggtcattgaggacacttagtgtcttcacccctggagtattgatatggaccaattaaaatcctgtcaaatcttctaaagaatgacagtacttatctccgggaaaggcacttctccatgcttcggctcatggaatccacctatagaagtaagcttgtttcaggttggtcgagaaaccataacccgttatttgtctatcacgaattgcattccttcaacgctaatgagtttcactgcgtcttatttcttga

SEQ ID NO: 11152 - DNA, 548 bp, Gossypium hirsutum
  Clone ID: LIB3828-034-Q6-N6-D4
gaagagtaagaagcaaaaatatatattttaatatatatttcaaatccccctcatttgacacccaaatttactaattaaatttaccattttatggcaattgaggaaaaaaaaaggctccccaaagcaaagtgcagaaagattagaacgatgataaaaaaagaagagtttagaaagctcgctctttgacaatatcaatactcatttcacttgcatcggttgcttgcaattcaacttgaacaccatccaactctcttctgaatctatcttaggagctcgcatataacattttgctcctcacccttgatgtatcaggagaccatgcaatgaagaagattttgcttttctggacattttcgtcggtagtgaagtcgaaatcaaagacagcgtaacgacactcgttatgaggcaaacaagcactgaagtcgtcgtatttttctttaggtccaccgagtttttcaaccatgacctgttgaatgttctcttctattttgaaaacgatgaacctgtagcttcttttggcctttagttccaagaatcgcatcttgcat

SEQ ID NO: 11153 - DNA, 522 bp, Gossypium hirsutum
  Clone ID: LIB3828-034-Q6-N6-D5
aacaactcatatatatatttatatttatttatatagaaaaacaaagaattgcaactcttattacaacacgaaagctgtaaagacatcctcaacaaaaaaaaccaaaacaccaacttagaaaagagacactccgccaaagattaaccaaaaatatcattatcatttactgataatcacatgctatatacttgaaaaactattaagtgaactcgagtcagccatcatgtcttgcaaagaaacgtcaacacacattactcagaagaccacattcttgctgctgggaagatcttttgagtttgcccttgatcatcttggacgactttctgattaggctgccagtactatgatcactatcagaagcacaattccgaatatcaccaggagcaagcatgccagagaagaatttgatctctggctctttgcagctttcacgagatgggattttgcctgtgaagtggcagcctgggaattttcaatatgggtcccgatgtcatcaatcatagttccctgctcatgaactag

SEQ ID NO: 11154 - DNA, 536 bp, Gossypium hirsutum
  Clone ID: LIB3828-034-Q6-N6-D6
attcagatacaatcaacttattttatttttataattttaaatcaaatcaacctaaatggttgaatgctcttcttacatgttaatcattaacaacataacacactaatccagtggcattgtataagtttacttgtttatttatttcaaagacattattcattgggtatcatcatatttttttgttttgtaataataataacaaacacttaataataaataaacaacgcgcgcgctcacacacatatatatatatccctctaggtcttaacacgggctgattggcctcgaatatcaaagggggtgcagccaaattggcaactggtgttttcgaaaaagcacttagtgccgcatccgatcgagggagatgtcacacagcctgcaaggcagccgagataaccgcatttcatggagcaggacattgtactctttccgcaatagccccccagttttgaggccaacgcatttgggggcttcacttgagctgatgccgccttcgccaatattcctatgcagatactcaacaacagcaatcgtgc

SEQ ID NO: 11155 - DNA, 277 bp, Gossypium hirsutum
  Clone ID: LIB3828-034-Q6-N6-D7
gggaaaaaacgataacggtaaaaattaaagggggccaaaaaaaatgggggggccaaagggaaaaaggggtttccctcaaaaaccaaaaggggccttaagcccggttttaaaaaaagggggaaaccaaggggaaaggctgctcccccaacccggttttggctgccccccctgggatgcgcctttagggttaattcggggttaaagggtttctggcaaaaactgggcggggcccctgggaccggaaaaacccaccggggggcgagaggttcggaccccg

SEQ ID NO: 11156 - DNA, 332 bp, Gossypium hirsutum
  Clone ID: LIB3828-034-Q6-N6-D8
gggggggggtttttaaaaaaaaaaaattttttttttttaaaaagaggggggggagataaaaataataaaaaaaaaacttttttgggggggggggttttaaaaaaagggtggtttttttaaatgggaaaatttaaaataaaaatagcccggggggggaaaagaaaaaagagggggggggggccccaaaaaggggaaaatttcggccgattttttttaaggggggtgggcaaaaacaaaaaaaaaaaagggggggggggtttaaaaaaaaaaaaagggggggggaaaaaaatttaactttttaaggagaaaaaagtattgggggggggtttttt

SEQ ID NO: 11157 - DNA, 464 bp, Gossypium hirsutum
  Clone ID: LIB3828-034-Q6-N6-D9
aaaataattataacatgtccattatttgtacataaaatatcatagttaaaacaaacacaagaatacacaaattaccgtatcattagttaacataaacaatttcatatcagctctccacctctggttttgaaaaaatatatatataatttttgtacttgtaaattttggttttattagattttaccttaacactgatcagctaaagacaacaaaccaagagcagatgaaaataatcataaaccaaaggaaagaatcggcatatccctgtatggatctctcgctgggcaccattttctttgcaggttgacattaaatacatatctgaatacctatacagagcacgcattgtgggcaatacgtaccttcgccgtattaaaaagaggtacaataaacaaatcaccaatctgcgatcctcaatccctaagaccctggccttgaagacttgccaaaacatgatatgatgg

SEQ ID NO: 11158 - DNA, 515 bp, Gossypium hirsutum
  Clone ID: LIB3828-034-Q6-N6-E1
accctcctccccctttttaagttttttttttttttttttttttttttttttttttttttttttttttttttttttttttttttttttttttttttttttttttttttccccaaaaaaaaaaaacaaaaaaaaaaaaaaaaagcccccccaaggggggaaaaaagggaaaaaaaaaggcaaacccaaaaaagagggaaccccaaaaagggaaaaaaaagcccaatttttttccccttttagcccccggggggaaaaaaaaaaaaaaaaaaagggggggggggggaaaccggaaaaaaccccaaaaaaaaaggggggggggggaaaggggaaaaaaaacccaagggggggggggaaaaaaaaaatttgggggggggggggggaaaaaaaaaagggccgggggagggggcccggggggggggaaaaaaaccccggggggggaaaaaaaaaaggggggggggggggagaaaccacccggggggggggggggaggaaaaaaaaaaagggggggggggggg

SEQ ID NO: 11159 - DNA, 512 bp, Gossypium hirsutum
  Clone ID: LIB3828-034-Q6-N6-E11
gaggaaataaaatccctcaatataaaggaataaactgagggtttaacataaagatgtttagctaggtcccaggaaatcaaatatgaggtacatgataaaaagttcctcaaaaacatgataagggagcactaataattatcaccatcaagcagaagtcctactagtagccatatgttttgtcacagcctgctgaagctcttttttttttgcaccaaccactttttcaacagcctttccttccttcaggaacaagaaagttggcatagcatccacatcccattcagcagcaacctccttcagttcatccacatccaccttaagaaacataacattaggaaactttttggccagttcagccagaaagggtgaaataaaacggcagggtccacaccatgaagcagtgaaatcaaccaccaccagctttttggattggcctcccttttgaagttgctccttccatgaatcaagggtggggcaactgattacttgaccttcctctgctgccattttta

SEQ ID NO: 11160 - DNA, 405 bp, Gossypium hirsutum
  Clone ID: LIB3828-034-Q6-N6-E12
aggggggaaaaaaaaaaacctccccctaaaaaaaaaaaagaaaaaaaggggggggggaaaaaattttccaaccaaaatttttaaaaaaaggggcccggggggacccaaaattaaaaacccttaaaaggggggggggaaaaaaaacccggtgttttccccaaaccgggggggaaaaagggcccccttttttttttttttgaaaaaaaaaaaaagggcccccttaaggggtaaaaaaaaaaaaaaaaacgggggggaaaaaaagggctaaaaaaaaaaaaagggaaaagtttttttttgggaaaaaaacacttttggggaaaaaaaaaaccggtttggaaaaaaacccgggggtgaaaaaaaaaccctttaagggggaaaaaaccccttttttggggcccccaaaaa

SEQ ID NO: 11161 - DNA, 540 bp, Gossypium hirsutum
  unsure (1)..(540): unsure at all n locations; Clone ID: LIB3828-034-Q6-N6-E2
aaaataatacgtgtcatgtttttattgaagaggggcacatttttttaggggtaaaatgacatatttgataattaagaggctttaaaataccaanatgggaaaaccgatatagcttggggtacaattttgtagctgacattaagtttattacgtatgcaggttcttcaaaaactgaaggggacgcttagtcggagccatggaggctttgcacattgtttaccatggaacatcccctaacaacattcagtaagcttgctccggaccaaaaattattctgacattcgaaaactttgagtctcttagctgcatttttgtaggtggaatacatggcaaactcgagttgtgagactccctcgaatttctttcagggaaacagatcctgaatgtcaaggatatcagcaagcacgccggctgcagtcgtatcattcccggctcccgcgccttgaataactaagggttgttcactatagcatcgactatagatttctagcacattgtcacttcccctcaatcttcccaaagccaaattcttaggaagtt

SEQ ID NO: 11162 - DNA, 432 bp, Gossypium hirsutum
  Clone ID: LIB3828-034-Q6-N6-E3
ggaaacctcaaaaatccaaatttttaaattagggaaaataaagggctttttaaaaaaaaaaggggaaaagtaaaaaaaaaaggatttggttttttccaaaacccaaattccaaagggaaaaggggggactaaaaaaaaaaaaatcggttttttttcccgggttaaaacttgggggaaccaaaaaaaaaaagggccaaaatttgggaaaaaccttccaagggggaagggggggggccaaaaaagggggaaagggccaacccccaaaaaggggggaaaaaaaaggggtaattccctttggaacctggggtaaaaaattaaaaaaaggggggggggaaacccaaagggtttaaaattttcccttggggccggggggtaaaaaagggggaacggtttttttggaggccccaacttttaaaaattggggggggcccc

SEQ ID NO: 11163 - DNA, 557 bp, Gossypium hirsutum
  Clone ID: LIB3828-034-Q6-N6-E4
gtcctcaacatacctcccatcaaatataataaatatccaaaatcatgtaattataataatccaaatccataaattgccttaaactgaaatttcagttcattaatgacggaaactaatgaaaaagcctatcttattccatggttagttcttaaagaaccaccaaaaccactaaccatttaaaacaaaaataaaatgaagcttaaaacttcagacatgaaccaccgtggctgtctttttaattttagagttgtccgcaatcggcaataacaactggcttagaagttcttccaccactagacccaactttctcaatgtctcgaaccacatccattccttcaacaacttgtccaaacaccacgtgcttcccatcgagccactcagtcttagtcgtgcaaatgaagaactgcgacccgttggttcccggtccggcgttcgccatcgagaggatccccggtccggtgtgtttcttgatgaagttctcgtcctcgaacttggctccgtatatcgattcacctccggtgccatttccggcggtgaaatcgccggacgcgtgggtc

SEQ ID NO: 11164 - DNA, 427 bp, Gossypium hirsutum
  Clone ID: LIB3828-034-Q6-N6-E5
gaaacaaaactgaatgcttaagcatgactgcactctatacctacaataagaagagatgttcaccccaggaatgaagacaatccatgcacacgtaacaaaacccagaatgcctttgtgggagaaaccctaattccaccaggtcatgatttgtttgcagcagtaaattggcgggcaggactaattgtcaacttcaaagcctatgcttaaaccctaaataccccgctctcacttctatgtatgcccctggaaacctcactccccttatgacgaacataacgcttataaaggctgtgaggcgcaccaggcgctggaccaaagtgtttaactggtggacgagcggaggtcgaacctcgcagtatcacctgcaagttcatgcaaggtaattaaaataaagacagacccctgtgttttatttgacacgacatga

SEQ ID NO: 11165 - DNA, 371 bp, Gossypium hirsutum
  Clone ID: LIB3828-034-Q6-N6-E6
caaataacaacttgtgaaaacaaaacgtgaacaatgattcgtattacatatagtggctctgacaattcaatgcttgttgtgaaagatctaaggtaaaattcgaacccacattgatcgacggcaaggtactccattgtagttcacaaagagcatgtaataaccaggtggtgcaatgttgctattaacgggagcttgaagaacaatgttgtttgtatttatggcaacatttttgttaaattccacaattcccaattgaatcaatctttgattcatagcaaccccgtgcgtcacaaatggcggtgagtaaatcgtcacttgaagcttttgttggtcaatttcgacatttccacggatttgcactgtaaatttct

SEQ ID NO: 11166 - DNA, 549 bp, Gossypium hirsutum
  Clone ID: LIB3828-034-Q6-N6-E7
aaaagcaaaataacagtttattcaactgcaaattcaagaggttcgctaagagggggggggggtgctgctagacaaaataaaaaccagggtcacagcatcccattcatgcatacatacataatacataatatgcataattataggtaccaacttttccataattgtagtacatgttaccgtcacaatctaaacattaaattccacacaccattagtatattattgcaatgaactctgtaacaaaacaaaagaagctcaaggggaccatccctgttgatcttttgctttaatcctcatcatcatcatcatcatcaccaccgtcttccctattcttcttaaggcgggttgtgccaccctccttgctgatgggtaatttcatagctccaaacggagtgtcaacgttgatgtgacctttcatagagtaacctgttccttttcccctaatcatgtcccacagagcagatccgaaatccttaggcctgaaagagataggaatctcaatataactgattccgtttttgcctatctttgcagatttttcaagttctgc

SEQ ID NO: 11167 - DNA, 543 bp, Gossypium hirsutum
  unsure (1)..(543): unsure at all n locations; Clone ID: LIB3828-034-Q6-N6-E8
aaggggngaaaaaaatgctgctctattatttctattttaaaaaacaaaaaaaaagttgaaaaaaatgtacaaatgttctaagtatatgtaaattaagagtaaaaagaactttatctagttgaaatgaccaaaaataaaacttgcaagcaaagctagtaatatggcataaatattgtggacttcatggttgatggagatacaagcagagcaggcatccacatatatcaacaacaagatgtcaagcggcttttgcttggtttggcccaggttccgtcttcgaataacgaccacgaccgcctccaccacggacacggccacctcttcccctctctcggccacgcccacgaacttgggtaagggctgcatctgattcagaatagacgccatagtatcctccaccaccataggcaccgcctcgtcctcgaccccggaaagaacgccctcttccacgtcctctacctttgcctcctaaaccatcaccattatattcccctttagccctaatccttcctcgaccacctcgtcctcttcctcgtgtctttg

SEQ ID NO: 11168 - DNA, 570 bp, Gossypium hirsutum
  Clone ID: LIB3828-034-Q6-N6-E9
gtgaaattaaatagataatcaatctctgcaagtagcaagacactaatttcatagaacaaacagagcaatttacacaatataaatggacttaagcaggtttggccaacagcagacaactttagaaacaaaataagccatccttgaacaacataaattaggacatacaatgctgcaaacaacctcagcaacctttgcaaacctaccgaagctgctggatatcggagaagacaaaagacgacatcatcatcactcataatgtagaagtttccagtttccatgcctttgatcatcaaataattcagtctcagtcgtccttatttatgcaatatgaggtcgagaactttatatactagtgtccatttaaaaccattgccatacttaatgctccaccgcaattgactcttgttccaagtctccaatcactggccctagatctaagtcaggctgacttccacctgaattagctccggaaaatgcttccagttgttgaattggagatgattcttcatttgtcaaataagatgatgcggtactctcctcccttgttgctttagatgttgcttttggttt

SEQ ID NO: 11169 - DNA, 551 bp, Gossypium hirsutum
  Clone ID: LIB3828-034-Q6-N6-F1
caaaccaacataacagattctgctttcctcgttaaaaacaagtggcattattatgagaaaaatctgaaagcattgcgatgcattagaagagaaaaaagaggcaaacaacttaattgagcaacataaaatataattagatgctaaagacaaaattcctggtgactggttacatcaactctaccatcaaatgttcttttatcaaagtttcagacttaacttctttcgattcccttcaaaaaaccatattacctaaggcttcacccattttataactcatccttgagaccggaagactctgcatctgcaccatccttacctgcttttgtctcgggctctgtctcagtttcttccacatcatcttcctcttcaattgttgcatccggactgatatttaggctagatttaactgagctgtagatgcgcgaggcgaaatccttggggtcggataaaatgaagccactctccattagagctgtctggtaaataagctgagccgtttgcttcacgccctcatcctcggggtccttaacaactctctcacgaagctcctt

SEQ ID NO: 11170 - DNA, 454 bp, Gossypium hirsutum
  Clone ID: LIB3828-034-Q6-N6-F11
ttttttttttttttttttttttttttttttttttttttttttttttttggaccaaggggattcaaatatttttatttataaaaaaataataattacatataacgacttcgacgattcaatgctttcagggaaatatttatggcaaaaattgaacccacattggttggggggaagggaccccattatagtttacgaagagcatgtaataaccagggggggcaatggtgccattcatgggagcttgaaaaacaatgttgtttgtatttggagcaacatttttgttaaattccacaattcccaattgaatcaatctctgattcatggggaacccatggggcacaaaagggggggagaaaaccggcacttgaaggttttgttgggcgatttccccatttccacggatctgtactgtgagtttttggccgcacttcacttgggtattggacttctcgac

SEQ ID NO: 11171 - DNA, 270 bp, Gossypium hirsutum
  Clone ID: LIB3828-034-Q6-N6-F12
aacaaaaaaaacatatttattagcatgcacatgcattaattacatatggctacaaaacaagaattcaaggaactttaggatattgcaaatcgaatattgttttgagctatttattcttcataattactctttttgtccaagaggattttatagcaaacccttctgcaacatcattacttcttattttggataattaataagacgacaaccaactcttcctcgttatttcatcttaatatgggatcatctctctactttgggggactgggt

SEQ ID NO: 11172 - DNA, 492 bp, Gossypium hirsutum
  Clone ID: LIB3828-034-Q6-N6-F2
ataaaaggaatagttaaaagagaattggtgtatgtactgtaaacatttgcttagctatgtctttgcagtgctcagtcaaatggaacaatctttttttttccaatccaatatcttctgacttctggtaccttacaaggatgctatctacacataattgtcctctctacttaagctgattgcatgtggatgctcagatttgaccttgtatgtacagaatctgtggcggtggtggtgccttctttagtaggcagattgcctgaatgcggttcaggttggttcagtttccggacaaactcaatgaacaaaggaaaatgctccggtgcgaagaattgagctccaatcctctggaaaatgaatgagtcattaagattctcactcaacatgttcttcttgatctgcttaagaccatcaggagctccgacagtcgagttctggccggaaattctgaccccgtgcttattgcaagctgttccaatttcagcaagtaataat

SEQ ID NO: 11173 - DNA, 472 bp, Gossypium hirsutum
  Clone ID: LIB3828-034-Q6-N6-F3
gggaaaagcagttttataaaaaagcatgcaacaaccaaaacaaggctaaacccttccaaatccaaacccgggaaaaaacaaaaaagagaaagaaaccgccccaacggggaaattaaagggggccaaactgaaagatctcaaaaggcatggaagacagagatagagcttcccaaccccccatttttattgggggaaaaaccaaaaaaagggggtccgggcggggcccaactagaaccttatcttgaggggggggacgagcttaaaaggggcatcgaaggcgtcttcattttgggggggatcttcgcaacgttggctatcgccaggctgagcacccccatgggtgcccccaagaacgttttgactgggggtggtggctttaactaaaaaaaacacccccccagcgtgaggaagcaaaaaacgatcattcgtcgggatacggccattgggggtggcctttgagaagtatgcccaa

SEQ ID NO: 11174 - DNA, 504 bp, Gossypium hirsutum
  Clone ID: LIB3828-034-Q6-N6-F4
aaactaatcacttatcgaggagacacctgtttataataggcccattttgcccgggcccatttacaaaacacctaacccaattaaacaaataccccaaaaccctttacataaaattaaaacccaattctaataaactcattttctaaccaaatactccaaaattttagccccaattacataacagatgcccaaattctaagtccccaaacccaataagaattagccctaaaactcgaggcctaatacacccaaaattctcagcagcactaggagcttctggaatgtaccagaataggccaaaaattggaactcccacgagtgattccttccgcgcacacctccactgtacggccaaataatattttcatggacgtggcatggatctcttcatggtggtatactgtcgattgccaaacaaaatggtgaatctggcagatgtaaagaaccctagcaattttaattttgggattgtggttctttgtttggaagatgggcagcatttgg

SEQ ID NO: 11175 - DNA, 519 bp, Gossypium hirsutum
  Clone ID: LIB3828-034-Q6-N6-F5
gaaaattaaaattgttgatctgctttggctttatcaagagcttacgagttaacagactgaggttacaccacactagtaggatgttgtctaatattgttgagttcacaaagaacactttgacacccaacagatagcactacggaaccatgacaagctgatagtttgcctatagtttaatttaaccccatagcctatagcatataggtcactataggtcaatgatgggaagcatgctgcgcattgagcatccacggaagttctaatcttgatcctctaaatgttaatacaattactgtataatcattcagctttatgctttatagatatagttgcaggagaataccgcggcccggttgtgcatctgccaatgcatttgagaacctcgtcgatcagaatgactggaaaagcaactgccaataccagcaaccattcgttgtggctgaggggaacaatcccaaacacttgagcaaggaatggcacgtagagaatcaagaaatggagtccaaatgaaattgacat

SEQ ID NO: 11176 - DNA, 547 bp, Gossypium hirsutum
  Clone ID: LIB3828-034-Q6-N6-F6
gatgttaaaaataaagttccaatgacattgaacaaaacttattgtaacaaataacaattcagtaaatagaaaaagcctatgaagccaaaccgaaaaaacacaatgctagcaaagtattagaatccttgcaaccacaaaaaaaaaaacaaaaaaaaacaaaagcttagataaatgttccaaactcaaccctacaataccaaaattccagtcactcaagaggcatggttatcattcaaagatagtgaagccaattggtctgcaggattgttgacctgtggctttgcagcaacactcttcaacacctttaaggcctctgctactttagctttcaaagcttcgggtgactcaatgacatgcaaaacttcagtctggtccatctctagaagcatgccggtaaccttggctgctgcatcacactcgagatgttccacaagggggtataggctttcaccaagcatcgtcctttgttgctcaggggttgcatttgcaagagcagtagccaaaggttgaagaggcataggctgtccagtgccagcatcttgcaatg

SEQ ID NO: 11177 - DNA, 425 bp, Gossypium hirsutum
  Clone ID: LIB3828-034-Q6-N6-F7
ggggggggggggaaaaaaattaaaaggaggaaaaattttaaaggggctgggggggaaagggatttttttttaaaaaaaaaaaagggggggaaaaaaaaaaaaaaaaagggggggcccctttttttttttttttaaaaaaaacccctgggggggaaaaaaaaaaaaaaaaattgggaaacccaagggggttaaaaaccccccgggaaaaaaggggggttaaaaacccgggggcaaaaaaaaaaaaccaaaaaaaaaaaagggggaaaaaaaaaaaaattgggaaaaatttgggtgggccccccccccggggaaaaaaaacggggggaaaaattttttaaaatttccccaaaaagggcaaaagggggaaaaaatggggggaaaaaaaaaaggggcccccccttttttgtaaaaaaaaaaaacctccc

SEQ ID NO: 11178 - DNA, 496 bp, Gossypium hirsutum
  unsure (1)..(496): unsure at all n locations; Clone ID: LIB3828-034-Q6-N6-F8
agcacaaatgatgttctttcattaatagaaaaaaattgaatataatagtagtaaagattttaaaaaataaaaatcacatgttntctttattcttctgctgtataccagaatcatggctacaatagtaaccatttgctgaaattttaatgtaaccaaaccaagttaggcctttggtttaagaggcttgacaatctcccaagtgaaatctttgtcatcacgtccaaaatgaccataagcagcagtcttttggtacctaaatttgcctcccctcttcaaatcaagattgatagagatcatccctggcctgaagtcaaagatctccttaatcaattgcaatatatccttgtctgggatcttgcctgtcttgtatgtgtcaacaaataccgacaatggttcaggcacaccgattgcataggatacttgcacaatacagcggcgtgcaagccctgaggccacaacactctttgctgcttgcctaacaatgtaggcaccacta

SEQ ID NO: 11179 - DNA, 561 bp, Gossypium hirsutum
  Clone ID: LIB3828-034-Q6-N6-F9
gaacaaaattgaaaagaaactaaagctggctttaaactcacctgacaatccaaaaacaaaaactaatgtctttaacaagtcaaataccaaaacatagtcctcaaagaaagcaaccttacttcttgtcttccttctcagcctcagcagctttcttcaatcgggcaccaatgtgtcgttcatttgtacgttccacacgaagcttgttataggccttgaatgacttcatctcctctgtgaccttcacaagctccacggaaggcttctcacgagaaataggcatgtatgatccctggacttgggttgcagttgcaagctcctcagcaattgaatcaccagccttaaacttgcgagctcgtcttgggaagacaacaagtttggccttgtaagttttaagcctctgaacattggcttgaagaccttcaagggacttgttcttacgacggtgatcgactgcaataccaatggtaggtgcaagtttctttgaaataccagcagccttaagctcttcaagagtgaaacccttgccagctctcaacttcatgttgtacttcaaagtttggc

SEQ ID NO: 11180 - DNA, 439 bp, Gossypium hirsutum
  Clone ID: LIB3828-034-Q6-N6-G1
aaggtgacgatagctgaggctatgcattgattatcaccaaacaggattacaggggctacagaggcgaaagccatttaacaagggctaggcaaacataccttcatatatcctacatacaggagggcaaaacacccaaaggggatgatgtttcaaccaccatcacatcatcaattataaccctactttttttttcaactttcatataacttaaaaacgtttcagtcgttttggtaacaaccaaaagcctatacaaaacatgggggctcaacaaaaaaacatggaattgcaaacgttttccttcaacctcggcagctgagggacaaaaatggctccgggtgcaataactccaccatggctcgaggatgtctctgaggtattttcaaacttcatgaatgtacccacctgtgaggctgccaaatgggcatagcaaataggagca

SEQ ID NO: 11181 - DNA, 559 bp, Gossypium hirsutum
  Clone ID: LIB3828-034-Q6-N6-G10
ataaaaattgaggctaaatttattgatttttttaaatttaaggtcaaattgacaaaaaaaaatgtaaacatcgataactaaatttgttattataccaatatctaaaatcggggccatcagatcggattgcaagaaacgcatgaaaaccgcaaaactaattcacccaaccaacaagactcctatttatactgaaaggcaatgcctatcatcgcataatcttgattcaacagggttctcatcagtctattaattagaggggctaaaacagtagttaatttttgtttatttctgttaatttgcttagttcattatgtagtcaggaaacagcacgttttagggaagggagtccttttaatgaaaacgctgtgttttagggggaaggcttagtttcaaaacgaggtgttttgacacgtagctgtaaccgaatgacggctgtactttccttttaagcatgctctgtgtaatgggccaaaactgcccgggcccattagaaactaaaatcaaaataaaaaataaaaaaccctagctcattagaatggcccgcagcttgagcaccttc

SEQ ID NO: 11182 - DNA, 520 bp, Gossypium hirsutum
  Clone ID: LIB3828-034-Q6-N6-G11
aaaactgaaagtgattgataaaaggttgaaaaggcatgcttgaaatacatgaataaacactcaaaacaatgaaacaaaacatgtcaaaagtattattaaagtaaaaatacatatatatatatatatatatatatataaattgcctaattaagctttcaattttctcaccgaggcatgatcacggccttgagagggttcttcatcacaactgtgaaagaatatgtctcggtcaaatccggtggggcacccggaactggaacccacttgaatgcttgaaccatctttcctatcaacaagtttatgtgcaaaatgcctaggttccaagccggacaaatccgtctccctgccccaaacggcaccattttcaccgcacgagtcccggtgacgtcgacaccgaccccgtcaccgtgcaagaacctctcgggtcggaactcacctggatccgaccatatatctggattctcagtgatccatgcagtgtagaactcgacgtgaacccctgcggggattgtgtagcccc

SEQ ID NO: 11183 - DNA, 540 bp, Gossypium hirsutum
  Clone ID: LIB3828-034-Q6-N6-G12
ccacgaacaagggcataacagtagcccaccaagcttgcaagtgctttcaaaattacacaggaaaacacaatcttattacatcacaacttctaggaataaaatcgaaatcctctaatcgaaaaggacaaaatacaagtacatcaactttataaacagggcgtggataagaaaaatggatactaggacgaaggttatatttacagctctactccggcacctaatggatccaaaggaatgacacttacggggaattcagatcttggtttggctagggagtaagtaatacatgagaaaatgagccggatgctcaaccacagcagccactccaacctgattggtcataactttttgtcttgtgggaattagcttgatattccagcagcagatggatccaaaggaatgacactttcagggaaatctgttcttggtccagctagggagtaatatgccagtatatgagccggatgctcaatcacaggatcctctccaactattcggggaattagctcaatattccaaaatggacgagccatagctaac

SEQ ID NO: 11184 - DNA, 537 bp, Gossypium hirsutum
  unsure (1)..(537): unsure at all n locations; Clone ID: LIB3828-034-Q6-N6-G2
aggcccttggataagccatatctacattcccacaatttgtagtccaaaaaaaaaaaaaaaaaaaaaaaaaaaaaaaaaaaaaaaaaaaaaaaaaaaaaaaaaaaaaaaaaaaaaaaaaaaaaaaaaaaaaggggcgggccccccttntttttttttttggggggcctttttattaaaaaaaaaaaaaattttcttttaaaaaaaagggtttggacccatttgctttttaaggccccccttttgggaaaaaaaacaagcccaaaaaaggctttccccccccttgggttagcccccaagttttgctttaaatggggcccaaaaacaggggattttgggaagggaaaccccttttttttttaagggttgaaccccaccttttttgaaactaaaaaccccctggggtttttgaaaacagggttttttaccccaacgtatttagaatgtccaaatcgaagggggttaaccctgcccaaattttaagtggtgggaatttttagaggggaaaagaaaccttggccccccccatccaaaaatttt

SEQ ID NO: 11185 - DNA, 523 bp, Gossypium hirsutum
  Clone ID: LIB3828-034-Q6-N6-G3
gcaattcattaccgaagaacaatgctttcatataacaccaaccagtatcttgactgctgagcctttgactttgaattaagacattttaactcaaagactaaatggacataaagacttcccttatggctactaccaaccaaccccatcaaaaatctctactcctttctaactcataaatactgtacacttattagtttggcgaaataagaagctcatggtagaacctgactgaaataagcaggcagacccatcaatcagaatataacaagagtttgtttatccattgtgcatggtgtttgtacatgtaaaagattgagccactccacaaagtgacatgtatgccatctcttctgatagtcagagcattcttgtttccttatcactattagagtagtccacaccagaatcactgtggaacgagtcggttgatgcctgccttacgggtccaaactcctttacatccgcaaaagaatggcgcaaccctttgacagcctcaaaattcttgtatgtatagcccacaaaa

SEQ ID NO: 11186 - DNA, 545 bp, Gossypium hirsutum
  Clone ID: LIB3828-034-Q6-N6-G5
attgaacttatgcatcttgattacagagccccagagctccaaaaagagggttaaagccaaaagaaaaagagaacagataatcaaaaacaaacacaaaaatttacattctgatagtgtcagagtttcaccagctatgacaatctcttcaacagaatatccaagtgtaagataaattgatcaactcgatgattatagatcataagttcataaccccaacccattcccatgtatgcttttggtaccaccacccccccaatcaccaaaagaacagcagatgcaaaagatttctgtgaaggatcggcaactacctgacaatgtaaagggggagaagagaggccgaaaagcggagtatcttgaatcagttatggcatgtagcagattcagaggaagtaatcaggcgttctacgggtaacgtcaggttctcctctccttggagctggctcaaactggatgaatgactgattcttgcaatcatcaacttccaagattgatgccatgttcccacagcgataacaataatttggggcgctaaatatagtaactac

SEQ ID NO: 11187 - DNA, 536 bp, Gossypium hirsutum
  Clone ID: LIB3828-034-Q6-N6-G6
gaagaattgctgtcgtgcatttttatatgttaatcatatgatttacaatcaatgtcttgctatttgttttatttacagcttaaacttgacattgaggaaaggcagtgaccgccattagtaaactctagtaatcaaaaggtgaaaacaaaaataagttaaaaagaaaatctactactaaatatattagtatacagaaatgtggtgcctcatttgattggagttagcagcatttggtctgcattttaccactattaaggtaaccatatgtcgtgcagtcgagctatcatcacatcatccgagtacgagttttacttggtgataacaaaatgtctaggcaatttttgaggattttcggttaattccgcattgtatagtatagttctccatagtttgcttagtggatgaaatgaattgtagcatcactcttctgcatctcagtttagttgtccagtatataatggctcatcaaacatggtaacagcacaagggccagaagtggaagcccaactaccttggtttgggtcatatccagctct

SEQ ID NO: 11188 - DNA, 366 bp, Gossypium hirsutum
  Clone ID: LIB3828-034-Q6-N6-G7
attgcaaatcgaatattgttttgagctatttattcttcataattactctttttgtccaagaggattttatagcaaacccttctgcaacatcattacttcttattttgtataattaataagacgacaaccaactcttcctcgttatttcatcttaatatggtatcatctctctactttggtggactgggttcactgtccataacctcttctatccctttgctctttacagtttcagcctggcaacatcctgatgcgcacctgggctgaccacactcagcacaagtcccaccacaaccctgacggcaacactctccactctcacatcccgactgtcctggcattagtgggatttttcccacgcgtccg

SEQ ID NO: 11189 - DNA, 540 bp, Gossypium hirsutum
  Clone ID: LIB3828-034-Q6-N6-G9
aaaataaaaaagcagatgattgaaattttaacttttaaagcacatgggaataaatctcaaattctatagaaatgtaaggactaatagtatattttaaccattaaatagtccactttttagtgaagcgtaaatgtaatataagaaccacgccatggaacataacaatgattgattaaaaaaaaactcccaacgaaacataaaatatttagatttaaaattaaaccatttatttcgacagatttaagatttgataagcattagaaattgaacacaatcacatcaaaggcttgaaatctcggggtttggagttgcaaatttgaggaactctgcatctttttccaacacaagcatcctcttttcatccaatgttatccaagcttcgatgcctttgccacactttgtttcaatgaaaaccacattgttattgaactcagacccggcttccccgaacggagcaacccattgcgggttgccccatccgaaatcgagttcgtaatacttgatgttgacccaacttgttgaggaaaagcgacgcgtggg

SEQ ID NO: 11190 - DNA, 527 bp, Gossypium hirsutum
  Clone ID: LIB3828-034-Q6-N6-H1
aaacttactatttttcattattaaaataataataataatgcagctgaagattaattatatagtatgtaacttttgaagtactttgtgtcattattatatgacatacattggacttccatcttgtgtaataaactaagttttaatagaacaaacatgattaactgaaacaacctgtccctacccaaactaacttcacatcatcaaaggatctttaatggaagatcagaatatccaacccgagccttgtgcctggcaaacagatcttgtagggctttaacaaattgggcttgtacttcaaggacctcttcggcggtaggatgtggatttttcttcaactcaataggtttacccaccaccacatgcattggatgttgatagggtaaggggagttccaagaactccccaaaataaaatagggacgaatttgatagccctcgcaagctgcaggaagaaatttccactcggtttccaccacttataggaatatgactgaccaaaggcaaaaacagggactagtggacaaccca

SEQ ID NO: 11191 - DNA, 564 bp, Gossypium hirsutum
  Clone ID: LIB3828-034-Q6-N6-H10
atataataaaaagtcacctgtcattctaaaacacaagtgttcaaaattacatatagcattacatacccaatccgacaatagtacacgattattttctaggaccatgatactggatgtatattcttcaaaacatgtcacataccaatcaaacttgtacccaaagaacagttatccatataaaatgaaaacaccattttcctcagcacaacaaaagatcataaaatatagtccaagtctagttcaaggcaagcaacatatcgatccgacagagttctcaattccattttccagagaatataacaatagctaaaaacaagacgataaactagtttcgggaaagcgatgaatggaaaataaagaaagctaactcaagaagcctcagtggcaggttgggtcactccaaactttaccaacaacttactcaaagaatcaggtgagcaaacctggtacttcacattcccagaaggtgtaaggaaaacctcagccagttcaagtttctccgaagtaaggctggtgctgtccatggttttactcagcaccttcagcgcgagttgtacggcttct

SEQ ID NO: 11192 - DNA, 553 bp, Gossypium hirsutum
  Clone ID: LIB3828-034-Q6-N6-H11
ggaatatattaatggcattgcttgtatatatattaacttcaaacgcacaatacagattgttgcatataattttaaagcaaattctatatagatgaagtaaagcataaggtttaaatgttaggaaactgatgtcgttgtaggattgtttgtatctcgagactcaaaggtgatcgcatgaatgcatgcataccctgttgtctaccttttaccccttccattagctcgatttgcgacataattcctcagcgaaggagattgcgagagagagggcgcaaccatcgtattttgtgttccattcttttgttgcatccttctcctggctaccaaacctctgatccaaggggtaacatcctcgctgatctttatcatcaagaagaagatgatgcggtaaattatgatcatgctgaatatcacacttagatcgatccatttcgaccgtccgacgtcgatttggaacacgttttcaaggatgtattcgccaggaatcttgggaagctccggtggttgattatcaaacaacaggcccttcagatcattttggtattgtccctgt

SEQ ID NO: 11193 - DNA, 539 bp, Gossypium hirsutum
  Clone ID: LIB3828-034-Q6-N6-H12
cacaaaacaaattttttgctttatattagccatccctataaaatattgtgcacacttgctatgttgagaaaaaaactacaatcttctcttaactattaacaaacccactgcattattgttgcgggatcacgccatcacatgaagtatagttttgtcactgctgcatttggtaccccataaacatacttccaattgctaccatacacacaaataggagaggaaatcccacttgaactcttcttacatcactctttttcctcaacagcgccagttcctcttgtaaggtcttcctctcttgaacagttaacctcctctcctctgtcagttttgaaatggttgcttcagccttgcctagctttgattcaaggtcacttaattttgatttcatttcctccatatctttggcaaacttaagatcctcatcagtcttcaatgttttcaccttgtaatccttcacaggcttcaattcctcggtctctagaatatcctccattggctttgattcctcatctttcaccggctttaactccttgctattg

SEQ ID NO: 11194 - DNA, 524 bp, Gossypium hirsutum
  Clone ID: LIB3828-034-Q6-N6-H2
acatggaaaaagatacaaatgcaaatgtagttctcagcccacaaacacaatgcaaaggggagagaacaaatttgggaagatcatatttaatgactaaacaaattatcagaaggggaaaaaaataatggtgtgaaaatttatgcacaattatatataagctttggaagataaagcttcagtcacttcgctcatatgcttccagtagaatgagatgaactgcttgaactaaaatgatctttcttcagcattgcctccagactctgaaaccattttaatggtctagcctgaacataatgcacccgtagagaacaattatcagcctaatagttaaaaaagattgcaccacacctgcaaaattggaccaaaatgctaactgtgcaagggaccaaaacagtaaaccaaatgtaacagatgttcattttgtaaagagtagcctaatcaaacttctgttggccatccaaaaatggcaaattacaaaagttgatgtattcctcaaatttcaattgtagatcatactttatttt

SEQ ID NO: 11195 - DNA, 440 bp, Gossypium hirsutum
  Clone ID: LIB3828-034-Q6-N6-H3
aatagattcttaataaatgatggccgtagaaacgggggggggcacaggatggggggcccacaaaatgggggcgacaaaaaagaggagcaaacaaatgggtgcaataaatggggcaagaattaataaaaacagattatacaactggggcccagaacttcaagccccaagcaatctagggcggaaattattcagctttatcggccctgggagggcgcactaaggggagttgcacgaccggagaaaccggggaaagcacccgggggaccatggggaaaacacctttggcatttctcagtttccggattcacttcttcagagcatgaagatgaactattaaaaaaaatccctggaaacccaaacccgaagggaaaaaaaggccttaaaaagctatcagcacacactggatttaaagagctagctaagaaaagggcaccatacca

SEQ ID NO: 11196 - DNA, 509 bp, Gossypium hirsutum
  Clone ID: LIB3828-034-Q6-N6-H4
atgcaaaagtacataatcaacattctgcaattttacaaatccagttacaaggttgtgcccccaccatcagacataagagatgcagcagctgcagcagccgtaggcacaacaccggttgaaacacctggctttgacaaatgcagcagcggtgcaagatattcgcagaaggaagacacagcagcaactacttcattataattttccgatgttgcaggggcggtcacttctaccagctgtataccaggtgttactggcacagcctcatcggttgcgtgcagttttagcatcttattaacagatgaaacagttactgttatctgagcacccctttggaaatgaaaggtgattcccactctcagcagctcatgatccaacttgtatccgagtgcataaaataatcgaagcacattcttgcttgctttgctttctaccatactcctaaccagaacagaaatttgctctaccccagcacccctcaatgcacccccaacatgtttaacagtccatgt

SEQ ID NO: 11197 - DNA, 509 bp, Gossypium hirsutum
  Clone ID: LIB3828-034-Q6-N6-H5
agcattaacttaacaaaagagcaccttaaaaattaaccaaaaacccagtaaagctaccatacaaacccgctctattcttaaaaataagtaaattaatccctgtacatttgattaaagagcaaattagtctcttctaataaaattttcatcaatatttattattaaaaattggtgccacagaacaaagaccaattttttaccatagaattggacaatttactctttgatataatgtatagggattaatttgctatgagtgaaaacgtcaaaatacaatcagactcgtcaatgatacttttacaaaaaaaaccctaatgattctcctacttcactccaccaaatgttaatgtaaacagagaaagagctaatacaagcttaaacttacattgcaatggcggataaatatctccatcactgcaaaaacgttatgaaaaccctttactaagcttctgaatagcacaaaacattttccttctagaaccaactgcatttattcccatatctttcaa

SEQ ID NO: 11198 - DNA, 556 bp, Gossypium hirsutum
  unsure (1)..(556): unsure at all n locations; Clone ID: LIB3828-034-Q6-N6-H6
ggaataaattgtatattatttattacgaaagagctttttagtccatcgaaatctcccacaaactcaattcaacatgttcaacaaaataaaactgcaaatacccatattcatcaagcaacaactgcccataaactactgagagatgacaaaacccaatacattcattttgtggaggcaaatgttgttggcttcattctattccgcaaccatcagcttatgcatcagcaaatcctagctcagagagcttcaggtgagcttcggtgtagtcagcaaagaaggcatcctcatcggcagcatatttttcaaccaatggacggaaaacaggatctgacaggagaactttgtcagttggtagttgaagaaggccttccttctctcccgacaaaagctccttgaagtaagagttgtcaaagatgagagggttnggtagtccatggtccctcaaacccggacctctccttgtggcaccttcccagagtgtggccaccagaaagagcaacaatgtgctggtcactgagacccatttgagcactaaacacctgcctcaagtgatcag

SEQ ID NO: 11199 - DNA, 415 bp, Gossypium hirsutum
  Clone ID: LIB3828-034-Q6-N6-H7
gcaaatcgaatattgttttgagctatttattcttcataattactctttttgtccaagaggattttatagcaaacccttctgcaacatcattacttcttattttgtataattaataagacgacaaccaactcttcctcgttatttcatcttaatatggtatcatctctctactttggtggactgggttcactgtccataacctcttctatccctttgctctttacagtttcagcctggcaacatcctgatgcgcacctgggctgaccacactcagcacaagtcccaccacaaccctgacggcaacactctccactctcacatcccgactgtcctggcattagtgggatttttgggacttgtgggatctgtgggacttgtgggatctgtgggattagtggaatttgtgggatttgtg

SEQ ID NO: 11200 - DNA, 519 bp, Gossypium hirsutum
  Clone ID: LIB3828-034-Q6-N6-H8
gggtatgatactactgcacaaacaaagtaccgaatttcttcctaacccgtaatagttacacaggtcgcatactattcattatttttatttataacaaaataaaattaccctaaataagcatgccaggccaacaacaaccaccggaacgaaaattcctaaaataccataacagaaagtagagacaagttggtaaaactgcacagtccagtcaagttcagtgcaccaacagaagatggggcttatcaaacactaaacaaaaatctcctcccaactttcactccatttcaccttcctgaatcaggagaaccatcatcataagagaccagtccccttctaccatctgggcttcctgatgatgaccttgacttcactttgctcacctgctttggagactgggagttcaacaacgaccttgattctgatctgctcctgctcagagaaggaaaacttcgccttccaacccttggagaatcaactgcactacggctgcgaataggggttcgacttcgacttggacta

SEQ ID NO: 11201 - DNA, 550 bp, Gossypium hirsutum
  Clone ID: LIB3828-034-Q6-N6-H9
atagcaaagaaaatcatatatattagcatgtacatgcattaattacatatggctacaaaacaagattcaaggaactttaggatattgtaaatcaaatattgttttgagctatttattcttcataattactctttttatccaacaggattttatagcaagcccttctgcaacatcattacttcttattttgtataattaatacgacgacaaccaactcttcctcattatttcatcttaatatggtatcatctccctactttggtggactgggttcactgtccataacctcttctatccctttgctctttacagtttcagcctggcaacatcctgatgcgcacctgggctgaccacactcagcacaagtcccaccgcaaccctgacggcaacactccccactctcacatcccgactgtcctggcattagtgggatttgtgggacttgtgggatctgtgggattagtggaatttgtgggatttgtgggatctgtgggatctgtggaattcttgggatttctggaatttgaggaaatggtagaacgaaaccacc

SEQ ID NO: 11202 - DNA, 521 bp, Gossypium hirsutum
  Clone ID: LIB3828-027-Q6-N6-D4
ttttttttttttttttttttttttttttttttttttttttttttttttttttttttttttttttttttttttttttttttttttttaaaaaaatgaagaggcggaaaaaattgaagggggggggaaggaaagggggaagctcagggggggggggggggaaaaaaaggcccgaactgggggggagagaaattttctcccccggaaaggggggggggtaaaaagggggggggaataaaacaagggggagaaaaaaagggggcggattgggaaaaaagttaaggggttaaaaggggaggggaaagggggtaaaaaaaaaaggggggaccaaattgggggggaaagggggggggaaaaattcctggggggaaaaagacttccgggccctttttaaaaaaaccggggaaaaaaagggggggtttaaaaaaaaaaaaagaggggggaaaaacacccactttttaagggggcccaaaaaaaccttattaaaaaggggggggggaaaaccccgttttcgggcacaattt

SEQ ID NO: 11203 - DNA, 109 bp, Gossypium hirsutum
  Clone ID: LIB3828-027-Q6-N6-D5
aataaatgaacatttttattgcaaaaaatacatgaaataataaattacggttccaatctcctgctgtcaaaagggaaagtgcaaaaaaaaaaaaaagggcggccctcgc

SEQ ID NO: 11204 - DNA, 579 bp, Gossypium hirsutum
  unsure (1)..(579): unsure at all n locations; Clone ID: LIB3828-027-Q6-N6-D6
aggaaaccgaaaacacaaaacaatgaataaacaaattgtccttgatataatgcacattggccataaaaggcacatgcaaatttcaaaattaaaccaaattgccaataaatctacacatngaaaatgcaaaccatataaggaccactactcatgcttgggattaactggagcagccttctcatggtgaaatctcaccacaatgcatgttatattgtccgcactcccacgtgtgaacgctgcttcagtcaactttctggcagctttctcgggttcttcttctgctcctgctagggaaacagcatcctcattaggcactacatcccataacccatcactagcaagcacaagcaactcaaactcttcatcgatctctttatcctgaatttctggttctgcaacaacaaattgcttcaacatgcgatcaccgaaagctcgagacatagctaatacacctcctaccctccaagttcctgcccacataacaaccccaccagcattttcaattctcttccgttcatcagttctatttggtttatgatcctctgagagagggatagcttctccagccttggatattat

SEQ ID NO: 11205 - DNA, 538 bp, Gossypium hirsutum
  Clone ID: LIB3828-027-Q6-N6-E4
cttcttaataaaacataaatagagaatttcaaatccaacatctcagaacattaaaacttaattgtaatgttaccttaatcaaaactgaaaacagcaacctataaataaaacctgacatgcaaaaaggtaccagaaatataaaaaggtaaaattaagaacatattccatcacttaaagcacttggcatccaagagaggctctccctcaaatggctcgcagtcttcaatcatctgattcacccgttccttctgggctgcatctgagaggtcgaccttcttccactcgtagagttccatgtcatagcactcgtcaatcacaaattgaggaatctcttgcccacggaaaagccatagtcctttcaccttgaatggagggttagcaccgatcaccaacatcttcccaaatgcatacttgcgggccaaatccattctctgcaggaatcctccaaccttgttcattgtgacaaatgaaactgtattctcctcattgtacttgtagtcacaaaaccacagtgagtatccctcgggatcatacatgt

SEQ ID NO: 11206 - DNA, 464 bp, Gossypium hirsutum
  Clone ID: LIB3828-027-Q6-N6-E5
aaaaaccaagcaacattcctatcattttagaaaaaaaaaattttttggaaaccctacaaagggggggggcatataacaatccttataaaccatatttaaaacattcagggggggcggaaataaaaaaccaaccaaaccaaaggggaacccccccagggggcccgcaaaagaacccaagcccatttttagaagcccttcctaagaacaagggggggcccagattccccaaaccccggtttgggtacccacatgggggggaagggcccaagagaagctaaaatagaccccccaatccaaaccctggttttttttttggggggggccaccaccttaatcttcaagccactgggggcaaaagcggggatttccttggtcattctatcagcaatccccggaaaaggggggatagcaaaaaaaccaggcccctttttagaagccctttctaaaaaaaggaacccgggggt

SEQ ID NO: 11207 - DNA, 535 bp, Gossypium hirsutum
  Clone ID: LIB3828-027-Q6-N6-E6
gaaagggggtaacagataagaatatagcagagacgggacgttttcagcttgctaattccttggctagcttctccattgttaactgttacccacttggaaaaaaaaagtgtgcctgatgatgatgaagagaccgttgcattgtgaggtctttgcctgaaacaatccaatgaaattcgggccggcgaagctgccaccgttactgaagaagatgactggaccccagaatccggcggtgaccttgggggattatcacaggagggattgccaccactttcaagcgggaggggcttctggtgttcttgagtggcattgggttgctgctgttgagattttcgcctgcgacgattgtggtcggccagtctctttcgacagctacgcttcccattgtcgaattctgacagaagatggaatctgctgcactgctggcagaatcgttgagtcaacccagcggcgatgacggtggaagctttggaatggaactcgcagactttatggcggcgatggtagtgcttagcgtgggtaagatcggcattgc

SEQ ID NO: 11208 - DNA, 553 bp, Gossypium hirsutum
  Clone ID: LIB3828-027-Q6-N6-F4
ggcaatgcatgtagcattaacctaataagattcatagttaaaaattatgaccaccctgtgtctaaattaccaggagaaaataggggtaccatctcaaatacccatgagaaccaaggaataattaaaacaaaacaagacaacctttgtttgaaaatttgaaggtgcattgtatgcctggacatcattccatcatgttctccaaaactttatttcagtagaaaaattggaggttgcaattaatgatgatcattgtcaccatgtccatctggaggacctccagggcccacaacttccaacacaaaatactgtgaacaaactgagcactcatgtggtttgcctttttccagccaaaaccagacaacatcgtgttcatcctcacctacacctcctgggcatccaactattctcttgttgtagtaggacttaacgacagcaggagattcctttgtgccaaaaggaccgactggattgtttacatcttcaaggattttctttccctcaagctcagcctgaagctccttgcgctcatgaccagtggcgataggcattacat

SEQ ID NO: 11209 - DNA, 468 bp, Gossypium hirsutum
  Clone ID: LIB3828-027-Q6-N6-F5
aaaaagaaaaaaaactgtttttttgtaatatgaataaattttttaattccaatggccctgaatctgtgggtttggttaaagcgggggcccttagggttttggggacagggctggaacatggagtcgggtttaattggccactagttttaggcttgacattcaaacattgggatgttgcgggttcaggcccggggggcttaatatcaatgtctgcaagttccacattttgacatggcgaaaaaccgctgcaaataaacttgacagcttttggaagcccaaatgtgccacggatgttcttgaagctaatgttgcttagttaaactttcgattcttcatttatctggcatttactccatgggcaatatttttgatcaattaggataggggaagagacatttttcacgataatatcctcaaaatgtacatttgatactatcccaggagattcgcctggccaagttttgattc

SEQ ID NO: 11210 - DNA, 501 bp, Gossypium hirsutum
  unsure (1)..(501): unsure at all n locations; Clone ID: LIB3828-027-Q6-N6-F6
agtaccaactttgaacagctactttatactattttgttacataaaatatttttgaaagccctaatgcaaaaaaaaaaagggagataaaattcatgatcagaaaatttatttactatatccccccaaaaaaaaggaaacaaaaaacacaaagcaataactcaaaacatcatttcaaggcaaaactcaaaaaaagtagcatacgagaagtacaacaaagattcattctctcatgctatcttcaccatcttcttgttcactcagctcgagatcggccagcaactcttccaatggaaccgaaggcagatcatccccatctgacaccgataccatctctgatggctggtaatctttgttacggtacagtgataagttgaaccttagctcagggttctcttccaaatctctcaagaactcctcnatattctgtgtccagcnttctgttcgttcgctctacctttagattcgtctagttccatatcgagggacttaagcttccatgga

SEQ ID NO: 11211 - DNA, 497 bp, Gossypium hirsutum
  Clone ID: LIB3828-027-Q6-N6-G4
gaaaaaaaaaaggaaatttaaataagttaacagagagttcgattacagtttttgggcatttctgtgcaaaatgatttgtacttggaatggaaaatacgttggttaaagacgtataacctccaaaagatcgatatagggagttgtatgttaaccggtgaagtggaaacagattgacgatagattagtggtttttgtaagctctccatcagcagcaaaagcatcaccagcaaaacttctttttctgcagtttccgaaaattgacttccttttgacggtctatttcagcaagcaattcttcatgtctcatcaaagcattgtaaagtgcctgcttggtagcaatcagctccgcttttagggcatcaacacgacatacggcagcattcaacaattcctctttctcataaggcatctcaaatgactttgcttgtagtatattaactttctcctcaagttcacccaatcttttgagaacagaggataaaagatcagcctgggta

SEQ ID NO: 11212 - DNA, 372 bp, Gossypium hirsutum
  Clone ID: LIB3828-027-Q6-N6-G5
aaaacaaaattaagccatggcatattaaacggggaaaaataaagatgggggaggcaaccttatcccccgccctataaaacaataatttaccaataaagggagaggggaagaaatagtaccgggggggggctatctacgggcatttcacaaggcgaaaagtaaaccgctgggtggggggggctatctacgggtaccctttgggggttcccaaaggggcttccccccttggctttatggaaaaaacacttaaacatcttcaaggcaaccccctaggggccctcatttgggcaaggaattggcttattttagggaattcgaaggttaacaacccctgaaaaagggaaaaatccccaaagtttttccggcacccgg

SEQ ID NO: 11213 - DNA, 373 bp, Gossypium hirsutum
  Clone ID: LIB3828-027-Q6-N6-H4
tttttttaatgaaaaacatagcattctatttatagaaactaattatttattttccaaaacctcaccattcttttaaattacaatttatttaatgatttatcgacatttcgttgacaatcattctacgggtcatcaatagggataccatcgctaagacctggattggtagcctgagaagtaggggaggaactagcagtactgccaactgtagaagctccagctggtgcacttgctgggctgccaccagcggaagaggcgtcggtagaaatgacgcctgcgagaaaaatcaaaaccaaagcaagaacaacaagttggcgtgccatttttgtttcaaaatgtggtctctgtgtttatgaagcaacaattttttttt

SEQ ID NO: 11214 - DNA, 550 bp, Gossypium hirsutum
  unsure (1)..(550): unsure at all n locations; Clone ID: LIB3828-027-Q6-N6-H5
gatactgcaacctagtttattattggggcatttcaattacaaaatgcacttcacttagttataaccaaacaaanagatattgtgaagtacaagagtaacataacctaaaaacaactagcttaatgtattgtaaccccaagacattttaccagacaccaacctccatgaacccatcctcagtggcacagcccctgaacatcccggtggtgttaaacccacaagcaacctcaccgttctttgaaacagcaatcagcccagctttgccttcatccaacctattgttgatcacaaaatccacagcctcatgcaggttcaatcctttgtactccatcactgcgcctacttccctcgccaaggtgcttcggatgattgcttctccttccccagtgcatgacaccccacacaagtcacaagcgtaggttccggagccaataagcggggagtcaccaatccttccggtcatcttgttcatgagcccacctgtggaggtggcggcagcgcaccgaccctccttgtcaaccaccacgcagccaaccgtctctgggggcgt

SEQ ID NO: 11215 - DNA, 475 bp, Gossypium hirsutum
  Clone ID: LIB3828-027-Q6-N6-H6
aagagtcaagatcaatgtcaaatcaagcaaacacgacaacagtttgttaatcttaagacgacataggcaaagactctgaaaaaccctaaaagaaacacatagatctgattccccaatcaacgaaacaacactatctttaccgtccagcgtaaataaatcattaacaatttgacatcatcggataattatttcttggttttactaccgcctccagcattgttccctccagctgccgcctgcgcagccttctttgccgccttttcttgcaaggcctttgcatctctttcacgacgttgttctggggttaagccatcgtccttggtcttgctgcctttgccgcccgctcgggattgagccctttctcgatctcgatctctctggttaccacgagtcatgattgatcctcggaaaccaagcaacgatcagcaaacgttaaccgccgcaaaaaaagcccacgcgtccgcccacgcgtccg

SEQ ID NO: 11216 - DNA, 340 bp, Gossypium hirsutum
  Clone ID: LIB3828-028-Q6-N6-D4
gatgacgaaaaagatatcttatttaatggtagttaatcgtaaaaactacataaagcaagttcctgaaaaccaccaaacccagtgacgataaaaacagcaccataaaagagtctaaatgacagacattaaatattctagacattagacaacatcccaacttaacacatagttctctttttcttctctaagagagctgtccgcagtcagcaacaacaacgggcttggaagttcttccactgctagacccaactttctcaatggctttcaccacatccatgccttcaacaacttgtccaaacacaacgtgctttccgtcgagccactcagtcttagccgtgca

SEQ ID NO: 11217 - DNA, 568 bp, Gossypium hirsutum
  Clone ID: LIB3828-028-Q6-N6-D5
gcataggtcaggccatatgaatgcaggattgagagaccaaatagacagacaatattacagttcatacacttacaagacaagctgcaataactagtcgtgtgcgtttcagacattagacggataaattaaataaaaaattgcagccattgtgtttgtctgtcgatcaaattttacatcaaattgcctttaccttacaacttgccctaatctacggaaaactggtccctctgtatcttcctgcttcatgagttgaacaactaaataatcgagttcagcctttttatcttttacttggctcaactaaactgtatgaacaaaattgttatcacgtgtgaatgatatctcttgaaatgttacaccccatatcgcctcaatgctttgcttaaacttggcatgacattatatgcttggtacgatcttcttagctcaattatggaacccacaattattaaaattgatgtaaaaccaattgcaaatccttcattgatatgtcgcaagtaatgatcaagtatggttgatgtagttgccaaaatacttaacagtagccctccccagaaacgtgttgatg

SEQ ID NO: 11218 - DNA, 553 bp, Gossypium hirsutum
  Clone ID: LIB3828-028-Q6-N6-D6
gtctccaaatatgatcaagatgcataattattttcagcactgttgaacacatgccggtagctcggatactaaacgaagcacatgtattttcatacaagttcttcagagaatgatgaaatctagttcccaaaacttgcattgtcccttttcttggtaaagactaattcctcccttttattggtaaaaaggaaaaaaaaaatcctacagatttctcccttccttatgattttactctcatgggactcttctgatttgaatagcgtgcttcgagttcaaaccacgagtccaacttgactagttggttaaattcttcgaatgtagccatcttgtgaaggtgatctctggtagttccgttttctttcagggtcctgaggacgtccaccaatgcacgagctgaagcatagagggcggtgagtggatgcacaatcaaatgaaaccccattgctctaagctcctcaggcgtgtgcaagggtgtgaccccaccttcaatcatattacaaactctgtaaccttttgtatggcgtccaatctccttaagctcgtcatcgttcct

SEQ ID NO: 11219 - DNA, 500 bp, Gossypium hirsutum
  Clone ID: LIB3828-028-Q6-N6-E4
agtagagacagacatatagatttaacacaaaatcgagtttcatgcagttatgctgcaggctttaactctccatagatattatcaacagcatgagttagccgtacattcaattacttcatcatcaacatgcaatgacgttattacgttgacggtcctcccatgcaccctaccatgatttgacaaatgggtgtcctaacatgattaggaaacagggttatattggatttcctactccgctgcttgaaggaggcagccacattcaaattaaatctatgtttgattcacaatttcatacacagcaacaaaggcaaatttagaaggttaccaccgcatttagggagggccatccttttcccatctctcctgatgaaaccctcgcagttataagagatagataacagttctaaaatattacactttatcatcatggaaccaccatctcgtctccttgggagatctcccattccgacaggtcttaacgtatcgatcattatcagttg

SEQ ID NO: 11220 - DNA, 564 bp, Gossypium hirsutum
  Clone ID: LIB3828-028-Q6-N6-E5
atcaaacccttccttaagccgttacaccaacagagctggaaatccaaaggagaatcattttgcatgacaaaggtcggttaaaatctttacattttcaggaaaattataaaaatggttcaaagtttcaaaaactaaaacaaaatgaacaatagctcaaaatgatacacaaaatcctttttccctaacctgaggtacactgtgctttcgttttccttgtattgtacactgaaaacttctattatatcttcatgaaaaatagtattgccaacacgctgcgagtccagctatgagtatgactttgagtactgatttagagttaatgaaggatgatgaagctgggggtgcttgaggaccttccaaatgtctacctctaagcttggcaaacaactttgttagcagcagaggtatccgacccattttcttggcagctttgtctttaagaaatctctcctcctcagcaacacgccgccttagtgcattgagcaatgatccaaaatacaatgcaaacactgtgcatgtgattgtgataacattgtaaggcatgctaaaatcaggagttgtcaa

SEQ ID NO: 11221 - DNA, 496 bp, Gossypium hirsutum
  Clone ID: LIB3828-028-Q6-N6-F4
gcaagcaacataataagtccacaaagtcaattcaacaagcaaaataaaacgatcacagttgacgtccaatctcttgaaatgtttaaaaaaaaaaaaacaaaaaactaattaggaatagtacttgtgtatgtaactaatggtactaaatccttcccaggaaaataccatggtaataggcaatgcaatttgaaatcgaaaccttgagcaaaaacaaaaaagaatagggcaaggaaacaaccatggtaaatgtgttgtaagcaattaggctgctgttgcctctggttccgcaacagtttggtccttggtgggagcggtcgtggcggcggcatcttgttcagcggaggaattattagcagcagtgccagtgggggcggcgccatcttttgcagatgaaacgggtgcccctttctctgcagttccattcgatgcagccttgtcaacgtttttcgagtcttttccatctttagcatcctttccatctttagcgtcctttgct

SEQ ID NO: 11222 - DNA, 572 bp, Gossypium hirsutum
  Clone ID: LIB3828-028-Q6-N6-F5
aaaccaagaaatttaataaattaatagtccaaatgatacaagcccaaaaacaaaaaaagaaatccatttatagaataggcccaaatggcccaaaatgaaaaaaagccttaaacagcccgttggcccacaacttaaactcattctcagaactctaatgttctatgcgcgccgcaccccctccctccgctcgtgccacgtcagcccacctcgtcccgaggcctaacgcgcacttgccgccattgcaccaaaatggcaaaggcagcccttctctcctcttcgttgaccacgcgccagtgccctcatcgcagtcttctccctccgtttggaaagactaatggatcctcaaggtttgccaaatggtcgcgacagaaaaagacagaatcgaagggttcctttgatttgttttgaattttggtgggctcttcgggcattttggcattagattggggtagaggatagtaaaacgatcaaaaaggcccttttttttgtcagccaccgtggacaatggaagccgtcaccggcgaccaacgaccgacgccgaggctcgcaagtctccatggctggattctggc

SEQ ID NO: 11223 - DNA, 512 bp, Gossypium hirsutum
  Clone ID: LIB3828-028-Q6-N6-F6
acaaaaataatttggctcgatcggaatggcccattacttggaaaaatttaagggccatctacaagtttgactcatacagaaacataatcttcaatggtatgcaatcttaaatgggatatgcaatcttagatatgatacaatcttagatatgattgcaatcttaaatatgatacaatcttaaatatgattgcaatcttagatatgatatacaatcttaaaagatatgattttgtaatcttggaaatttaatttggagatatcctttaatcttaaccggtgatgtaattgacctgtaccattggatttagggaggatagaggcctctcccctcattgtaaaaacaacttgacttcactggagttttgggaagcaaaaaaaattcttaaaagcattcactcaaatttctctccctcttgcgttcttattttctgcaggggggtcttatttattctttggtcattttcggtttcaaccttttttttattttgatttaatccctatttctttgattt

SEQ ID NO: 11224 - DNA, 532 bp, Gossypium hirsutum
  Clone ID: LIB3828-028-Q6-N6-G4
aaaagagaacatttggatgttgaattatgcaatttcccctaatttatgttatgggaaatttccccatcgttctaaatattttttctagcacaaacagtatggtactgcctgcgtgcagagaaaaagaaatcaactagcagtagcatgagcaccaaaaaaaaaagtgattaattatttgtatatgagagcatcacgaccaggtccgacaccgatgtaatggataggcacaccaacaagttcctctatcctctcgacatattgtcgtgcagctttcggaagatccgaataatttctgatagaagaaatatcggattgccatccaggcaaaacttcgtattccaccttcaactgttcgagaagctgaagatcacctgggaacgattccaccggtgtaccatcaacatgtttataagcaacgcctaatttaatttccggaagatcagataaaacatccaatttggtgaggtttagagaagaaaagccattaatctgacaacagaacttgagagcaactacatcaagccaaccacaa

SEQ ID NO: 11225 - DNA, 557 bp, Gossypium hirsutum
  Clone ID: LIB3828-028-Q6-N6-G5
cagttaaaattacaagtctttgcattactcttactccattctcaatcactaattccattccaatctccacaattataataacttgggaaataaagtaattcaaaagggggtcttctaggagccaaaattagaacagagaagatgaaaaaaaaaaaaaaccaaatcttttgattgatgattagtatatatatttatgggggatctggttcaaagggggcacacaaaatcaccacttgactttacattttcaagatcttcatcgccatctaaatcatcatcaagatccatgctccctcccagaaaaagttccccgcccttggggacctcaggggttttcatggcctctcgtattataaactgggcttcttccaagctttgggaagggttgttcacatcatggctctcccagtttcccccttccttcagttccataggcaagttctttaaaaaccatggggggcttttaatctctgttatacttattctctttccaggattttccacaaatatccgaaacaaaagatgcttgcagtccatagaaactcggatataatcgg

SEQ ID NO: 11226 - DNA, 481 bp, Gossypium hirsutum
  Clone ID: LIB3828-028-Q6-N6-H4
gaaaggaactgccattctttcaattgaaaacaaactttcttaaatatcataatacattctgacatagcagaaaagcccacattacacataattaagaaccaaatcctcatgaagatttgctgatacatactaaagtaatagaatttatttagttaaaaagacaaaggcctctctgcttctctttgttgttcattttccccccctcttatttacaattgcaagggttgcaagtgcagttgtctccacacttgcatccattctcaaccccaactcccatctcagatccctcaaagtgcattttctgagttgtcacaccaagaacaatagtctcagttgtagtcttctctattatgtcagggaacatcttgcatcctccacagccattgccacacttgcaaccagagctgcagccacagtttcctccgcagcaagacattttcagttttgtttttagaaaatagaaactggaaagatttttttt

SEQ ID NO: 11227 - DNA, 579 bp, Gossypium hirsutum
  Clone ID: LIB3828-028-Q6-N6-H5
aaaaataaatataaaatactataacatgttaatgtaagtgaacaaaagtgactagtttgatagttatccaaagtcacccttctctagccgcccatccacgctgtccgtgtcaccttttccctttcggtccctttttgtatccactcaggggaaaaaagttataccctttcttgcaagggaaaaaaagttactcctcgtagcaaagaaaggttaagggttacattaatctaaaaaacattgcaaaactcgtaacattttatgtacactgatattcacggatagattacatgcaatgtttcagctattcagccagtccagactataccatttctctgcaatttgaacatgtaggtttggcactgtcttttccagatttctccactgaccaaaaacttcatcatcacagataactcgttgtaatgactttaagttcgataaagcagcatgggtcggtagattcactatttgtaaacagtccctcatgtctatcttttccaggctaactaatttacctacttccttcggtagacatttcaagttaacgcattctgaaatatcaaggtattttaacccgactag

SEQ ID NO: 11228 - DNA, 412 bp, Gossypium hirsutum
  unsure (1)..(412): unsure at all n locations; Clone ID: LIB3828-028-Q6-N6-H6
atctattnttaaaaaaaaaaaaaaaaaaaaaaaaaaaaaaaaaagggcgggccgccctttnttttttttttttatttttttttttattttttgttttttttgttagcacaaaaaaataattttttttatgcatgttcatgccttaatttcctttgggttcaaaacaaaatttaaggaacttttggatattggaaattaaatattgttttgagctttttatttttcaaaaatacttttttttttcaacaagattttatagtaagcccttttgcaacaaaattactttttattttggttaaataaaaccaccacaaccaacttttttttattatttcatcttaaaaagggataatctccctactttgggggactgggttaaatttccaaaaacccttttattcctttggttttt

SEQ ID NO: 11229 - DNA, 519 bp, Gossypium hirsutum
  Clone ID: LIB3828-029-Q6-N6-D4
attgcaacaggtaactatttgaaggagcaaccatgaattacaaccacatttttctacaaagagcaatctctgacactgtacagctttgctccttctcggtctgtatgcaaaagcggactagactttaaagtagtagtttcaactttacaggagaaaattttcctaaatccatactatttattccgagcactcgagcaaaattttcttttttctcaatttctccttgactagctatgacataattggcaagaactactaattctactatggaaaaagcattttaactacgaagttcacgtgacggaggaaataataatcagcaatctaaagtaggtgagaattgaaccggttttgatgcaccatagcattgtcttcatatctcctccttgacccccttcaatccattgaaaatatctaaatccgtaaaccttgtactcaagaagtcttcggcttcatcacctgggggtgttaaagttgttctgttaccaacagggggatcaagtgacttccaatctgaac

SEQ ID NO: 11230 - DNA, 475 bp, Gossypium hirsutum
  Clone ID: LIB3828-029-Q6-N6-D5
aaataaaaaggggggctgcttatttgagacattaactacaatatatgttttttaaaactttgttttctaaattttcggaaaaggtctcaggatccacgggaagagaagggaggacctacacaacggaaaaaaaggttgggggggagggggatatgacactgttacagaaattatctccactggcacccatctgaaaaaaacagatcttttttttttacctcggggtcctctcagttatctttggagcttttccacattaagggggaaaacctgtctattggggacttgatgtggctcctaccccaaaaaagccaatgaatggcggtagaaacagcctcatagaggctggaggtactgcttcctgccacggatgatgaaagctcaatggctgaaacttgaggggttattgatgctggggaatctgcgctactttgggagctggggaactttgccagttgcattgtaaccatgggcg

SEQ ID NO: 11231 - DNA, 554 bp, Gossypium hirsutum
  Clone ID: LIB3828-029-Q6-N6-D6
aaaactcgtaacacgttttcccattgctcattcaaatatacaaccaagcacttgaaacgtcagaagccaatttcttttatcttcagtctctacccccattaaggaaaaacagaacagcaaaacataaagaaatacaaacagttgaaacagataacctgatgaactataagatacgggtgaggcaataacttaatggttgggacctatattgtaccgacttgacttttttttcttaagaactcgggttctacaattatgtctatcacaagtgtgcggatataaccattcctaagataaaaaccttagaaaaagctgatcacatctgtatttgatatctaacaatcacacctgagttttaagtaacataggctgtgacctaacgtagctgcaccttcctaaaagtagtaggtttagaggaatttcacttcctcgcggcaaaaagaaataagataaatcatataggatgttgagacaggattaaagacgctggaagcaaaaggaaaacagttagggcatctatatacttagagctgtcatcaagcataaagacaatc

SEQ ID NO: 11232 - DNA, 440 bp, Gossypium hirsutum
  Clone ID: LIB3828-029-Q6-N6-E4
aaaattgattatgtgaattttataccttaattggtgaagttgttacacagttttaaaagctatttcattagtattctagatttacacatatgtaatgtgaacttttatccgatttaataacacaaaaagcaaatctccatagcagaaacttggaagttgatacagttcaagcatttggcatcccttgtttcaactgtgtaacaatcttattaaaattaatgtaagaagagccatcagggcttgtagctatttcagctttcttcttccaatctatggcgttttgccttaaaccttgccccttcatcccttccatcaactccctcacaagactttcaactttctcccttttgacatcactgtcaatctccatcccaatgccccacttggtgcacgagtagaaacaattcatctgttgctctgcaaaaaatggccaacaaatc

SEQ ID NO: 11233 - DNA, 456 bp, Gossypium hirsutum
  unsure (1)..(456): unsure at all n locations; Clone ID: LIB3828-029-Q6-N6-E5
aataaaaattgaaatattattanttattccaaaaaaataggaaacaagaaatattgatcaaagctccatatattaattttcaatattcatcgcatatattcttttactttaatacatttatcagcttactggagaatgtaagaaaacaaagaaacaatggaagccccaaccaatgatccaagaacaggcaaagtggcggcagcgacgctggaatccgggccagctgctggggcgaaagcgggagaggagctagggctagaaccacctgcggaaggggaagcagcaggtgcatctgcggccatgacggcgctcattgaggcggcagcaacaatgatggcggtggagaccttcttcatgtccatggcgtataaagggattattaaacgcaccggaaatgaatgagacctgcgtttaataactggcgaatggggatccgccggtgattgttattatttg

SEQ ID NO: 11234 - DNA, 522 bp, Gossypium hirsutum
  Clone ID: LIB3828-029-Q6-N6-F4
aagaagaaacaaaccaatgccataaataattgaattacatcacatgcataattgagaactgcaaacagaagtaaaacaaatttattatattttcaatatataatcttatgatcttttttgagtaagcaaaataaataatttaaggagaccacatatatgttgggtggctagtgcctgaaccaaatttctctgctatttgatgagggctgcatacagaagtagattccatgtatcggggaggccggccacgcaccagtgggtgcaatccatgccgttgaagtcattgtaagtgctaggatgtgcatcttttcgtaattgagagagcattgtaatatcaagcaaatgaacaggcttcttgatgttccttatgacctctttaactacgtactctgccagaggcaaaccagttggataaatcgatcccttgaatggtgtcgtctgccttgaacaattccttactcctggctcattccaatctatgccattgtagtgaggaggggaaattccttgaaatataacttt

SEQ ID NO: 11235 - DNA, 560 bp, Gossypium hirsutum
  Clone ID: LIB3828-029-Q6-N6-F5
aaaaaacatgaacggttcctgattacaagcaatcacaatccaattgacagagacagcacaattcagcaaaaaccaaaccaacagtgtctatagtttttgaaattaaaaggtgaaataagtaaaaacacgaagcattacatcagggctctataggctctcaagccatcatgccatctttaagcagtgctttatcagtcagaatcctcgtaaacttctccatcggatagctcatcgaatgatcttatgtcaagctgatagcggaggatacctccaatgccaccgaagcctctgcaaaactgtgatccttcttgggatttgtttgtaacgaattcaagagaacaaccaaagcgcttgtactcgttggcaaaccattcgagtaagggcattttttcttgaacttccaactctgcagaggtttcaggatcacggaagttgctctgatcagcctcctgctccttattcaggtgttttatgataatttctccggttgcactgtgctttagcacgtacctattgatctctagattttcccacacaataagggtttctacagcacccat

SEQ ID NO: 11236 - DNA, 569 bp, Gossypium hirsutum
  unsure (1)..(569): unsure at all n locations; Clone ID: LIB3828-029-Q6-N6-F6
aatgaaagatctttatttttcaaaagctgaatccacttggaacatatcacctcaatcccatctttgaaagtgggaaatttatgtaacatattatgaaccaagaataatatctggatcaaagaaaaaaaataaaaagaaccccattgcagaaaatcaacacagcaatgacattggatcgttttacaaagtttttttcattgaagcagcagtgatgcacactgagatcattacgactcagctgcaatctccgtggttgtggttgtggttgatgttgcagcaggggcaggaaccttattggcggcggtggcggcttgtttctctcgttcggtctcgagttggctgtagtttcctttctccttgaagagttggatatggntgatgtttgcagtagagtttaccttcatgtgctatatagtttgatgggctaatggtacaccctccatgggtacacttgaagcagctcttgtggtatattgtcccattcacagtaaccctctcaattggataagcagtcttagaacaggccgcacatttttctctggtgccaccaaacgagttcatcactttca

SEQ ID NO: 11237 - DNA, 517 bp, Gossypium hirsutum
  Clone ID: LIB3828-029-Q6-N6-G4
gagaccactatatatatatatatatatgagattcaagagttctacaatagcaagaatgtaccaaaaatcttacgaagaatagactacaatgcatcatcttcacgagttttttttttttcaaaactcagtttattggattaccataacccaaaccaccaccgagaaatccaccaccagtagcggcataaacgtctgaaggatcgagaacaggtgatgaagaagacccagcatttcttccaccaccacctaaatgcaattcagatatatttggaaatccatctcttccttcaactccttgatcataaagaaaccctttgaacacatgtccaccgatcttaacgacggcttgatatgcgtactcgtcttcaccgccctccactgccgttactcgtacgcatttgaacaccgcaggcgcacggacttgccctggcaatgtctctttaaaaccaacatcttggtggctcgagcttgtatcaaagcttcgaggaggggtagtatttgaagttgatgtatgtga

SEQ ID NO: 11238 - DNA, 551 bp, Gossypium hirsutum
  Clone ID: LIB3828-029-Q6-N6-G5
gggaaaggattgttatatatatacgtgcaataattacataatttataagaggccctcgcagtcaaattaatatatgggagttcatcaaccatatatacattacattgcattcatattcatggccactttagatagtataaggtgaaggcttgggcaacccggagacgatgccacacagcggcgtgttctcagggatgttgtactcgtcccttagtgatttttctggtgacagaacactaacgtaaagctgttcccctaaatatgttctctcccatatctccgacctgatattccacatgcctgcattatcaaacgtcaaaagtatagcagcccatgatttagggaacacttgcaccgtatgcctactcactgcgtcgagcagattatagttctctctcttctcagggctccatgttcccggctcaacggcgaccgcaaagaaggaatacccgtcaatatggaacgattgaaggcttttttcatggttctcgaatatgatttcaacgaagttacgaaatgtcatgttgagtacatttggttgtatggtgagg

SEQ ID NO: 11239 - DNA, 389 bp, Gossypium hirsutum
  Clone ID: LIB3828-029-Q6-N6-H4
gtagtagcccaatttacccgggcccaattaaataaataagcacaaaaaataaaaaccaaaataataaaacagtccagtttcttttttacaaacccaaacttaaagcccaaattcactacccaattacagcggcccaaatgcctaaaccctagcccactagtccaaaacaaagcaaaaaaaaaaactagcctacaagcttcctgcgccgcagcaaccagggtcttcccccgcgcgtgctgcgcttccgcgtgcgtgcgcctcctccagctgaccttgtaccttcatgaaatcgcgccatcggagccctgtcaattccgtccgaaatggagttggatggggttcggacttgtccagcggcggagagaaagggagatttttttctagatcgc

SEQ ID NO: 11240 - DNA, 569 bp, Gossypium hirsutum
  unsure (1)..(569): unsure at all n locations; Clone ID: LIB3828-029-Q6-N6-H5
aacagcaatttcgatttccatatgaaattattgaatacctgtataagattttacatatatgacctatgaaaaaaggatgaatctttgcatacagatgcaacatttaatcaccatccccatgtactttgtctatctattatctaaaagaaacaggcattaccagtgaaaaaggaaaaaaataaataaaagatcagaactttctgcttcttatatgaaaatgaaaaagctagccagttaatacaacattggtaatatctgggaatttctccttaattgcagctttgatccctgatccaatagtttcaggccctgtataactcacaacacattccccttcctcaatagacaatacttccacactcccaccataattcttaatagctggtctcaatatatcaagatgacgattcactgcctcaacagtagtttccttttgttcatcatcgtatacttgtcgaatatccttgactgcatccccaaatttttctttcaaaaccctttcgatccccattttncatggttgttgttgaactagggcaactcttcacatgctccttggagtttaagcg

SEQ ID NO: 11241 - DNA, 546 bp, Gossypium hirsutum
  Clone ID: LIB3828-029-Q6-N6-H6
aaaatgaaaaaaaactgtttttatgtaatatgaataaatatattaattacaattgcactgaatctgttggtatggtttaagcggtggcacttagggtttttgggacagggctggaacatggagtcgggtttaatttgccactagttttaggcttgacattcaaacattgggatgttgcgggttcaggtccggtgtgcttaatatcaatgtctgcaagttccacattttgacatggcgaagaaccgctgcaaataaacttgacagcttctggaagcgcagatgtgccacggatgttcttgaagctaatgttgcttagtttaactttcgattcttcatttatcttgcatttactccatgggcaatatttttgatcaattaggataggggaagagacattattcacgataatatcctcaaaatgtacatctgatactatcccaggagattcgcctggccaagttttgattcgagctccattcgaagtattagtgatggtgcagtttgtgactttaactccctcaactggctcttcatttgggtactttc

SEQ ID NO: 11242 - DNA, 546 bp, Gossypium hirsutum
  Clone ID: LIB3828-030-Q6-N6-D5
aactatcacttaattagtgttagtgttacatatcaattaaaatttaagtttactttataaatagcatctattgacttcatctaagaaaaatcattggtaaaaaaagtctgctgccctagcactctctgtctgcttctctggcaagcctttaaggcttcttgagttctttttttgtttcggcggctgatatctccatagtcttgaacagtcttctttgatgggttttctcttcctgggtccatggaatcagaattcgctggtctatcccttgatgaagaaaaaatcttgccagtacaagttgatccggagtcggtaagggaagaagaagctcttactctggttggatgttttcttacaggtaggatcatgcattacccagcaatgaaaaacaccctggctaatttatggcatcctgaaaaagagcttgggctacgaaagagcttcttgaaaaaggactatgcttccgatcggatgtaacggataaaaattacagatcccactagcggagacagcacatgaagattttcactgttggagaggggagcc

SEQ ID NO: 11243 - DNA, 540 bp, Gossypium hirsutum
  Clone ID: LIB3828-030-Q6-N6-D6
gaaacaagattaaaaattgttggatttccaaatggtttgccagtaatttaaaatgagaaaggtagcatacataagaaacaccaagaagttctgcctttgaaaaaacaaaattacttaagcaaatatcatgaatggccaaaattaaactctgattctaccaaagaaaccatcctctttacttaatccttgtgctgctgaacaacttcgacaccctcgtgttgttcaccgtaatccttcacaactacgcaagagcaaccaactactttccgtgctttcccttcagaatctatcttacacaaaccagcccactcgccaagagcttttgcactaggtgcacgtagcaccttaacattatggtcagcgcagagtgccttgaccagcttaacaaaatcaggttggtcacagtcatcggccaaaaacaaagatgtgcattgtgcttttcaattgccttggcagcttcatgtaagccacgagcaagcccaccatgagcttgggacttcctcaccacaagagcaaggctgtgtttgatgtccattggct

SEQ ID NO: 11244 - DNA, 476 bp, Gossypium hirsutum
  unsure (1)..(476): unsure at all n locations; Clone ID: LIB3828-030-Q6-N6-E4
gggcaaaccaccaggttcattctaaaaaaaaaagacacaaggcccttataggcgaaattagggggaaaaaaagggtttaaaaaaaaaattcatttatggggaggcgggggtatcccagcccggagagggcaaaggaaaccaaacgggattctagcggggggaagaaaatgaaaccccacacaatttagccattttcgcaaactcaactctggaaaaaacacgggggacaacttctatcttcagggacccgcaaaagcaggggggggggtccttcatctttggggaacaaccagcgggggggggggggtttttggccccattcaagcatgagctataccccaagggggtaaaaaatttgggggggggggctgcctttggacccgaaaaaacaccccccctagaggcaccccgcccaaaacaataggggaaaaccccttcatggttttttaaaaaaaaaattanctagctgggcccgg

SEQ ID NO: 11245 - DNA, 475 bp, Gossypium hirsutum
  Clone ID: LIB3828-030-Q6-N6-E5
acaatccaaaatcacaggattcgagatctacaaagggtacttaacacgcatgagttgcagttccaggcactatacacatcgaaatggggagctgcacgcggtaatctaacttaaacgcaactagtccactccttaaaatacataatgacttaagctgtgaaagaagtcaaaactaacaaccttgacatgagatgctacactatgttactcgaacttgatcatgacagataaaaagaaatcccaaggcttagaaagatcaatggttataaccccaccatgtcccaaaaagatactcttaaaaaagcatgaaaatcagagcaacatttgatgcacataactcatatgaagtactacctctttaaaatacataaaatacccgctgtgagtataaaatacaatttatttaagatgcacagcttacatgatacattgcattttaacagcatctccaatctgatgtaaaaatgctgccaac

SEQ ID NO: 11246 - DNA, 570 bp, Gossypium hirsutum
  Clone ID: LIB3828-030-Q6-N6-E6
acgtagacgttcatcaactcttaattttacttcccactttttttaacacgtaccatctcccagtttcttattttaaccatcaacttgctacctaaagcttacaaatagaagtgaatgatggcaattacaaaggagtttattcgcatcatgtctaaaccttcttctctgttacctgacacgtctatgctattctcagctttcagattttactattttacatattctttgcataaatagacgaacactggcacacaaacatagagattaactcccatttccaaattgctttgtatgtccttaaatgatattgaggcagaacccctccttttggacttctgttgagaaggatgttctctccaacctgtcatgtctattacctggtaaagtgcagggatggtgccatctttggctgcaaacattgaatcatagatggatgccgttgctagagctgttaccctcttcaagatattggtcctttgcagaatcgcattagtttcacccattgctcgcagatgttcaattagatccaaggcactcttgtatctaaccacgtattcatcaacatcaaca

SEQ ID NO: 11247 - DNA, 551 bp, Gossypium hirsutum
  Clone ID: LIB3828-030-Q6-N6-F4
attcgcaactgctctaaataataataaacaaataaacaaatttaaacatactataaaatcaattaataaacctaaaccttaatcctcatactcttaatgagctgtgaacctataaaccataaaatgcttatatatccctcgaggcttaacaatctgagatggaaaatttgggtgattcactgcatcagggaatccttgagtctcaaggcaaaaccctgcatgttttccatacacagttccatttttgcccttctcattcttcaacatattgcttgtataaaactggacccctggcatattggtccatagctccattttccttccacatttgctttctacaaccacagcaactttcctcaagtgtctcgaccgcctcgatttatggagcacgtagtttatgtcgtatccgtggggtaattggtcgaacttgctgccgatctcgcgaggccggcggaaatcataagggtttttcgaactggaacgatttcgcccgttgggattagttcagagtccaccggtgttatcttagagccaaatagcttaagtgtgtg

SEQ ID NO: 11248 - DNA, 539 bp, Gossypium hirsutum
  Clone ID: LIB3828-030-Q6-N6-F5
gcccaaccatgttcttttttatatttgaaaccaacaatacataaaaacctacatttggtacatcttttgagaaagcaactatatatacttcattatatatccctgaaactttaactacacttctgttctacatagtgacccaaagactgtttggggaatgactatagggaaaactaaacattttccattggcaagaaaaacataagcaaatgtctttttgaacctcgcaaagcatgtataaaaagcaccctaaaaagaaaaacccaaaagcaaagaagggagaaaatggcactaaaatggggaaaattttacatgatactacaactggttgcgttttcatcactgaagtaatgagcataagattcagatgggggtggatgcatgggtggaggtccataattaagttggggatatgggtgatgagcatacatcatggggggatacatccctccatttgcacgttgttggttcatcatcatgggtgccatatattgaggctgattataaggatttcctgggcccatcccttggtaataccc

SEQ ID NO: 11249 - DNA, 451 bp, Gossypium hirsutum
  Clone ID: LIB3828-030-Q6-N6-F6
aggcagaagaactacagccattcattatactttcagcaattcagaagaaaaacaactatatgcatatacatacatatatacccaataaatgattatgggggggtctctttaatggaagaacaagagggctgaacaattctttttttaccaaattacaagcaccaatgcttctgggattctgaaaaaaataatgtacagccaacttcttaatttcatagcccatacctcaccaggcacgagttcctccctttgtcaaaccaaaggtaatggcgatcatagcgacaacggactgtagaatagcaatagcacatgcaagggatcctgctttttctctataatccactttgacacacagtagaataaaagttccaacataccaggggaataccgccaaagaagaagccaagaaaaaacaataaccatcccattccaagtccacaaacaggtaggc

SEQ ID NO: 11250 - DNA, 575 bp, Gossypium hirsutum
  Clone ID: LIB3828-030-Q6-N6-G4
aattgaaaatacctttttagaaaatattccacaaaagatctgcaaattcctttggcagaagaagaacatggcgactttcaagtttggcgaggagaacattctggccaatttacagtcagaagtgcctataaactattacaataggcaactacagatcctaatgcttatttagtacagatcgaaacaaaaaatttctataggaaattatggagtctacgccttccttcaaaattgccatcactatttggagtctttcatggaactttatccctaccctaaagaatttaagactaagaagagtggctttagatagctcatgtccccggtgtcgaagtgtagaagaagatagcaaccatgtgtttagacagtgccctgggtttttaccataggcaacagtcaactgtgtcagcttttttgttgtgctgcatggatgatatggagctccaggaaccaacttaggtgataacatacgtcagagacagaacacaagaagtacgacagcaactatctatgttgacgcagcctttgacaacaaatattcaagatcggcttcgggtatgatggtgaggggggag

SEQ ID NO: 11251 - DNA, 555 bp, Gossypium hirsutum
  unsure (1)..(555): unsure at all n locations; Clone ID: LIB3828-030-Q6-N6-G6
gtaggaacaggaaccaaacatttttctgcaattaaagtggaatggaaatactggcaagaaaatatttgttgtacagattttgtctacgaaaatctgaaaacctgggaatgatagacaaacaagaacgacaaatccacttgaaaggagaataaagagaaataaaatttgatggcgtcatcatcaaatctcggaaagttgaacttgttgagctggtgctttatcatcttcatcccatttggtagttctatagaaccatgcataaagtataagctgcaccaaacctgacagggttcccaagccattcggaatcaagacgttaatatcaaatttgagtaatgcataaatcacccaaacaactccatttaagaagttaaaaagtgagagactgaagggcatgtacttgacgctttttgtcttaatcaccatacgcatgactgtcaatggtgaaagtgtacattccaatgttgaagacaatggccaaaattccaacaaacatggaccttttnttgggttgtttgaaacacaagtaaagtaatcaaaactacggctaccatg

SEQ ID NO: 11252 - DNA, 438 bp, Gossypium hirsutum
  unsure (1)..(438): unsure at all n locations; Clone ID: LIB3828-030-Q6-N6-H4
atatagaaaaagaacgtagattgaatattgataacactngaaaaaaaaatcgacaagctaatgagattatcaagctcgaacaaaataattttcgactaaaatcacataatgctcttatttacaaatcatttagacctcaaatcagattgaagaaagaaacatcaaccctcaaaaaaaaaacccttagctttaactaaaataaaataaaataaagaagccagcttcatcatcccatcacatgtccaaaaccctatttttccaattggaagctcaaaagctaaagcagaaatcagcagcatgaatgaggtaagtgagcaacaatgctaccaccatcaacatgcatgcaatcccttggtctatcgaattccctccgtcgcttgttggggaagaggactgggcttgaatggaagaaggcaaggtgataatagcacagcaaac

SEQ ID NO: 11253 - DNA, 437 bp, Gossypium hirsutum
  Clone ID: LIB3828-030-Q6-N6-H5
acccaaaaaaagcatcggtccaggggaaaaaacaaaaataaaggggcccaaaacccagggggggggttgggttaaagggggtcccatttcaaccctaaaaactaaaccaaaatccaacaaatttgaatatgggggaaaaccaaaggctatacggaaataaggtcgggaacccaaacaaataaaccctcgaccgggggggggggggcaggaacatgaaagcaaacctaaccgggtccaaaaaaaaaggtggaaagggggaaaaaaaagagctggacaaaaaaacctacaaatcccaaaaccacaaatcccatcggtggacggggcgccaccttggaaaaatttttgggaacgggcttgggggaatttttggagagaagaacactggccttagggaacccccttagggggtcaaaaacgggggcaatggcgcccatttt

SEQ ID NO: 11254 - DNA, 550 bp, Gossypium hirsutum
  Clone ID: LIB3828-030-Q6-N6-H6
agaaccacatctgcaactacattgatcagcaggagccataaaacaaagcacaaaacaaaagttccattaaacaaacactcgctgcttcatattacataatattcaacgtctcacataacgctcgctcaccaactttcttttacagcaggaaccaacacccgcttgtttttattgtgtttgcagtgacagcaaatctaagaaatcacaaatttaagagtgtttgccttctcttgcaatgtgtcgagaaggctgtcaaagctcttcttgaaagactccactccctcgtcttccagctgtgaaccgactttgccccagtcaatccccaacttctcaagtgcactatagatgccttcagcttcagacacgtttgcgtcaatcgtccttgaaactgtgccgtggtctataaaggcttggagtgcttggtcaggcatggttgagaccgtgtcaggtccaatgagaggagcaacatatagggtgtcagggtaggcagggttcttgacactagttgaggcccagagcaacctctgtttcttggcacccttcttcacca

SEQ ID NO: 11255 - DNA, 635 bp, Gossypium hirsutum
  Clone ID: LIB3829-001-Q1-K6-A1
ctttgatctcttttgcaccctctctggtctcttctgtaaagttttgcactgactttatgtagcttagagcctttctattgttctcatcaaaacaaaatggtttgcagccacagtttcatagttccccagagagcttgccatattctcctctgttttctcttgatcttaaccacgacccaagctagatacaaagctgaaggtaattcattactcgtttaattcatttcatttcatatatttggtacgattttgaagtgaatttcctttgattcccacttattttcactgcaggtaaaccaaatcccatatctgataagagagtagtaaatgaagaaaaggcgatggtgttgagtggtcagataggttcaaggccgccaagatgtgagagaagatgcagtacatgcggtcactgtgaagccattcaagtgcctacaaatccccaactcagaattcaaaacaagccttcttcaacttcagtctctgatgttgcttatgcaagaagagatgacagctctaattacaaacccttaagttggaaatgcaagtgtgggaaacttcatcttcaacccctgaacataaattatccatctttcaaccttgtaaatctgcataagagaaatacatatttcatcggg

SEQ ID NO: 11256 - DNA, 606 bp, Gossypium hirsutum
  unsure (1)..(606): unsure at all n locations; Clone ID: LIB3829-001-Q1-K6-A10
gttaccatctgaggagnaaacagnagcaggctgcatttatcgaagaaacagtagaactgcgcctattcaatatcttcacaagtacctgtctcggaagggcattgtatcntgaaaactatcaagatttcaaaagaatgttgacaagcctatggtttgatctttatggtcgaggaggtacatctggttcctcttctgcttttgaacatgttttcgttggggaaatcaagcaacattgtgagcaagaagttagtggcttccacaattggcttcagttttacctagaagaagcaaaaggatgtgttgactatcatggttatatattaccccgaagacgtggggaaactcctgactccgagacacagttgctaacagttcagttcgaatggaatggggttcttaaatccgtgtcaagtacattggttggggtgagtcctgagtttgaaattgctctctatactctgtgtttcttcgtgggtggagaggataactatgtacagctgggtccatactctgttaacatcaagtgctaccgatttggaaataaaatcggttctgtatttccaatagcagaatgatgattttcagctctgtgtgttattattatta

SEQ ID NO: 11257 - DNA, 619 bp, Gossypium hirsutum
  Clone ID: LIB3829-001-Q1-K6-A11
ctcaatgcaagcaggtaccaaaccccattgcggcggaagcgcgtgcgcattcaacatgacctacggtggctcaaccatagccggtaacctatcacaggacaccataaccttagccaccgacccaatcccaaactacactttcggttgcctccaaaagacagcaggcagctcagtgccaccacaaggtgtattgggcttgggccggggcccattatccctcctttcccaatcccaaaatttgtaccaatcaacattttcatattgcttgcctagcattaggtcacctaacttttctgggtcattgagacttggaccaagtgggcaacccgtgaggatcaaatacaccccgttgcttaagaaccctaggaggccctcactttattacgtcaatttgattggaattagggttggaagaaggattgttgatatcccaccaagtgccattgctttcaatccttccactggtgctggcaccattattgattctggtaccgtcttcacccggctagttgagccagcctatgtagctgtccgggacgcattccggagacgagtaagggtggcgaacgtgacatctctgggtgggttcgacacatgttactcggtcccaatcaatgca

SEQ ID NO: 11258 - DNA, 623 bp, Gossypium hirsutum
  unsure (1)..(623): unsure at all n locations; Clone ID: LIB3829-001-Q1-K6-A12
gccaggatcacctcaccaccgcatggcgaactatacatactctgttcaagcagcgattcaagctgggatcgacatggtcatggtccccttcaaccttaccgagttcgtagacgatctaacctatctagtggatagcaaagttattccgatggatcgtattgatgatgcagtgcaaagaattttgcaagtcaaattcactatgggactctttgagacacctatggctgattttagtctagttaatgagcttggaagccaggcacatcgagacctggcaagggaagctgtgagaaaatcacttgtattgctgaagaacgggaaacctggaagtacacctctactgccccttccaaaaaaagcttcaaagatcctagttgctggcactcatgctgataatttgggttatcaatgtggtggatggacaattaattggcaaggattcaatggcaataactctacaagggggacgacaatcctcggtgccataaaatctactgttgatcagagcactgaaattgttttccgtgagagccctgatgccaactntgtgaaatctaacaaatttgattatgcaattgttgttgttggtgagcccccttatgccgagactgcgggggatagca

SEQ ID NO: 11259 - DNA, 630 bp, Gossypium hirsutum
  Clone ID: LIB3829-001-Q1-K6-A3
gcctattgtaaatgccgtaattgacggggatgatattatttatcgagattatatagatatcagcattgctgttggaacttctaagggacttgtcgttccagttgtccgtgatgctgataagatgaattttgctgagatagagaagacaatcaacaatcttgcaaagaaggcaaatgatgggaccatatcaattgatgaaatggctggaggctcgtttacaatatccaatggcggtgtttatggaagtctattgagtacccccattatcaaccctcctcagtcggcgatcttaggtatgcactcgatagtgtcccgaccgatggttgttggaggtactgtactcccaagaccgatgatgtacattgcactcacttatgaccataggttgatcgatggaagagaggctgtcttcttcttgcgtcgtatcaaggacgtcgttgaagacccttgcaggctgctactcgatgtatgaactatgaagaccagttagtaagatttcatggtttttatagcacacagcatttgatttttattcctatatatataataaaaagaacaagaggaataaatgcctcaagttttttgtagggttgcatttgttgattcacccttttttttaattactttctg

SEQ ID NO: 11260 - DNA, 624 bp, Gossypium hirsutum
  unsure (1)..(624): unsure at all n locations; Clone ID: LIB3829-001-Q1-K6-A4
gcggnaaaaggaacctcatcctctctgaaagagattcagatgatattgatgcactactcagctcagaagaggaggaacaagaagattatgatgaggaagaagttagcacagcacggacttctggtaattatgaaagtgactctgattctcactctgcctatggctcaaaacccaagaaaaaacagctcatgttcttctactctgaaatcctctggtagcggttttggtactgaccccaaaaagcggctgaaaatgaagaaaatggttaaggttctaaggggaattgtaccaggtgctgatcagatgggtactgtagccgttctcgatgaagctgttcggtacctcaagtctctcaaggttgaagtaaagaagcttggagttgagaatttcaagaatggagattaaactcatattctggtaatggtttcctcatctaatggaattcaagtttatcctgtattgcatacccatccttcgccgtctctctgatggtttgggttccagagataaagaagacaggcatttagaattcatgtgtgttttagtttccagttatgcatatgtattaatggtgccagtgcatgtgttgcttaaacttctgaagatatatatcatgtcccttgg

SEQ ID NO: 11261 - DNA, 627 bp, Gossypium hirsutum
  Clone ID: LIB3829-001-Q1-K6-A7
ctgacatatattgatgaagatggggatattgttacccttgttgatgatgatgatttgtgtgatgtgatgaggcaacgccttaaattcttgaggattaatgtgcaactaaataatgacaagctcaataaaccttacacaagatcaagtggtggttctactcccttgagatccccatctgttcagcctccattgccaagctttaatactgcttctgctgatgcactgaattctgtaccagtgcctcttcgtgatgctctaactgaagttttctcaaagctttccgtagaagttgcttcgaaagcttcatctgccagtccattgttgggtgatcttttggagtccttgtctaagatgggacaatcctacttgagtcctgcttcccaacctggagttggtgctgattctggcattcctgttggatcttctgagagcccttctggaccatatgctccaactggtgttttaccaaaatttacagctgttgattcaagcttcaagactggcaaggaagccaacactgaaaacgcagcagatggtgtggatgtacctgctgtttctgatccagctgctgttgatttgaatgctgaccctctttatgatgccaacctttctgggtatactaccatg

SEQ ID NO: 11262 - DNA, 651 bp, Gossypium hirsutum
  Clone ID: LIB3829-001-Q1-K6-A8
atcaagttcaattctctcatcccttgttttccttctaagccaaacgaaatctaatcatttttgaaaatggcaccaaaagctgaaaaaagccagccgagaagaagcctgcggaggagaagaaagccgtagctgagaaagccccggcagagaagaagcctaaggctgggaaaaagcttcccaaggaaggcggagcggctgccggagacaagaagaagaagagagttaagaagagcgtcgagacctacaagatctacatcttcaaggtcctgaagcaagttcaccctgacatcgggatctctagcaaagctatggggatcatgaacagtttcatcaatgatatcttcgagaagcttgctcaagaagcctctaggctcgcgaggtacaacaagaaacccaccatcacttccagggaaattcagaccgctgttaggcttgtacttcctggtgagcttgccaagcacgccgtttctgaaggtaccaaggccgtgaccaagtttacttcatcttgaaaaggctatttgttgatctgtagttggggttagggttaggaggctgctttttaaattagatcggtgtggtttttatgtttatttttctgaatttccgcaatttattttgatatatggtttgtattagcgagatggatctact

SEQ ID NO: 11263 - DNA, 649 bp, Gossypium hirsutum
  unsure (1)..(649): unsure at all n locations; Clone ID: LIB3829-001-Q1-K6-A9
cggacgcgtgggagcggattttngaaagaactcaagggatttgcagaaagatccacccacttcttgcagtgctggtccagtagctgaagacatgtttcattggcaagcaacaatcatgggaccctcagatagcccttatgctggaggtctgtttttagttactatccatttccctccagattatcctttcaagcctcctaaggtcgcgtttaggaccaaggtcttccatcccaacatcaacagcaatggaagcatttgtcttgatatcctcaaagaacaatggagccctgcactaaccatttccaaggttctgctctcaatctgctcgttgctgaccgatccaaaccctgatgaccctcttgttccggagattgctcacatgtataagactgatcgggcaaagtatgaagccactgctcgtagctggacccagaagtatgccatgggatgacagttgttggtgtgtaatatgtatcagctttcttatgttgccaactgtgtcgaaccattttatgttttcttttggggaaggaggggggtgttttttcttaaaggaatttgtcattgtgctttggatatgggaagatatggacattctttntatttattccgcgctttataacttgtgtgaaacccttgtnttcgtctc

SEQ ID NO: 11264 - DNA, 600 bp, Gossypium hirsutum
  Clone ID: LIB3829-001-Q1-K6-B1
gaaaatgtgattgccttcaaggtttcaggtttgtcattctttgggaggaggaactggatctggaatgggaacgcttttgatatcgaagataagggaagaatacccagataggatgatgttgaccttctctgttttcccatctcctaaggtctctgataccgtcgtggagccttacaatgctactttgtcagttcatcagttggttgaaaacgctgatgagtgtatggtcctcgataatgaggccttgtatgatatttgtttcaggacacttaagcttaccactcccagctttggtgatctgaatcacctgatatctgcaacaatgtctggggttacatgctgcttacgattccctggtcagctcaactctgatctaaggaaacttgctgtgaatctcatcccatttcctcggcttcatttcttcatggtgggttttgctccactcacttcaagaggctcccaacagtacagagccctgacagttcctgagctaactcagcaaatgtgggatgcaaagaacatgatgtgtgcagctgatccacgacacggcagatacttgactgcatcggctatgttccgtggcaaaatgagcactaagga

SEQ ID NO: 11265 - DNA, 677 bp, Gossypium hirsutum
  unsure (1)..(677): unsure at all n locations; Clone ID: LIB3829-001-Q1-K6-B10
gtttttgcaggtggaagggagacttactttgtcgatgagcactgatgtggcttctcggatgctcgatggagccgtgaaattgcccaagcagttatttggggaaagtactgcagtgatggcgccacacgaggtggtgcagcccgcgaaaggtgggagggatttgttgcgtttgtttaaggaattgagacagtctgttgcaaacgattggggtggttctaaaccacctgtagtggaggaggataaggtatttttggagaagaaagagtggattcatgatcttgagcagcaaataagcaatgcttctcagcaggctgagtctcttgttaaagcacagcaagatatgggagagacaatgggagaactaggattggcgtttattaagctgactaagtttgagaatgaggaggctatgtacaattctcagagagtgcgggctgctgacatgaaatgtttggcaactgcagcagttaaagctagcagattttatcgagaattgaatgcgcagactgtcaagcatttggatacacttcacgaatatcttgggcttatgttagctgtgcatggtgcattntcggatcgatcaagtgctttattgacagttcaaactctcctatcagaactatctacacttcatgcaagagctgaaaaacttgaagctgcatcatcgaaaatatttg

SEQ ID NO: 11266 - DNA, 649 bp, Gossypium hirsutum
  unsure (1)..(649): unsure at all n locations; Clone ID: LIB3829-001-Q1-K6-B11
atttattcattaatcagatgaacctccttgatcgagcagtgaagaggtagctgaattagatgaacctgtggagcagaactatgtacgtaagcacgccttagagcaagccaaagccttgggaattgaggttagagaagctgcaacaagggtcttctcaaacgcttcgggatcgtactcttcgaacgtcaaccttgctgttgagaactcctcatggaatgatgagaaacagctccaagatatgtacctgagccggaaatcatttgcttttgactgtgatgccccaggtgcaggtatgactgagaaaaggaaagtctttgagatggctctaagcacagcagatgccactttccaaaatcttgattcctcagaaatttcactgactgatgtgagtcactactttgactcggatccaacaaacttagtacaaaacctccgcaaggatggaaagaagccaagtgcatacattgcagataccaccactgcaaacgcccaggttcgaactctggctgaaactgtgcgactagatgcacgaaccaagttgttgaaccccaaatggtatgaaggaatgatgtccagtggatatgaaggggttcgtgaaattgagaagcgccttacaatactgtnaggtggagtgcaacttcgngcaagt

SEQ ID NO: 11267 - DNA, 628 bp, Gossypium hirsutum
  unsure (1)..(628): unsure at all n locations; Clone ID: LIB3829-001-Q1-K6-B12
ctgcttagnattagtttctcgtatttatggggctacttgaccagttgtgggacgacaccgttgcgggtcctcgacccgataatggtctcggcaagctccgaaagcactccactttcactttccgctctaactcctccaaggaatctgatggcgggagtgtgagatcgtacaatgatgagacgccggaggaaacaacgaaagtgacacgtacgattatgatcgtaaaatcgccgcgttaccagagcggatcgcctccggtttcgccggccgaatcgactcctccggaggaagcagagagtcgtatcggtttcggagaaggtcaacatcagatgcatacgagaaggggaaggagggtggaggtaggagccttgctcctccttacgacgtgtgagatgtgaacctctcctctcctctctgctgatccccctattcgccgacaaatcaattttaatctgcatagtttcgacgtttatacagctgaactttataatgttgttaattagagtttgcccactttgtctttttgcatgcatgtatgtctgtatgtgtacttgttttggcaatgtaactacttctatcatcatgggatattattatatataatgtgcagacggcgttgaaaagctgc

SEQ ID NO: 11268 - DNA, 558 bp, Gossypium hirsutum
  Clone ID: LIB3829-001-Q1-K6-B2
aaccaatccatttattcatcaaactaaagagggaaaaaagggctaaaaatcaacacacataaaataaatatttaggccatggctttcacacatatgtaagaaaaaaggctctgaatacatctacacctttatagtacctacttacaacgagcgcctcaacattgctctcatcgtttatctcatctttaaacatctccggcatgttgattttgaaataattgttgtggatgatgggagccctgatggtactcatgaagctgagaaacaattgcagaaactgtatggtgaagatcgtgttctattgatacctatacctaataagcttggattgggaacagcttacattcacggcttgaagcatgcttctggaaattttggtgaaatcatgggtgctgatctgtgccatcatccaaaatatttgccaagcttcgtcaagaagcagtctgaaactggtgccagcgtagctactggaacacgctgtgtcacgagtggtggcgtgcatggatggaatctgatgcgctcgctaacaagtgcggcagccaatgttcttgcacaaac

SEQ ID NO: 11269 - DNA, 388 bp, Gossypium hirsutum
  unsure (1)..(388): unsure at all n locations; Clone ID: LIB3829-001-Q1-K6-B3
gtatggagcgagggcaaggcaggatctaccaaagttggtaaaactagcagaaacaggaatcttcaatctaaacaatgctgtttctcgaaaatacaaatttgaagagggaaataaagcatttcaggatcttaaccagggnaagaattgtcagccgaggtgtaattgagataatgtaagttgcttttccttttctcaacaataatacaactttgacacacgcaattcagcaaaatcaaagtaatattgggacattatggagttgtggttgtcacatttcccattatgtttgttgtaatgttttcctctgtaattgtctggtagtatgtattttactgtcaccatgatccgaggaatgttcaatcaagtattagaattggggttacatgtc

SEQ ID NO: 11270 - DNA, 625 bp, Gossypium hirsutum
  unsure (1)..(625): unsure at all n locations; Clone ID: LIB3829-001-Q1-K6-B4
gtttgaaacatggagtccacaccaaatgtcagctcttcttttgatttgcatgcttttcatttcttcagtgacaccaattcttgggtgtggttcatgtggngaaagcacacaagcatcgaaagcctaagggaaagtcccctaaaggtcccatcactttgcctccccttgtgaaacctccaatcaagttgccaccggttgttcctccaatagttaagccacccattgacctccctccggttacggtccctccaattaaccttcccccagggacggttcctccagtaactaagccaccaagtgggaaaccctgcccaacaccaccaaccaaggacacttgccccattgacacactgaaattgggtgcttgtgtggatctgctgggagggttggtgcacattggactaggtgacccggttgtgaaccaatgttgtccggttctttcaggactcgccgagctcgaagctgcggtctgcttgtgcaccaccctcaaacttaaggttctcaaccttaaaatttatgtgccactggctcttcaactccttgtcacatgtgggaaaacaccccctcctggttacacttgctctctctaaaaccaagttgctaggttgatggactcttatgatgg

SEQ ID NO: 11271 - DNA, 243 bp, Gossypium hirsutum
  Clone ID: LIB3829-001-Q1-K6-B5
attcaccagcctccaaattgtattttaattttcccttggaatgttcaatgaccataaagcattttaaaatactttgtaatcctcaccaaaagaggatctgtaagtagagtctcgtaagtagtcagtattaagagcccaatatccactcttaacagagtattccccagaaccctcatgtttccaaaccaacctatcctcctgaccactttcagaaatgggtgcatgaagcaattaacagttgtt

SEQ ID NO: 11272 - DNA, 512 bp, Gossypium hirsutum
  Clone ID: LIB3829-001-Q1-K6-B6
ggaggaaaaataaaggagcaaaagtccaaccatttctgctttgtttctcttagttcttcttttcaacttagtttgactttattttatggcattggcttcaacttttgtctgcttctttctttatttttattattttttacataattatgttagtgcgcaaatcgctttctttgggttgtgatttttgaagtgttaaggtctgggttttagctgtggaagcatgctttgtcttaaaggttggtgagtgcgtggacctgacttttagtttcccctctactttatatctttaacatgacgcctttttctttgtttcccgaggttcggttagctctaacacagcttgctatttcttctttttcctttcaacttctcacctcttcccaatttccactctgatttttcgcctttcttcgttgctgattttgctacttactttctctaactatggcgctctattgccttcatgcttagatccaaagtgctctgtttgtctacactgaacgcctccgctt

SEQ ID NO: 11273 - DNA, 659 bp, Gossypium hirsutum
  unsure (1)..(659): unsure at all n locations; Clone ID: LIB3829-001-Q1-K6-B7
aaaaactcctataattgtgagctttatcagcttttctagtttgttagctttcctataaaataaaaaatggggcattttcagatttcacttttaaattaaaacctcttttgaactctctttttacaatcttactctcggagttgcagtgcctggaaaaaatggggagagcttcaaggtggctgaagagcttgtttgggataaagaacagcaaaaacagcttcaatcccagagacgggaaagacaaggaaaacggcagcattgaccattcagtgggtgattcaagcatttccccagaaaaggttgcgtggttaagatcgtgctataatgaaacagagagggagcagaacaagcacgccattgctgtggctgccgccactgctgctgcggcggatgcagcagtagccgccgcgcaggctgcagtggcggtggtgagactgactagtcatggtagagggaccatgtttggtggtgtacatgagaagtgggctgctgtcaagattcaaacagtttttagaggttatctggctcgaaaagcttacgagctttgaaaggattggtgaaaattcaggcacttgttagaggatatttagtgaggaaacaagcttcagctacatttcatagcatgcnagcattgatgagagcacaagctacattaaatc

SEQ ID NO: 11274 - DNA, 664 bp, Gossypium hirsutum
  unsure (1)..(664): unsure at all n locations; Clone ID: LIB3829-001-Q1-K6-B8
cccacgcgtccgcttgttttggatttgtgggatataggggaactttcacttggtgcttcaaggatgaaagaaatcgacttctgtcccgaggagtctgagaatcatattccttgctttaacatttcagagaatcttgctttgggttattctgatggtagcgagtatgaccggcaatgtggacaaggctcaaggcaaagttgtttagttcttccacccgtgaactataaaattccacttagatggccaactgggagagatgtcatttgggttgcaaatgtcaaaattactggtcaagaggtgttcacctctggcagtttaaccaagagaatgatgatgctggaggaagagcagatttcattccgatcagcatcacttatgtttgatggtgtggaagactattcccatcagattgctgaaatgattggattgagaaatgaatctaacttcatacaagctggggtcagaaccatcttggatataggatgtggttatggaagctttggagcacatcttttttccaaacagctcttaaccatgtgcattgcaaattatgagtcatcaggcagtcaagtccaactcactctagaaaggngccttcctgncatgatcggntctttcaattcaaaacattgccatatccatctctttcgtttgatatgctgca

SEQ ID NO: 11275 - DNA, 641 bp, Gossypium hirsutum
  unsure (1)..(641): unsure at all n locations; Clone ID: LIB3829-001-Q1-K6-B9
gttcctcgcaaanaggataattatttctttgcttgtcgaaatccaaaaaccattagaagaaattttagaacaaaatccagattttgttcagccttcttaccgtttgaatgaggtccaaggttggataaaaatggcttaagagatttttcgatttcccgagcagctgtggaatggggtattccggttcccaatgacaataagcaaactatatacgtttggtttgatgcacttctcggctatatctcggctctgttggaggataaggagcaaataagtttacaaagtgctgtttcttcaggttggcctgcctcattgcacttgattggaaaggtatgaaactaatccacacggcaaagtatccatatgcaccaaaatgctactcaagtgaatgagttatgttcccctttttgaattgtgccgagtttggcattttctttttgtgtaggatattttacgttttcatgctgtttactggccggctatgctaatgtctgctggattgagtctcccgaagatggtgtttggccatggtttcttgacgaaggatggcatgaagatggggaagtcattagggaatacaatcgaaccaaatgaattggttcataaatttggagctgatgcagtccggtacttcttcctaa

SEQ ID NO: 11276 - DNA, 651 bp, Gossypium hirsutum
  Clone ID: LIB3829-001-Q1-K6-C1
cggacgcgtgggcggacgcgtggggttgctctcatcatcttctccaatagaggaaagttgtacgaattttgcagcagctcaagcatgatcaaaacattggagaggtaccaaaaatgcaactatggagctcctgagccaaatgtgtcatcgagggaggctgctttggaattaagcagtcggcaggaatatttgaagcttaaagcacgttacgatgccttacaaaggtcccaaaggaatttactgggagaagatttgggacctttgagcagcaaggaactcgagtcacttgagaaacagcttgattcatcattgaagctaattagatcgacgcggacccaatacatgcttgatcagctcaatgatcttcaaagaaaggaacatcttcttaatgaagccaataagaccctaaaacaaaggttggtggaagggtatcaagtaaattcgttacaattgaatccaaatgcaacggaagacgtcggctatggccgtcaacaggttcatcatcagcctcatggcgatgccttcttccatccattggattgtgagccgactttacaaatcggatatcagcatgatccaatgtcagtggtgactgcagggccaagtgtgaataattatatgacaggttggttaccatagtatatatatatc

SEQ ID NO: 11277 - DNA, 664 bp, Gossypium hirsutum
  unsure (1)..(664): unsure at all n locations; Clone ID: LIB3829-001-Q1-K6-C10
cgtgactcgaagattggaagccaatgatttctccacattacctgaggtccatgcatgtactgcagggttaaaatctgttactacttctgcaactgcagatgcaatcgaagaatgccggaaattatgtggtggtcatggttatctttctagcagtgggctccctgagttatttgcagtttatgtccctgcctgtacttatgaaggcgacaatgttgtgctacttttacaggtttcaaggtttctaatgaagaccgtttcccagctggggtctgggaagaagcctgtcgggacaatagcttacatgggacgatcagaacacctcttgcaatgccgttgtgaagttgaaagggctgaggattggctaaagcctaatgtaatattggaggcatttgaagcgagggctgctaggatgtcggtcacctgtgcaaaaaaccttaacaattttccaaatcaagaagagggttttgctcaactcgcaactgatttggctgaggctgcagtcgctcatgttcagttaattattgtttccaagttcattgagaaattgcaccaagacatacccggaaagggagtaaaaagacattggagatcctatttaatgtatatgctttaagtctgttcacaaacatcttggtgactttgtcacctnncgctgcattacccc

SEQ ID NO: 11278 - DNA, 631 bp, Gossypium hirsutum
  Clone ID: LIB3829-001-Q1-K6-C11
cttttcttttacctcttcccccccccccccctttctctccaagaggacctcccgtggagccgacgtccgccaccgccgactccatcccgccttctccgccgcacgatcctctcgattccgttcccatcgggtcacctgaagacgatattctgtctccgccgtccgatgatgatattgaccacgatcacggtcacgaaaatgaagatgatcacggccaggaggatcaggttcagaatcatgagatctcctcggcggttgatgtacttactgatgatctcaaaaagaagatcattaagcaggcggaatattattttagcgatgaaaatctgcctactgataattacatgatgggactaattaagaagaacaaagaaggttttgttcctatttcagttatttcttcatttaggaaaacgaaaagactcaccaggaattatacatcaatagttgctgctctcaaagagtcatctttacttgttgtgagttctgatgggaagaaggtaaagcgtcggaatcctcttccgttcattgaagttagggatccaaagttattcaccattttggtagataatcttccagaggatcattcggtagaaaaatttaagaggatatttggtgaagtgggaaggat

SEQ ID NO: 11279 - DNA, 643 bp, Gossypium hirsutum
  Clone ID: LIB3829-001-Q1-K6-C12
ctttgcatggaacttgcagcgaaagctttgtgggggctaattcagcaacagagatgacccaaagtcagggaagtggtccgacggccggagaagcggtgacggcgccggaaaagcctaaacaaagagttagggcaaggaggggtcaggctactgacccgcacagtatcgcggaaagactacgtagagttagaattgcagagagaatgaaagctcttcaagaactggttcccaacgccaacaagacagataaagcttcaatgcttgatgagatcatcgactatgtcaaattcctccagctccaagtgaaggttctgagtatgagcagattgggtggtgctgctgctgttgctccccttgtttctgagggaggtggcgattgtattcaaacaagtgccaatggtgggtcccatccacgaaattccaacggcgaccaaacgccgtcggccaacgacagactgacgatgacggagcaccaagtggccaagcttatggaagaggacatgggctccgccatgcagtatctgcaagagaagggtctgtgcctcatgccgatctctctcgccaccgccatctcaagcgccacgtctcgttcaaggaaccccatgatcaaccattgaaaacccggccaacggcagccaccttt

SEQ ID NO: 11280 - DNA, 647 bp, Gossypium hirsutum
  Clone ID: LIB3829-001-Q1-K6-C2
ctcagcaagcttcttttgccccttttcctcactcatattgccgtctcgatctcgaaaaccgaagctcaagttgaagacacaaggtcgaagctggtgagagatgctttcgaatggccactttcaatgtcgtttcagggtgacttacacgacaatgaagaaggcgatgaggaggtagatgatgaagttgaaaatgggtatagtggtagatctttgttgtggtggaagagaatgaggtattacatttcgtatggggcgctttcggctaacagaatcccatgtccaccaagggcaggcaggtcttattatactcacaactgtttcaaggctcgtggccctgttcatccttataccaggggatgttccaggatcactcgctgcaggagatgaggttttaaatttagccctttttagaatctgggtctgtattagttaatcattatttttcgaaatgtggaagatttgagtgttttgggatctggggcttctttttgccctccttttagtgtttgaagagcatcatgtgtcataaggttaaactactttatggttatggtagttattatatatagttttggtctggaagggcgggggtgttcattggcagtcgctattttatatcatatatgtgatctcatcaacctacatgt

SEQ ID NO: 11281 - DNA, 644 bp, Gossypium hirsutum
  Clone ID: LIB3829-001-Q1-K6-C3
ggtttaaaagagaaactcttcaggtggagtgagcaaataagggtttgctccgcgacgtcattagaggggcctctggatgatggatattgctggcgaaaatatgggcagaaagaattcttggatccaattttccaaggggatattatcgatgcactcatcgtttctcgcaaggctgcttagccggtaagcaaattcaaagatcagacgaggacccaacaatcttcgaggtgaaatatcgtggaagacatacctgtaaccaagtctctcacttggttgctacgcccaaagagaaaggcaatcattatcgggaaaagcagcaagttgaagagaaacaaaagcaatccgaggaattgttgttgagttttgaaacagggcttaaggttaatacagaggacttggacaacagagagaacatatttccttcattttctttccccattgagtcagaggaagttcaaaatgggttattgcgtaattccctaatgaaaaacatatctccggcatttgtgtcaccagctacatctgaatccaactatttttcagtgtcagcgttccacatgggcagctttgatttcagccaaaatgtgcagacttcggaatctgaacttacagaaataatctctgcaccagcttcagttactaat

SEQ ID NO: 11282 - DNA, 585 bp, Gossypium hirsutum
  Clone ID: LIB3829-001-Q1-K6-C4
cttcctcatttcttgttcttatgctaagagtacaaggtttatcaaaatgagctgcaatggctgtagaattcttcgaaaggttgcagtgaaaattgtatgcttagacaaagcttacaatgtatagagaacccacaagctcaagcacacgccaccgtttttgttgctaagttctttggccgtgccggacttatgtcatttctctcctccgtcgccagtcctcaaagacctgctttgtttcagtcgcttttgtttgaagcagtgggacgggcaattaatccggtgagtggagccgtggggttgttatggacagggaactggaacgtctgtcagtcggcggtacaaacggtgctccaaggcggcacgttgcagccgttgcctgaatttagtggtggggtttcaggatcggattttgaggatgttggagaaacggtcggtgttggtggcggcggcggcgctggggggccgtgtatccagtcgggaggtttcgttgacgttgttgaatgtaaagcatctgatctcaatctctgcttgatgatcggcgacgatgatagagcggttaaaaggagaagggaatctacatcgtcg

SEQ ID NO: 11283 - DNA, 644 bp, Gossypium hirsutum
  unsure (1)..(644): unsure at all n locations; Clone ID: LIB3829-001-Q1-K6-C5
cggccgcgtggngaaaacctgtaaattgtttttctatttattgcctcttcgctcgatctcatcagcctctttcttaaagaaaaactcaaatctcactaaaaaccccacaaaacattcaagacagaaaagagggcgtgttgttgttgtttctcttcgacttcgatcgatgtcggcgagggtaataacggtgtcccaagacggcaatggcgactaccgaacagtgcaggaagccattgacactgtcccactctgcaacacctgccgcaccatcattcgactgtcacccggggtttacaagcaacctgtttacattcccaagaccaagaacctcatcaccttggctggtctccgccctgaactcactgttcttacatggaacaataccgctactaaaattcaacatcaccagggttcgaggttaattgggactggaacgttcggttgtggcactgtgattgttgaaggagaagatttcattgctgaaaatgtcacatttgaaaactcttccccagagggttcaggacaagctgttgcaatcagagtaacagcggatcgatgtgcattctataattgcaaattcctgggctggcaggatactctatacttgcatcatggaagacagtacttgaaagactgctacattg

SEQ ID NO: 11284 - DNA, 654 bp, Gossypium hirsutum
  unsure (1)..(654): unsure at all n locations; Clone ID: LIB3829-001-Q1-K6-C6
gctttccagnacaaagcttcatattatcttttttagttccgacaaaagaaaacgaaaaaaaagaagaagaaatcaatcgttttctttttgaagtcgggttttagtttttggggtgaaaaaaatgttgggagtatttagcagtgcgatagtgtctccgccggacgagctggtggcggccggttgccgaactccatcacctaagataacggcggacgctctggtgaaacggttccttgagacgaactcctccggcgtgtccatgcacatcggagaccatgtccaattcgcttattctcaccataaagagtctcctttacagcccagatcatttgctgtgaaagacgaaatcttctgcttgtttgagggagcccttgataacttggggagtttaaagcagcaatatggtctggcaaagtcagcaaatgaagtgatattggtcattgaagcttacaaggcccttcgtgaccgagcaccttatcctccaaaccatgtggttggccatctaattgggagctttgctttcattgtctttgataaatccacctccactttgtttgtggcttctgatcaatttggtaaggttcctctctattgnggaatcaccgncgacggatatgtggcctttgctgatatgctgaattgctgaaagtgcct

SEQ ID NO: 11285 - DNA, 489 bp, Gossypium hirsutum
  unsure (1)..(489): unsure at all n locations; Clone ID: LIB3829-001-Q1-K6-C7
cggacgcgtgggggccgccctttttttttttttttgtttaaagtaaataacgagnaaagcttcattaacataaggtgcaattacaggtaatttacatgccattacaccccatacaagatccacaatctcactgagatctcatcctattaagctggttcaaagcgggttgcagaatgttgtaggccacccaaagaagagctggtgctacaacgaagaggagaagggtacccctattgtcactagatgcagcatcagctaccatagctatctcactggccgatgcttccggtgttgacatgaaccctgatgcagccaatcctccgagccctagccctatgataacccctttggagctcctcattcgattcagctggttaagtgctggctggaggatgttgaagaggacccaagcgatcgctgggattatgggaagcaatagagctagcccacggttgtctccttcagctatttcagcaatctagatcgcga

SEQ ID NO: 11286 - DNA, 662 bp, Gossypium hirsutum
  unsure (1)..(662): unsure at all n locations; Clone ID: LIB3829-001-Q1-K6-C8
aaaaaggcagttaggaaccagaaaccaagcaatggcttctcttgcaaccttagctggtgttcaaccaacgaccatcaagggccttggtggcagctctctcaatggaaccaagctcttggtgaagtcaactcgccagagtttcaaacccaaaaactacagggctggtgctgtggtagcaaagtatggtgataagagtatatactttgatttggaggatattggcaacacaactgggcaatgggacttgtatggatccgatgcaccttcaccgtacaacccactccagagcaagttctttgagacatttgcagctccatttaccaagagaggattgttgctcaagttcctgatcttgggaggcggttccctcggtctttacctcagtgccactgcttccgatgaccttctaccgatcaagaaaggtccgcaactcccacccaagcctgggccgcgtggcaagatataatttagttaaactctttaagcttttcattgtatgtatcttgtttcagttttcaaacatgtaatcctaaaatgtgaccttggctatcgatccaatgacatttgtttcacgcttaactggtgcattgctttcagctntaaaatttcttctctttgataacgatcctatcccttctgattactgatctgaactgtcattg

SEQ ID NO: 11287 - DNA, 669 bp, Gossypium hirsutum
  unsure (1)..(669): unsure at all n locations; Clone ID: LIB3829-001-Q1-K6-C9
gaagcttttagcttgcttaagtattggagaggggctggtggtggtagtaatggttgtgttaatgcacgttctgcagccacagccggcggcacgactacgattgtgacggcggtgagtactcgtcaggtggtggatacggatgatgatgatgacgacgatggccctttctttgacttggagtttgcggttcctgatgaggacgaaacagaggggagtgaagagaaaaaggaagaagatgaagatggtaatattgaaggtgatgaaagtgaggaacaaagtgatggtgacgatgcaaaatctgatgatggaagctctgatggtgatgatagagagttcaattttacactctcctctggttcaagcagcgacccttgtgatccaaacttaactctatctccttcagatgatttgttctttaaaggaaggctggtacccattgaagcaaactcttgtttggaatcaaagcctcctcaattcccagtttcattgttgaaatcggccaccaagtttcgagttttcttgttaaggttcaagaaatcgaagctcaactcaactgaaaaaacagagtcgggttcagctaatggacctgtttcagtccccacgactgcaaaaaaacagaaacaccccagnagaaaacnnacaacagaacagcttttcacagtgaaattt

SEQ ID NO: 11288 - DNA, 608 bp, Gossypium hirsutum
  Clone ID: LIB3829-001-Q1-K6-D1
cggtttcagattttcgaagacacttggatttaatcagatccactaacaagaagggactgccttatactcttgctgtcaatcagtttactgattggagctgggaagagttccagaaacacagattgggggctgctcaaaactgctctgctaccacaaagggcaatcaccagctcactgatgtcgtccttcctgattcgaaagactggaggcgagtgggcatagttagcccagtcaaagatcaaggctcttgtggatcttgctggacattcagtaccactggagctcttgaggcagcttaccatcaggcatttgggaaagggatctccctatctgagcagcagcttgtggattgtgctggagcttttaacaacttcggttgcaacggtgggttgccatcccaagcctttgagtacatcaaatataacggcggccttgatacagaggagtcgtacccttacactgcaacaaatggtctatgcaaattctcttctgaaagtgttggtgttaaagtccttgactctgtcaacattaccttgggtgctgaagatgaattaaagcatgcagttgccatggtccggcctgttagtgtggcatttgaagttgtcact

SEQ ID NO: 11289 - DNA, 629 bp, Gossypium hirsutum
  Clone ID: LIB3829-001-Q1-K6-D10
gccggtccagatctactcctatcaggtaaacgttttcctctctgtcaagagcactttttgccaacctatgtgcatgcgagttctctgatctattaatgtattgaaattttagttactggaaacatggtttcttattatggatatctctgataatagccccaatcactaatttatctagtgaagctttcaacattttttaataactgttctggagtcccccatgattttgattgataacattcttagtgagattcctaactttatactttccaaacatgtgtacgcctctgctacgaacgaggaagaaacattgttgtgaaccaccgtcttaagcaccaacaaatcccctttttggtcccatcctaccagtcctgttgctgacttggagcttcttctgtcaaacgctgcgtcgaactgaatcgttgcttttgggcactctcaaaatacatggaggctttcttcaaaccaggaccggcaacgagggcattcatcatttgtaatgactttcctgcacctgagattaacaaaattgggaatatagtctcaggagattctccaaatagtcattgtaatttttgggggtaactgtaagccccataattttctataaaattctttatatttggtct

SEQ ID NO: 11290 - DNA, 653 bp, Gossypium hirsutum
  Clone ID: LIB3829-001-Q1-K6-D11
ggcagcagctgccgccgccgctgcacgtcctctggtctccgtccaaaccatagaatctgacatggccactgactccacccaaaccgtcccactcgccgatgtcatgaaagcctcgatccgacccgacattgtcaccttcgtccacgacaacatctccaaaaaccgccgccaaccctatgcagtctccaaacgcgccggtcaccagacctctgccgaatcctggggcacaggccgcgctgtctctcgcatcccccgtgttcccggcggaggtactcaccgtgctggtcaaggtgctttcggaaacatgtgtcgtggaggccgcatgtttgctccgaccaagatttggcgccgctggcaccggaaaatcaacgttaaccagaagcgctatgccgttgcttcggcgatcgctgcctctgccgtaacctccctcgtcatggcacgtggccaccgcatcgaggccgtcccggagatgcctctggtcatgtctaacgccgtggagagcgttgagaaaacctctgccgcaattaaggttttgaaacaggttggggcatatcccgacgtggaaaaggctaaggacagcgttggaatccgacccgggaaagggaaaatgagaaaaccggagtacatttcccgtaaagtccattgattgttat

SEQ ID NO: 11291 - DNA, 644 bp, Gossypium hirsutum
  unsure (1)..(644): unsure at all n locations; Clone ID: LIB3829-001-Q1-K6-D12
ccccgcgtccgattgagggtcttgacgaatcacctccggaaggaattaaagttggtgtaaatgatgatgatttttcgatcatttatgctgacattgaagggccagctgggactccatatgaaaatggtgttttccgtatgaagttgttactgtctcatgatttccctcattctcctccgaaaggctactttctgaccaagatttttcatccaaatattgcacccaatggggaaatttgtgtaaacacactaaaaaaggattggaatccaagtcttggattacgacatgtactcatcatagttaggtgtttattgattgagccatatccagaatctgcactaaatgaacaggctggcaagatgctgcttgaaaattatgacgagtatgcccggcatgccaggctttatactggaatccatgcgaaaccaaaaccgaagttgaaatcaggagctatttgcgagtcaactacagcattgaacgtggagcagcataacacctcggttctgaatatcgagcagaaaaagcagcaagtggtgccgggttatcattgccatccncactcgctccgtcatcgacaaaagaggcaacaatccagaccatcagtcgcagccgcagcagcagcctatagttccggcaactgaaac

SEQ ID NO: 11292 - DNA, 356 bp, Gossypium hirsutum
  unsure (1)..(356): unsure at all n locations; Clone ID: LIB3829-001-Q1-K6-D3
cngaggttgtagaagcagctgtgtgagcgtcctaagctacctagggtttccttcnattcgaaaatgatttacgacgtcaattctcctctcttccgttctttcctcagccagaagggaggctcctccgacaagagaaaaaggaggagcagaagcctaaggaacagagacccaaagcaaatgagaataagcctgtcatgacagagtaacagctgcttttgtttagtatgcatggcaagttggtggatggttgttcttagaactctgatatgttcaagattgaaaatgcttgttgatgtattcaaatactgtcataacggtttttctttgagatggaatgatattcaactttgtggatg

SEQ ID NO: 11293 - DNA, 428 bp, Gossypium hirsutum
  unsure (1)..(428): unsure at all n locations; Clone ID: LIB3829-001-Q1-K6-D4
ggcggctacggtggtggtgctgcaggagggagttctttctatggaagtcgaggggggtatagtggtgcgggaagtggtcgataccatccctatggaagataggcaaactgggaaagatctctgttgagaggttacaaaatgttgtctcaatttgtactattgtagctcttttcttatgtgcattattccttagtttagtttctctgttgtttatttttgggagtctttcagaatttgaggtttcaactttctaaggatttgagtatccattttactcttttaaattttagtttaatttaagctaaactatgagagctaagtggtctgattttgtatttctcttttagttgatattaaaatgcaaacttccctagctgtgaaaaaaaaaaaaaaaaaaaaaaaaaaaaaaaaaaaaaaaaaannanana

SEQ ID NO: 11294 - DNA, 626 bp, Gossypium hirsutum
  unsure (1)..(626): unsure at all n locations; Clone ID: LIB3829-001-Q1-K6-D5
gttgatggtgggccctcggggngnatccagtgcattacttttacgatgagccactgcttttgatcccagagtgtgatggagtgaggattttatcgaacacaagtttggagtttctgcaacgggttccagattctactgtatctatattcaaaattggtagcacatcaccagctgcattgctttatgatgccttggatcattttgaccggagaagtgccaaggcagatgaaaatttgagattgattcagtcatccttgcctgaggctgttgaagcctgcattgatgctgctggtcatgaatttgatgtttcacgtcaaagaactctattaagagctgcaagctatggacaagctttctgcagtacttttcaacgtgatcgcattcaggagatgtgtaaaaccttgcgggtcttaaatgctgtgcgtgatcctgagattggcatccttctcagtattaatcaatataagttgcttacaccatctgtgctgattgctcgtttgattaatgcccatcgccaccttcttgcactacggatatcagagtatgttggaatgaatcaagaggtggtgataatgcattgggcatgctcgaaganacagcttcattagcaattccagatgccactc

SEQ ID NO: 11295 - DNA, 632 bp, Gossypium hirsutum
  unsure (1)..(632): unsure at all n locations; Clone ID: LIB3829-001-Q1-K6-D6
cggacgcgtgggttgtgatcccaaggtcgttggtaccaagcagatgctggattagctcctggggatatgttgctcattactggcaaggcgcttagccatgccaccgctggtcttcgtcctgctgccacctatagagctgctcccgagtacctatcaggcattaataatggtggcaggacatcacttgcattcaggctcatgccacaaggcaatgctatattagattgctctccagttgcagctgctggtcatgtaattccacaaagctatgtaccaatatctgttagccagtttatggatgaactttctgctgaagaagatgtagtgtgcaatcgttctgataatacttgtgtagctcgaaacaatttgaataagcagccttcattgagaagcgttctatcagaccccttgtctggtgcattccttgaagatgctgtggttgtttcttgtggacattcatttggtggtctcatgttgaagagagtcctggatatgtcaagatgtacactctgcagtgcagacatcgactctggatcattgatccctaataaagctctaagagctgctgctntagctgtgaagcaagaggataatcggaggctattccataatgccgctcttcgtaaacgacg

SEQ ID NO: 11296 - DNA, 481 bp, Gossypium hirsutum
  unsure (1)..(481): unsure at all n locations; Clone ID: LIB3829-001-Q1-K6-D7
ggccccctttctctttctgctagggcgcagcgcccatcatcgtagcgcttcccctcccctgcgtgctcatcggcgaccgtcggaaaccaggtgttgttgcggatatctcggaagcacgaggcgtgacaaagagggactgctggtagcgcacgtctcggaggtgcggtggatggtggagtgggacgctggtgagaggcgtgcggcgcaagggctcaagcaacagctttaggtttctgtttgtttgggccttgtttgggtttatttttgggcctgtgttttagatgtaaatgagtcttggatttgggagctttgagcccgggcattaatttggtcctacagctattaataatgaatcattatcatctccatggatgtattatacatccatccctacccatactgttccatttcaatttaaatttggctatttatctttaatatttttaatttttttaagtcnnnnnnnannnnnnnannnnaa

SEQ ID NO: 11297 - DNA, 613 bp, Gossypium hirsutum
  unsure (1)..(613): unsure at all n locations; Clone ID: LIB3829-001-Q1-K6-D8
cgaaatgttggaaccgaaggatcgaccgatataatcgagccgttaaagcagttaatcgttgtcacgccgacttataatcggggatttcaagcgtatttcttgaacaggttagggcaagttttgaggttagtgaagccgccgttggtttggatagtggtggaggagaaagcggcgtcgcatgagactgcagagattttgaggaaaaccggggttatgtatcggcacgtgttatgtgcgttcaactctagcagcgtgaaggatccaagggttcatcaaagaaacgccgctttggaacatatcgaacggcataagctcgatgggatcgtgtttttcgccgacgacgacaatgtctacacgctcgagttgtttgaaagcttgagaactatcagccgtttcggaacttggcctgttgccatgcttgcacaaagcaaaaacaaggcaattctggaaggtccagtatgcaatgcaagtaaagtaattggatggcacacaaatgataaaagtaaaagaatccgtaggttntatgttgatatgtcaggatttgctttcaacagctctatattgtgggatccaaaaagatgggcgcgtccctcctcaaacccaattcgacagt

SEQ ID NO: 11298 - DNA, 639 bp, Gossypium hirsutum
  unsure (1)..(639): unsure at all n locations; Clone ID: LIB3829-001-Q1-K6-D9
aattgcttttggtcaattgaaaggtttgcttggagggaattacagttggctactgatagcttcagtgaaaagaatatcctcggacagggaggttttggaaaggtttataaaggcgtgctttctgataacacaaaaattgcagttaagagattaaccgattttgaaagtcctggaggagatgcggcttttcaacgtgaagtcgagatgataagcgtagctgttcacaggaatctcttgaggctgattggcttttgcacaacaccaactgaacgccttttggtttatccgtttatggagaatttaagtgtggcctatcgccttagagaactcaaacctggtgaacctgttttagatttgcctacaagaaaaagaatagccctaggtgcagcacgtggactggaataccttcatgagcattgcaatccgaagatcattcatcgggatgtgaaggcagctaatgtattattggacgaagactttgaagcagttgttggtgacttcggccttgcaaagttggttgacgtcaggcggacaaatgtaacgactcaagttcgagggacaatgggtcacatagcacccgagtacttgtccactgggaagtcatcgnaaaggacagatgtctttggttacgggattatg

SEQ ID NO: 11299 - DNA, 649 bp, Gossypium hirsutum
  unsure (1)..(649): unsure at all n locations; Clone ID: LIB3829-001-Q1-K6-E10
ccggngtcgacccacgccgtccggattctctcttcatctcccaattctcaaaaccctaattatatttttttatttccctttttgattcagcaatcggggcttgccaatggccaacagtaatctccctcgaagaatcatcaaggaaactcaacgtctcctcagtgaacctgctccgggaattagtgcttcaccatcagaggataatatgcgatatttcaatgtgatgatccttggtcccacacagtctccatatgaaggaggggttttcaagttggaactatttttgcctgaagaatatcccatggctgctcccaaggttcgatttcttacaaagatatatcatcctaacattgataagcttgggagaatatgcctcgatattctcaaggacaaatggagtccagctctgcagatccgaactgtacttttaagcatccaggcactcttgagtgctccaaatccagatgatccactctcggagaatattgctaagcactggaaatcaaacaaggctgaagctgttgagacagcaaaggaatggacgcgtttatatgcaagcggtgcatgaagaccggtggaaccgtttgctctcataaaataacatttttatgcaatgtaagctattcaatgtcaattccatattgaaatc

SEQ ID NO: 11300 - DNA, 644 bp, Gossypium hirsutum
  Clone ID: LIB3829-001-Q1-K6-E11
catacctaaaagaattcttctcaatcatgatacaaagatcctcaattttctgagaggcataagttctcgattttttcacaggaactgtgagaattccagtgctatgagaggccaaagcaacggtggtgtaagaggattcacttcgccagacaggggtgtgcacgagaagagaggtggcaacaataacaattacaaccaccacagcaacaaccatgataacaaccaccacaacaataaatcagcggcatcttcggagacagctcaggatagcaaaaaaggagggtcatcttctgggagcggtgagatagctcctgcacccatggtttggccacctaaattcgtgattgctttaacaaataaagagaaagaagaagatttcatgacctttaaaggatctaagctgccacaaagaccaaaaaagcgatcaaaatttattcaacgtaccctcaatctggtaagtcctgggacatggctttgcgatttaaccctcgaacgttatgaagtcagggagaagaaggtcacaaagaagagaccaagaggtttaaaggctatgggaaatatggaatctgactctgaatagaaaagctggaaggtgcagtttaaaggtttgattttttgggtatttgcaaatgtcgatgatgatg

SEQ ID NO: 11301 - DNA, 642 bp, Gossypium hirsutum
  unsure (1)..(642): unsure at all n locations; Clone ID: LIB3829-001-Q1-K6-E12
acagcatcagnactggccctgtcggtcagatttttagaccagataacttcgtttttggtcaatctggtgctggtaacaactgggctaagggccattacacagaaggtgctgagttaatcgattccgtacttgatgttgttcgtaaagaggctgaaaactgcgattgccttcaagggtttcaggtttgtcattccctgggaggaggaactggatctggaatgggaacactgttgatatcgaagataagggaggaatacccagataggatgatgctgactttctcggtcttcccatctcctaaggtctctgatacggtcgtggagccttacaatgccactttgtctgttcaccaattggttgaaaatgctgatgagtgtatggttcttgacaatgaggccttgtatgacatctgtttccgcacacttaagctaaccactcccagcttcggtgatttgaaccatttgatatctgcaacaatgtctggagttacatgctgcttgcggttccctggtcagctcaactccgatctcaggaaacttgccgtgaatctcatcccctttcctcgtcttcactttttcatggtgggttttgctccactcacttctaggggatctcaacagtaccgagctcttacagtacctg

SEQ ID NO: 11302 - DNA, 655 bp, Gossypium hirsutum
  Clone ID: LIB3829-001-Q1-K6-E2
ttcctaaccgttcaattgaacatcccctcttttctggtctttttgttttcccatccctttctctagaaaattttgacaccaattttctcgagaaagttagggtttttacaaagacagatatagagaaggagcaatcatgagctttcaagatctggaggctggacggccatttgcgtcgaggcaaaacatgatcaacggaaagcaagacgcttcgcaagctgtggcttctggcattttccaaatcaacaccgccgtctccacattccagcgactcgtcaatacccttggcactcccaaggacacccctgagctccgagaaaaactgcataaaacaaggctacatattgggcaattggtgaaggacacttcagctaaacttaaacaagctagtgaaaccgatcaccatgctgaagttagcacaagcaaaaagataacagatgccaaacttgcaaaagattttcaagcagttttgaaagagtttcagaaggctcaacggcttgcagctgaaagagaaacttcatattccccttttgttccccagtcagctcttcctgcaagctacactgcaggtgagatggatgcaggttctaataaaagtgctgaacagcgagcccttcttgttgaaagaagacaaagagtcgtgctgtggatatga

SEQ ID NO: 11303 - DNA, 648 bp, Gossypium hirsutum
  unsure (1)..(648): unsure at all n locations; Clone ID: LIB3829-001-Q1-K6-E3
agngggctatggaaaggtggagttgggcgagttgaggaggttgctgtttagagatggtaatggttaattgagggaggggagctagtgtatagacgaggcaaggtgttgaatggtgaaggcagtggggtgcttgattggtgttggtaacggaggttttggcttctgggttagctcagacaaaccaagaatcttgctgtgctactgctgtcttctttttttctgaaaattttgctaacgtccacttcttcttgttgcagggtgcttataacggagcactggcgtgggactttggtgaagctggtgtgtgcagcagggtggttgatgggatttgtcgacagagggtatggtggtggcagtaatcggttgatgagatggtgactatgtgagggaccgaaatgcataatttgtgaaagtcaaagggctttttatatatacataccaatgggttaaagcccaaaacttttaaatttaaattaatgcaataaaaattcttctaatctaaataattagtgtctatacttaaatcacttttcaagagcaaatttttctattcaacatgatagaagttttatttatttttcttgatgattattcattctagagctaaagaaaaaaagcaaagattagtaggtgatgctgatggcaact

SEQ ID NO: 11304 - DNA, 633 bp, Gossypium hirsutum
  unsure (1)..(633): unsure at all n locations; Clone ID: LIB3829-001-Q1-K6-E4
caatggcangagatggtaagcagtgggtttcaagaaactactctactgaacatgcaatgcatcagaagatgattggttgcatgggtgataatggagcagaatccggctctattggtgcaatagcatatggagatttgcagtctttgagtttgtcaatgagccctggttcacaatcaagctgtgtgactggttcacagcaaatctcaccttctggaactgactatgctgcagccctggaaaccaagaaaagagggcctgagaaggtagatcagaagcaaattgcccataggaaatccattgatacctttggtcaaagaacttctcaatatagaggtgtcacaagacatagatggacgggtagatatgaagcccatctatgggacaacagttgcaagaaggaaggacagagcaggaaaggaagacaagtttatttagggggttatgacatggaggagaaagctgcaagagcatatgatctagctgcactcaagtattggggaccctccactcacatcaatttcccattggagaattaccaaaaagaacttgaagaaatgaagaacatgacaagacaagagtatgttgctcacttgagaaggaaaacagtggattttcaaggggagcttcaatgtc

SEQ ID NO: 11305 - DNA, 657 bp, Gossypium hirsutum
  Clone ID: LIB3829-001-Q1-K6-E5
gtcgacccagcgtccgaaatcttgtttaaaattaagaaaaagtcatacgcaatgagcactgccggtcaggttattcgttgcaaagctgcggtggcatgggaggccgggaagccactatctatagaagaagtggaagtggcaccaccccaaaaacatgaagtccgtattaagattctcttcactgctttatgtcacactgatgtatactactgggagtgtaagggttacactcctctgtttcctcgtatacttggtcatgaagcctcagggatcgtggagagtgtgggtgagggtgtgaatgatttgaaacctggggatcatgtgcttcctatcttcaccggagaatgcaaagaatgtcgccactgtctgtcagaagaaagcaataacatgtgcgaactgcttaggatcaactgcgaccgaggtgttatgcttgctgatgggaaaaccagattttccatcaacggcaagcctatctaccactttgttggaacctcgacttttagccaatatactgtcgtccatgttggccaggttgccaagatcagtccaaccgccccgcttgataaagtctgtcccattagctgtgggatatgtacaggttttggggccactgtaaatgttgccaaacccaaaaagggtcaaactgttgcagttttt

SEQ ID NO: 11306 - DNA, 700 bp, Gossypium hirsutum
  unsure (1)..(700): unsure at all n locations; Clone ID: LIB3829-001-Q1-K6-E6
ccggtccaaaacccccggtcgacccagcgtccgggaatcttgggaaaccaaggttttttttcttgattttctcgttgggaaagggtatttttctctttggaacccatacttttctaagcaaccgaactgagggtgaagtgtttgcctcatctctggtttgctgttgtctttattgttgaaattacagcattttgactgtgttttgattcccaaaaacttaagcctgtattgctgaaattgttgctacagatatgaggatgagccaccagagcctgagattgaagaaggagccgaggaggaggtggaaaacaataacaatgacgatgttcctgttgatctggttgaaactgaagaaaaagaagacgaagatgctaatgacaaaattagtcgcaaaacatcaaagtacatgaccaaatatgagcgtgctagaatcttgggtacacgtgccctgcaaatcagcatgaatgcaccagtaatggttgagctggagggtgagactgacccgcttgagattgccatgaaggagcttcgggagcggaaaatccccttcaccattcgtcggtacttgcctggtgggagttatgaagactgnggagttgatgagttgattgtggaagactcatggaagagacagtgggaggcaattgatgaccacgttntattcgagaacatgnaaaatactgnttacgtgatgcctttt

SEQ ID NO: 11307 - DNA, 608 bp, Gossypium hirsutum
  Clone ID: LIB3829-001-Q1-K6-E7
gttttgtgttttcgagggggaagcttcctggtcctcttaggcaacttcaaatggatttgagaaaattgatgcttccttatactgctctcaaactcaaggagaagaaaaggaacaatctgaaagactttttgaacgttgcagggccaatgggtgtaacccatttcctcattttatctaaaaccgaaacttcgcctgtccttagggttgcaaagacccctcaaggccctactcttacatttaaaatacatgaatattcattggctgttgatatagcccaatctcaattgcgccctcgttgccctcaggatcttttcaagaatcctcctttgattgttctgtctggttttgcggcagcagatgaacaattaaggctcacgactatgatgttcaagaacatctttccagatattgatatcaacactgttaaactttcttcttgccagaggattgtgttgcttaactacaataaagacacaaagcttattgattttcgacattattctatcagactacagcctgttggtatctcgcgtagaattcgaaaattcgtgcagaaccatcaagtgcctgatcttcgtaatcttcaagatgtgagtgacttcatcact

SEQ ID NO: 11308 - DNA, 479 bp, Gossypium hirsutum
  unsure (1)..(479): unsure at all n locations; Clone ID: LIB3829-001-Q1-K6-E8
gttcgatggtgccttngacgtggatgtaacagaattccagaccaacttggtcccttacccaagaatacacttcatgctttcttcatacgctccagtcatctctgctgagaaggcttaccatgagcagctatcagttgctgaaatcaccaatagtgcctttgagccctcatctatgatggccaagtgtgatcctcgccatggcaagtatatggcttgctgtttgatgtaccgtggtgatgttgtgcccaaggatgtcaatgctgctgttgccaccatcaagaccaagagaactattcagttcgttgactggtgcccaactggattcaagtgtggtatcaactaccagccacccactgtcgttcctggtggtgatcttgctaaggtccagagagccgtttgcatgatttccaactcaaccagcgttgcntgagggtgtctccgcatttgaccacagttgatctcatgtatgccaagcgtgc

SEQ ID NO: 11309 - DNA, 365 bp, Gossypium hirsutum
  unsure (1)..(365): unsure at all n locations; Clone ID: LIB3829-001-Q1-K6-E9
ngactcaccaaagcacgaagccaggatctttcagaaaaggattcctattcgaagagtgcataaccgcatggataagctcacactaacccgtcaattttggatccaattcgggattttccttggggggtatcagtaaggaattggaatgtaataatattgattcatataggaggaaaaggttctctattgattcaaatgctgtacctatgggatagggatagagaaagaggaaaaaccgaagatttcacatagtgcttttgatcgaaaaatcaatctgatttatttcgtacccctcgctcaatgagaaaatgggtcagattctataggatcaaacctatgggacttagggaatgatggaagggaat

SEQ ID NO: 11310 - DNA, 639 bp, Gossypium hirsutum
  Clone ID: LIB3829-001-Q1-K6-F1
ctttcacgaaccctaatcgttaaatttcttcatcaaagaactacgaatggcgtggaggaaccaattatctcgaaatctcaaagagctacggattctgttttgccaaacatctcctgccagtgcccccgctagatcgttcgtggagaagaattacaaggatctcaagactttaaaccctaagcttccaatcctcatccgtgaatgccgtgggattgagccccaaatgtgggctagatatgatatgggtgtcgagaagggcattcgcttggaaggtttgagcgagccacagattttgaaagcactagaagaccttgccaaagcaggggcatcgaccaaagcctaaccatattgctaccattgaatccaaaaggttcgaaataaaactcatgtcttttgaggaactgtttccttttaatggttgttgtgttcttccctctgttttcagccatcataactgattttgtgagatgattgttgaaagttgtcagtatttgtgttctttcccttgcattgcctttgccttgtaaggtttcaaatacccaagaaactacctcttgattacttgtttgctgttattttcctttgtccttgttagcaaacatgttaattataaacacttatcaatcaccaataagttcc

SEQ ID NO: 11311 - DNA, 538 bp, Gossypium hirsutum
  unsure (1)..(538): unsure at all n locations; Clone ID: LIB3829-001-Q1-K6-F10
ctcctgcacggttccgagtatgtactcacctatgaagataaagacggtgactggatgctggtgggcgatgttccttgggagatgtttaccgactcgtgtaagagattgaggatcatgaagagtacagaggctatcggcctagctccgagggctatggagaagtgcaaaaaccgtacctagacgattcaatgtcactgtaactactgaaagcataagatggaagtttgctactatatatatttatatatatgtgaatgtcaaaagcctttgactatttatcaaaatccgtgtcttctatttgcttctaaagcatgtttctaagcactgaaggctttgctattgttagtagggcaagataaaaaaaaaaagtactttaagacattaatttccaggttatatagnatttgttgttgtnnaaaaaaaaaaaaaaaaaaaaanatttttnnaaaaaaaaaaaaaaaaaaaaaaaaaaaaaaaannaaaaaaaaaaaaaaaaaaaaaaaaaaaaaaaaaaaaaaaaaaaggggcggccgtttta

SEQ ID NO: 11312 - DNA, 629 bp, Gossypium hirsutum
  Clone ID: LIB3829-001-Q1-K6-F11
atcatccttcacttcaatatcgtaggttaatgtcattgttggagagacaagatgctggttttcttgcagtaccccattcgttacgaaatttagctgctgccactgaaggaagaagcaggctcgttgtacctgagattcgcaatgtcttggatctcatgcgtaggggtgagaacttgcgttttgaggatgctgtgatcctcgatcaatcagcattttttggggcacctgatattcatgaccggcatagggatatgcggctcgatgttgataacatgtcatacgaggagttactggctctagaagagcgcattggtaacgtaaacacggggttgagtgaagaaatgatatcaaaccagttgaagcgacgaaagtactctagtgtaccagaaactcagttagagacagaaccatgctgtgtttgtcaggaagaatacaatgacggtgaagatctcgggacactcgaatgcggccatgactttcacgccgattgcattaaacaatggttgatgcacaaaaacttgtgccccatttgtaaaacaacaggactgaataaatgagatgaaccgtttggttttttaggctgattagttcttgccttcaagtccgacatcgaaggatgcggcttggca

SEQ ID NO: 11313 - DNA, 568 bp, Gossypium hirsutum
  Clone ID: LIB3829-001-Q1-K6-F12
agcagtttccgaatcttttacgactcgtaaaaagttgaattgactcatggcttccgccgttgcttccgttgcgaagaagaaactgctggctctaagaagtctaaatcagctccttcacatcctccatttcttgagatgatttcagatgcaatcgtttcgttgaaagagaggacagggtcgagccaatatgcgatcgcgaaattcatcgaagagaagtataagcaattaccggcgaatttccgcaaagtcttacttgttcagacgaagaagtttgttgcttctggaaagcttgtcaaagtaaaagcctcttttaagctgccttcggcttctgccgcagctaagaaaccggccgccgtagctaagaagcctgccgccgcgaagcctaaatctgcagctaccactgccgcctcaaagtccaagccgaaggcgactaaaaccgcgtcgaaaccgaaagccaaagccaaagttggaacgcctgtgaaggcaaaggctaaagttgcggcgaaaccgaaggctactacaactaaggccaaagctaaaccagcggctaagccaactaaggtagcga

SEQ ID NO: 11314 - DNA, 658 bp, Gossypium hirsutum
  unsure (1)..(658): unsure at all n locations; Clone ID: LIB3829-001-Q1-K6-F2
cggacgcgtgggtgtttttgagctccaaaactgaaaaactctccattttttatcaaatgttctagacaacgatgggatctgaatctcaagttgtttgtgttactggtgcctctgggttcattggttcatggctggtcatgaggctactcgaacacggttacactgtccgcgccaccgtccgtgatcccgataatcaaaagaaggtaaagcacttgcttgatctaccaaaagccaacacccatttgacattgtggaaagctgatttatctgaagaaggaagctttgatgcagccattaatggctgttgtggtgtcttccatgttgccactccaatggattttgagtccaaggaccctgagaatgaagtgataaagccaacaataaatggagtattggatataatgaaagcatgcatcaaagcaaagacagtaaaaaattgattttcacatcatcagctggaactgtcaatgttgaagaacaccaaggaactgtttatgatgaaagtaattggagtgatttggaatttgtctatgccaagaaaatgactggatggatgtattttgtctccaagacattggctgagcaagctgcctggaagtntgcaaaggagaataacttggatctcatcactatnattccaactcttgtcattggtcca

SEQ ID NO: 11315 - DNA, 624 bp, Gossypium hirsutum
  Clone ID: LIB3829-001-Q1-K6-F3
cgcatgggtcatatcagggtgcggatgagtcatgccaggattctggtactgacaggtttgcatggacttacacctcacaagagtttgaaatggctcaggaaaaccgcttacagactttcaagcttccagagcctattctttgcattggtggaatattacagattgagctgttgagtagggtccagagacaggaaatagatggcttgttctatatctgtgtgtcacatgttcaagttgtgggacgcccattatctcctgcttttagtattcagatacttgaacctccagaaaaattcgtgctagaggtacagagttattcactgccaactttacctgagcagatgagctctataaccagtttgcagatgcgtgtgagagacttggagcagattctgaatttactgcagggaaatggaggtgaggtggaatatggatatgaatgggaagtggaatcagacgaggacgaggaagaatttgacatggagtaactttctgctgttcctccccccccccccccggggggtctgaactaacctttcaaatggaagcttgctggcaactaaagcgtgtaaccttgttccggattagcttattctgggttcatgtgctagtgttatatatcaa

SEQ ID NO: 11316 - DNA, 648 bp, Gossypium hirsutum
  unsure (1)..(648): unsure at all n locations; Clone ID: LIB3829-001-Q1-K6-F4
gnagaaggagcgttgaaacacaggggacgatgatgatacgataatggcgaaagaacaaataataagcggccgatgaagagcagtaccagcaagatgaagactaagctgaacaagaaacttgtgcagcagcagcagcagcaaagcaatggtgaagaacaagagagcaaagacattgcttgcactagtatttataataataacaattctagtggtgcaaaaaagagaggtcgaggtggtgcactcatggaagggtcgcggtgcagtcgagttaatggaaggggatggagatgttgccaacaaacactcgttggttactctctttgcgagcatcatttgggcaaaggtaggttgaggagcatgactagtgttcgaagccgatctttagcatcaaaggaggagggacagcctaataatggtgataatcaaggtctgatgttgtccaatctttcttcttcgtcccaacaattagcaaagcgtgaattgcatggtgaaagtggtgggaatgatgcagaaggagaggatcagaagccattgatgatgacaaagaagagagcgaagcttggaatggttaaagctcgatccataagtagtttgctgggccaaaaacgacaatgcattgcagtagcagatgataataactagctgagc

SEQ ID NO: 11317 - DNA, 639 bp, Gossypium hirsutum
  Clone ID: LIB3829-001-Q1-K6-F5
gcctacctcctttacctgtcccccttgctccaaccctaatttctctttcttcaatctcgcccctactaagaaacccaagtcaacgcccgatcatcctcccggatctacccacgacggcgacgacgacaacaacaagacgacgaacacgagggttattgacaaggaagcagctaaggcacttctagctgctgctaagattgctgccgcctctatgaccaaagctgccgccgttgcgaaagtggaggctgagcggagggtcaaagaagctactttggcaaagaagagagccaaagaggctctcgagagactcgccttgttggcccggaaggatagtgatagacataagtcgtccctcgtaggcattcccaaatctaaacctgatgctgccattgctgctgctgctgacgccaaagcaagctctttatcccttccatctcctattcccgacaagggaaacaatgggtcgtattcagtttctggtgctaatgtacccatttcaatccccaagttgcagcgtcaacaaagcactcatggtatgcctaattgatcattggtgattccaacaatctcagtaaagtgtttgttttcgtttgttggtatttagcctttctgttcatgggaaccatatgtcaaatcttt

SEQ ID NO: 11318 - DNA, 632 bp, Gossypium hirsutum
  Clone ID: LIB3829-001-Q1-K6-F6
agaattagagaaaaagaggtaaaatggcgcatagagtagatcacgagtacgattaccttttcaagatcgtgttgatcggcgattctggagttggaaaaacgaatattctctctaggttcaccagaaacgagttttgtttggaatctaaatccactatcggcgtcgagttcgctactagaaccctccaggtagagggaaagactgtcaaggcacagatttgggatacggcaggtcaggagagatatcgagccatcaccagtgcgtactacagaggggctgttggtgcacttatggtctatgacataacgaagaggcaaacctttgataatgttcaaaggtggcttcgtgaattgagggaccatgcagattctaacattgtcatcatgatggctggaaataaatccgacttgaatcatctcagagctgttaccgaggaggatggtcaagctctggctgagagggaaggtctttcatttcttgagacatcagcactggaagcaaccaacattgagaaggcattccgaactatattgactgagatctaccatatcataagcaaaaagcattggcagcccaggaagcagctgctagtaccgcaattcctggccaaggaactaccattaatgtcactg

SEQ ID NO: 11319 - DNA, 224 bp, Gossypium hirsutum
  unsure (1)..(224): unsure at all n locations; Clone ID: LIB3829-001-Q1-K6-F7
catggnaaggggctcaacaattcaaggtgatgtgttcacttgtttgctgtcaactttcgtctcaacgtgttagattcatccttggagtggcttgaatcttactttgctctctttgaggtgatgaagacctcatacaagtgtattttgttctagtttgctatgcgacttgattttatatcaagcgtgcataccatatctttaattgtaatctcgtctaactttcc

SEQ ID NO: 11320 - DNA, 664 bp, Gossypium hirsutum
  unsure (1)..(664): unsure at all n locations; Clone ID: LIB3829-001-Q1-K6-F8
gcaaatatgatgtacatctgcttcccggggacctttcttatgctgattgcatgcagcatctctgggacaactttggtgagctggtacagccacttgcgagtgccagaccatggatggtaacacaaggcaaccatgaaaaggagaagataccattttttacagatgcatttgagtcctataatgcaagatggaaaatgccgtttgaggaaagtgaatcgacctcaaatctttattattcttttgaagttgcaggggtccatgttatcatgcttggttcatatacggattacgacgagctttcagatcaatatagctggttgaaggctgatctttcaaaggtggacagaaagaagacaccctggttagttgtgttgttccatgttccatggtacaatagtaaccatgctcatcaaggtgaaggggatgggatgatgacagccatggaaccactgctttatgctgctggtgttgatttagtatttgcaggtcatgtgcatgcttacgagcgctccaaacgtgttaacaaaggaaaatcagatccttgtggcaccgttcatattactatnggagatggaggcaatagagaaggattagctcanaagtacattcacccaacaccagagtggtcaatgttccgtgaagcgagctntgntcatggcgagct

SEQ ID NO: 11321 - DNA, 610 bp, Gossypium hirsutum
  unsure (1)..(610): unsure at all n locations; Clone ID: LIB3829-001-Q1-K6-F9
gcttaaatcctatggnaatggnaaatgcaataatattccccagatccttgtaccaattgctgatggctcagaagaaatggaggcagttatgataattgatatcctgcgtcgagcaaaggcaaatgttgtggtggcctccgttggtgacaatcttgaaattctggcttctaggaaagtaaaattagtggcagatatgcttcttgatgaagctgctaaactttcatatgacctcatagtcttgccaggaggacttggtggtgcccaagcatttgccaactctgataagctggtgaacatgctaaagaagcaggcggaatcaaacaaaccctatggagctatttgcgcatctccagctttggtcttggagccccatggcttactgaagggcaaaaaaagccacagctttccctgcaatgtgcaacaaactatcagatcagagtttcatcgacaaccgagttgtggtggatggcaacctcattacaagcaggggtcctggaacttccatggagtttgcactaggaattgttgagaagtttttcggacgcccgaaagccttagactagcanaggtgatgctttttgtacactaatagatcaactagtatgaatga

SEQ ID NO: 11322 - DNA, 599 bp, Gossypium hirsutum
  Clone ID: LIB3829-001-Q1-K6-G1
atttcattaggttttcatttttaacatagaaaagaactgtcaatcctctgtagatctaaccctcacacactgagcaatgtcaactacccctccttccaccgctccaaacggccgatccagggttttcagcgaatcagacgaaatccagatcctcaaatgtttaatcagagccaccaaatccattcctccgcccatcaccaccgtgggtacctctaccatcaaccgcatcatcaagcgtctcgaccacaggttcaccgtctcccagatcaccgacaagatccgcaggctcagagacaagcaccacaaccatgcaaggaacagagccctggtaaggaaccatcacgaccggcgaatattcaagctttccaaaagaatttggggcaagaaagcaacacccagaaagaagaatagcaagtcagaagatcaaggggctattgaaatgggaggtgatggggtcgagaaattggacaagtttccatacctggtggctgagttttccaaggttttgcccgaaaatgaagtgtggaaacagaagatgaagagagtggaagaggagaagttgaggaagatggatcaagaatgggtgatgttgaaagttg

SEQ ID NO: 11323 - DNA, 215 bp, Gossypium hirsutum
  Clone ID: LIB3829-001-Q1-K6-G10
aatgacagcaggaagaggaagaagaagtaagaagatagctgaggtgtgacagacccacatcgtggtggttggaaatttatcaattcagggatttcttccaatttgattgcttagaagggatggatgaatgattaaacatattcttatttttggattatttgtgttgacagcaactataatgttttaacgcctatactatacgtaattctctgtcc

SEQ ID NO: 11324 - DNA, 447 bp, Gossypium hirsutum
  unsure (1)..(447): unsure at all n locations; Clone ID: LIB3829-001-Q1-K6-G11
cggacgcgtgnggttagnaaactcaaacaaactttttagttctcaactctctcaaattcaccatggctgacaagtgtggcaactgcgattgcgctgacaagagccagtgtgtgaagaaaggaaacagcttggtcattgagactgaggagagctacatcagcaccgtagtggtcgagcctctggcagagaacgatggcaagtgcaagtgcggaactagctgcagctgcacaaactgcacatgtggcagtcactaagcagacatatagaatgatgaagtttgggacctaaaaagaataaaagttgggttgaataatttgtgtcttttgttgtagtttgagtgtgttttcttgtctatctgtccgatgattgtctatgtctctcattttatacaatgatggaatgaccatgtcaatggcctttgtctgattaatgaactattattagtat

SEQ ID NO: 11325 - DNA, 239 bp, Gossypium hirsutum
  Clone ID: LIB3829-001-Q1-K6-G12
gtctgtatctgaggtgaatgatgaagaagaagagatgatgaaggcagtggagacgaagatgatgagtaggaaaaatccaggaggatagcataatcaaactaggctgtgatagtgtttgatcatcttatgttaatgctttttaaatgcaaatttcatttaagcaaaaatgtaactctggatgctgttggtttcttttgacgtttcgaaattaatagttgtagatgggtaatttgttgctt

SEQ ID NO: 11326 - DNA, 627 bp, Gossypium hirsutum
  Clone ID: LIB3829-001-Q1-K6-G2
ctaaacccataactcgaaagcaaccctaattacgatgtcggatcagaaaacgacgccggaacttctcaggcgaatgctccggcgaatgatccaaagaagaaagaggaccaaaagaagaaagatgatgaggatctgtcggaggaggatttggctttgaaacaacagttggagttatatgtagagagagttcaggattccgatcctgggttacagaaagtagctcttgagagcatgaggcatgaaatccggacttcaacaagctctatgacttctgttccgaagccattgaagtttctccgtcctcattatggaaccctaaaagctttttacgagacaatgccagaatctgatttaaagaaatacttggccgatatcctgtctgtgttggcactgaccatgtctgcagagggagagcgggagagtttgaagtacagattgttgggttcagaaggtgatattggttcgtggggtcatgagtatgtgaggaacttggctggagaaattgcacaagagtatgggaagcgacagagtgaagaggctgcaattgaagatctaatggagcttgtgcaacagattgtgtcatttcacatgaagcacaatgctgaacctgaagctgttgatctcttg

SEQ ID NO: 11327 - DNA, 214 bp, Gossypium hirsutum
  unsure (1)..(214): unsure at all n locations; Clone ID: LIB3829-001-Q1-K6-G3
gttagtcacaccttacatccaaaagcaaagctttttttacatgtgtatgtaaggttgctaagcaaatctggtgagccttcactgctgttttaaggatatagagcaactttnntgaatttcatcgnctgtaaagaagtttaggaccacgacatgttcttgcaaatttgaagaagcttctaaggtctgtccagtcttcagaatatatagatacctg

SEQ ID NO: 11328 - DNA, 381 bp, Gossypium hirsutum
  Clone ID: LIB3829-001-Q1-K6-G4
gggatgcagatcttcgtcaagactttgaccggtaagacgattactttagaagtggagagctcggatacgattgataacgtgaaagcgaagattcaggacaaagaaggaattccaccagatcagcaaaggttgatttttgctgggaaacaactggaagacggaaggactttggctgattacaatattcaaaaggagtccactcttcaccttgttcttcgtcttcgtggtgggttctaagccttaaggtctcccttaatgtgggttttctggttttacgtgaaggactgtgccctgtaatggccttttaaataatttctagtctttgtttaccggttgcatctatgtatggtttctctttgaatggaatttgcatatttacct

SEQ ID NO: 11329 - DNA, 580 bp, Gossypium hirsutum
  unsure (1)..(580): unsure at all n locations; Clone ID: LIB3829-001-Q1-K6-G5
cttctcacgctcgattaccttacaaaaagagaaaatgaccaagtgttacccaactgtgagcgaggaataccagaagtcagttgaaaaggccaagaggaagctcagaggtctcatcgctgagaagaactgtgctccactcatgctccgtttagcgtggcactcagctggaacttttgatgttaagaccaagaccggaggtccattcggaaccatgaagcatcctgctgagctcgcacatgctgctaacaacggcctagatatcgccgtcagacttctcgagccgatcaaggagcagttccctaacctcacctacgctgacttctatcagcttgctggtgtcgttgccgttgagattactggtggacctgaaattcccttccatcccggaagagaggacaagcctcacccccctcctgagggccgtcttcctgatgctaccaagggttctgatcacttgaggcaggtgtttagtgctcaaatgggtctcagtgaccagcacattgttgctctttctggtggccacactctgggaaggtgccacaagnagaggtccgggtttgagggaccatggactaccaac

SEQ ID NO: 11330 - DNA, 654 bp, Gossypium hirsutum
  unsure (1)..(654): unsure at all n locations; Clone ID: LIB3829-001-Q1-K6-G6
cttttccaaatgtggtactacttggctcaaggccttgactttctccactttgtaccgcaatcagttcccatgggatgaaaatccattgctcacctttggccctcaccaacttgttcgtttcttcgagtatgatctttacttgaacaacccttttcctgatcttcgaaagtttgtgcttatcagccaaggcttttttccacccacgccccttatgctactttgccaacttccattaaggattctggctgtaagattgtttacatatgtagaaaccccatggatatcttcatttctctttggcttttctctgccaagctccgagacaaaaaccaagagtcactatcactagatgaagcttttgacaagttctaccatggaatctctgcgcatggaccattttttgatcatgtattgggatattggaaggcaagccaagaaaaccccaacaaaatattgtttttgaactttgaagatcttaaggaagatatggattcccatttgaaaattttggccatgttcttaggagttcctttcacagatgatgaagagaaacaggnagttgttgaaaaatagcgaaaatttgtagctttgagaacttgaaagaattgaagtgaacatgaaggacgtacatacttctggnagtccacacacaca

SEQ ID NO: 11331 - DNA, 633 bp, Gossypium hirsutum
  Clone ID: LIB3829-001-Q1-K6-G7
gtttcaaaaaggcttcttctttgttagttttagctaccatttttgtgttatgcagctttggtaaagctactcatcctggtctcattttaacagtcgttaacaactgccctttcaccatttatcctgctatccaacccaacgctggccaccctgtcctcgaacgaggcggcttcgctcttcataccctcacccaccgttccttccctgcccccaccgtccactggtctggccgtatctgggctcgaactggctgcacctactctaacggacatttctcctgtgccacgggagattgtggccaccgcattgaatgcaacggtctcggtggagccactcctatcacaattgctcagttcagcctccaccacggtggccataaagatctctcttcctacgaagtcagccttgtggacggttttaacatccccatgactgttaccccgcacgaaggcaaaggcctttgccccgtcgttgggtgcagggctaatattctggccacgtgtcccggcaagttacagtataggtcacctcctcatggtccagttgtgggttgtaagagtggttgtgctgccttcggaaccgacgagctttgctgcaggaaccattacatagccctcagacctgtagggcttc

SEQ ID NO: 11332 - DNA, 675 bp, Gossypium hirsutum
  Clone ID: LIB3829-001-Q1-K6-G8
gttctatgcattctatgatcgttgttttgagatcaagcagaacaagtatgtttacaaagtctgcccatacaaacaagcttctcaggaggagggccacatgacaacccgtttagggcgttgggacaaatttgaggacgcatacaagatgatggtattttcaaatggagataagtgctggaatggtccagatcgaagtatgaaggtgaaattaagatgcggtttgaaaaatgagcttaccgatgttgatgaaccaagccgttgcgaatacgttgctttattggccactccagctgtctgcctggaagataagctgaaggagctgcaacataaactagatttgtcgaacaaagagcagcctcaggaacatgatgaactttgaggaacccggatagaagattcagacatggttagaggttgttgactccataacaaatctatcattagaacactaatcaatttgatcctagttgtgaagcgatgtagaatgtggccttttcgagctagtagagaagattttcaagcgatatctgaaatctgaggaagcctcctgaaaaaaatttcatagggaagtatgcttcacattacaatcacatagatgaagtgaggtacgattatatttgttaggttgagctgaactgactatggtgaaaataactggtcctcaatacttatttg

SEQ ID NO: 11333 - DNA, 288 bp, Gossypium hirsutum
  Clone ID: LIB3829-001-Q1-K6-G9
aaaaaacatacgcaatgagcactgctggtcaggttattcgttgcaaagctgcggtggcatgggaggcggggaagccactatcgatagaagaagtggaagtggcaccaccccaaaagcatgaagtccgtattaagattctcttcactgctttatgtcacactgatgtatactactgggagtgtaagggttacactcctctgtttcctcgtatacttggtcatgaagcctcagggatcgtggagagtgtgggtgagggtgtgaatgatttgaaacctggagatcatgtgc

SEQ ID NO: 11334 - DNA, 602 bp, Gossypium hirsutum
  Clone ID: LIB3829-001-Q1-K6-H1
gttcttcgtcgccgcagcagcaatgtggcggtaatagcaagatcgttacaccgttagtggctccgcccgagccatcgcagttgcctaggtggaccattcggtctatgtgggagttagcttccgtacttaattttttgcatgttttcaggccgcttttgaatatagctgtggagttctcagcggaggagtttgagacagcgttgattactcctaattatactttggcagatattcatattcctttgttgaaggcaatccctccaattactcggatgccccttacacgtgatacctgggttactgttctttgcagaaaattaagagactggtggcattgggttgctgatggggatcttcccattgttgcttcacatgggacggagattgaattatacaagtcgcttgatcctggagttcgtgttgtgatcctgaaagcactgtgtgacattcgtgttgagcaagatgacattcgaagctacattgacaactcacttaaacatggtgtttcaactttcagcctttcgtaaagaacgtatcggaggcgattctcagggaattaattactggtatgaagatgatgctgttgttggtcatcgcttttt

SEQ ID NO: 11335 - DNA, 614 bp, Gossypium hirsutum
  unsure (1)..(614): unsure at all n locations; Clone ID: LIB3829-001-Q1-K6-H10
caaaaaccagccacgcccccactctcaccctcatttctcctccctttcccatccccatacccacaccacctttgccatgtctctagtccccttccctttctttctcttcttcatctccctcttctttgccactttttccttcactatatccagccctgacgccctcaatgtccaatccctccctctatccacatccccacctgcaacgatccctgcatttccagagcaatccaatgtcgttggttgtccacttgacttacctgaacaactctttcacagcgttaagaacgcttgtggcactaagataaacaatggggtggcgagtgagctccaccgcagccgctgctgtcctgttctcgctgcatggctttacgccgcttactccgccaccgcccttggtggggttggaagagtagtgccagcggttgcggggcgtacccaatcttatgacatgccattgctgccggatgactcggaaacctgtgtggatgacttagggaaagctctgaaacagagaggcgtggagttggctaaaccgaacgagacatgcgatgcggtgtattgctattgtggcatcaggcttcacccattgacttgccctgatgctntctcag

SEQ ID NO: 11336 - DNA, 587 bp, Gossypium hirsutum
  unsure (1)..(587): unsure at all n locations; Clone ID: LIB3829-001-Q1-K6-H11
gnaaaccctagcaatattttcttcttaacgtttanagaagaacaaggggaaaatcctaaaagaaaaggcaaagtcgatgagatcgaagagagagaagaggctgagagccataaggagggaaatagtggaacctttctatcagaagaaagatgaagctaagatggttgccatagaggctgccctggctgcccctaagctgcccgcctcttccccaccctctggttctatgcagctcgaagaacaagttaccgcacccagttccgcaacaaccaatctgaactccatggaggtggagatggctgactgtgatgaaaacaagaccaaggcctccttgagagctattggtagaataggaaagatgtccaaaaagaaattgaagatcgccaaaaagaagcgccgcgccggtggtaagggaaagatcagggggaagcgtaatctttgattcttaactctctactcccaaatttttcttgcctttttatcctttttatgttgtaatactattatcgtcgagtttgtctagttgaacgagataacactgagttgttacgcttttcttttcttttttatttgaaatattaattagt

SEQ ID NO: 11337 - DNA, 645 bp, Gossypium hirsutum
  unsure (1)..(645): unsure at all n locations; Clone ID: LIB3829-001-Q1-K6-H12
taaataagcagttacaatagaataaagagcttggtgacggaagagctgaaacaatatttccggcctgagttcttgaatagattggacgaaatgattgttttcaggcagctcaccaagttggaggtgaaggagatagcagatataatgcttaaggaggtgtttgacaggcttaaagacaaagagatagagcttcaagtgactgaaagatttagggaaagggtggtggaagaaggatacaacccgagctatggtgcaaggcctttgagaagagccattatgagacttctcgaggacagcatggccgagaaaatgcttgccagggaaatcaaggagggtgattcagtaatcgttgatgttgactccgatggaaatgttacggttctcaatggtagcagcggtacgcctgagtcattgggcgatccaatttcagtcgtttaaccaaatagccttttttggatatatgctcattttacctttccgttttcattgaaaggactacttggcagttgaattgaaagtcatcgctagcttgcccgttggcattgaaggtgtatttctgacacttanaatcgcctgcttaattggaaggggcaaaaaaagaactggtagtgttagtttagaatttaacttcacataaactgtttg

SEQ ID NO: 11338 - DNA, 624 bp, Gossypium hirsutum
  unsure (1)..(624): unsure at all n locations; Clone ID: LIB3829-001-Q1-K6-H2
gtctggtcccagcaacagaaattgatgatgatccctttgcaggtgtctcatttcactctggcgagggtagagaaaatgtggacgatcttttctctgggatgactatagatgacaagtcagttggcaatggtaatcatgtggctgctaataaaaaatctgaactaattgatatctttgggaccaattctgaagctccattcgagcctgagaataaaacaaattctgttaatgagttaatggctggcttgtcgatgaatgagaatccacctaatttgaagcagaaaggaatgacttctgaggcccctgaaaatatgtttgccaatattaacacccattctagccaacaagcttctaatgatgctttgagtggcatctttggttctcaagccacggggatgaatgcaactccgatgtttcctttagggacgatgccatatggtgttcctcccggaataacgttgaacccagccttttcctctcagcctatgaattatggtgccatggnggagtttctttgcgcagcagcaattgcttgctacaatgtctaacttacaacactttggtaatcttaatgcacaaaatgctgggattaatcatgtttccagtggatcaaatggaggatca

SEQ ID NO: 11339 - DNA, 643 bp, Gossypium hirsutum
  Clone ID: LIB3829-001-Q1-K6-H3
gttctctccacactgactcttttcttctccattataaaaagtaactaaatcttcctaaaactttcaattctaatcaagatttccagcattcgtaaacgccgccgtctccaccccaagatgttgctcagaatccgcagccgagacggcctggaacgtgtccaggtcggcggtcctcatgtttcaatctcccaattgaaagccttaatcgaatcccaattccaaatccccattcataaccaaaccctttccaccgatcgcaatcttctcttggctaaaacccccgccgatcttctccgtttcaccgacatgtccgacccctcccgtcccctctcctccttgaacctctcccacggctccgtcgttttcctctactaccagggtgaacgcaccgtccgcggcggaccccccgtctgtcccgccggatccttcgggcgtaagatgacgatggacgacctcatcgctaagcagacacggatcacccgccaggaatcgcctcactgcgattcggtttccttcgaccgcgattccgccaatgctttccagcggtacgtcaacgaaacgctggtgttcgccgtgaaacgcggcggctttatgtacggcaccgtctccgaagaaggtaggtggaagtcgattcatttacgag

SEQ ID NO: 11340 - DNA, 642 bp, Gossypium hirsutum
  unsure (1)..(642): unsure at all n locations; Clone ID: LIB3829-001-Q1-K6-H4
attgagcaaacaccttcaatccctatgatttcaaaggttccaactatcatccttggaatggatgtatctcatggttctcctgggcagtctgatgtgccttcaatagctgcggtggttagctccaggcaatggccattgatttcccgctatagggcatcagtccgtacacagtctccgaagcttgaaatgatagattctcttttcaaaccagtttctgacaaaggggatgagggtatcatgagggaggctctcttagacttttatacaagttcagggaagaggaagcctgatcagatcattattttcagggatggggttagcgagtctcagttcaatcaagttttgaacaaagaacttgatcaagttattgaggcttgcaagttccttgacgagaattggaaccctaagtttgtggttattgttgcacaaaaaaaccatcataccaagtttttccagcagggatctcctgacaatgttttacctggtactgtaattgacaacaaagtatgccatccgaagaacaatgatttttacctttgtgctcatgctggaatgatagggaccacaaggccgacccactatcatgttctcttagaccagnttgggttttcagctgatgatctgcnagagcttgttcattct

SEQ ID NO: 11341 - DNA, 635 bp, Gossypium hirsutum
  unsure (1)..(635): unsure at all n locations; Clone ID: LIB3829-001-Q1-K6-H5
gcttgagtaccttgaggagcgacgtttgaaggatttgattaagaagcattctgaatttattagctacccgatttccctttggattgagaagaccactgagaaggagatttctgatgatgaagatgaggaggataagaaggacgaagaagggaaagttgaggatgttgatgaggataaagagaaggaagaaaagaaaaagaagaagattaaggaggtgtcgcacgagtggtctttggtgaacaaacagaagcccatctggatgaggaagcctgaggagattaccaaggaagaatatgctgctttttacaagagccttacaaatgactgggaagagcatttggccgtcaagcacttctcagttgaggggcaacttgagttcaaggctgtcctctttgtccccaagagggctccttttgatctctttgatacaaggaagaagcccaacaacattaagctctatgtgagacgtgtctttatcatggacaactgcgaggagttgattcctgaattcctcagctttgttaagggtattgtcgactcagaggaccttcctttgaacatctcaagagnaatgttgcagcaaaacaagatcttgaagggtatccgcaagaacttggtaaagaagtgcattgagc

SEQ ID NO: 11342 - DNA, 623 bp, Gossypium hirsutum
  Clone ID: LIB3829-001-Q1-K6-H6
cccagcgtccgccccgcgtccgataggattcaacctgagctaactgatgaggcttcagaacaaattgcaacagcttatgcagatctcagaaatgccagttcaaatgcaaagactggtggaacccttccaataacagctagaaccttggaaaccattattcgtctgtcaactgctcatgcaaagttgaagttaagcagaaagattacgaaagttgatgtcgaagctgctctgaaagttctaaattttgctatttatcataaagaattgactgagatggaggatcgcgaacaagaacgggaaagagaacaacagagaaaacaaagagctgaccgtcgaggccaaactgcagatgctatggaagtagatgatcctccactagcccagcaggccactgctactggttctgtcgaaagaatagaagcttttaaaactatatttggtcagcatatgcgtgtaaaccacaaggaaaccgtatctattgcagaagtggaggatattgtcaacgtaggagctgacatccattactcaagggttgagatcatgtctatattagagaaattgcaagatgagaatatattgatgatagctggagaaaccgtgcatatgatagtttaagatgtaag

SEQ ID NO: 11343 - DNA, 476 bp, Gossypium hirsutum
  Clone ID: LIB3829-001-Q1-K6-H7
gtctcgtctctcaccttagctccagtgatcacaatctttgagaacatatatcctgtacttacagagttcagggaaaaaccagcaatgaagaatgttgtggatcagacagaggcgagatccacaacattcttcattgctggcaaataataccttggaatgggaactgccttttcagatataatttggtggcaaaacacaaccttcctcgacttgtttgtggatattaggttttcctctgccatgttcaggagttggatttcaagtatgaatatacaatgaatagagattggcaaagtaaaggaggggagttggatacatcggaccgttacctggctttttggctgtggttgtcatatggggtttcctttcccttaaagtcagtgtggtgcttaaatgcttggcatatgctgtaattagtaaattcggaaggaagaacaaactggaaaaaagaaaatggaaggaacaacttgaagatt

SEQ ID NO: 11344 - DNA, 659 bp, Gossypium hirsutum
  Clone ID: LIB3829-001-Q1-K6-H8
attttattccacaatttttgcttgttgatttggctttttggcttgattacgccttgattttcactggactaccatccacagaccaaagtgtcgtccgccagcgccggatctgtacctttgtccatcgtcacagataagtcttccttctccccttgtatgctccgatctaccaaaaaagaagaacaagaatttttagtatggccatattgccacaataaaagcataccgtgggaagagcttcaaattccactctttggatccggctgttgatcgagacttgtgaggtaagtggcttttccagatctaccgacatcgccatcctagcaaattggcctcttgctccactatccgtcttgaggtctaatttcatcacttttccgaccaagcttcctatctcctctaaaatccttttcttatataggaagcccgacaatcctaggaatcggatccaggccataatcatgctaggaaagggtttcagcggatcaaactggatcgtccatggctgaacgggtaaatagtgtccaaacattatctaggggccttgagtcaaagctcgactctgctttggaaacggacaaggaaatatccgttctcgatgtccattagtctaaacgattgagagggtttccaaaggctacaaatacaattatgaagta

SEQ ID NO: 11345 - DNA, 654 bp, Gossypium hirsutum
  unsure (1)..(654): unsure at all n locations; Clone ID: LIB3829-001-Q1-K6-H9
tgattttccagagaagggaatttctaaactttgtctttntgaatgnnagcttgatgaaaagcttnngttgcttnngttgcttnncaggtgatggaaatatacnnggatttggaaagattatacagtcaggggcaaacagaaactcgttactgcattttcttctattcaaggtcacaaacctggtgtgcggagtttgagtactgttgtggactggcagcagcagtctggatatctttatgcatctggagagatatcatctgtcatgatctgggacctggataaggagcaacttattaattcaataccatcctcctcagattgcagtgtctcagcattggcttcttctcaagttcatgctggtcaatttgcagccggttttgtggatggttctgtcagactctatgacgtccgggcacctgacatgctggtttgtgcaactagaccacatacccagcaagttgaaagagttgtgggtattggctttcagcctggacttgatcaaggaaagattgttagtgcttcccaggcaggtgatattcagtttcttgatattagaaaccaaagagatgcttaccttacaatcgatgtgcacagaggctcacttacagctctagctgttcatagacatgccccgataattgccagtgggtcagc

SEQ ID NO: 11346 - DNA, 534 bp, Gossypium hirsutum
  Clone ID: LIB3829-001-Q1-N6-A1
gcccaagaaatcttatcaataaagatatatacaaaccttgttctaatatacggtccagggagcatctaatatgtcaaataacagtgaaaaaaaaatgagacaagaaaactaactgaaccgatgaaatatgtaattctcttatgcagatttacaaggttgaaagatggataatttatgttcaggggttgaagatgaagttgccacacttgcatttccaacttaagggtttgtaattagagctgtcatctcttcttgcataagcaacatcagagactgaagttgaagaaggcttgttttgaattctgagttggggatttgtaggcacttgaatggcttcacagtgaccgcatgtactgcatcttctctcacatcttggcggccttgaacctatctgaccactcaacaccatcgccttttcttcatttactactctcttatcagatatgggatttggtttacctgcggtgaaaataagtgggaatcaaaggaaattcacttcaaaaacgtgccaaatgtctgaaatgaaatgaatta

SEQ ID NO: 11347 - DNA, 603 bp, Gossypium hirsutum
  Clone ID: LIB3829-001-Q1-N6-A10
caagtaaaagatatgttatgatatatcataaactaaagttagacagtaacatgaacatgatgtctacagtgtttctgtagcttctggacaataataataataacacacagagctgaaaatcatcattctgctattggaaatacagaaccgattttatttccaaatcggtagcacttgatgttaacagagtatggacccagctgtacatagttatcctctccacccacgaagaaacacagagtatagagagcaatttcaaactcaggactcaccccaaccaatgtacttgacacggatttaagaaccccattccattcgaactgaactgttagcaactgtgtctcggagtcaggagtttccccacgtcttcggggtaatatataaccatgatagtcaacacatccttttgcttcttctaggtaaaactgaagccaattgtggaagccactaacttcttgctcacaatgttgcttgatttccccaacgaaaacatgttcaaaagcagaagaggaaccagatgtacctcctcgaccataaagatcaaaccataggcttgtcaacattcttttgaaatcttgatagttttcagatacaatgcccttc

SEQ ID NO: 11348 - DNA, 562 bp, Gossypium hirsutum
  Clone ID: LIB3829-001-Q1-N6-A11
aactacaaaaattttactttcattattaatcagatatattctgcttttaatcaacaccaacactgtttcccaaaagttagaagaaaaagaccccacactttttacgaacatcgctcacgggcgacccccatcctcgaattgggcacatcgaaaaccaccctatggttctgctgctgcatattggcgatcacattcagcgctggtgccgatgccatcgcaagacatgtgatgctgcctgctgtgctgtggagcagtaggttctcttgtggcagtgtcacgttcatgcccgaaaacataaatgttatggtcggtgcattgattgggaccgagtaacatgtgtcgaacccacccagagatgtcacgttcgccacccttactcgtctccggaatgcgtcccggacagctacataggctggctcaactagccgggtgaagacggtaccagaatcaataatggtgccagcaccagtggaaggattgaaagcaatggcacttggtgggatatcaacaatccttcttccaaccctaattccaatcaaattgacgtaataaagtgagggcc

SEQ ID NO: 11349 - DNA, 523 bp, Gossypium hirsutum
  Clone ID: LIB3829-001-Q1-N6-A12
aaataaatgagattgcaataaaaatagaggtgattcagtacattgataagatgttcgaagcaccaatggtttctacaatagagaatgggctgaaactgctactaccaacttcatttaacatcacttcgactggatagaatgttgagcaatgcctaaactggtccagcctcgggtccgaatgactgctaccacctcgggtgcagtcgtcttcaacataaaactctcagtaattcggctactatttccctgtgatataaaaactcaaagttacggttaccataaagataaacaagcctggccttctcagagttgcagatgatgtcgaccttgaaacaatgctcgcacccgactcggttttaagtccgaatcccaaggggaagagtggatcatagtgtgaatccctaacattcatcggtaattgatctacagttttgaaccatgttctcggaagttttccactgaatctgtagtccccgtaaagaaatcagtcacaccttggccttcagtgccaggtaaccatgct

SEQ ID NO: 11350 - DNA, 527 bp, Gossypium hirsutum
  Clone ID: LIB3829-001-Q1-N6-A3
gaaaaaaaaacaggaaatattgtttttcaaatactccaacaatggccatccgtcctttcagaaagtaattaaaaaaagggggaatcaacaaatgcaaccctacaaaaaacttgaggcatttattcctcttgttctttttattatatatataggaataaaaatcaaatgctgggtgctataaaaaccatgaaatcttactaactggtcttcatagttcatacatcgagtagcagcctgcaagggttttcaacgacgtccttgataccacccaagaaaaaaacagccttttttccatcgatcaacctatggtcataagtgagtgcaatgtacatcatcggtcttgggagtacagtacctccaacaaccatcggtcgggacactatcgagtgcatacctaaaatcgccgactgaggagggttgataatgggggtactcaatagacttccataaacaccgccattggatattgtaaacgagcctccacccatttcatcaattgatatgggcccatcatttgccttctttgc

SEQ ID NO: 11351 - DNA, 543 bp, Gossypium hirsutum
  Clone ID: LIB3829-001-Q1-N6-A4
aactaatactgaatatcttttaagtacatttcattaacattcaaagcagctactagtgccataaagataatggcaactacaaacttagtagtcatattacagagccaaactccacccaacctctctccctttccaagggacatgatatatgatcttcagaagtttaagcaacacatgcactggcaccattaatacatatgcataactggaaactaaaacacacatgaattctaaatgcctgtcttctttatctctggaacccaaaccatcagagagacggcgaaggatgggtatgcaatacaggataaacttgaattccattagatgaggaaaccattaccagaatatgagtttaatctccattcttgaaattctcaactccaagcttctttacttcaaccttgagagacttgaggtaccgaacagcttcatcgagaacggctacagtacccatctgatcagcacctggtacaattccccttagaaccttaaccattttcttcattttcagccgctttttggggtcagtaccaaaaccgctcc

SEQ ID NO: 11352 - DNA, 576 bp, Gossypium hirsutum
  Clone ID: LIB3829-001-Q1-N6-A5
cgagtcaatttttagttactcgattttattttcttagccctattggctacaactacaaaattaaccatatgcatgttcgggtacatgtcggacacatccgacactcagaagccaaaactgagtaaaaaatgtgacaatgaaagtccttgttacgaacagttttgtaaccctattatttctttcttttcattgataatttttcgacgagaaaggaaaatcgacaagaacacgggttcatggaaagattacctttggcactgaatcgacaatggattcgaattaatggctgtaaacctatacagtgcacttggccggatccttcttggattgtaaaagcatgtcaacaaactcttgattccggtatttgagtccaagtcacgagtgtcggtataaaatgagtgtcaatataaaggtagccctacaagcagttaaaacgtagaatggatggttccagccattctcctatgtctctctcaaaaagcgaatggagtggtctttggagttgtatactgggacccataagaacgctctgctttacgaaaacagccactgaaattacagtaacacaaatgccct

SEQ ID NO: 11353 - DNA, 641 bp, Gossypium hirsutum
  unsure (1)..(641): unsure at all n locations; Clone ID: LIB3829-001-Q1-N6-A6
tcgcttcttttctttttctctcccacaagttgcagttgcagagcttcgccattgttgtcttccttcaagctttttcagtttcttattcactcttcttcaacacccttttgatttttgctcttcaaccatggctgctttagtgcttccgctgctcatcctggctgccattactggccgctcaagtggcaactggtgtatatgcaaagatggtgtaagtgatacagtattgcagaagacactggactatgcatgtggtgcaggcgccgactgtaaccctatccacttgaagggatcctgttttaaccccgacactgttaaggctcattgcagttacgccgttaacagttacttccaaagaaaaggccaagctcaaggctcttgtgatttttccggcactgccaccgttactaccgctgaccccagctatactggttgtgctttcccatctagtgccagtaccgnaggcaccaccacaacaccaacaactacaccgtcatccaccacaccctcgtccgtgaacccaatcaacaacaccccaacaagcacaacaccattcggttcgacaacacctactggaatattgggaggagttggcaacggcttaggcccgtccggaactgggatcaaccagttacagtact

SEQ ID NO: 11354 - DNA, 589 bp, Gossypium hirsutum
  Clone ID: LIB3829-001-Q1-N6-A7
caagacaaatgggacaaatatatatttaatgtaaataactatatatacacaagtagttatagcctttaggcttcaaagttcaaataaacagaaacgtttacagctcttttctttagcccctgcatacttcagaagactagaaattaaaaggcagctacttcataaagacacggtttagatgcgcacactcatttatttatataataaaatgcctagaaaccaagagccatcatccataattaataatttaagcaccttctcctgttaacagatccatgacaactcccttgatgcttccgttgttcttcttcagcagcttcttgttcgtttcagcatcacagaaacccatttcctgcaactcctcaagtatcggatcccattcagccaccccacaaagatcatcaacagacttctccagatcatattcattcctcctcaaaatgtccttgttcaaatcaacctgcttgaaccccatatcttcaagttccttaagcagagactgctcaacaacattttcactctccccttgactaggtgcttgcacgctaattgcagggtctggcacttgagagggtccaacaggagcagc

SEQ ID NO: 11355 - DNA, 60 bp, Gossypium hirsutum
  Clone ID: LIB3829-001-Q1-N6-A8
cgtactagcttggatccttaacggcgccttttttttttttttttttttttttttttttcc

SEQ ID NO: 11356 - DNA, 552 bp, Gossypium hirsutum
  Clone ID: LIB3829-001-Q1-N6-A9
gaaccaaagacttttttgttacattgaacgaaacaaagggtttcacagcgacttcgagaacgaaacaagggtttcacacaagttataaagcgcggaataaataaaaagaatgtccatgtgttcccatatccaaagcacaatgacaaattcctttaaaaaaaaacaccccctcccttccccaaaagaaaacataaaatggttcgacacagttggcaacataagaaagctgatacatattacacaccaacaactgtcatcccatggcatacttctgggtccagctacgagcagtggcttcatactttgcccgatcagtcttatacatgtgagcaatctccggaacaagagggtcatcagggtttggatcggtcagcaacgagcagattgagagcagaaccttggaaatggttagtgcagggctccattgttctttgaggatatcaagacaaatgcttccattgctgttgatgttgggatggaagaccttggtcctaaacgcgaccttaggaggcttgaaaggataatctggagggaaatggatagtaactaaaa

SEQ ID NO: 11357 - DNA, 514 bp, Gossypium hirsutum
  Clone ID: LIB3829-001-Q1-N6-B1
acataaactgcgcatgctttgctaagtattgagcatgaaaagctcaagaaaaagttcacttagaaacataaatgcaataacagtcacagcataatgactatttctttcagcaactggaagttgagattagaatttgcctaattggcataaagtttttccttcctaatcctcgtactccgcttcctcttcctcatactcatcttcatcggctgttgcatcttggtactgctgatactccgagaccagatcattcatgttgctctctgcctcagtaaattccatctcatccatgccttctcctgtgtaccaatgcaagaaagccttcctcctaaacatagctgtaaactgctcacttacgcgcctaaacatctcctgaatggatgttgaattgccgataaatgtggatgccatcttgaggcctgtgggtggaatgtcacaaactgttgacttcacattgttaggaatccactcaacaaagtaggaagaggtcttgttctgaacattcaacatttgc

SEQ ID NO: 11358 - DNA, 619 bp, Gossypium hirsutum
  unsure (1)..(619): unsure at all n locations; Clone ID: LIB3829-001-Q1-N6-B10
aaactaacccaagttcttcctccgttttcttcatttttattattcttattaaaactgtcacctaacaaggacaataatcattaaaaagtataaaggaccaaaaaaacaggaagtgaatatacattcaaacatttagcagctatctttagcatatccactcgtctcttctgccacctttgcccacacatctgaaattttctcggcatatcccacctgatttacaacaaaccccttcaacatgttcaagaagtcaacgcgtctttccttgtcaagcctttcaagttcacacttgttattttccttgatcctctcatattctcttatggcaacattttttgcgtcttcagtaacccttatagtttctttcagttcctctatcttgtgaatcctagatttgtcgccgccaaatattttcgatgatgcagcttcaagtttttcagctcttgcatgaagtgtagatagttctgataggagagtttgaactgtcaataaagcacttgatcgatccgaaaagcaccatgcacagctaacataagcccaagatattcgtgaagtgtatccaaatgcttgacagtctgcgcattcaattctcgataaaactgctagctntactgctgca

SEQ ID NO: 11359 - DNA, 595 bp, Gossypium hirsutum
  Clone ID: LIB3829-001-Q1-N6-B11
aacaaagcaaagggtttttattttttttattttttatgaacaaaattacattccataagttcacgagagtgtttcagctcatcctaaagggaggagctcaagtaagtcatcaaatatttgccattttagaagctatttggtttatggttcatcgatcaataccttcaatcttatcttcgacttctgaatacaactgcctcaacttctcaatattctcctccgaagtttcccaatagccacgtccgttagcctccaagaatgtttgaatcaacttcctgaacgagttgggattggtgttcatcagcctattcaacatgttctcatcttgaatgaaagtcgaattagcctcttcgtacacccagttatccacttgccccgaagttgcactccaccctacagtatttgtaaggcgcttctcaatttcacgaaccccttcatatccactggacatcattccttcataccatttggggttcaacaacttggttcgtgcatctagtcgcacagtttcagccagagttcgaacctgggcgtttgcagtggtggtatctgcaatgtatgcacttggcttctttccatccttgcggaggttttg

SEQ ID NO: 11360 - DNA, 457 bp, Gossypium hirsutum
  Clone ID: LIB3829-001-Q1-N6-B12
agcaaaccatgttaggacattatagttataccctctctacatatatgggttgcagcttttcaacgccggctgcacattatatataataatatcccatgatgatagaagtagttacattgccaaaacaagtacacatacagacatacatgcatgcaaaaagacaaagggggcaaactctaattaacaacattataaagttcagctgtataaacgtcgaaactatgcaaattaaaattgatttgtcggcgaatagggggatcagcagaaaggaaaggagaggttcacatttcacacctcgtaaggaggagcaagggttctacctccacccttcttccccttttcgtatgcatctgatgttgaccttctccgaaaccgatacgactttttgtttcctccggaggagtcgattcggccggcgaaaccggaggcgatccgctctggtaacgcggcgatttta

SEQ ID NO: 11361 - DNA, 565 bp, Gossypium hirsutum
  Clone ID: LIB3829-001-Q1-N6-B2
agcaaaataccaactaaattagccatcaaaaagtcaggttacaaaggaactagtaagaactaagccataaaaattgttcgctgcaaagcttactcagccaatctcagggctcatgttgtgaccaaaagatatgaaaggcctttaagatactctataatttcagatccaccaagctttgaacttccgaacactctatcaacaaaagttattggaacctcttcaatgtgataacctttctttgaagccctaacaatcatctccatttgaaatacatatcccttgctaacacaggagctaatgacatcttcaagcactgatttcttataaagcctgaaagagccagttaagtctgatacaccaggccacaaaagagtttgtgcaagaacattggctcccctacttgttagcttgcgcatcagattccatccatgcacgccaccacctctgacatatcgtgttccagtaactatgctggcaccagtttcagactgcttcttgatgaagcttggcaaatattttggatgatgtgacagatcagcatccatgattacaacaaaatttccag

SEQ ID NO: 11362 - DNA, 387 bp, Gossypium hirsutum
  Clone ID: LIB3829-001-Q1-N6-B3
gacatgtaaccccaattctaatacttgattgaacattcctcggatcatggggacagtaaaatacatactaccagacaattacagaggaaaacattacaacaaacataatgggaaatgtgacaaccacaactccataatgtcccaatattactttgattttgctgaattgcgtgtgtcaaagttgtattattgttgagaaaaggaaaagcaacttacattatctcaattacacctcggctgacaattcttccctggttaagatcctgaaatgctttatttccctcttcaaatttgtattttcgagaaacagcattgtttaaattgaagattcctgtttctgctagttttaccaactttggtagatcctgccttgccctcgctccatac

SEQ ID NO: 11363 - DNA, 567 bp, Gossypium hirsutum
  Clone ID: LIB3829-001-Q1-N6-B4
gtggaagatacagaaacacacttgcaagttgcaacaatcttttaaaagaaaaaaaataattggttttacaataaaaactgcatcagatttccaatccaactaagaaacaaagagaaaagctcgacatcctctcatgtccattccatcatatagagtccatcaacctagcaaccttggttttagagagagcaagtgtaaccaggagggggtgttttcccacatgtgacaaggagttgaagagccagtggcacataaattttaaggttgagaaccttaagtttgagggtggtgcacaagcagaccgcagcttcgagctcggcgagtcctgaaagaaccggacaacattggttcacaaccgggtcacctagtccaatgtgcaccaaccctcccagcagatccacacaagcacccaatttcagtgtgtcaatggggcaagtgtccttggttggtggtgttgggcagggtttcccacttggtggcttagttactggaggaaccgtccctgggggaaggttaattggagggaccgtaaccggagggaggtcaatgggtggcttaactattgga

SEQ ID NO: 11364 - DNA, 298 bp, Gossypium hirsutum
  Clone ID: LIB3829-001-Q1-N6-B5
tttttttttttttttttttttttttttttttttttttttttttttttttttttttttttttttttttttttttttttttttttttttttttttttttttttggaaacccggaaagggacctttttttggtttttccgggaagggggggggggggcccaaaccgggtaatttggggggggtttttaaaaggggggggtccccacccctttaaaaattggggaaaaccccgggggggggggggggaaccccccttgggaccctatttttccggaaagggggggtttaattgccggggggg

SEQ ID NO: 11365 - DNA, 572 bp, Gossypium hirsutum
  Clone ID: LIB3829-001-Q1-N6-B6
aaagaggactgaagcatgtctaacttaaaactggttcaaatgggagaaatgaaatggtaccgatgggatcagtagaaatcgtgagttctaactgtctatcaaagctacaaatatcggaccaaaccgccgcacttgtcgacgagtaaaatcaagctgaaaatcaggctgcctgtagcagcaaactttgtacattgcttgtgaaactattagaggaaacgagtcaaccgcgcattagatcgatgtcaacatgagtgttacgcatatccattgttcgtgaaccaggccatacacctgctggtgaaggtggaatcagattttgactcggtgaaatgccagacggagatactagattgtcgacactctgattatccgagtcatttagacattcttgaccttccggtttcttgttctttgcctttggaccaccccattgaaaacttccgacaatcacctgaactgggcttgctgcaataagcatccctccgacacctccaccaatgacgcggccatcaggagtggcaagggaaacactaagagcaccacttcggctgcaagagccattgttgctgatc

SEQ ID NO: 11366 - DNA, 556 bp, Gossypium hirsutum
  Clone ID: LIB3829-001-Q1-N6-B7
cataatcaccaccttctaatctgcaaatggtttctctcaaaatctttaccaaattctaaggacctatcaagcttccccattactgcattcttgaaatgaatagcttcttgagctcgtgaacatgatctctgcatctttaccccacttaaactacttctggattccatcatttcattgagggaaagccgttttttcgggcctggttccggtctttgttttggagcactatgcgacctcaatttagccttgaatgattgtgtattagccatataattaggaaaatccccacagggtctgaaaaagttgtgacccgacacactcttggccggtgtagccggagcgcaagaattgatgaaccgaggcgtactgtgagctgtggaaaacctgcattcatctccactaaatccccagtcaatgtcctgataatgccgactatctggtattgataatcgagctggacatcgacacggaagtggtgaaggcagtgtttggtaggtatggtcatcgatgaaatctgatatactggtgttggttcttcgagatcttgctttaggct

SEQ ID NO: 11367 - DNA, 544 bp, Gossypium hirsutum
  Clone ID: LIB3829-001-Q1-N6-B9
gttcaattcttgccaacactggcttaggttgtgccatcacttgaccaccttttactccaccccactttgtattcgctccagcttatgttatcgaactggtcctcggagtatccaagctgtgcatatatttgcctacataagctgggtgcgaccggtgatagagcgatcgctttaatccttattgcttcgagtttgaccacaagatcctttgctgcaacttcggaagcagcaccgccttgcttaaaaagagaccatggttgatgcttatccatgtacaagtttccaccattgccgatctctagcacggattcacaagcagatgatagggacagattttcataattgatacgagctttttctaccagctactaaacggtatccttaaaatactttccttcagctgccatggttgaatcaaccactaaagtcgactggcagttcttcttaagaagtccaagagtacggttgagaatatttcctattgtgtgtgcaagatgtgcattgacaatattaacaaaacgctcctcagaataatctacatcac

SEQ ID NO: 11368 - DNA, 587 bp, Gossypium hirsutum
  Clone ID: LIB3829-001-Q1-N6-C1
aataaataagcaaaacaaaatattaatcccttaaaaacaaattaaattgttcaaagaaagatgcacattatagctcacacagatggagtttgttatagtgcatcctaattaaaaacacaaagttacaataataataataataataataaatccatggcattacacatttcttttgtttcatataataacataaaataagtttcttatgaagaaatccatacccatggtttcttcttcttcatatagatatatagatatatatatactatggtaaccaacctgtcatataattattcacacttggccctgcagtcaccactgacattggatcatgctgatatccgatttgtaaagtcggctcacaatccaatggatggaagaaggcatcgccatgaggctgatgatgaacctgttgacggccatagccgacgtcttccgttgcatttggattcaattgtaacgaatttacttgatacccttccaccaacctttgttttagggtcttattggcttcattaagaagagttcctttctttgaagatcttgagctgatcaacatgtattgggtccgcgtcgatctaattagc

SEQ ID NO: 11369 - DNA, 552 bp, Gossypium hirsutum
  Clone ID: LIB3829-001-Q1-N6-C10
aagaaaagcttaaatgaaatgcttgattaattggaagggactaaaactgatagtatcccatttaaataatcaagccataatctaagtacattgttgggcacagccctaaacctgacttgctctttcgaatgaccagtatctctgcactttattcattcatataacatactatacaattcaacagcaagatggttgattgtttttttagagtcttgcaacgcgaatatgttgcttcaatattggccgaatataatcatggtaaccatcgggtacgacagtctcgttcagaggatctttccatgcttcctcatagagttttggatacacatttccatcatagcgaccaagaacggagccaaggtaatggtcagtgtagttgaatgcatcaacaagtgcaatagcatttggacggacctgggagtacaataatctcagctgttcatttgctagtgcaccttgctttggggtaatgcagccggaggtgacaaagtaccaagatgtttgtgtaacagacttaaagcatatacattaaataggatctccaactgtctt

SEQ ID NO: 11370 - DNA, 599 bp, Gossypium hirsutum
  Clone ID: LIB3829-001-Q1-N6-C11
gttcaaaagaaaagaaacaccatcaccatttataaaacacagataaatccatttgggtttttgtttttcacacttggcctttgaaaccatatgcatgataatcaaaataccacatcattaacttggtttagaaattggagaccgtccacgtcccattgtgaatccccgtgttccatcaggcattctaggtcccggtggtggcttcgatggttctacggcatggcatgaggatgtagttccatggccgtgtccattggcaccacgatttttctgtctcctccctcgtcctctgtttctaggtcgaaccccatttttctctttggacaaatgctccccatcctcatcatctggtatatcttcatgatactcacttgaagcatttttctcctcggttccagtttgatcagatacctgagcattgatgtttttttcatgagcaggtcccctccaagcttgctttcgctgtccatgcttaccctttcgctcaagaagcttaacatgcatgccatttctccagtcatgttcatcgttcaaagtagccacagctttttcagcagcctcaatagtctcatactccaccagtgcgtgtaacttactac

SEQ ID NO: 11371 - DNA, 579 bp, Gossypium hirsutum
  Clone ID: LIB3829-001-Q1-N6-C12
acaaagaacttaaaccccatttcattatactactaaaatttgttccctctacgtaattgtttgttgattggatgaggtcagtcttaggggttagcctataagtctacgtcaaatacggcgtcgtttcgtacttttaagaaaatacttgggaagaagaccgccttattctcatagactaaaagctgtttcccttcaattcctctctacgtatgtcagtcaccgccgttatcagggcttggaaaccgaggctgcgccaccttcaaggccaccgttacccatggtggctgactggactgtcaacacggacatgctaggcgaggaaggtccatcgccgccgcttgattgaatcaaaaggtggctgccgttggccgggttttcatggttgatcatggggttccttgaacgagacgtggcgcttgagatggcggtggcgagagagatcggcatgaggcacagacccttctcttgcagatactgcatggcggagcccatgtcctcttccataagcttggccacttggtgctccgtcatcgtcagtctgtcgttggccgacggcgtttggtcgccgttggaatttcg

SEQ ID NO: 11372 - DNA, 563 bp, Gossypium hirsutum
  Clone ID: LIB3829-001-Q1-N6-C2
aataattaaggcagaaaatcttggtgactagattaccttttcaagctgcggcgtctgttgcagcacgcaacagcaggattcaggtcttacaagcatttacatgtaggttgatgagatcacatatatgatataaaatagcgactgccaatgaacacccccgcccttccagaccaaaactatatataataactaccataaccataaagtagtttaaccttatgacacatgatgctcttcaaacactaaaaggagggcaaaaagaagccccagatcccaaaacactcaaatcttccacatttcgaaaaataatgattaactaatacagacccagattctaaaaagggctaaatttaaaacctcatctcctgcagcgagtgatcctggaacatcccctggtataaggatgaacagggccacgagccttgaaacagttgtgagtataataagacctgcctgcccttggtggacatgggattctgttagccgaaagcgccccatacgaaatgtaatacctcattctcttccaccacaacaaagatctaccactatacccattttcaact

SEQ ID NO: 11373 - DNA, 516 bp, Gossypium hirsutum
  Clone ID: LIB3829-001-Q1-N6-C3
ggggccttgaaaagtttaagggttaaatttgactaaatccacaactcacttaaaggacaagggctaatagcagaatttgaccaaatttttacataagaaattacaattctttttacgatttgaatcgggacaaaaacactttcaaagctaaaaagtaaaaatgaatagctcaaagcaaatgaagggaaaacaaaatatttccaaaaattgagcttcctaatcgactgatattgaagtctggtcacacccaaaacattgacacttgacaatctattttttaatgcagactgaaagcttactgtaaaaaattagtgaaaaactcaggattatcaaatgggaagctttgatcgaactccagcttttcgagtgatgaaatatcgagggcgacaatgggtgaattagtaactgaagctggggcaaagattatttctgtaagttcaaattccgaagtctgcacattttggctgaaatcaaagctgcccatgtggaacgctgacactgaaaaaagttggattc

SEQ ID NO: 11374 - DNA, 543 bp, Gossypium hirsutum
  Clone ID: LIB3829-001-Q1-N6-C4
atgggaaattcgaaattttataaaatttgatcgaacttcatccttcatagccgaaaatagaaacaaaagatcatagctcatacaggcgttcaattataatcaaaattacatagacaaaatgtgaagaagaaaaaaaaaactctcaaatgaacagtcttaaaagctttctttcaccgtcggcgccgcagctgtcatttgaactattaccatctccagaaaaccggcttcccaacgtcgtcgtttcggactcttccgacgatgtagattcccttctccttttaaccgctctatcatcgtcgccgatcatcaagcagagattgagatcagatgctttacattcaacaacgtcaacgaaacctcccgactggatacacggccccccagcgccgccgccgccaccaacaccgaccgtttctccaacatcctcaaaatccgatcctgaaaccccaccactaaattcaggcaacggctgcaacgtgccgccttggagcaccgtttgtaccgccgactgacagacgttccagttccctgtccataacaacc

SEQ ID NO: 11375 - DNA, 562 bp, Gossypium hirsutum
  Clone ID: LIB3829-001-Q1-N6-C5
atcttaaaacactccaactattatagttaatttgattaataaagcaattatgaggattcaaatacttcaacaccattatattcaagtttcaactgcccaaaccatatgagcttaccatttttcttggccatcttcgttattctatgcttcaaatacttccaacacacaccattacattcctcattattaactcataccaccactatctgtttctcttttctatgcagaatatggtattttcagtgccattctttgagcaagccatggtcggttcggatcagggtctatgaatccgtgcataaggaactcttctgcttcttcctccagcagttcccgagaccaagtaacccgtttcgattgacagcacccagggccgaaacatctgtattcgtaaaagcaagcacttctctcgttttcggcttttccccagttatgccaacctacatgtttgatacattggtccatgtatgtgtaggcaaagaccacccttccaaagggtccccatggtcgcccgagatatgaataagaagaccctccgttgccagtaatgacgcatcttaaa

SEQ ID NO: 11376 - DNA, 542 bp, Gossypium hirsutum
  Clone ID: LIB3829-001-Q1-N6-C6
agatgaacaagcttttattagactcgaagttgaagctgacattatgatgtacaaaggacgaaacaggaataaaagctagttttaacataaagctacctaaacagaaagttactaccatttctcataaccaaacagttctttttcttcttttcatttcccactctacaagtactttcatatggagactgatccatatgctatgcatttgcagctcctataattccatggatccatagatttagaaggagaaagcaaaggactactctgtggcagcaacaacagctggcccttccaccttgaatttagcaccccatatctcctcttcttcagcaggcactgcagtgatcttgttcttaggattctcatagcttcttaatcctcctactgctgtggagtagaaacagccttgagggaaagaagcaagagatttgccacaggcacctttcagcaattcagcattatcagcaaaggccacatatccgtcggcggtgattccccaatagagaggaaccttaccaaattgatcagaagccacaaacaaa

SEQ ID NO: 11377 - DNA, 486 bp, Gossypium hirsutum
  unsure (1)..(486): unsure at all n locations; Clone ID: LIB3829-001-Q1-N6-C7
tcgcgactanatgctgaaatagctgaaggagacaaccgtgggctagctctattgcttcccataatcccagcgatcgcttgggtcctcttcaacatcctccagccagcacttaaccagctgaatcgaatgaggagctccaaaggggttatcatagggctagggctcggaggattggctgcatcagggttcatgtcaacaccggaagcatcggccagtgagatagctatggtagctgatgctgcatctagtgacaataggggtacccttctcctcttcgttgtagcaccagctcttctttgggtggcctacaacattctgcaacccgctttgaaccagcttaataggatgagatctcagtgagattgtggatcttgtatggggtgtaatggcatgtaaattacctgtaattgcaccttatgttaatgaagctttctcgttatttactttaaacaaaaaaaaaaaaaaagggcggcccccacgcgtccg

SEQ ID NO: 11378 - DNA, 487 bp, Gossypium hirsutum
  Clone ID: LIB3829-001-Q1-N6-C8
aaaacccaagggcaagggacatattattagttcttaaatgacaggtcaaatcagtaatgggggggggtaggatccttttcaaaaaaaaaaaattttaaagctgaaagcaatgccccagttaagcgggaaacaaatgtcattggatcgatagccaagggcacattttaggattacatgtttgaaaactgaaacaagatccatacaatgaaaagcttaaaaagtttaactaaattatattttgccaccccgcccaagcttgggggggagttgcggaccttttttgatcggtaaaaggtcatcggaagcaggggccctggggtaaaaaccgagggaaccccctcccaaaaacaggaacttgagcaaaaatcctcttttggaaaaaggagctgcaaatgtctaaaaaaacttgctctggagtgggttgtcccggaaaggggcattggatccatacaagtcccattgcccagttgggttgccaatatccccc

SEQ ID NO: 11379 - DNA, 584 bp, Gossypium hirsutum
  unsure (1)..(584): unsure at all n locations; Clone ID: LIB3829-001-Q1-N6-C9
catacaaagatctgattcttactttcactttcacagaaagaggagctttacatacagtaggggataatagactagagaacaacgatgactagcttatgcctatggctaattagtaaaaggattaaaaaacaaaaacaaatgttgacagagataatcgatccattcattaatgaaggacaaatttttcccgcttttttctctcttcccagtgttcatgctttggcttcatctggtgatgagtttcttgacaaattaattgatttttcatgggatgggtcacttacagaccttggcaaaccagaagactctgaagaatcttgacagccattgaaggatctcttgcaatgtaggatggcgctttggattccatcttgctgttgcaatagagaatcatctctcctcttagacaaagttggcgccggaggggaagccgccacggcggaggaagccgatctactctttcccaaatgcttgcaaaccaccctaagtccagccggaatgttcacctgcttgaggttcttcccaccctctgcctncacctgtcccttctccaccgtcgttgccttaccggaaagccgtttctg

SEQ ID NO: 11380 - DNA, 509 bp, Gossypium hirsutum
  unsure (1)..(509): unsure at all n locations; Clone ID: LIB3829-001-Q1-N6-D1
gtattgttacaagcattaaaacataaaaatttacacctgtctttgttgtgtacagcagatttgcatcttacatgtctttggatccttattgtacatgaacccatcggtttcaactagaccataaccccgaacaactacaacaacatttgtggaccataactagaagccttctataacacagaaatgacatgatccaacacggttcatcgattggatcaagcaacaattgggtatgatgcacaagttgccacaccgcacatgtttttgcccatctccatcttgaagtagccattgtcaccccattctgcaccccatgagttcttaatgagccaatatggaacgccattttcgactccatacccaactgcaagaacagcgtggttcacatccatgggtgtgctgccacatgttttactggtntaaaccccacttttgtaaaaacggaaactagtgacaacttcaaatgccacactaacaggccggaccatggcaactgcatgctttaattc

SEQ ID NO: 11381 - DNA, 469 bp, Gossypium hirsutum
  Clone ID: LIB3829-001-Q1-N6-D10
ccccccccaaaaaaaaaaaattttgggggggggggggggggcccaccccccccccaaaaaaaaaaaggtttttgggaaaaaccccgggaacattttccccaatttggtaaaaccggggggggggaaagcttttaaaaaaaaaaaacccccccctgcccgccccgggttaaaaaaaaacccccttttttttgggggggcccaaaaaaaaaaaattaatttccccccccgttttaaaaaaaaaaaccccaaaaaaaaaaaagggggggggggggggaaaaaaaaaggggtttttgggggtttaaaaaagggggaaaaaaaaaaattttttttccttttgggaaaaaagggcccccaatgtggggaaaaataaaaggggggaaccccccaaaaaaggtaaaaaaaaaaaaaggggggcccccaaaaaatttaaaaaaaatgggaagagcccccaaaaaaaaagggggggggg

SEQ ID NO: 11382 - DNA, 573 bp, Gossypium hirsutum
  Clone ID: LIB3829-001-Q1-N6-D11
aagctattcaattctttctcattttaatagaaactattctcatattcagttcttttactcattttaatagtaactattctcactgtcatgcagggtggaggccaaaagagcacggcacaggagcatgccattcccaccctttctcttgcacaaaattgaaacagcaaatacaaataaaaatgttaataccaaaccaaaactgatgccgaccttcataatttctaaagccaaaagctaaatcactgcgatacacccaaccacttggagaagttctcaaactcagtgtaatcactgtccgagatcatagtcttataccatgctttgcctgctgacttgattgctgttgcctcctccttagacacgggcttcctcttcttgtcaagcttctccttcttagccttaacacgttgtgcctcagccaaaagagccatcctccttgctgtctttgcatatgggttcaacttcagcatagcattcaagttcttaagaggattcttcttcaatggtgccctcttgatctcctttttaattggcttcaccacggactgcacctcatcggagttaattatccta

SEQ ID NO: 11383 - DNA, 599 bp, Gossypium hirsutum
  Clone ID: LIB3829-001-Q1-N6-D12
atgaaacaagtaattagcatataggttcataggtcaagttgacatgttaaacctaaaacataattcccagaacccataatcacacacccccactgaagataacagaaaagcacggtaatcggagacggtgttagacctatgaagttaaaccaaagcaatggtgctttccccaccagggggtttgcgtccgctactgactcgagactctaccttcccttcagcaaagatgttgctaccgctcatctcccgcagtttcgctacactgagtggtttttcagcagaacctggaggaacatcacccttaaatatgtcgtttccggatagctctgcgaatttctggttatgtattttctttgctgtcttaaccacggtctcctcacttggcgtgctacctccagcaggtttatgtgtatcaggttctcccatgtcaaaattgtccttcaaagccaaagcgcgtacagtagttggcctcggcacaatttcaggtgggggtgcaaagatgtcatgtccaccaagctcctttgacttggcatcggagagctgcttcttcaactttgcctcctcactttgtagtgttccactcaattcacgctgcttcg

SEQ ID NO: 11384 - DNA, 356 bp, Gossypium hirsutum
  Clone ID: LIB3829-001-Q1-N6-D3
catccacaaagttgaatatcattccatctcaaagaaaaaccgttatgacagtatttgaatacatcaacaagcattttcaatcttgaacatatcagagttctaagaacaaccatccaccaacttgccatgcatactaaacaaaagcagctgttactctgtcatgacaggcttattctcatttgctttgggtctctgttccttaggcttctgctcctccatttttctcttgtcggaggagcctcccttctggctgaggaaagaacggaagagaggagaattgacgtcgtaaatcattttcgaatgaaggaaaccctaggtagcttaggacgctcacacagctgcttctacaaccttcg

SEQ ID NO: 11385 - DNA, 386 bp, Gossypium hirsutum
  Clone ID: LIB3829-001-Q1-N6-D4
ccacagctggggaagttggctttttaatttcacctaaaagagaaaccaaaatcagcccacttagctctaatgggttacctaaaattaaactaaaattaaaaagagtaaaagggatccccaaatccttaaaaagtggaaacctcaaattctgaaaaacccccaaaaataaacaccagaaaacctaacctaaggaataatgaacataaaaaaagacctccaatagtccaaattgaaacaacattttgaaacctctaaacaaaaatctttcccagtttgcctattttccatagggatggtatcaaccacttcccgaaccattataccccccttaacttccaaaaaaaaaactccctcctgaaaaaccaccaccgtaaccccccggaacc

SEQ ID NO: 11386 - DNA, 495 bp, Gossypium hirsutum
  unsure (1)..(495): unsure at all n locations; Clone ID: LIB3829-001-Q1-N6-D5
agactacttgcaccaaggcaacactcacaaatttattgtctgttacactcaatctgcaatctctatttctcttcataaatgttcccacaacactagcttttctaccttaaaacaagcaaaagaatatacacaacaatacctgaaactgcaaaatcatttgcatttataatgatgacaacgttaatgtgatcatctatatatatataactatgaaacaccttggaatgacaatcgatcccgaagagtgtcaaaaagtgaggaagctgctgcattttgtgcaaatgttaatttcaatctacccagcaattcaccatcttttgcttgagaagctgcatcagcagcttctttggccatgccaatcctagcatatgcctcggccctttcacggagatcagcaagcttgggtatatattttagagcttcacctttctcatcagcatcaatgcatgcctcaacaaatggcctataaccnaattggtggtctcttctcttttg

SEQ ID NO: 11387 - DNA, 543 bp, Gossypium hirsutum
  Clone ID: LIB3829-001-Q1-N6-D6
gggagtcaaataacttacttttcctggataaaaacaacattcaaatacaacaacagtataatcaaagaaacaaaagagaaggaaattacatatctatgatagccggacaagttcactattcctctaggtatttgaggttttctttatgccgtgagtaaaaggtaattacagctataactatgagctactgttctgaatcggttgtgaaggacatctatcttcttcaatggtggattgcgggttcatgatcttacaaagagatcgatattgtagacgaacattctcaccacttccaattatcttaagcaaataccagccattgaggcattgggatgtaataacggcttcctttccaacaaacttttctggtgtcctcctgtttcccttaatcaacaccttctcattcactgaaaatggatattgcacgcccctatgcaacccatcctcagcaccatcctctccattctccctgcttgatctctttgataaatcaatttggtcacccatttcttgtccgtcgtttacgaagagcggcattatgga

SEQ ID NO: 11388 - DNA, 437 bp, Gossypium hirsutum
  Clone ID: LIB3829-001-Q1-N6-D7
gacttaaaaaattaaaaattttaaagataaatagccaaatttaaattgaaatggaacagtttgggtagggatggatgtataatacatccatggagatgataatgattcattattaatagctgtaggaccaaattaatgcccgggctcaaagctcccaaatccaagactcatttacatttaaaacacaggcccaaaaataaacccaaacaaggcccaaacaaacagaaacctaaagctgttgcttgagcccttgcgccgcacgccttttaccagcgtcccactccaccattcaccgcaccttcgagacgtgcgctaccagcagtccctttttgtcacgcctcgtgcttccgagatatccgcaacaacacctggtttccgacggtcgccgatgagcacgcaggggaggggaagcgctacgatgatgggcgctgcgccct

SEQ ID NO: 11389 - DNA, 606 bp, Gossypium hirsutum
  Clone ID: LIB3829-001-Q1-N6-D8
aaaggaaaatgctgctttcagacaagtatgatatcgccatatacaacgatgcttaagtacagggtatataaacaatggatccacaacaaaccccacctattttgtggtgtatgcaaactgctccttttgtttctttgccaacgtcacatgaatatctgcatacgctaccatatgatgatgacgatgatggcaaatctggtcagataagtttgaactaccgtgccaccagcagaaactatggtcagaactcttccatttgactttcatcttccaccacatgctctataaatgtgctttcttggaaaccctccttcactgtgtctaactgtcgaattgggtttgaggagggacgcgcccatctttttggatcccacaatatagagctgttgaaagcaaatcctgacatatcaacataaaacctacggattcttttacttttatcatttgtgtgccatccaattactttacttgcattgcatactggaccttccagaattgccttgtttttgctttgtgcaagcatggcaacaggccaagttccgaaacggctgatagttctcaagctttcaaacaactcgagcgtgtagacattgtcgtcgtcggcga

SEQ ID NO: 11390 - DNA, 537 bp, Gossypium hirsutum
  Clone ID: LIB3829-001-Q1-N6-D9
gctcttccattcaataaacacaaacaagaaatcatcgaatacaacatgctggaaaaggagagttacgacgaacaatgattcagatattaaaacagaaataatatgatggctttttttttttggctaaagtgaaacatttgatttagctaacaaactaactaggatattatatgcttacctcatcttccgccggataactcgatcgcgtcctgattatataatgaatcttctccccattcaaatctcctttgaagtctttcgtactcttccctacgcgtaacttcaacatgctgccactcttcccatctctcagccagcccctctccttccagcatcctcaccacctctgacattgctggacgctcctcgggtgaagcttgtgtacaaagcaatgcaacttggatcattgcttccacctcctcgatgttgtagtttttattaaggttccgatctacaatagcatccagctttttctccctttccagcttcttgacatgatcaagcagcaaacatcatcctcttcttccaagcgtgaaa

SEQ ID NO: 11391 - DNA, 540 bp, Gossypium hirsutum
  Clone ID: LIB3829-001-Q1-N6-E1
agaaaaattaaatcttccctcaaattgatatattgagatcaatgcgaggctttttagcaactggcattggaacaagggtattgcacctaggacatttagggttatgtttcattatcaacacatacgataagcatccgggacaacccgctgcaaccggcgacgcaaacaacttatcttgatcaccttcactgttttgcgaatctttgatcgaagatgatgacgaagagtatgatggtgatcgcttcttgatcggctctttctcggcacgttcaagcgcgaattttactttgtcgagggtgcaaacactttgataattggtaggagtgggtgatgagactaatttcaattctaggttggtgtcgtcgaaaagtttagcaaaggtttagaggaagaggctggaaaattcaaatcttgaagctttggcactgtttgattgatttggtgcttgcttccatctgatgattgtgaagaacttgaggaattgcatctttgcaagtacaccttaccggatttcaagtctaggcgcttttcccatccatt

SEQ ID NO: 11392 - DNA, 539 bp, Gossypium hirsutum
  Clone ID: LIB3829-001-Q1-N6-E10
agccagaatctgaaatcaccatattagagaataatcccatagttaaagcctttgggagttttagagaaccatgtgtattatcatacaagcttagagattgcttccgaccgaattactactaaaaggggagcacctggaagctttttttttggttgcaaatatcaaactctttcaaactgtcattcgtccagatttcaatatggaattgacattgaatagcttacattgcataaaaatgttattttatgagagcaaacggttccaccggtcttcatgcaccgcttgcatataaacgcgtccattcctttgctgtctcaacagcttcagccttgtttgatttccagtgcttagcaatattctccgagagtggatcatctggatttggagcactcaagagtgcctggatgcttaaaagtacagttcggatctgcagagctggactccatttgtccttgagaatatcgaggcatattctcccaagcttatcaatgttaggatgatatatctttgtaagaaatcgaaccttgggagcagccatg

SEQ ID NO: 11393 - DNA, 567 bp, Gossypium hirsutum
  Clone ID: LIB3829-001-Q1-N6-E11
gcttaatctaaacttttcattcatctcatatatgaaaagatcatcatttatacagtttaaagactaatctcatcctttaaaaagttaaagagcaactgtctctggaaaatctcatcatcatcgacatttgcaaatacccaaaaaatcaaacctttaaactgcaccttcccagctttctattcagagtcagattccatatttcccatagcctttaaacctcttggtctcttctttgtgaccttcttctccctgacttcataacgttcgagggttaaatcgcaaagccatgtcccaggacttaccagattgagggtacgttgaataaattttgatcgcttttttggtctttgtggcagcttagatcctttaaaggtcatgaaatcttcttctttctctttatttgttaaagcaatcacgaatttaggtggccaaaccatgggtgcaggagctatctcaccgctcccagaagatgaccctccttttttgctatcctgagctgtctccgaagatgccgctgatttattgttgtggtggttgttatcatggttgttgctgtggtggttgtaa

SEQ ID NO: 11394 - DNA, 574 bp, Gossypium hirsutum
  Clone ID: LIB3829-001-Q1-N6-E12
agaaagaaactttaaagaaagaaagatacacaagtctgcaaatatccagaaatgcaacagttgttacagcaaaagtaaatggctaattctttcacatccaaaacaggaaaaaaaaaaagcaccagcaactgggagttgagattttgaattgccaaaatggcaatatctttccttctccttagtcctcatattcgcgttcctcttcttcttcttcgtactcttcatcatcagctgttgcatcttggtactgctgatactcggagaccagatcattcatgttgctctcagcttcagtgaactccatctcatccatgccttcccctgtgtaccaatgcaagaaggccttcctcctaaacatagctgtgaactgctcactcacacgcctgaacatctcctgtatggatgttgaattgccaataaatgttgatgccatcttcagcccagtgggtgggatgtcacaaacggtcgatttcacattgttcgggatccactcaacaaagtatgaggagttcttgttctggacattcaacatctgctcatccacttccttggtgctcattttaccacggaacat

SEQ ID NO: 11395 - DNA, 601 bp, Gossypium hirsutum
  unsure (1)..(601): unsure at all n locations; Clone ID: LIB3829-001-Q1-N6-E2
aacaactcatagatatatatttatatagaaagacaaagaattgcaactcttattacaacacgaaagctgtaaagacatcctcaacaaaaaaaccaaaacaccaacttagaaaagagacactccgccaaagattaaccaaaaatatcattatgatttactgataatcacatgctatatacttgaaaaactattaagcgaattcgagtcagccatcatgtcttgcaaacaaacgtcaaacacattactcagaagaccacattcttgctgctgggaagatcttttgagtttgcccttgatcatcttggacgactttctgattaggctgccagtactatgatcactatcagaagcacaattccgaatatcaccaggagcaagcatgccagagaagaatttgatctctggctctttgcggctttcacgagatgggattttgcctgtgaagtggcagcctgngaattttcaatatgggtcccgatgtcatcaatcatagttccctgctcatgaactagcacagcaagatctttgaagatctcgttcacctcaccaatttgctgctgaatttcttgattccttgttctctttcacaatgatagcctca

SEQ ID NO: 11396 - DNA, 590 bp, Gossypium hirsutum
  Clone ID: LIB3829-001-Q1-N6-E3
acatgaactggaagcataattagaacatgaaacgttccaaatatattgcttaccaactttcgtatgtattacggaatttagattaatctttagtcaaatcaggaagaaacaaacaacatatggcaataatgaaattacctcccaaatgtgggcctttttttacattaaaatatcattttagatgcctactgctattggctagtactactatatatgccacacactgcgaaataataactaagccaagttgaaaggaatagctaaaccccctttctgtcactgtaacagtgcgacgaatatgggatattcggactttgaatttgacgtaatcgtcgtaggggcgggcgtcatggggagctccacggcgtaccaactagccaaaagaggccaaaaaacgctactcctcgagcagtttgactttctccaccatcgaggttcgtctcacggcgagtcacgcaccatacgagcaacgtaccctgaagactactacttcggcttggtcgatgagtcctatcggttgtgggagcaggctcaatctgaaatcgggttcaaggtttacttcaaggcccacagttcgacatgggtccatc

SEQ ID NO: 11397 - DNA, 584 bp, Gossypium hirsutum
  Clone ID: LIB3829-001-Q1-N6-E5
catagtaataggaatttatttcattaacaaagcaagcttttacaagataatttattctctcatcacataatataaaactccatataaagaactctcttttttttttttagagagagagagttctatatgggcactcttgataaccgggaaaggtagcttaagtaggcacataaatataacacatagtaggacaaaacattagagttttgatccttggttgggcaaatatacagcagcaacactcttttaagcatccaaatgaatcatgcatctcagacctataccctggagcatgtagtcgaatgccttgtttatatcggcaaaaggcacagagtgtgtgatgaacttgtccatatccagccccagctccttgttcaaatatttgtcgacaaccataggaatatcagtgcgtggtttatagttgccataaaaagcacccttaagggtcctctcacttagtagattcattggatgagttttgaatgcatcgtctttctttggcacacccaccagcacacaaacaccccaaccatcatggacgcattcaaaagcggaaatcatggcttggacgctccctgtacact

SEQ ID NO: 11398 - DNA, 622 bp, Gossypium hirsutum
  unsure (1)..(622): unsure at all n locations; Clone ID: LIB3829-001-Q1-N6-E6
gaagcccacatactaaacttgctcagatatgagttcaaagatctccaatgacgctccaaatatatgaaataatttaaaaagaacaagaaaaaggcatcacgtaaacagtaattttccatgttcctcgaataaaacgtggtcatcaattgcctcccacttgtctcttccatgagtcttccacaatcaactcatcaactccccagtcttcataactcccaccaggcaagtaccgacgaatggtgaaggggattttccgctcccgaagctccttcatggcaatctcaagcgggtcagtctcaccctccagctcaaccattactggtgcattcatgctgatttgcagggcacgtgtacccaagattctagcacgctcatatttggtcatgtactttgatgttttgcgactaattttgtcattagcatcttcgtcttctttttcttcagtttcaaccagatcaacaggaacatcgtcattgttattgttttccacctcctcctcggctccttcttcaatctcaggctctggtggctcatcctcatatctgtagcaacaatttcagcaatacagngcttaagttttntgggaatcaaaacacagtcaaaatgctgtaatttcaacaat

SEQ ID NO: 11399 - DNA, 496 bp, Gossypium hirsutum
  Clone ID: LIB3829-001-Q1-N6-E7
gaaaatatggactccaatggggctttttctttcttatagcaaaatctatggatcttctacaacaaatttaaggcaaaattcaggaggaaacagacaaagctgggaaataaaaaggcaaaaataagaggctaactggcacaaaagcttatcaaatcgtcactccaaataagcattttccccatgtaaaaaacatggctaatgttaagtgccatgtcatttaatcaaaaaatggaagttgtattgcaccttccactttgctaaagcactaatcttcttcactttcttccatatcttcggcgttatccgcttcatcatcgtcatcactatcctcaccatcttccttttcattaccctcctcattgcctggctttttcttattgccaccattgcctcatattcactgaacataacttcaccagaacatagtccaccctcgattttggtgagttggagagtcattctaggtccaatttcttgaagcttaaccgcgcttttt

SEQ ID NO: 11400 - DNA, 585 bp, Gossypium hirsutum
  Clone ID: LIB3829-001-Q1-N6-E8
agccgaactactcgtcaaatctattgcagtccatatagagtcttgaacaaagcttcgaagagtcgaagttcacacaatagaataagcaaaaacacacgataaaagcaaacaaatcattgggtagcaaaatgcaagccctccactcaaacattacttatttagtactcatcttcatcttcctcatcaccctcgcctgactcagcaccgacttcttcataatccttctcaagtgcagcaaggtcctcacgagcttccgagaattctccttcttccataccctcacccacgtaccagtgaacaaaggcacgcttggcatacatgagatcaaacttgtggtcaatgcgggagaacacctcagcaacgctggttgagttggaaatcatgcaaacggctctctggaccttagcaagatcaccaccaggaacgacagtgggtggctggtagttgataccacacttgaatccagttgggcaccagtcaacgaactgaatagttctcttggtcttgatggtggcaacagcagcattgacatccttgggcacaacatcaccacggtacatcaaacagcaagccatatacttgcca

SEQ ID NO: 11401 - DNA, 310 bp, Gossypium hirsutum
  Clone ID: LIB3829-001-Q1-N6-E9
attcccttccatcattccctaagtcccataggtttgatcctatagaatctgacccattttctcattgagcgaggggtacgaaataaatcagattggtttttcgatcaaaagcactatgtgaaatcttcggtttttcctctttctctatccctatcccataggtacagcatttgaatcaatagagaaccttttcctcctatatgaatcaatattattacattccaattccttactgataccccccaaggaaaatcccgaattggatccaaaattgacgggttagtgtgagcttatccatgcggttatgcac

SEQ ID NO: 11402 - DNA, 586 bp, Gossypium hirsutum
  Clone ID: LIB3829-001-Q1-N6-F1
ggaacttattggtgattgataagtgtttataattaacatgtttgctaacaagggaccaaaggaaaataacagcaaacaagtaatcaagaggtagtttcttgggtatttgaaaccttacaaggcaaaggcaatgcaagggaaagaacacaaatactgacaactttcaacaatcatctcacaaaatcagttatgatggctgaaaacagagggaagaacacaacaaccattaaaaggaaacagttcctcaaaagacatgagttttatttcgaaccttttggattcaatggtagcaatatggttaggctttggtcgatgcccctgctttggcaaggtcttctagtgctttcaaaatctgtggctcgctcaaaccttccaagcgaatgcccttctcgacacccatatcatatctagcccacatttggggctcaatcccacggcattcacggatgaggattggaagcttagggtttaaagtcttgagatccttgtaattcttctccacgaacgatctagcgggggcactggcaggagatgtttggcaaaacagaatccgtagctctttgagatttcgagataattggttcct

SEQ ID NO: 11403 - DNA, 386 bp, Gossypium hirsutum
  Clone ID: LIB3829-001-Q1-N6-F10
ccaacaacaaatctttttaaccggggaaaaaaaggctaaaagggcggggggtttttatctggccccactaaaaaaagcaaagccttcaggggttaaaaacatgctttaaaagcaaaaaaaaaacacgggttttgaaaaaaaggaaaagggttttgacattcacatttttttaaaaatttttaggggcaaacttccattttatgctttcaggagttacagggacattgaaacgtctagggacgggttttggacttttccataaccctcggagctagggcgaaagcccctggacttttaaagaacccaaaacttttacacgaggggggaaaaatttcccaaggaaaattgcccaccaagattcaatcaccggttttattttcataggg

SEQ ID NO: 11404 - DNA, 584 bp, Gossypium hirsutum
  Clone ID: LIB3829-001-Q1-N6-F12
cataaaacagagtaacataggataaattaataaaaccgtaacctgctttatataatcaatacatactacatatatcgatctaaattccacgactacccctagctcgccatcaaatttacaccatctgcaaagggaaggaaaaaaaaaaagaacaacctcctacaaacaaatactgctttctcttcacttctttgccttctttggcgccgctttcttagccggagatttaacactcttcggcttcttgacagcgactgtcttctttgctggatcctttactttcttccctggcgaactcttcttcgccgtcttcgctaccttagttggcttagccgctggtttagctttggccttagttgtagtagccttcggtttcgccgcaactttagcctttgccttcacaggcgttccaactttggctttggctttcggtttcgacgcggttttagtcgccttcggcttggactttgaggcggcagtggtagctgcagatttaggcttcgcggcggcaggcttcttagctacggcggccggtttcttagctgcggcagaagccgaagcagcttaaaagagcttttactttg

SEQ ID NO: 11405 - DNA, 597 bp, Gossypium hirsutum
  unsure (1)..(597): unsure at all n locations; Clone ID: LIB3829-001-Q1-N6-F2
gactatggtgatacatccatggtatagatagatattgttctaacatttaacactggttggtgtctcaatacaagcaatggtatcaccatttattgcattctcaatcttcgttggaggtgcaattaaccctttttcatgacatgtctccacagctccgacaaacatgtcttccaagctgtacttaaattgaaaccctaaatccaacagcttcttggaattgaagaccacatttcccaagttttcatctgcatctttgaactcagtaggaatattgtagtctgggtatttttctcttagcattttggcaagctcaacaatggtggcctcatgggaggagcaaatgtatctgccttcagctttagggttttcaaacaagaatatgtgagacatgcagagatcatccaagtgcacaaactgcccttgcctaatgataccataatgagcttcattcccagtaaggggtgaaaggccagtaattagactaggtggcattgaaggcataagaaatggaccaatgacaagagttggaattatagtgatgagatccaagttattctcctttgcaaacttncaggcagcttgctcagccaatgtctt

SEQ ID NO: 11406 - DNA, 497 bp, Gossypium hirsutum
  unsure (1)..(497): unsure at all n locations; Clone ID: LIB3829-001-Q1-N6-F3
acattgccatcatttcttcacattcatgaatttaggcagagttcatatatatatcctgtgctctgtttgacacattttattacttggataaacatatacccgatttagtgacacattttattacttggataaacatatacccgatttagcagaaaacaagattcgatttctgaatggctaaggctttgatatataacactagcacatgaacccagaataagctaatccggaacaaggttacacgctttagttgccagcaagcttccatttgaaaggttagttcaaacccccggggggggggggnggaggaacagcagaaagttactccatgtcaaattcttcctcgtcctcgtctgattccacttcccattcatatccatattccacctcacctccatttccctgcagtaaattcagaatctgctccaagtttctcacacccatctgcaaactggttatagagctcatctgctcaggtaaagttggcagtgaataac

SEQ ID NO: 11407 - DNA, 612 bp, Gossypium hirsutum
  Clone ID: LIB3829-001-Q1-N6-F5
acagggcaatagagaaagctacaattgaatgcaaacaaaaagcttactgaatacagaaaaactcctaaatcatctctacaaagatttgacatatggttcccatgaacagaaaggctaaataccaacaaacgaaaacaaacactttactgagattgttggaatcaccaatgatcaattaggcataccatgagtgctttgttgacgctgcaacttggggattgaaatgggtacattagcaccagaaactgaatacgacccattgtttcccttgtcgggaataggagatggaagggataaagagcttgctttggcgtcagcagcagcagcaatggcagcatcaggtttagatttgggaatgcctacgagggacgacttatgtctatcactatccttccgggccaacaaggcgagtctctcgagagcctctttggctctcttctttgccaaagtagcttctttgaccctccgctcagcctccactttcgcaacggcggcagctttggtcatagaggcggcagcaatcttagcagcagctagaagtgccttagctgcttccttgtcaataaccctcgtgttcgtcgtcttgttgttgtcgtcgtcgccgtcgtgggt

SEQ ID NO: 11408 - DNA, 610 bp, Gossypium hirsutum
  Clone ID: LIB3829-001-Q1-N6-F6
aacagagcaaagtaaaaccaggcgttccattctatttctactaacaatttatagttgtttaaaacatcacaagcttcatatcacaattcaggtaatatatatatgtattttacatgtctccctctcagccaaaaattgacaaaaacagaaaaagggcctacttcctagcaaatatttttaccttctcaaatgtaacctatgaccttttaaggtagaacagcatcaaatgtaacctatcacctttctaagtagaacagcatcctctcttagtgtttcctgatgtatcagtgacattaatggtagttccttggccaggaattgcggtactagcagctgcttcctgggctgccaatgcctttttgcttatgatatggtagatctcagtcaatatagttcggaatgccttctcaatgttggttgcttccagtgctgatgtctcaagaaatgaaagaccttccctctcagccagagcttgaccatcctcctcggtaacagctctgagatgattcaagtcggatttatttccagccatcatgatgacaatgttagaatctgcatggtccctcaattcacgaagccacctttgaacatttcaaagtttgcctcttcg

SEQ ID NO: 11409 - DNA, 559 bp, Gossypium hirsutum
  Clone ID: LIB3829-001-Q1-N6-F8
ggagaaacttttcagtatgcgcatagggaaacaaaattatctttgaaaagttcatataagaaatgagcaattggacaacttcaaatggagatggcctttatgctcaattacatgaaacgaataaccattttactaatggaaaccatgtcttctagtattagtgtatatatacacataacacagatcaagctgtttagcaacaacttagctcgaatctagggacactgaccgccaagtcttagtttaaggagaaacaagaattttacttgattcataagccttttctgcaagacatccagaaccgatgagagagattatccaaacctgatcggaccttactggttcatcgtcatcattccggtgccagctccaaaatgcatgagttgaattcactatcttgagctcgccatgaccaaagctcgcttcacggaacattgaccactctggtgttgggtgaatgtacttttgagctaatccttctctattgcctccatctcctatagtaatatgaacggtgccacaaggatctgattttcctttgttaacacgtttggagcgc

SEQ ID NO: 11410 - DNA, 577 bp, Gossypium hirsutum
  Clone ID: LIB3829-001-Q1-N6-F9
agctaaacccgggtgttcttattgctcaactgttcctagtctcatttatttatcaaccaactatggtatataaaccgcaaagtgaatctgtagtcaaatgcaaactcacctttgatcttcccatgtatcatctcatagaatgttctatggtagcaagaaccgaggacaatcattcatactagttgatctattagtgtacaaaaagcatcacctttgctagttctaaggctttcgggcgtccgaaaaacttctcaacaattcctagtgcaaactccatggaagttccaggacccctgcttgtaatgaggttgccatccaccacaactcggttgtcgatgaaactctgatctgatagtttgttgcacattgcagggaaagctgtggctttttttgcccttcagtaagccatggggctccaagaccaaagctggagatgcgcaaatagctccatagggtttgtttgattccgcctgcttctttagcatgttcaccagcttatcagagttggcaaatgcttgggcaccaccaagtcctcctggcaagactatgaggtcatatgaaagtttagcagcttcat

SEQ ID NO: 11411 - DNA, 628 bp, Gossypium hirsutum
  Clone ID: LIB3829-001-Q1-N6-G1
tcgcgatctcagatctcagaagaggcccgtaccaagcaaaccgcccgtaagtcgactggtgggaaggctcctaggaagcaacttgctaccaaggccgcccgtaaatctgccccaaccactggtggtgtgaagaagcctcatcgataccgtcctggaactgttgctcttcgtgaaattcgaaagtaccagaagagtactgagcttcttatcaggaaattgcctttccagaggcttgttcgtgaaattgcccaggatttcaagactgatttgcgtttccagagccatgccgttcttgctcttcaggaagctgcagaagcataccttgtgggtctctttgaagacaccaacctgtgtgcgatccacgccaagcgtgttactataatgcccaaggacattcagttggctcgtaggatcaggggcgagcgtgcttaatttccaagtgtgttaatcacacacttagaatggagaaactattgtttgttgttaggcaaatgtgttgtactatttttttatgtttatttttaatcctctttttagacaagattaaatgataggtttatcttagtgcgtaggttcccatgttatgatgaaatggggttatggtggagagtgtgatgtctgatatttt

SEQ ID NO: 11412 - DNA, 217 bp, Gossypium hirsutum
  Clone ID: LIB3829-001-Q1-N6-G10
ggacagagaattacgtttagtataggcgttaaaacattatagttgctgtcaacacaaataatccaaaaataagaatatgtttaatcattcatccatcccttctaagcaatcaaattggaagaaatccctgaattgataaatttccaaccaccacgatgtgggtctgtcacacctcagctaatcttcttacttcttcttcctcttcctgctgtcattt

SEQ ID NO: 11413 - DNA, 444 bp, Gossypium hirsutum
  Clone ID: LIB3829-001-Q1-N6-G11
atactaataatagttcattaatcagacaaaggccattgacatggtcattccatcattgtataaaatgagagacatagacaatcatcggacagatagacaagaaacacactcaaactacaacaaaagacacaaattattcaacccaacttttattctttttaggtcccaaacttcatcattctatatgtctgcttagtgactgccacatgtgcagtttgtgcagctgcagctagttccgcacttgcacttgccatcgttctctgccagaggctcgaccactacggtgctgatgtagctctcctcagtctcaatgaccaagctgtttcctttcttcacacactggctcttgtcagcgcaatcgcagttgccacacttgtcagccatggtgaatttgagagagttgagaactaaaaagtttgtttgagtttctaacccacgcgtccg

SEQ ID NO: 11414 - DNA, 240 bp, Gossypium hirsutum
  Clone ID: LIB3829-001-Q1-N6-G12
agcaacaaattacccatctacaactattaatttcgaaacgtcaaaagaaaccaacagcatccagagttacatttttgcttaaatgaaatttgcatttaaaaagcattaacataagatgatcaaacactatcacagcctagtttgattatgctatcctccctggatttttcctactcatcatcttcgtctccactgccttcatcatcatcttcttcttcatcattcacctcagatacagac

SEQ ID NO: 11415 - DNA, 470 bp, Gossypium hirsutum
  Clone ID: LIB3829-001-Q1-N6-G2
tcgcgatctgtgggagttggctgatggattaatgcctgagaagctggacatggaggaagcttatgggttgactttacaacgtgcggcaccattgatggtgcatccaaggccaaggttatcaaagcatgcttattgaaaacgttgtcgtttcagggtgaggaggacttaagggtgttcaaacttcggttaaaaccgaattaaccgattaaatcgatcttattttgttaatcaatcggtggttgaacttagttgtgtcgaaggtcggttaatggctttttgaaatttagcttattggttaattcgattccaaatcgaataattaaccgaattaatcgaacttaataattaatattatgtattaatttaagacttatgtagtgtttttattatgtagtttttcaagtcataaaattttggttaattcggttaacttttaagataaataaatatatttcagtttatttcaatat

SEQ ID NO: 11416 - DNA, 237 bp, Gossypium hirsutum
  Clone ID: LIB3829-001-Q1-N6-G3
aaatgaaaatgtgtgacaaggggaagggaaaaaaaaaaaaggggcccgggaaaagaggaggggggggggggggggggggggggggggggaaggggggggggggggggggggagggggggaaagggggctggtggcggggggtggtgggggggggggacgggccgggggggggatggagtttgaagggggggcgaaccggaagggggcctaaccctttggcggaactgggggggggcc

SEQ ID NO: 11417 - DNA, 381 bp, Gossypium hirsutum
  Clone ID: LIB3829-001-Q1-N6-G4
aggtaaatatgcaaattccattcaaagagaaaccatacatagatgcaaccggtaaacaaagactagaaattatttaaaaggccattacagggcacagtccttcacgtaaaaccagaaaacccacattaagggagaccttaaggcttagaacccaccacgaagacgaagaacaaggtgaagagtggactccttttgaatattgtaatcagccaaagtccttccgtcttccagttgtttcccagcaaaaatcaacctttgctgatctggtggaattccttctttgtcctgaatcttcgctttcacgttatcaatcgtatccgagctctccacttctaaagtaatcgtcttaccggtcaaagtcttgacgaagatctgcatccc

SEQ ID NO: 11418 - DNA, 573 bp, Gossypium hirsutum
  Clone ID: LIB3829-001-Q1-N6-G5
ggaataaattgtatattatttattacgaaagagctttttagtccatcgaaatctcccacaaactcaattcaacatgttcaacaaaataaaactgcaaatacccatattcatcaagcaacaactgcccataaactactgagagatgacaaaacccaatacattcattttgtggaggcaaatgttgttggcttcattctattccgcaaccatcagcttatgcatcagcaaatcctagctcagagagcttcaggtgagcttcggtgtagtcagcaaagaaggcatcctcatcggcagcatatttttcaaccaatggacggaaaacaggatctgacaggagaactttgtcagttggtagttgaagaaggccttccttctctcccgacaaaagctccttgaagtaagagttgtcaaagatgagagggttggtagtccatggtccctcaaacccggacctctccttgtggcaccttcccagagtgtggccaccagaaagagcaacaatgtgctggtcactgagacccatttgagcactaaacacctgcctcaagtgatcagaacccttggtagcatcag

SEQ ID NO: 11419 - DNA, 610 bp, Gossypium hirsutum
  Clone ID: LIB3829-001-Q1-N6-G6
aatgcaacttcatttattttcacataaaatccacaaaacatacctcaaagcaatttattctgatcatgattacaagagaactctagtacagattatttataaagaaaatgggaataaaagagatttcattcccaaaaaagctagaagacatccccgcgatcatggagaagcaatattgtttgcagtttcggagagcagtttaaatgttaaacccgagccattcaatttctcttgaataagcttctccaaacattcaatcatgaagggtgtgagataattgctccaatctcccacttctcctttcctaaaaaaatgtgtgtgtggaactccagaagtatgtacgtccttcatgttcacttccaattctttcaagttctcaaagctacaaattttcgctattttttcaacaactccttgtttctcttcatcatctgtgaaaggaactcctaagaacatggccaaaattttcaaatgggaatccatatcttccttaagatcttcaaagttcaaaaacaatattttgttggggttttcttggcttgccttccaatatcccaatacatgatcaaaaaatggtccatgcgcagagattccatggtagaacttgtca

SEQ ID NO: 11420 - DNA, 505 bp, Gossypium hirsutum
  Clone ID: LIB3829-001-Q1-N6-G7
gaagatgaaaaacaaccttcattaattttgtctaaacataaacaattacacacttcaactttttcaaacaccattaatgcttcaatcccaacaatcaaacattcaccatgtgggtaacatagcactacagattattcaacaaactcaaactcattatcggcttcctctagggacagaaaataacttttagctcacgtggggaagaacagtcgtgcatgagcgaagggctatcatgggcgtaagtaaatgtggccggacaagcatgtttgaaaaactctgaatagctcgaagccctacaggtctgagggctattgtaatggttcctgcagcaaagctcgtcggttccgaaggcagcacaaccacttttacaacccacaactggaccatgaggaggtgacctatactgtaacttgccgggacacgtggccagaatattagccctgcacccaacgacggggcaaaggcctttgccttcgtgcggggtaacagtcatggggatgttaaa

SEQ ID NO: 11421 - DNA, 613 bp, Gossypium hirsutum
  Clone ID: LIB3829-001-Q1-N6-G8
caaattaatgccatctgttatcattcttattcttttatgcagaaattcaaataagtattgaggaccagttaattttcaccatagtcagttcagctcaacctaacaaatataatcgtacctcacttcatctatgtgattgtaatgtgaagcatacttccctatgaaaatttttttcaggaggcttcctcagatttcagatatcgcttgaaaatcttctctactagctcgaaaaggccacattctacatcgcttcacaactaggatcaaattgattagtgttctaatgatagatttgttatggagtcaacaacctctaaccatgtctgaatcttctatccgggttcctcaaagttcatcatgttcctgaggctgctctttgttcgacaaatctagtttatgttgcagctccttcagcttatcttccaggcagacagctggagtggccaataaagcaacgtattcgcaacggcttggttcatcaacatcggtaagctcatttttcaaaccgcatcttaatttcaccttcatacttcgatctggaccattccagcacttatctccatttgaaaaaccatcatcttgtatgcgtcctcaaatttgtcccaacgcccta

SEQ ID NO: 11422 - DNA, 598 bp, Gossypium hirsutum
  Clone ID: LIB3829-001-Q1-N6-G9
ggacaatcatagtaatagaaatttatttcattaacaaagcaagcttttacaagataatttattctctcagcatataatataaaactccatataaagaactcttttctcttttttttttttttgagagagagagagttctatataggcactcttgataaccgggaaaggtagcttaagtaggcacataatataacacatagtaggacaaaacattagagttttgatccttggatgggcaaatatacagcagcaacatttccttaagcatccaaatgaatcatgcatctcagacctataccctggagcatgtagtcgaatgccttgttaatatcggcaaaaggcacagagtgtgtgatgaacttgtccatatccagccccagctccttgttcaaatatttgtcgacaaccatgggaatatcagtgcgtggtttatagttgccataaaaagcacccttaagggtcctctcacttagtagattcattggatgagttttgaatgcatcgtctttctttggcacacccaccagcacacaaacaccccaaccatcatggacgcattcaaaagcggaaatcatggcttggacgctccctgtacact

SEQ ID NO: 11423 - DNA, 598 bp, Gossypium hirsutum
  unsure (1)..(598): unsure at all n locations; Clone ID: LIB3829-001-Q1-N6-H1
tttttttttttttttttttttttttttttttttttttttttttttttttttttttttttttttttttttttttttttttttttttttttttttttttttttttttttttttttttttttttttttttttttttttggggggggggggggggggattttttgggggcctttttggggggtgggccaagtttttggggggggggggtcccccccttgtttggggggcccccccccttttggggggcccaatttttggggggggnggggggggccccccccccccccttttttttttttggggtttttttttttttttttttgcccccggggggggttgngcccccgtttttttttttttttttttggggggggggggggggcttgggcttccgtggttttttttttttttttttttccccccgtgcccggggcggcggggtgggggggggttttttgtggtttgtttggtgggttgggtgggggggtggcttcgngggggggggggtgtggggggtggttggggcggggtgtttgggtgcgtgggggggtgcctgggggggtggcgggggggggggggtggttggttctctcctgtctat

SEQ ID NO: 11424 - DNA, 600 bp, Gossypium hirsutum
  Clone ID: LIB3829-001-Q1-N6-H10
agagttataatgatgtgtgttttattgagggtaaagatttaatgaggatcattacataattgacccaaataattgggcatttggcatggcatccacttcttaatatcttcattgggagacgcgacaactcatgaatttctcgtgaatggcattagtgtgttaaaattccccccaaggatgccaacaaattgatgaccagtttcccccacattttgtccttacaagacgaggcagtgctgagtcaggcacatgccaacaagccccacatctcaaacttaccattttgaaccaaaattcttaaattttcagggggaaaagcccataaatttcacagatctaaactcacacaccaaactaactgaaacaaaagaattttacagcctaaaaaacagcaacagcaacatcaacatcaacatcaacatcaacaccagcaacaacaagccatatcaatgccctctaactagacttgtatgataatacaacaaggtggataagcaacaagcaaagcgatagaaccggcagatgctgggataagttaaaggtaaccgatgacgactgatcatatatttcagaaagaatcgaccgtagcggcattccgtc

SEQ ID NO: 11425 - DNA, 598 bp, Gossypium hirsutum
  Clone ID: LIB3829-001-Q1-N6-H11
actaattaatatttcaaataaaaaagaaaagaaaagcgtaacaactcagtgttatctcgttcaactagacaaactcgacgataatagtattacaacataaaaaggataaaaaggcaagaaaaatttgggagtagagagttaagaatcaaagattacgcttccccctgatctttcccttaccaccggcgcggcgcttctttttggcgatcttcaatttctttttggacatctttcctattctaccaatagctctcaaggaggccttggtcttgttttcatcacagtcagccatctccacctccatggagttcagattggttgttgcggaactgggtgcggtaacttgttcttcgagctgcatagaaccagagggtggggaagaggcgggcagcttaggggcagccagggcagcctctatggcaaccatcttagcttcatctttcttctgatagaaaggttccactatttccctccttatggctctcagcctcttctctctcttcgatctcatcgactttgccattttcttttaggattttcccttgttcttcttaaacgttaagaagaaatattgctagggtttccggacgcgtgggtc

SEQ ID NO: 11426 - DNA, 606 bp, Gossypium hirsutum
  unsure (1)..(606): unsure at all n locations; Clone ID: LIB3829-001-Q1-N6-H12
agaagtggaacataatcacattnagaacgtatttcaatataattcaaaacaatatatccaaacagtttattgtgaagttaaattctaaactaacactaccagtatcttttttgccccttccaattaagcaggcgatttgaagtgtcagaaatacaccttcaatgccaacgggcaagctagcgatgactttcaattcaactgccaagtagtcctttcaatgaaaacggaaaggtaaaatgagcatatatccaaaaaaggctatttggttaaacgactgaaattggatcgcccaatgactcaggcgtaccgctgctaccattgagaaccgtaacatttccatcggagtcaacatcaacgattactgaatcaccctccttgatttccctggcaagcattttctcggccatgctgtcctcgagaagtctcataatggctcttctcaaaggccttgcaccatagctcgggttgtatccttcttccaccaccctttccctaaatctttcagtcacttgaagctctatctctttgtctttaagcctgtcaaacacctccttaagcattatatctgctatctccttcacctccaacttggtgagctgcctgaaa

SEQ ID NO: 11427 - DNA, 592 bp, Gossypium hirsutum
  unsure (1)..(592): unsure at all n locations; Clone ID: LIB3829-001-Q1-N6-H2
ataaaggctaggncggccaaaaaaaaagagagccattttctataaatttaagacataaatacataatatttgcaggcattttaacagatcaaaacatataagtttgaaaaacggcaattcaacttcactgctccagagagttttaagagtcaagagttgctgttgatgtacattgcctcagtcgaaatgccttacccgtggaaacacacttttctcgtggtggcggagggaaaaacaggcggtacagaaactctacaaatccattccaacaataaagtaccttacacagtcctctttggatcacgagctgctgcaagatggtccaaaataaaatcaaacgctctggtgtcctctttcttagaattgttcatcatagaactagctgtttgagttgggaaatttgactggaaaatatcaggcagaggtgatcctccatttgatccactggaaacatgattaatcccagcattttgtgcattaagattaccaaagtgttgtaagttagacattgtagcaagcaattgctgctgcgcaaagaaactccccatggcaccataattcataggctgagaggaaaaagctgggttcaacg

SEQ ID NO: 11428 - DNA, 607 bp, Gossypium hirsutum
  Clone ID: LIB3829-001-Q1-N6-H4
aatcaaaagagcaaaccattgaccatatttatcaaagtataaaaccaaacaggaaaaagccacaaaagccactgcagaagtgagcttagctagacaaccgttcataagttcagataacatacggaacacctaagagtgttgcaacccaaaagtctaaagacatgaaaaagcagcataaatagtttttggtagccaaaatccaaaagccctatacaaaaacatggttcaacggttttcagcagaagaacatggagctgctgacattatccttcaacctgggaagctgaggtacagaaatggctcccggagcagtcaccccaccatggctcgatgatgtctctgaagcatcctcaaacttcataaattgccccaactgtgaagctgccaaatgagcgtagcaaataggggccacaacagatatggctgtggtgctcctttgatacacgtaggatagagaatgaacaagctcctgcagatcatcagctgaaaacccaacctggtctaagagaacatgatagtgggtcggccttgtggtccctatcattccagcatgagcacaaaggtaaaaatcattgttcttcggatggcatactttgttgtcaattac

SEQ ID NO: 11429 - DNA, 541 bp, Gossypium hirsutum
  Clone ID: LIB3829-001-Q1-N6-H5
gaaaaaaacagcacttatcatttaagagtactcgacaataactaacaacaacataacaaaagcaaaagcaccaaacaaaatgtaaaacaagctaacagatgcttcaaaagtaagataaatctactgatcttataaaaacatgttaggcttaatcaacttcctccatcttgctgccttcggcatcagcatcctccaatgggggcatatcagcatcaccttcaccttcacctgcatcctcatcaatgctcaagccgagtttcagcatcctgtggattctgttgccaaaggtgttaggctcatcaaggctgaagccagaggtgaggagagcagtctcgaagagaaggagaacaaggtccttcacagatttatcattcttctctgcatcggctctctttctcagctcttccatgatggggttctccgggttgatctccattgtcttcttgcttgacatgtaaccagccatgctgttatccctcaaagcctgggccttcatgattctctccatgtttgcagtccaaccatactcgccagtcactaa

SEQ ID NO: 11430 - DNA, 601 bp, Gossypium hirsutum
  unsure (1)..(601): unsure at all n locations; Clone ID: LIB3829-001-Q1-N6-H6
gctgaaaacaactcttaaattttatcatatacataacaggaaacaaacataaatgtattagttaattttaactaaaaaaataaaggtcaaattgataataaaaaacaattgtatacattaattaataaagaaaacgttcaaatcaggttccaaagaaccaacttataagtacttcattaaagcattgatctcaactttctgcatcttcagtctccaaagaatacatgttacatcaaattctggaatatgtaagattctgagcacttcacagttcacctaatatcagctgcttattttggttgatcctggtcttctcttacatcttaaactatcatatgcacggtttctccagctatcatcaatatattctcatcttgcaatttctctaatatagacatgatctcaacccttgagtaatggatgtcagctcctacgttgacaatatcctccacttctgcaatagatacggtttccttgtggtttacacgcatatgctgaccaaatatagttttaaaagcttctattctttcgacagaaccagtagcagtggcctgctgggctagtggaggatcatctacttncatagcatctgcagtttggc

SEQ ID NO: 11431 - DNA, 502 bp, Gossypium hirsutum
  Clone ID: LIB3829-001-Q1-N6-H7
ttttttttttttttttttttttttttttttttttttttttttttttttttttttttttttttttttttttttttttttttttttttttttttttttttttttttttttttttttttttttttttttttttttttttaattttgggggggggggggggttttttaaaaaaaaagaaaaccttttaaaaatttatataaaaaaagtgggtttctgtccttttttttaaaatgcaattttgcgagttgtttaaaccccaacacttgtttttgggaaaaaaaaaacccttttcaaaacccgcaaaaaaaaaaaaaaaaaagcccaaaaaaaaaaaaaaacgtttttttttggccgcaatttttttttgtgggggtttttcccggaaaaaaaaaccttggggaagggggaaaaaaaacttttttcaaaaaaaaaaagaaaaaaaggggggttttccccccaaatttttttggaaaaagaggggcccccccgaaaaggttttttttac

SEQ ID NO: 11432 - DNA, 559 bp, Gossypium hirsutum
  Clone ID: LIB3829-001-Q1-N6-H8
aatcaataacaatagctgttttgaaactagagttggtaaattgtaaatttttgtctaagcatcaattttcttaaccgatgaccgaactgatgccgaaattatcccagctgaggaacgtaacaccaaaaaggtcaggtttaaagtggtgagtgaagattcaatggacgtaacacgattccaatgagagaagtttcttggaaagagaagcttttgggaaggaatggatctgaatctggtgatggttctttcgatggagaccttgtaattgaagatggtgacattcttcggtcctctattaatggaatccccgccatagtcttctcggagtgtttacggaatattttggttagggatatgtagactactgttgttgtcaagttgttgggacggaacataggctacggggtacttcataattgtatttgtagcctttggaaaccctctcaatcgtttagactaatggacatcgagaacggatatttccttgtccgtttccaaagcagagtcgagctttgactcaaggcccctagataatgtttggacactatttacccgttca

SEQ ID NO: 11433 - DNA, 573 bp, Gossypium hirsutum
  unsure (1)..(573): unsure at all n locations; Clone ID: LIB3829-001-Q1-N6-H9
gaacaatgaacacactgaaaagggtgaaataataatgggaaaactatttacatgcacctataagaacaaattatttgccaaagcccccccatccatgaaatatctgcaggataggattcctttttccgaacatgtgtaagaccatctacaccggaggctaatgaatatatatcccactatatatatagcattacaatcagcagatccccccccccaatttccaggaatacccacaatgaaatggtaaatgtggcaggcaacatttacaggttatcttcgatcctgactccgtgcaatttgtgccgatgccagttctaccgtgcaatacctcccgaattcatgaaattgggaaagaatttatattcatcttgtctgagaattgtcatcagcgtagatagaaacacacgcatctgcagcaccagcagcaagcaatacttggtagggatggaaggtaaggcagctcacagaaccaatcttctgggccatgaaggtatgttggtaccgaatgacgcctagttgctcgccttccagactgaagactntgattagctgttttgctgacccactggcaat

SEQ ID NO: 11434 - DNA, 686 bp, Gossypium hirsutum
  unsure (1)..(686): unsure at all n locations; Clone ID: LIB3829-002-Q1-K6-A10
gcggacttcctcattccaatacttgattttgcccctngaaaagagacccacagcagctcaatgcctgaaccatccgtggatcagttctggtcctcagcagctacaactttccacaactgctcccaaacagtacggagatgatggtacatctaaaagggaaaggaaagagaaggatgacagggaggccatggaagctggagtagggaatatagaaattgatggaggatcttctaagccattgaaagaaacacttccaaagttgaactaacactttccccgaacagttttaatcggatggtaaattctttcttcctcgtattgcatcgccaaaaggctacatgtattgttcatgggcaattctctgcaagtactacagtttttcttcggttctgtcaacatccatactataccattcaaagcgatagggcttttcaggtgtcagcaccagttttgaaagagccatttagagcatgtgttcaaatttcagggttacatcttgctagcaaagactctcaatggtggatggatcccccccccctacatactcagtttccattgtgtctaatgtattcatgcatcaaacatctatatcaatctctgttttgaaaatgatttgtgtaaaaagcattggaaatgttgcagttctgatatttcctaaaaatccaaatggaatgctattgcaattt

SEQ ID NO: 11435 - DNA, 189 bp, Gossypium hirsutum
  unsure (1)..(189): unsure at all n locations; Clone ID: LIB3829-002-Q1-K6-A11
aaattttgtaaatggactctttttgtttatttggtttggaggcccggngaaaaattgggctactacaattatcataagtgttatcattcaatagtttgtagtttatcaccgttctgggtttttgtcttacttgttctgaatgattattaaaaaaaaatgatgcacacctatgttttgattcgcttcttc

SEQ ID NO: 11436 - DNA, 661 bp, Gossypium hirsutum
  unsure (1)..(661): unsure at all n locations; Clone ID: LIB3829-002-Q1-K6-A12
gnaaataagcatcaacaatatggttcttataacaacgtcagccataacaaaaggtaatatgcatattctccccgagaaggaacacatgaaattccccgagaaaagagtctcggagccaaaaattggcaaatgcagatcttagttgctcctgttactgatgatgcaagcagaagcaacgacacaggtatcagagtaacgaccataaaagaagcttttagtcctacatctgctaataaaagaaagctaatcaacacttccgagtcatctgagctagaaaaaacagacacacaagaacgagaacccaaagtgtctagatcttgtttggatttaaattttccagtggaggagaccgatgaggcagacattgatttggggctgtcaaaaagcgagtccttgtctgagaactcagaagtttggttggaagaattctttagcgaagtatataaaaagatacatttcaagtcattcgatttcgatggacttgctaataaaattgtaaaggaaatcagctcacaatttcaaaggacagttggaagtgaagttctgttagagattaatgaagaagtgatggtacaaatacttgctgctgtctggttntcggacaaaaaggagctctagaagattgggtgcaaatgtgctgggaagaagcttgctgaggctg

SEQ ID NO: 11437 - DNA, 619 bp, Gossypium hirsutum
  Clone ID: LIB3829-002-Q1-K6-A3
gcaaaaccagcctatatctgatttatacgtggacgaagtccctattccttccagtgtcatgattggcacttcccaggaattatacgactacatagcagcggagctagtaaaatttgtgtcggcacatcccgagaaagagatgaagccccagcaaatgataagaaactggggttcaccgtctcatctggagatgatcaatctacagccatatcaggttccaacattaaattgaagaatttcgctgcagataccacaggggtaaaagatctgatcactggaatgaatcgagctctggagaaacatggtctgaaattgcgagttcatgcgctagtcgatgatatcgttggaaatttagctggtggcagatactatgataaagactgcgtggctgcaatcaccttaggaatgggtaccaatgctgcttatgtcgatactactcagtcggctcctagatggcatgattctttgccaaagaaaggcgagatagttgtttgcatggaatggggaaacttaatacatgccatcttccaataactcagtatgatacttctttggatgctgcaagttcgaaccccggccatcggattttcgaaaagagatttctggaatgtatttggga

SEQ ID NO: 11438 - DNA, 607 bp, Gossypium hirsutum
  unsure (1)..(607): unsure at all n locations; Clone ID: LIB3829-002-Q1-K6-A4
ctttccttcaatccaatccaatccaatccaggtaagggctaaggcaagagggagtgaaaatggttgagaaaacaagaggaagaaaggaagaggtggtgaccagggagtacaccatcaaccttcacaagcgcctccatggctgcacattcaagaagaaggctcccaaggctataaaggagattaggaagtttgcangaaaaagcaatggggacaaaggatgtgagagttgatgtcaagctgaacaaacatatctggagccgagggatccgaagtgttcctagaaggattagggtccgcattgcccgcaagagaaatgatgatgaagatgcgaaggaagagctctactctctagtaactgttcctgaaatcccagctgaaggactgaagggtttgggcactaagcccatcgatgatgatgatgagtaatttattgatgtttagttttatgaaaacttgcatttgttcaccaagaaatttacccgagttttggctagtgttacatttgtgacctgtgagacatcattctactcatatatttggtttattgttgtcaagactatttaagcttgttccttgtgcaattgaagtttccagcagattttagagt

SEQ ID NO: 11439 - DNA, 597 bp, Gossypium hirsutum
  Clone ID: LIB3829-002-Q1-K6-A5
attggtaacctatcatcatgtatatatattcctaggaaatttatattgattgtatctgttgctgaagaacattgttgtgcttaggactgcatttttgttttgggataatattgaagagtgactgatggtttgatcagtttttttacatcttgtttgtgcatgcatctccagtccaacatgacaaatattgcaccattagctgatattaagatttgttttctctcctccccgcagcattggtgggcaatgtattgggttctctcactctttctgttgatcacattttacaggctctatttcggaagattgcagctgcattgcctggaatggaaacactatcttcaacaaagcatgaagacatggtggatgtgaatcttaagtcgagcaattcaaatggatcgcagtcacaacaagagtcaggaggatgtgcctgctaatacccaaaatcattcatctcagcatttcttttgtgcttccatgatcctactaagtgcatgtaagaaatcttgttttgaagcactgggtgtggttgaatatttgagcatataacttgagagagaagattttggtatggtagttaggctagtcctaagtcct

SEQ ID NO: 11440 - DNA, 504 bp, Gossypium hirsutum
  unsure (1)..(504): unsure at all n locations; Clone ID: LIB3829-002-Q1-K6-A6
gngcgactgtcaagaagtggtgctactggagataggttgaaggagactcaggcaattaacaaaagcttgtcgtgtttgagtgatgtcattttcgccttggcgaagaaggaggatcatgtgccgtttaggaattccaagctgacatatcttctccagccttgtcttggtggagactcgaaaactcttatgtttgtaaacgtgtcacctgatccttcatccgtgggagaatcactttgctccctccgctttgctgccagagtgaatgcctgtgaaattggagttccccgtcgtcaaatgaccttgcggcccactgattctcgattgagctgtggaggaagttaatgatttatcacattctttaataacattaagtaactatcatgatttgtaatgatatgcctttggtttgtaccatcatttgtagaggttctgctttaacctccttactgctaatctgtattcctagatttcaaatgtgtttctgattggtcgatttcgtggacc

SEQ ID NO: 11441 - DNA, 664 bp, Gossypium hirsutum
  unsure (1)..(664): unsure at all n locations; Clone ID: LIB3829-002-Q1-K6-A7
gtttctttgatttgtttctaaggatttaatctctaaaccttcttcccatttcttcattacattgttcaagaacaaacaaaaaaaaaaagaagcaaaaaaacatggccaaagttctgttgttcattgctctatgtgtgcttccagctttggttagtgctacacgcattctgaataaccaattggtggttgaaggctatgtgtactgtgatacttgccgtgctggttttgaaacccctaagactagaaggctagctgatgccatggttaagctggtatgctccgacaggaagaccggcggagttgttttcgagaaggagggatataccgacaaaaccggaaaataccagattcgtgtatccgaggatcacttggatcagatctgtgatgcagttcttgtgaagagcccccagcttggatgtgccacaatgtcccccggtcgtgaacgtgcccgtgttatcttgaccaactccaatggcatttcatccaccacccgttatgccaatagcatgggcttcatggttgacaaggctgaagttggctgtgctgagatgatgaagatgtatncggaggatgaggaggatgtctagtgtgtgggtttggatttatttgcatatgaaatgtgatgttgtctgctatttgttatgtgaattgcttcgttatttct

SEQ ID NO: 11442 - DNA, 618 bp, Gossypium hirsutum
  Clone ID: LIB3829-002-Q1-K6-A8
ctcatatctctcctttgtttccccttttctctctcttttttcaaccctaaccctacctcaccaaccaggattcaacatgaagggaggaaaatctaagtcagatactaagagtgccaagctatccgtgaaatccaaagctggaaagaaatcggggaaggctgccaaggatccaaacaagccaaagaggcctgctagtgccttcttcgttttcatggaggagttccgtgagcaatacaagaaggatcaccctaaaaacaaatccgttgccgctgtcggcaaagctggtggagataaatggaagagcttgtctgaagctgaaaaagcaccttatgtagccaaggcagaaaagcgaaaggtcgagtatgaaaagaacatgaaggcctacaataagagacaggctgagggtcctaaagacgaagatgttgagtctgacaaatcagtgtctgaggtgaatgatgaggatgatgatgaagaaggcagcggagacgaagaagatgatgagtaggaaggtccgtggtggatagcataatcaatgtaggctgtgatagtgtttgatcaaaaccatatgttaatgctttcgatgtttccatgttattcttttagatgcgcatgccatct

SEQ ID NO: 11443 - DNA, 621 bp, Gossypium hirsutum
  Clone ID: LIB3829-002-Q1-K6-B1
gtgagactgtccttgagaggtcttgcaggacagtgatgagcaaatctcctaacaagcacaatcgtctgtacatggaagctcgacccttggaggaaggtcttgctgaggccattgacgatggacgcattggtccaagagatgatcctaaggttcgttccaagatcctggctgaggagtttggttgggacaaagatctcgctaagaagatttggtgttttggccctgagaccactggccctaacatggtggttgatatgtgtaagggagttcaatatctgaatgaaattaaggattcagttgttgctgggttccagtgggcatcaaaggaaggtgccctggctgaagaaaacatgagagccatctgcttcgaagtctgtgacgtggttctccatgctgatgccatccacagaggtggtgggcagattattccaacagctaggagggtcttctatgcttctcagctcacagccaagccaaggcttcttgaacctgtttacttggtcgagatccaagccccggagcaggcacttggtggtatttacagtgtccttaaccaggagcgtggacacgtattcgaagaatgcaaagacctggcactccactttacaacatcaaggcata

SEQ ID NO: 11444 - DNA, 625 bp, Gossypium hirsutum
  Clone ID: LIB3829-002-Q1-K6-B10
aaccaagttcctttgctgtgggagttctcgaaactcgaaccacataataaaaatggcgatgtgggtctttggatacggttctcttatttggaaagctgggtttaactatgatgatcgtcttgttggtttcatcaaggactatcgccgtgtattctatcaagggagtactgatcacagagggacgcctgagtatcctgggagaactgtcacattggagcctgctcctggggaagtctgttggggagctgcttacaagatatccaaggaggaagataaagaagctgcaataacgtatttagaagtgagggagaagcagtatgacaagaaagcttatgttgatctcttcaccgatcccttagctacaactccagccatttctggagtaatggtgtacatagcatctcctgacaagaagcttaatccgaactacttggggcctgcttctatagaagacattgccaagcaaattgttcgtgcggaaggcccctcgggaccaaacagagaatatcttttccaactagaaaaggctcttcttcagattggttgtaaagataaacatttaatggatcttgcaaacgaagcaaggcgcattctttcagaatccgagcatactgcatcatgatgc

SEQ ID NO: 11445 - DNA, 662 bp, Gossypium hirsutum
  unsure (1)..(662): unsure at all n locations; Clone ID: LIB3829-002-Q1-K6-B11
accggtccaaaacctcccggtcgacccagcgtccgcaaatcctcctataaaaaccaaactcctaaaccctcatactccactccactcatcttcggtctctccgccgtttcgcatttcgtctttctctctccaatggcttctattgctggttcatccatctccatgcaacctcgcccctttgctaaaggcagtgtttctgggttgaaattgggttcatttatgaaccagggaagaagcaccctctcatttacgatgcgtccaatgcctgctcgcttgcagatctgctgtgctgccaaacaagagaccgtggataaggtatgtgaagtagtaaagagacaattagctttagacaatgacaaaccaatcaccggtgaatcaacatttcttgatcttggagctgattctcttgatacggttgagattgtgatgggacttgaggaagaattcggaatcacggtggaagaggacaatgcacaatccatcacaactgttcaagatgctgcagaacttattgagaagctgtgcagtgagaaaagtgcctagaaaacaaggatcgcagttggttggtttatttgccgatatttgatattcacatactagaccgcaaacttgggggaaatcatgtgtgaacttttattatgttgaatatgtangaaatttcg

SEQ ID NO: 11446 - DNA, 645 bp, Gossypium hirsutum
  Clone ID: LIB3829-002-Q1-K6-B12
cccagcgtccgattgaagggtcttgacgaatcacctccggaaggaattaaagttggtgtaaatgatgatgatttttcgatcatttatgctgacattgaagggccagctgggactccatatgaaaatggtgttttccgtatgaagttgttactgtctcatgatttccctcattctcctccgaaaggctactttctgaccaagatttttcatccaaatattgcacccaatggggaaatttgtgtaaacacactaaaaaaggattggaatccaagtcttggattacgacatgtactcatcatagttaggtgtttattgattgagccatatccagaatctgcactaaatgaacaggctggcaagatgctgcttgaaaattatgacgagtatgcccggcatgccaggctttatactggaatccatgcgaaaccaaaaccgaagttgaaatcaggagctatttgcgagtcaactacagcattgaacgtggagcagcataacacctcggttctgaatatcgagcagaaaaagcagcaagtggtgccgggttatcattgccatccccactcgctccgtcatcgacaaaagaggcaacaatccagaccatcagtcgcagccgcagcagcagcctatagttccggcaactgaaac

SEQ ID NO: 11447 - DNA, 617 bp, Gossypium hirsutum
  Clone ID: LIB3829-002-Q1-K6-B2
gttctagacgctcgcgactagatggaggaagtgttgatagaacctgatggctttatcccaagtttgttgctggaaggtgatagttaagatgaatattggtaaattgttgtggttcactctttagatattccgagtggtaattgtttgtggagttagaggagggaattgatggaagagatgtctccggcagtcgcagtaacacttagtttgggtaactctatgggtgacaactctggaatcacagcccatgtggaaatcacgccgatcaagctcgtaaccgatgcagcgagtttgtctaagatgttacccaagaatggaaatgggtctatcgctcctagtgaatcgatggttcaggaaagcgaggaagatgtaattttgtcagtggacactaacggaattataaatgaggggttgctggttttgaatgcaggttctgatattagcttgcaaaatgcggaaattgaaagtggtcgaattcttgctaaggctattattttggggagagtcgagcatcgagcaggtgcctacggctgaagtactgctcacaacagtgagttcccgatttaaagatttctggtgggtttgagttaaaggcttcagaagtggtaattcaactg

SEQ ID NO: 11448 - DNA, 236 bp, Gossypium hirsutum
  unsure (1)..(236): unsure at all n locations; Clone ID: LIB3829-002-Q1-K6-B3
ttcatagcatagcagcttagtccaacagtccaactccacacccaccaccattggctgtttctgatcatccgaaaaagaatggtgaccgtggaagaagttcgtaaggctcaacgtgcccaaggccctgccaccgtgttggccatcggcacatcaaccccngcctnnaatttgtggtttnggnatttncccccnnnnnnnnnnnnnagnnnccccccccccccccccttttttttttt

SEQ ID NO: 11449 - DNA, 610 bp, Gossypium hirsutum
  unsure (1)..(610): unsure at all n locations; Clone ID: LIB3829-002-Q1-K6-B5
ggatgccctatacagcagcagcagagcagagcaagggtttagagacgaatggcagcgaaaaggaagactcccgtcaagaccagaaacccggatctgatccgtggtgtgggaaagtattccaggtctaagatgtaccacaagcgtggcctttgggcaatcaaggccaaaaatggcggtgctttcccccgccatgatcccaaacctaaggcccccgctgccgctgagaaacctcccaagttttacccggctgaggatgtcaagaagccgctccttaacaagcgcaaacctaaacccaccaaactcagagcaagcattacaccagggactgtgttgattttgttggctggaaggtttatggggaagagagttgttttcttgaagcaacttacttctgggctccttttggtcaccggaccattcaagatcaacggtgttcctttaaggcgcgttaaccaatcctatgtcattgctacttccaccaaggttgacatctcaggggttaacgtagacaagtttgatgacaagtactttgccaaggaagtagagaagaggaagaagaagactganggagagttttttgaggctgaaaaagagataagaaaaactgcct

SEQ ID NO: 11450 - DNA, 650 bp, Gossypium hirsutum
  Clone ID: LIB3829-002-Q1-K6-B7
ttaaaatataagaaaaaaaacatacgcaatgagcactgctggtcaggttattcgttgcaaagctgcggtggcatgggaggcggggaagccactatcgatagaagaagtggaagtggcaccaccccaaaagcatgaagtccgtattaagattctcttcactgctttatgtcacactgatgtatactactgggagtgtaagggttacactcctctgtttcctcgtatacttggtcatgaagcctcagggatcgtggagagtgtgggtgagggtgtgaatgatttgaaacctggagatcatgtgctccctatcttcaccggagaatgcaaagaatgtcgccactgtctgtcagaagaaagcaataacatgtgcgaactgcttaggatcaactgcgaccgaggtgttatgcttgctgatgggaaaaccagattttccatcaacggcaagcctatctaccactttgttggaacctcgacctttagccaatatactgtcgtccatgttggccaggttgccaagatcagtccaaccgcccctcttgataaagtctgtcccattagctgtgggatatgtacaggttttggggccactgtgaatgttgctaaacccaaaaaggtcaaactgttgcagtttttggactgggtgccgttgg

SEQ ID NO: 11451 - DNA, 670 bp, Gossypium hirsutum
  Clone ID: LIB3829-002-Q1-K6-B9
taccggtaacaaaactcccggtcgacccagcgtccgattttaacttcaattttgctttatttggatctatgcagcgctgggtatatgctttatttgattgaaagggcaaagaaatgcttagatttttcagccacactctatattatacatctttttatatgcatcatgtatggaggttggccttcctcaataacatggtgggttgtgaatggtactggagttgcagtgatggctttgctaggtgaatatttatgcattagacgggaactcagagagattcccataacacgatattgatcaagtaagaaataattcctaaatatgttaaattgatttcttaagataagtgtaatgtagaatatatatatatattcaagtcattctttcttgcatttgtaagattgctattcatcttcctgctctacttaatatattctgttcaatgcttttctgccacattaattctgtatctggtaaataagcaaaagaatagaagttgttgaactatgtcaagttaaaacataaatgattgaaagacttacctgagaccttgctagtttatggttgaacttagtatttacatttgctctcttcagttaacaattctttctttggttcctcaattgtaatatattggctgacttttatctgatgcagatgtttgactgat

SEQ ID NO: 11452 - DNA, 616 bp, Gossypium hirsutum
  Clone ID: LIB3829-002-Q1-K6-C1
cggacgcgtgggttcagccggcttttcgccaagaaggagatgcgtatactgatggttgggcttgatgctgctggtaaaaccaccattctttacaagcttaagttgggagagattgtcactaccattcctaccatcggtttcaatgttgagaccgtggaatacaagaacatcagcttcacggtttgggatgttggtggccaggacaagatccgaccattgtggagacattacttccaaaacacacaaggacttatttttgtggttgatagcaacgatcgtgatcgtgtggttgaagctagagatgagttgcacaggatgttgaatgaggatgagttgagggatgctgtcctgctagtatttgcaaacaagcaagatcttccaaatgctatgaatgctgctgagattactgacaagcttggccttcattctctccgccaacggcactggtacatccagagcacatgtgccacttctggtgaaggcttgtatgagggactggactggctttcgaacaacattgcaaacaaggcatagatggcatcattgagttgtcagtctcaccaatgctggccccttttagagttccggatgttatcccgttcaagtgttttgggtt

SEQ ID NO: 11453 - DNA, 653 bp, Gossypium hirsutum
  Clone ID: LIB3829-002-Q1-K6-C11
gcaactgttgactatttggaccaattggataaagcacttgcggtagcggggagtaattttgcccccgagttgattgtttacaatgctggaactgatattctcgatggagatccactgggtggattaaaggtcagtccagagggggtgatcaaaagagatgagaaggtcttcaggtttgctcgtgatagaaagatccctattgtaatggtcacatcaggtggctatatgaaaaccagtgccagagtcatagcagattccattataaacctctcaaatgaaggcttgatagagacaaatgtccacagcggaagaaaaataatgatataaggctactttgctatcaataaacaactccattacaaaggtcagttctactgaagaatcccaaggcatgaatactatccaagttactcacatgtttgtaaccgaaagtgatccttactatataagcaggcaaataggagaaattaggagatagaagtgtgagttttacataggaataatactcataggagcatgagtgtgtctcgagttgttattcaagtagtttgcaaggcagtatcttagggattagcttggcttggtcttccttgtacacgaggtatggccgcttgccgtgtgtctaccttctctcttagttatcgaataactga

SEQ ID NO: 11454 - DNA, 583 bp, Gossypium hirsutum
  unsure (1)..(583): unsure at all n locations; Clone ID: LIB3829-002-Q1-K6-C12
tngaanaanaagcaccaatcacttggtgaggaagaattgttgcgctattgtttttcttcagcatatattgtggccttacttcatgatagccttggaattgctttggatgatgaaaggatcagctttgctaatcgggtangaaaatataccactagattgggccttgggagctttcatagtacaaaacacggccaagttggatgcgccgcaaattgattggataactaccattgtcagcaatgattcacccacgctattctccatcattgccgtttctgcaatattgatgttcatagcttggtttatattgaaatggaggaaacctgagttgaagacagtgtatgatttagagaaaggacgatatatagtgactcgtattggcagaaaatgatattgttgtcctgaggagattggtttacgagtttgcagccaagtgaggagaatgcatgtcttatgatggtatattatcattatgcttccttggtttaatatgccctccacttaggttcaccatgtgagtgggaaatataagactgtatatcatcaacttttaccgtgggattgagtgtaatcttttcatggg

SEQ ID NO: 11455 - DNA, 135 bp, Gossypium hirsutum
  Clone ID: LIB3829-002-Q1-K6-C2
taaaaccttgatagaagatcccatcttatcttttgtttcttatctctgtgagtccctgtttgtttcttacccgcctttcaggctcacccatatctttcttccttcctttcaaacaaagttgtttctttttttccc

SEQ ID NO: 11456 - DNA, 661 bp, Gossypium hirsutum
  unsure (1)..(661): unsure at all n locations; Clone ID: LIB3829-002-Q1-K6-C3
cacagatcctgcaaagtgtccagtgaagatagagaagcagaagaaaaagctgatattatcgacgacttgaaactctgccatgaagagagtcatattgaagttgtgacagacttaagagcacagacgagcttaaacgatgctgtgaaggaggagctcataaatacattgaatatcagctcattcaagatgggtctagaaaccattaaaggtggtgccaatcaagagactaaagaagtagagatggggcagcttgaagatatatcctccgacttggcacttgaaatcccacttaatgacaacaatgaagtggaggtaatcaaaagagatgctgatgcactttacatgcacaaagatcaggttgctgaacctgagaaaggcccaacagcagaactggaagccaataaaactgaagacattgaagagaaacctggagcaagtaatgtcacagtcacagggtggtgagcagcagggaaaggaaggttttggagaaagtgaagtcgatgatgctgcctcgtatattgaccccaacaacttactcagcattcctgatgttggtggtgccaaatgtgtttccaggaatcgccatggcatgatttgcagagcttgcaacgcanaggaggtgtccgttttgttgatgccgtgtaggcacctttgcatatgt

SEQ ID NO: 11457 - DNA, 603 bp, Gossypium hirsutum
  unsure (1)..(603): unsure at all n locations; Clone ID: LIB3829-002-Q1-K6-C4
ggatgatgccttngattgcaacgatatctcaccgtcctccactctcagatcgtcgcagttttctatctcgacccgtttttattttctggagacccgaaatccgacccggaggttgaaacgatgtttctcgtggattggttctacggcgttcttgcttccctcggtctatggcagaaagaggctaagatcttgtttctcggcctcgataatgccggtaaaaccacactgcttcacatgttgaaagacgagagattggttcaacatcagccaactcagtatcccacatctgaggaacttagtattgggaaaattaagtttaaagcttttgacttgggtggccatcaaattgctcgccgagtctggaaagattactatgctaaggtggatgctgtggtttaccttgtagatgcctatgataaagagaggtttgcagaatcgaagaaggaactcgatgcgctgctttcagacgaggcccttgctaatgtcccgtttcttatcctaggaaacaagattgatataccatacgctgcctcggaggatgaattacgttaccatctcggcctcaccaaactttaccacgggcaaggggaaggtaaacctagc

SEQ ID NO: 11458 - DNA, 608 bp, Gossypium hirsutum
  unsure (1)..(608): unsure at all n locations; Clone ID: LIB3829-002-Q1-K6-C5
cggacgcgtgggnctgaaacctcacccacaccaaactccagaaccagcctccgttatcaatggcgatgatatctacatattgcccacatttcaacggacttcaccgatcatctcccaagctcgacagttctcaatctcaatctttccttcaacacatcaactctcagcttcgccttgcttcgtctcgtaaaccttgcagagctgttactgccatggccggttccggaaagttctttgttgggggtaactggaaatgtaatggaacaaaagactccatcacaaagcttgtttctgacttgaacagcgcaaagttggagactgatgttgatgttgttgtgtcacctccctttgtttatctcgatcaagtgacagcttcattaaccagtcgaattgaggtatctgctcagaactcttggattgggaaaggtggggcttttaccggagaaatcagtgtggagcaattgaaagatattggctgcaagtgggtcattcttgggcattctgaacgcagacatattattggtgaagatgatcagtttataggaaaagaagctgcttacgctttgaacgagggtctcggagtaatagcttgtattggtgaattgcta

SEQ ID NO: 11459 - DNA, 661 bp, Gossypium hirsutum
  Clone ID: LIB3829-002-Q1-K6-C6
ctttaatttgtttttgcatctctcgttttatttctcgtatattaatggcgggtcggggtaagactctcggatccggagcctcgaagaaggcaacatcaaggagtagcaaggctgggcttcagtttccggtgggtcgtattgctcggttccttaaagctgggaaatatgctgagcgggtcggagctggagctccggtttacctcgccgccgttcttgaatatcttgccgctgaggttcttgagctagccgggaatgcagccagggacaacaagaaaacccgaatcgtgccacgtcacatccaacttgccgtaaggaacgacgaagagctgagcaagctgctcggcgatgtgacgatcgccaatggtggtgtgatgcccaacatccacaacctcctcctcccgaagaaaaccgggacctccaagacttccggtgccgatgatgattaatgcagataagtttagattccccaaagccgttcacaaatcaacccctccccccctctctctgtagtagttgttgatcctgagattcaaatctctagggtttttggctttggttgttgttctattattaccttctgtgggactttagttagcaattagatttttagggttttcggtttatgtgaatataaatcaaatatccatctttttttccctct

SEQ ID NO: 11460 - DNA, 538 bp, Gossypium hirsutum
  unsure (1)..(538): unsure at all n locations; Clone ID: LIB3829-002-Q1-K6-C7
gtgtnntattgaagcattctgaagccaaattcctttttgtagattacgaattcctccatattgcagagggagcattgaaaatctatccaacacgagtgctaagctgccccaactagtcttgatcccggatcatgatcggcaagttccttccaggagcaacaccaactccacatctgcaaacttggactatgacagtctattagcaatggggaaactagattttgatattagaagaccagaagatgagtgggaacccatctcgcttaattatacttctggtacgacatcaagcccaaaaggtgttatttatagccaccgaggtgcctatctcaattctctagccacaattcttctcaatgagatgccctcaatgcctgtatatttatggactgttcctatgtttcattgcaatggatggtgtcttacatggggagttgctgctcaaggtggtacaaatgtatgtttaagaaatgtctctgcgggaggaatattttctaatattgctaaatacaggggactcacatgggtggtgcaccta

SEQ ID NO: 11461 - DNA, 651 bp, Gossypium hirsutum
  unsure (1)..(651): unsure at all n locations; Clone ID: LIB3829-002-Q1-K6-C8
ggcctctcaaactccaaccaagnaagcaccaagcatttatttgagtttcttcctctggtttcatcatcgatccatttttttttcgctttataatggcaactaggctacagtttngaaaattcatgtgaagttggagtgttttccaagctgaccaatgcttattgcttggttgcaattgtagggtctgaaaacttctacagtgcttttgagtctgagttagcggatgtcattcctgtcattaagacctctcttggcggcactagaataataggacggctctgtgctggaaataagaatgggcttcttgtccctcacaccaccacagatcaagaacttcaacacttgcgaaatagtctaccggatcaagttgttgttcagcgcatagaggagaaactatctgctcttgggaactgtatagcttgcaatgaccatgttgctctgacgcatacagatctagatcgggaaactgaggagataattgctgatgttcttggtgtagaagttttcaggcaaacaattgccggaaatattcttgttgggagctactgtgcattttcaaaccgaggtggcttggttcatcctcacacatccattgaagacttggatgagctttcgacgcttcttcaggttccattggtggctggcaccatc

SEQ ID NO: 11462 - DNA, 654 bp, Gossypium hirsutum
  Clone ID: LIB3829-002-Q1-K6-C9
cccacgcgtccgctcaggttgccggtgcggactggaacggggagagtgtggtttatgctcatagatcaggagagctggtacggttacctaaaggtgcttcagtgccggtaacacttaaggttctcgagtatgaactattccacttctgtcccgtcaaggaaatttccaacaccatttcatttgcaccaatcggccttcttgacatgttcaacagcagcggtgccgtggagaagttcgaagtacaaatgacatccaatgagaaactgcagttctttgatggcgaggtttcctcggagttgacaacttcactcagcaacaaccggaatccaacagcagcgatcagtctcaaagtccggggttgtgggaggtttggtgcatactcatctcagcatccgttgaagtgttgtgtggacaatgccgacactcacttcaactatgactcagccaccggattggtgacacttacattgccagtgccatcggaggagatgtacagatggcacgtagaaattcaagtctaagtttagcttcaggttattttattaggccatcatattaaaagtcattattgtattgagggagatttcatggctttctagtctagtctagtctagtggtaatacgtaattggggtcctctaccgtgctgtagcta

SEQ ID NO: 11463 - DNA, 207 bp, Gossypium hirsutum
  unsure (1)..(207): unsure at all n locations; Clone ID: LIB3829-002-Q1-K6-D1
cgnatctcaaatctcctcctcctcctcgggaaatcttagtatcatcaccatggccctcaaatcccaaggtcttctttgacatgactatcggtggtcagcccgctggtcggattgtngatggagcttttcgcagattgcactcctcgcactgctgagaacttccgtgccctctgtaccggcgagaaaggcgtcggccgcancggtaag

SEQ ID NO: 11464 - DNA, 631 bp, Gossypium hirsutum
  Clone ID: LIB3829-002-Q1-K6-D10
cgttaccaaggtccctctttgcttactgatctttctccttcttgtttcatctttcagtgagacggtttggttggtttaaaatctgggattttgttttcactcaaaatgggcaacttttattgcctgtatttggtgctgttgctgttttgttttgggttttttgtgaacactctgagtcaggcggattcgagttcagatgcaattacggctgtttacattgtgtctctcaagcaagctcctgccgctcattactttgaggaacagctaagaaggcataatcgtcatggtcatggcttccaccataattcttcttcttcagggagattaaacaggcttcacaaaccaaggaataattcaagatatcatccaagttctggttcgtatatttctcgagttcatcattctttattaaggagagccttgaggggggagaaatatctgaagttgtatagttaccactacttgattaatggctttgctgtgcttgtcacccctgaacaggcgaacaagctttcaaagagaagagaagttgcaaatgttgtgttggatttctctgttagaactgcaaccactcatactccacagttcttgggtctgccaaagggtgcatggtccccagcaggggatatga

SEQ ID NO: 11465 - DNA, 626 bp, Gossypium hirsutum
  unsure (1)..(626): unsure at all n locations; Clone ID: LIB3829-002-Q1-K6-D11
caaccatttagcttactgccagnaaaatccaagcatcaatcttgcaaagcaaagcgtttgctaatggagggtctgatgcaggtgccttatgatgttacggttaggttcatgttgaccttcttggagcgcaatttgttgcctgatgctattatacggaggttgactcggcttctcctggctagtcgtcttcgttctggttataaaccctccactgaactccaactctctgatctccttcagtttgctcattccctaaaggagatgcctatagctatcaagacagacaagcctaaaactcaacattacgaactgccaacctctttcttcaagttggttcttgggaagaacttcaaatacagttgctgttacttttctgatgagtcgaaaactttggaggatgctgaggaagcaatgttggaactgtactgtgagagatcgcaattaaaagatggccaaacggttcttgatgtggggtgtggatggggttcactttctctatacattgcccgtaaataccccaattgcagggttacagggatttgcaattccaccactcagaaagcttttatagaggagcaataccaggatcggcaattgcaaaatgtggagatcattgttgcggacat

SEQ ID NO: 11466 - DNA, 660 bp, Gossypium hirsutum
  unsure (1)..(660): unsure at all n locations; Clone ID: LIB3829-002-Q1-K6-D12
cggacgcgtgggcggacgcgtgggttttgtgaaatgttaattgatatcataaaacattcattccttgccaaattcaatggtataaagcccattgaatactcagaatttcttgaagatctctgcaagcagactttaaatatgcaaactgaagacagcaagaaaaatctcacttttgttcctcttgctccagcttgtgtggtcattcgagtgctgactccagtatatgctgctcacctcccatacagccccttgctgtggagactcttttggatccttttcttgatttcagtaacctatgtcatgctcacaagcctaaaagtaatgatcgggatgggcctacagaaacatgcaacttggtatgttaataggtgtcgtaaaagaaaacaccatcttcacttcgactgattcaaaacaataaaaggtgaatatcatagagaagttctattgcattaatttggtgcttcttatcctaaatgggaaatatatgaaaaaccgctcagattattcgtgaaactggcagcaggatgtaacatatacatgagataccgcagtccacaccaaaagagcatattgtctagtcttgatactggggttttatatatacatgggtctntggtttaccctccaattttgtagagactgatgaaactgttggctttc

SEQ ID NO: 11467 - DNA, 593 bp, Gossypium hirsutum
  unsure (1)..(593): unsure at all n locations; Clone ID: LIB3829-002-Q1-K6-D2
cggccgcgtggggtangaggtttagttgtacaaacatggctagttccggtgtccttaagttggtttccatgattctcatggtgtgcaattgacgagaccaaggaatcaagatcacctcgagatgatgatgggcatggtactcacacggcctccaccgctgcagggtcggtggtggaaggagctagcttgtttggttacgcacaaggaacggcgcgtggtatggccacgcgcgctagggttgctgtttacaaggtttgttggatcggtggatgtttcagttcagacatcttggctgccatggagaaggccattgatgacaacgttaatgtactatccatgtccctcggcggtggcatgtctgattattacagggatagtgttgcaatcggatcttttgctgccatggagaaggggattttagtttcttgttcggccggaaatgctggtccagctccttacagtttatcaaacgtggctccgtggattacaactgtcggtgcaggcacactggatcgtgatttccctgctttcgttagccttggaaacggcaaaaattctccggcgtgtcgctttaccgaggcagccccttgcct

SEQ ID NO: 11468 - DNA, 460 bp, Gossypium hirsutum
  Clone ID: LIB3829-002-Q1-K6-D3
catataccccaggcctcgagatcacccccagcatgagctattgaagtccatggccaacaaggaatatgggtatggtgggcttctttgtgttgacatggaaaccgaagaaagagccaataggctgatgcaccacttgcaaaactatactcagtttgggttcatggcggttagcttgggttactacgagactctcatgtcttgttccggcagtagcaccagcagtgaaatgaatgccgaagagaaggaacttgccggcatatcgccggggctggtgaggatgtccatcggatacatcggaacactagagcagaagtggagccaattagaaaaggcactgtctaggatgcaagatggcaccttgttgaataaaaactaatgtttgccttgggtgtgtaaagtcttgtttatgttgtttcagtagaactggagcgtttgcataaatataatgcttttttctttt

SEQ ID NO: 11469 - DNA, 659 bp, Gossypium hirsutum
  unsure (1)..(659): unsure at all n locations; Clone ID: LIB3829-002-Q1-K6-D4
tcgacccagcgtccggcagtccctanaaacattaaaaagagcaaaaaaaaacacacacacacacacacagattaagacagaagcatggccagccagatcgtaggaacaaagaaagcttgtgtcgtgggtggcagcggattcgttgcgtcattgctggtcaagttgttgctcgagaagggttacgccgttaacactgcagtgagggaccctgacaaccagaagaagatctctcaccttgaaacactacaagagttgggagacttgaaaatctttcaggcggatttaactgatgaagggagctttgatgcccctattgctggttgtgaccttgtcttccatgttgcgacacccgttaactttgcttctgaagatccagagaatgacatgatcaaaccagcgacccaaggagtggtgaacgttttgaaagcttgtgccaaagcaaaaacagttaaacgtgtcgtcttgacatcatctgccgcagctgtgtctatcaacacactgaatgggacagatctggtcatgacagagaaagactggaccgatatcgagttcttatcatcagcaaagccaccaacttgggggtaccctgcatccaagacgttggctgaaaagcagcttggaaatttgctgaagaaaacacattgatctcattacagtta

SEQ ID NO: 11470 - DNA, 604 bp, Gossypium hirsutum
  Clone ID: LIB3829-002-Q1-K6-D5
gcaaagaagcaacacggttcttcaacctaacaaaaagatgtatgcatggtgtgccttgttgttttaggactgtaagctcctataactggcatcttatttccaattatcttgtttttcaggggtccacttcccatcgaaaacattgtgggtagatctgtatttcgctattggcctccatccaaagtttcagccactatatatgactcgaatgtggggaagaatgctgtagcagtttcttgacacctgaaataacttgaaagactttatgtgagtctgagctgcagcgaattcgcacctggatttattgccatggtgcatgttttattatggataatccattcatcatattcgttgtttttgtaaatttattgacggccaattgtaggccactcacaatttttcctgtaattagagtgtcaaattttctttgacaaggatttgggcatcccttttgtactgaactgaattgagaataatctgaggtcttaagctgagtaaaagcagagataggagattgttgaagaaaggggttaggtgatggtcaatgtttgtgcaggctgattcccaactttggtgggcctgtgaatgtaatgtcaatcccata

SEQ ID NO: 11471 - DNA, 614 bp, Gossypium hirsutum
  Clone ID: LIB3829-002-Q1-K6-D6
tgctcatttatcagtggttttctgtttatgagtccaacagtttatggtgctgatgttttcctttgtgagccttttgatggtgcatttgcttggaagggttttcttttcttatcaagttgtttagtgcacgagaagagattaattagttttatgttatgatgatcaaacaaatatttaataggctcccgcggaaacaatctaagtcaagtgacaatcgtgagggaggtggaacctctgcctcttcttcaaatgcttataccagttctagaaataatgcaaattctggtggtccagcctcttctggtgttagttctacaccaaatttagggctgaatcaagggaataaggtttctcaagtggtgaatacaaagctgaatggagatgtatttgcctcttcatttgtgacattgcctagttttaaagatattccgaattccgagaagcagaacttgtttatccgaaagctgaacctgtgtcgtgtcgtgtttgacttcagtgacccaacaaaaaacctcaaagaaaaggatatcaagcgacaaactttgctagagcttgtagattatgtttcatctgctaatgggaaattctcagagattgttatgcaggaattcgta

SEQ ID NO: 11472 - DNA, 657 bp, Gossypium hirsutum
  Clone ID: LIB3829-002-Q1-K6-D7
gctctctccaatcattcggttctccctctgatttctccctcttttatcttccttttagattcttgaattatcccccgatttttatccgattccatcccatcgccgatctctcctctttacattttcatctacccgacgattttttcctgatctgaaaacctttgcttcggagaaaactacgccgaggaacagcatagcgaaatcggcggttgtcggttagggaggaaggcaaaaagaatgtcggccgaacagaaagaacaagaacctaaccctaaccctaaccctaatggtaacggcaacggcaatgaaaatttgaacactgaaagtgaacatgaagaaagacaagaagacaggcaagaacatgaacaggaacaggaacaggaacaggaacgagagcagccgccacgtcagtcttcgacaagaactcctttcactaatctcagtcaggttgatgctgacctggctcttgctcgaaccctacaagaacaggaaagggcgtatatgatgcttaggatgaataatgatggtgggagtgattacgggagttgggaggctgggagctatttgcatgatgatgacgatgatgatgattttgggagatccccatgatcatgatattactgacggcgatgatgaggatgaggatgatggtgagca

SEQ ID NO: 11473 - DNA, 630 bp, Gossypium hirsutum
  unsure (1)..(630): unsure at all n locations; Clone ID: LIB3829-002-Q1-K6-D8
cccacgcgtccgttaactttngattatcagattcagagaagtggtagccaaaaaataaatcaaaaactaacaacagtcaactagttttgcctaacaaggttactgttctctgctgtggtgttgaaggcatatattacccaagcctccactcctttttgggatgttttttgtaaaaggcaaacttatctgctactggtgatgaaacctagagggacaaggaagctgctgttttggctcttggtgtaattgctagaggttgcatcaatggtctttatcctcgtttgtctgaggtagtactcgtttagtttttgagacagattatggaatgatgcatataaaacattcatctgtttttgttaaaccatgttatgctcctaaattgatcattgttgttaaatatgtttatgtgtgcagattgtggcatctctaattccccttttaaatgctgtgtggttgtcaatacttttttctaatttagtaatgaatgattaataacccctttgaccgactatagtttatgtgtttgcatcatataccaatcatttgttgttcttggtacatactgccgataaacttcttttatcggtttctttggctttggattttatgttgagaattctcatgtttcat

SEQ ID NO: 11474 - DNA, 654 bp, Gossypium hirsutum
  Clone ID: LIB3829-002-Q1-K6-D9
actggatgtacttgtgggaccttgcattgcggaaagatccctgggatacataaagtacatccttaagagcagcttgatgaaattacctgtatttggttggtcattccaaattttggagttcatccctgtggaaaggaagtgggaggttgatgaggcaaaaatgcgccagatgctttcaaaattcaaagatcctcgagatcccctttggcttgttctctttcctgaaggaacagatttcactgagcagaagtgcttaagaagtcaaaaatatgcagctgaaaatggcttgcctatcctaaagaatttgctgcttccaaaatcaaagggttttaatgcctgcttggaagatttgaggagcactttggatgcagtttacgatgtgaccattggatataagcatcgctgtccttcattcttggataacgtctttggggttgacccttctgaagttcatattcacatcaggcgtgttaccctggatgacatcccgttgtccgaaagtgaagtaacatcttggttaatggatacattccaacgtaaggatcaattgctttctaatttcaattctgaaggttatttccctctgcatggagcagaattgaacctctctacagttaagtgcctcataaacgtcatgctggtgcttgtctttac

SEQ ID NO: 11475 - DNA, 593 bp, Gossypium hirsutum
  Clone ID: LIB3829-002-Q1-K6-E1
ttcaaatttgcaaaagttgcaaaatagcatttggctgtttttaatatcccgacttatgcttggttcctgctgatttatttgtctgcttctttgtcctgcaacaaagtgccatttctggttgctgtgtgctgtttttagcactcaagagttttatcatacggcaactcaaatcacctctgcattaatgatagttgctgtgtgctatgtgatgttttttttgtccttaggggagtattaatcaccaaacctcagaatcaggtggatcccacgaaaatgatcctagcctgggttcaaacacttcaaagacccctaaatctccttggatgcctttcccaatgttgtttgctgctatctcaaacaaaatccctcgttcagatatggatcaagttactaatcattatgaactattcagggcaaagaagataagtcgtgatgattttgtcaaaaagctgagattgatagtcggagatagtttgttgagatcaacaataacatctctgcagtgcaagtttccatctagacatgaattagaggcggcagcagcggcaaagcagaagacacgaaggtcctggcggcctttgaacgtggtgatc

SEQ ID NO: 11476 - DNA, 538 bp, Gossypium hirsutum
  Clone ID: LIB3829-002-Q1-K6-E10
cgattgttaattatcactgttctgcaatggcgtcaggttcgaactggacgccaaagcaaaacaagttgttcgagaacgctttagctatctacgacaaggatacaccagaccggtggcacaagctagccagggctgttggggggaagaccgtggaggaagtgaagttgcattaccagaaccttgtggatgacatcaagcagatagagtctgggcacgtgcctttgcccccttacaagaaagctggaggaacaaaggatacaacaatttcatggacgatgaagaaccaaggatgaggaatctcaggctttagtgaagtatgaaccagaaatagcctgtagaatatcaacctttcaataaaaggaaatgcaaagcagcaaacatataaattattgctcttaatttcgtttacatttcccgctcatatatatatatatgttttttgtgtgcttgaatgtaacaagcagccacaacgttcctatacttgcatgtatcaagtatgaaattatagcattggtgccttgtttttattaatgttacc

SEQ ID NO: 11477 - DNA, 514 bp, Gossypium hirsutum
  Clone ID: LIB3829-002-Q1-K6-E11
gccccactggcccatataatgatcgctggggctgttgacattgcggacccctatagattccatccatgctgcctaatacacctgcttgctatgctatatgctacactatctgatagcagcctctactggtggacttgctgacacactcaatgaaagattcacagggatgacaaatgggagctcaaaatggagaatgtaatgaagagtgtccaaaagatgatactaatgaggtaaaaactgtcaagaaaactgttgcaacatatgggactcaatctctgaaagaaatgatccaaaatagtatgcaacatgatttttcatagaatggaccatcaaaggtaccataaaagatgttgtagaacctcttggtgactctcagtgaacctggcattgaacgagacgaggaaggtcctgttgccaatgaaaatgccgacacaccctgagcctcatcataaggctactatggatgaagctaaggaacctgcttacttacacaaccaattacacgtacctgtct

SEQ ID NO: 11478 - DNA, 663 bp, Gossypium hirsutum
  Clone ID: LIB3829-002-Q1-K6-E12
agattttgttgctaaagtaaaggaagcattggcaaatgagcctcaaccccttacacccgagcaaatatacaacctgtcgtgggaggctgccacccaaagattcgtagaatattcagagcttgacagagttttgaataacagacataatccagcaaaagtgggatcgaaaataattgcaaaatcgtcgtcattgccaaacctttcagagatagttgatgggggtttagcatttgcccactactgtcttacaggaaacgagttgcttagactttgcaccggggcaatacctggtacacgggattacgacaagcaacattgtaaagaccttcatctcttaccaccacaagtggaaaatcctatctatggctggtaagtcaatataataactgtatcgacaatcctgtgcataatagttgtaggaggctgccaaccatgtttgttagtcttttttgcttaagaagacaggtgtgagatatattcagacagtatcctatgagttttgttgtcttgttctgtttttattgctgttctcctttgtattaatgcatagaaatagatatcaaaatatttttaatataggaaaaaccaaacaatcctttgctgtaagtaacaaatgttttaagtgtcggcataagctggtaataaaatggtggcagttattcc

SEQ ID NO: 11479 - DNA, 600 bp, Gossypium hirsutum
  Clone ID: LIB3829-002-Q1-K6-E2
cggccgcgtgggttggcacttgtcctgtgccttggcttcggcatcatcagtcaacccggcacggacgccaaagcgaaacaccctccaatcccatctcctctcttccttcttccctccaaataccctaaatgctgcccccccacatttttatttgaaaccgaattattgaaaaacaaagtcaaccccagatcattaaaaaggaaaaaaaatcattggtctttctcgattgttgggtctttgagatatgtcgtcggagatcgaggtggtggaggagactgtacctttgaagcaattgagtggcgctgtagcgaatggaaatgaatatgggggagggcatcatggggttgttggtgatgttgctgatgatgagagcttgaagaacgatgtctataccgctgctgcttatggggatttggagaaacttcagaggttggttgagtccgagggttgctctctttccgagcctgatggccttggttactatgccctccagtgggctgctttgaataatagaaccgcagctgctcagtacatcatcgagcatggtggagatgtgcatgcgggggatcataatggacagacagccttgcactggagtgc

SEQ ID NO: 11480 - DNA, 574 bp, Gossypium hirsutum
  Clone ID: LIB3829-002-Q1-K6-E3
tttttgtttacaacaacaatggctgggcacacagtttacaccctctcagaagtgtctcgatacaaatccaagaacgactgttggcttgtcatcgatggccgagttctgaacgtaacaaagttcctggaagaacatccaggaggagaagaggtgttgttggaatcagcagggaaggatgcgacgaaagaattcaacgatatcggacatagcaagtcggctcagaatttgctcctcaagtatcagattggtgttctccagggtcacactttaaagaataatgaacaggttggttcaaccgaggagcccaaaaagaaagagatgagtgcattcgttatcaaggatgacctgacgcctaaatatgctgcagtcgtcgagttcgccgccccactcctggttgctggttcctatttctgttacagatacctcacaccaagctcataagtgctgtaatcaatttggttttcaagttcaacctcaacatgccccttcttccctttaaataattgttggcatagaatgtttacaatgatggtgtgttgttcctttctttttatcttcacttgtccttttggtt

SEQ ID NO: 11481 - DNA, 657 bp, Gossypium hirsutum
  unsure (1)..(657): unsure at all n locations; Clone ID: LIB3829-002-Q1-K6-E4
atgaagactcattgttttcctgtcattcttttttagctttggttatccaccggccaaaaaaacacacgctatagaagggagagagttttcgtgagagagaaaccctaagttttctctggcgtttctggtttttgtgattttgaactctctattttgaacccttctctcttgtatatatattctgtttaattaaacattttaatacttgtaaggactagattctggagtaggatgttccagatattctttctcaacataagttattagtttctgttctggtttctcttattcattttattctcttcattctctcttcctcttttatgtgtttttactttttaatgttataaccagaaagtagagtagcaaatacctaatcaggttcttttggtcggtaaagacattggattgacaggaacgaagcttggctgcgatgaaggtggttgtggggcttgtactgtgatgatttctcattacgatagaaagacaaagaaatgcatgcattatgctgtcaatgcctgcttggctcctctttattctgtagaaggaatgcatgttattacagtggagggagttgggaaccacanatgtggcttgcaccccatacaagaatcattggcacgttctcacggctcccaatgtngattttgcacccct

SEQ ID NO: 11482 - DNA, 634 bp, Gossypium hirsutum
  Clone ID: LIB3829-002-Q1-K6-E5
gggtccagcttggctgaaaggttcctaaaatctcatcctttttctcttcaacatttaaatccgatgcccatttctttttctttttttaatttcttttattgtttttcatgctcctctgtttccaattcctctttgtctctgttaaccagattcgttagctaatgctaataattcatgtaaagtttttcttttgtaggtgacgataatggtgctgaaggtcgaccttcagtgcaggaaatgttacaagaaggtcaagaaagtgctctgtaaattccctcaaatacgagaccagatatacgatgaaaagactaatacggtgaccatcaaggtggtatgctgtagcccggagaagatcagggacaagttatgttacaaaggtggtggatccatcaagagcattgagctcaagtcgccggcgaagcccaaggaaccggagaagaaacccgacaaacctaaagaagccgagaaggcgaaagaagctgggaagaaaccgccaaagcccaaagacggtggtgagacgaaaccggatatacctagagaggtggcgtcgcagcagaaggttgcggcacctgctcctttaccgccgatgacgtatgcagttgggtataattgctccgagggttattataatggc

SEQ ID NO: 11483 - DNA, 666 bp, Gossypium hirsutum
  unsure (1)..(666): unsure at all n locations; Clone ID: LIB3829-002-Q1-K6-E6
gtagtaatatctatagcatacagagatggagaggcaaagaagcaagcaggtttgtttgttgatgtgggttttggttgctgcctttttctcccacaatagggtcattgcagtgacctccactggccttggtgagcangaaaaactactatccagctcctgaccctcatgctggaactcccccttcaggttcacatggcacaccaccatcttcaggaggtggatcacctccctctcatggaaccccgtcacatggaggtggttaccacccttcaccaacaccatcaacgccttcgggtggaaattgtggaactcccccacatgacccttcaactccatcaacaccatcacacactcctcctcatggtactccaccatcatctggaggtggtagtcccccatcgtatggaggaggcagtcccccatcgtatggaggaggcagtcccccatcgtatggaggaggcagtcccccatcatacggaggtggcagtcccccatcatatggaggtggcagtccaccaactactcccattgatccaggaactccaagcattccctcacctccattctttcctgctccaactccaccaattggtggtacatgcgatttctggaggagtcaccccacactgatatggngtctgcttggttggtggggcactgtaagca

SEQ ID NO: 11484 - DNA, 653 bp, Gossypium hirsutum
  Clone ID: LIB3829-002-Q1-K6-E7
gtttggtcttacataatgataaagctttggtccagtagaagcaatggtggtgctcccttgtggacttattggagtgctggaatcacaaatacaattggtccggccatgggtatagaagcattgaagtacatcagctacccggctcaggtgttggccaagtcctcaaaaatgattcctgtcatgctgatgggcactctagtttatggtattcgatacactttccctgagtatatctgtactttccttgtggctggaggagtatctgcttttgcacttatgaagactagctctaaaacaattagcaagttggcacaccccaatgcaccccttggatatgggctctgttttctgaaccttgcatttgatggctttacaaacgctacgcaggattcaataactgcaaggtatccaaagacaagtgcttgggaaatcatgttgggaatgaatctatggggcaccatatacaacatgatttacatgtttggctggccgcatggtagtggtttcgaggcagtccagttttgcaagcagcatccagaagctgcttgggatattctcctctattgcctctgcggtgctgttggccaaaattcatcttccttaccataagtcgatttggctccttggcaaacacaaccatcaccaccacacgc

SEQ ID NO: 11485 - DNA, 615 bp, Gossypium hirsutum
  Clone ID: LIB3829-002-Q1-K6-E8
tggaatttgtggttccctagaaagaagttgtgccgttgtttaattagatcttgttttcatttacagatggatgctctaatctcgcatagctcaagaagctactatgcttgtgttggagagagtactcgtgcctatcagagcccttcgaaagacctaactgctatcaacaatcacctgaatggtggcaggaagatcagaggggcgctcaacttcgacgatgttgatgtcggtttggttagtgattctatggttgcaaatagcctttacctgcaaaatgggagctgtgcatcctcatccggtgcacctttaaaatccgagcaaccagaatcttagcccagcacgcttgtattccttgtatattctgccccactcccgtattcttgttagatcgtacgtatgaatggaagttcatcacacggggtacatatgagcggtgagttactgtagaatagccgccacctccccaatgtgtttactgatgttagctaacagtactttgaagcttggcctaacaaattgaataaatttttgcctttgccggattgtagccaaatagtaccactgattattaatattggaatcacagtgctccttcaaggggtaattttctttggg

SEQ ID NO: 11486 - DNA, 635 bp, Gossypium hirsutum
  unsure (1)..(635): unsure at all n locations; Clone ID: LIB3829-002-Q1-K6-E9
gcttcttctttcttctttgttcagatctgaggtctctcagttctaagccatggccgagaaggtgactgtaatggtgctgaaggtagaccttcagtgctggcgatgctacaagaaagtgaagaaagtgctgtgtaaattccctcaaatacgagaccagatatancgatgagaaaaccaacaccgggaccattaccgtggtatgctgcaatcctgagaagctgagggacaagatatgttgcaagggtgctggatcaatcaagagcattgagatcaaacctccacctcctcctcccaaacccaaggagcctgagaagcctaaagaacccgaaaagcccaaagaacctgaaaaacccaaagaacctgagaagcctaaagtaccagaaaaaccaaaagaacccgaaaagcctaaagcaccagaaaaaccaaaagaacccgaaaaacccaaagaacccgggaaacctaaacaacccgaaaagccgaaagaacccgaaaaacccaaagaacccgagaaaccgaaacaacccgaaaagccgaaagaacccgaaaagcctaaggaacctgagaaaccaaaagaaccaccaccaccaccaccaccaaaggttccagaaccttgtcctccaccaccaatggcttat

SEQ ID NO: 11487 - DNA, 644 bp, Gossypium hirsutum
  unsure (1)..(644): unsure at all n locations; Clone ID: LIB3829-002-Q1-K6-F1
cgtcccgtaaaaaccctatgatagaanaatcccatcttatcttttgtttcttatctctgtgagtccctgtttgtttcttacccgcctttcaggctcacccatatcttcttcttcttcaacaagtgttcttttcccctttcagtaacgcacaatctttaattaaatgctctccacaattctctcacctttataataattcacttgtttgtctacgcttgtatttttatattagtgagaagttcttgttcttacattgtttgtaatgttttcatgttttttgtgttttcccctttgatgggtagcttttgttgttgttgtgcttttcagtgaattctacgatttttattgtctgtcggaaatggcctctgttcttaggtttaggaaactatgctatgtagagtcagcggttaagtgtacttcagtggggtatgaatcttttgagattgatgaaaaactcgacaagaaggaagaggatgtcctttctgctaacaactttgccttggaaatcaacaagaagagaaaacaacctaagaggcaaccaaaagaatggaggtgcttagattcttgctgttggattattggttacctttgcaccacttggtggctccttttgttcttctaccactgctttccggttacattgc

SEQ ID NO: 11488 - DNA, 649 bp, Gossypium hirsutum
  unsure (1)..(649): unsure at all n locations; Clone ID: LIB3829-002-Q1-K6-F10
gacctcctattcctgggcaggagttgggcataacttctgatgaagcattgagtttggaggacttgcctaagcatgctgttgtacttggaggagggtacattgctgttgagtttgcatcaatatggagagggttgggcgctaatgtcgacctctttttcagaaaggagcttcctttgagagggtgggatgatgaaatgagggcagtggttgcaagaaatctggaacgaaggggaattaatttgcatccacagacgaatttgactgagttgattaaaacagataatggcataaaagttactacagatcatggtgaagagttgatagcagatgttgtactctttgccacaggcaggttaccaaactcgaagaggttgaatctggaagctgtaggtgtggaacttgataacactggagctgtgaaggtggatgagtactcacgtactagcattcccagtgtatgggctgttggtgatgttacaaatcggatgaacctgactcctgtggccttaatggaaggaacctgctttgcgaaaactgtttttggtaaggaacctagcaaaccagactacagccatgtaccttgtgctngttttagcatccctccactttctgttgttggtctcagtgaagagcagcaattgagcaagca

SEQ ID NO: 11489 - DNA, 404 bp, Gossypium hirsutum
  Clone ID: LIB3829-002-Q1-K6-F11
ggtacacgtggcccaaactgaccacatggataactgtcttgagacgggcacatcgtcatcgtacacggtgcttggggacacttcattgcaggatggtgctatacagtgagaatcaaacaataccaagcgaaggactggacacctcactataagaagctacaaccaggaataccaccgcaagagcgacagggtatcttgtaccctagagatgtagcgtggctataccaacatgaaacctagtacgaggacgaacacaaggattcgctcacttggatatcaagctgaggggaaaaggaacaaacgcctagataccgagcgctcaaatctgactgaacacctctaggccagagatcaggctaaaaccaacggacactcaaaaaaaaaaagaagaagggcgagcagtg

SEQ ID NO: 11490 - DNA, 533 bp, Gossypium hirsutum
  Clone ID: LIB3829-002-Q1-K6-F12
cacctggtagccgagccgtcgttcactccgtcgcaatcggagtcgggcgagggattggggcctccaagcgttggtttgctgagcggcgttggagaagagttacttttttttcttctcgttttttttatcttttgtcgattctttttttttctttcctttcttttctttttatttattgtttgcaaaacagaaacgaagggagaggaggaaggagacccttaccttcgtgggtgcgtcgatgaagccttcttctcctcggcacgaatcggagtcgaatgggaagaggccttagatttgaaatggcagagaaagggaaaaaacggaggcggcgttcacctctctttgcaattttaaacccccgaattttattcagattttaatttaacgcttttataaattttacttcatttaaatttttatatttatgattccctttttatcaatttatattttatttatttcatttcattttattattcatattaaaatgtgtgatattatctacgctaagttatttcatatattacctattt

SEQ ID NO: 11491 - DNA, 635 bp, Gossypium hirsutum
  unsure (1)..(635): unsure at all n locations; Clone ID: LIB3829-002-Q1-K6-F2
actggatgtacttgtgggaccttgcattgcgggaaagatccctgggatacataaagtacatccttaagagcagcttgatgaaattacctgtatttggttggtcattccaaattttggagttcatccctgtggaaaggaagtgggaggttgatgaggcaaaaatgcgccagatgctttcaaaattcaaagatcctcgagatcccctttggcttgttctctttcctgaaggaacagatttcactgagcagaagtgcttaagaagtcaaaaatatgcagctgaaaatggcttgcctatcctaaagaatttgctgcttccaaaatcaaagggttttaatgcctgcttggaagatttgaggagcactttggatgcagtttacgatgtgaccattggatataagcatcgctgtccttcattcttggataacgtctttggggttgacccttctgaagttcatattcacatcaggcgtgttaccctggatgacatcccgttgtccgaaagtgaagtaacatcttggttaatggatacattccaacgtaaggatcaattgctntctaatttcaattctgaaggtatttccctctgcatggagcagaattgaacctctctacagttaagtgcctcataaacgtca

SEQ ID NO: 11492 - DNA, 632 bp, Gossypium hirsutum
  unsure (1)..(632): unsure at all n locations; Clone ID: LIB3829-002-Q1-K6-F3
ctgnccctttcaccatttatcctgctgtccaacccaacgcaggccaccctgtcctcgaacgaggcggcttcgctcttcataccctcacccaccgttccttccctgcccccaccgtccactggtctggccgtatctgggctcgaaccggctgcacctactccaacgggcatttctcctgtgccacgggagattgtggccaccgcattgaatgcaacggtctcggtggagccactcctgtcacaattgctcagttcagcctccaccacggtggccacaaagatctctcttcctacgaagtcagccttgtggacggttttaacatccccatgactgtgaccccgcacgaaggcaaaggcctttgtcccgtcgttgggtgcagggctaatattctggccacgtgtcccggcaagttacagtataggtcacctcctcatggtccagttgtgggttgtaagagtggttgtgctgccttcggaaccgacgagctttgctgcaggaaccattacaatagccctcaaacctgtagggcttcgagctattcagagtttttcaaacatgcttgtncggccacatttacttacgcccatgatagcccttcgctcatgcacgactgttcttccccacgtgagcta

SEQ ID NO: 11493 - DNA, 662 bp, Gossypium hirsutum
  unsure (1)..(662): unsure at all n locations; Clone ID: LIB3829-002-Q1-K6-F4
caagcacatagcgctagnacactcacaccagctcaactccacagttgaattattagtatggtacgaagaagatgagcatttgaatccctaaaccctaaaaatattttattnagaaaaacaaaacaaattaaaggtgaatgaatggcgtcgtcatctctgctttggctctgctcttccaatcctgtaatctcccccgctactctccttaaggctcaccctcgcttccctatccggcaacgcttcaggtgtagcttggtggagcccttgaagttcgaaaatggaaagcctcactttcctctcctcacctctgatcctgcgtttccaaccttcttgtcccctaattcccatttccaaaacgatatcaacaaacacgacactaggctccgtatattttctggcactgctaatcctgctcttgctcaggaaatcgcatgctatatgggtctgaagcttgggaaaatcaagataaagcgttttgctgatggtgagatttatgttcagttgcaagagagtgtgagagggtgcgacgtgttccttgtgcaacccacttgtccccctgccaatgagaatcttatggagcttctcattatgatcgatgcttgtcgaagggcttctgctaagacattactgncgtcattccctattttggctatgcagggctg

SEQ ID NO: 11494 - DNA, 623 bp, Gossypium hirsutum
  unsure (1)..(623): unsure at all n locations; Clone ID: LIB3829-002-Q1-K6-F5
gggtaatgctgaagatcttctggtgctggaagtttagggatttcatcaatgcctggaaatgctagtttactgggatgggccatgagttccttaactcttaaaggcaaagcttctgatcaagctccagttgctactganaattctgtcacacctgcaactaccacagcctctacagccagctcaggactaatagaaactccaagtacagcaccagtccaccgagtaagttccagtacagattttgcagatcaactgatgcctccatctcctacttcaaccgatggatggggagaaattgaaaatggcattcatgaagaacatgacagtgacaaagatggatgggatgatattgaaccccttgacgagccaaagccttctccagccttggcaaatattcaggcagctcagaagcgtcctgtttcgcaaccagtttcacagcctaaaccacaagcttcaacaagtttgagaccaaaaagcacagtgaaggcagctaaagatgaagacgatgatttgtggggttctatagcagctcctcctccaaaatctgcttctagaccattgaatgtaaaaacagctggagcagttgatgatgatgatccctgngcagctattgctgctccccc

SEQ ID NO: 11495 - DNA, 487 bp, Gossypium hirsutum
  Clone ID: LIB3829-002-Q1-K6-F6
cggtcgcgtgggttggtttccgaggatcaatcatgactcgtggtaaccagagagatcgagatcgagaaagggctcaatcccgagcgggcggcaaaggcagcaagaccaaggacgatggcttaaccccagaacaacgtcgtgaaagagatgcaaaggccttgcaagaaaaggcggcaaagaaggctgcgcaggcggcagctggagggaacaatgctggaggcggtagtaaaaccaagaaataattatccgatgatgtcaaattgttaatgatttatttacgctggacggtaaagatagtgttgtttcgttgattggggaatcagatctatgtgtttcttttagggtttttcagagtctttgcctatgtcgtcttaagattaacaaactgttgtcgtgtttgcttgatttgacattgatcttgactcttaaatcttctatctgatttgtattgaaattgatttcctatgtagcatttgttctttttgtt

SEQ ID NO: 11496 - DNA, 606 bp, Gossypium hirsutum
  unsure (1)..(606): unsure at all n locations; Clone ID: LIB3829-002-Q1-K6-F7
gnaaaaacccgagtgaatttatgcaaccattttgcgatgcggtgacggaagctgctaaaggtatcgacccaaagtcttgaaagaaggagaaacgcttcatgtgggatttgaaggcccttttgtttctcgtcgcgttactcccagagatcttctctctgaattcattggctccatggtatgcgtcgtgggtattgtcaccaaatgttctctggtaagaccaaaggttgttaaaagtgttcatttttgccctgccactgagaacttcaccgttcgggaatatcgagacatcacctccaataatggtttgccaactggatctgtgtatcctactagggatgaaaatggcaacttattggtgactgaatatgggttgtgccaatacaaagatcaccagaccttgtcaattcaagaagttccggagaatgctgcacctggtcagcttcctcgaactgtggatgtcatagttgaggatgacctggttgattcatgcaagcctggagatcgtgtggctaccgtagggctatataaagctcttccaggaaaaagcagggcagtgtgaatggtgtattcaggactgtactcatagctaataatgtctctctgctc

SEQ ID NO: 11497 - DNA, 578 bp, Gossypium hirsutum
  unsure (1)..(578): unsure at all n locations; Clone ID: LIB3829-002-Q1-K6-F8
ggagtagcaaagctgggcttcaatttccggtgggtcgtatagctcggttccttaaggctgggaaatatgctgaacgagtcggcgccggagctccggtttaccttgccgctgttcttgaatatcttgccgctgaggttcttgagcttgccggaaatgcagcgagagacaacaagaaaacccgaattgtgccacgccatattcagctagccgtaaggaacgatgaagagctaagcaaattacttggagatgtcacgattgccaacggtggtgtgatgcccaacatccacaatctcctccttcctaagaaagctggaacttcctcaaaggcatctggaggtgatgaagattagattatgtcaacagtttagactcataaaaccctaagggaatcccctaatttatctccctctgtttacgtgattcttagattgaaaccatcatgggtattagctttgaatgttgtttcacttagttctttatttgttaagtttgtagtttattgatagtgcttagttagtaggtagctntaggggtttttggttgaatgtgaatagaatgaatcaccaagcattatcttc

SEQ ID NO: 11498 - DNA, 620 bp, Gossypium hirsutum
  unsure (1)..(620): unsure at all n locations; Clone ID: LIB3829-002-Q1-K6-F9
gtaggatggccaccaatcagnacattcagggagnaacagcatggcctctaatttggcaaagaacagtgatgaagctgctggttgtctgtatgtaaaggtgagcatggatggagcaccatacttgaggaaggttgacctcaagacctacaataactatagggaattctcatcagctttggagaagatgttcagctgctttactatcgggcagtgcggttccaacggtgatggtctcagtgagagtcgtttgatggatcttctccacggatctgagtatgtgctgacatatgaagacaaggatggtgattggatgcttgttggtgatgttccatgggagatgttcaccgattcgtgtaggaggctacggataatgaaaggttcagaggcaatcggactagctccaagagccatggagaaatgcaagaaccagaactaatgcaaaagacctggaaaaaaccaggaaactttactcaacaactttatatacatatgtgtgtgctttcagatattacagtttgatgtatttagtagaagtaagagaaaaaggagattgtattaggcaaattatggcattgaagacatatccaattatttaaggttgtctggtttacctttctttt

SEQ ID NO: 11499 - DNA, 618 bp, Gossypium hirsutum
  Clone ID: LIB3829-002-Q1-K6-G1
ggaaaaacctcgcaaacttgcaggcagagttagatactttgagaagaactgaggaaatggttgaaggtcaagttgaaaagcatgaaccaatgaatgaaaaccctgatgatgagctctcatcaaccatagttgaactaaatgaggcttgtccaaagtctcctcaagatctgaaatctgagaataaaaattacggccatgaagaattggaggtcacacgtcttgacagtgtgacagaaaaggaaataccaaatcctgaaatcaagcaccacgagaaccagtttcgaacagactgggagatcgcagctgcttcagaaaagttggccgagtgccaagagactatattaaacttgggaaagcagttgaaagcattggcatctacaaaggaagcagtccttttcgacaacattgtttctagtccaactttgactgcaatcccaactccaccaaggaagaagatgatgagccaaagatcatctctactagatcagatgatagctgaagataatgctgaaacgaatgatcttgcatctcctaagtccaaagaaaaagcaatccgacttcatctttcatttctaacaggacggtagcacctccagacagcattgctggtttaagtgg

SEQ ID NO: 11500 - DNA, 645 bp, Gossypium hirsutum
  unsure (1)..(645): unsure at all n locations; Clone ID: LIB3829-002-Q1-K6-G10
gngatttgcagnctaaaagnaaaaacaagnagaattaggaagcatggtgtaccccaatgaatcccttgaagactctccccagaagaaaaggggagaggaaagatcgagatcaagcggatcgaaaaccgacgaaccgccaagttaccttttgtaagaggcgcaatggtttgctcaaaaaggcttatgagctatcggttctttgtgatgctgaggttgctttggttgtcttctctagccgtggtcgactctatgagtatgctaacaatagtgttaaagcaacaattgagaggtataaaaaggcttctgattcctccaatactggatcagttgctgaagttaatgctcagttctatcagcaagaagctgacaaactccgaaatcaaatccggaatttgcagaatgcaaacaggcatatgctgggagagtccatagggggattgcctatgaaagagcttaagagcttggagagtcgtttagaaaaaggaattagcagaatccgttccaaaaaggtatctgataataatttatgtaattaaaaatagttcctttaagattattaattattattgctactgacaaattntcccttctcctttaatttatcccctttaaactctaccagaatgagctgttgtttgctgaaat

SEQ ID NO: 11501 - DNA, 623 bp, Gossypium hirsutum
  Clone ID: LIB3829-002-Q1-K6-G11
cggacgcgtgggcggacgcgtgggacgattatgagacgaggtgagtcgttggattcgaagatcaagatcgacaatggcggtggtggaagggaagggggtttggttgttatgggtacggatcgtttgggtccggatccggaatggtccctaaacagatcaaaatcgtggatgctaagtcttcggtgaccgtaaaatccgacgtgtatgccggatcggctttctccgtttctccggcaccgagctcacttcctttaccaactttctcgaagaagaaacaggttccggtcgatgattcagctacaagggatctcaggcgtttgctacggcttgatctctgatacccgaatatttagatttggatccaaataagcctgcgtctctttttatctccatctctctcttgatacgtttcgtctctatttagatatctccggaattttcaagatccgatgccctccgtgatattttttgaagacggtggacggatttgaaaatctggaaaattttaggggcgattagataatattccctgcttatcagtttatgcgttaaacaagtggggtttctttaaggaaaaaagaaaatcaagggggttgatatgtaatattagggggatagtgggc

SEQ ID NO: 11502 - DNA, 583 bp, Gossypium hirsutum
  Clone ID: LIB3829-002-Q1-K6-G12
gttcttattcactccatttctttaaccctggctctttccgtcgagaaaaccgccgccggccgtgagtacaaggtcaaggacatgtctcaggctgacttcggtcgtctcgagatcgagttggccgaggtcgaaatgcccggtctcatggcttgccgagccgagttcggccctgcccaacctttcaagggagccaaaatcaccggttctcttcacatgaccatccagaccgccgtcctcatcgaaaccctcaccgccctcggagctgaagtccgttggtgctcttgcaatatcttctctacccaagaccatgccgccgccgccattgcccgtgactcggcagccgtgttcgcctggaaaggtgagaccctccaggaatactggtggtgtaccgagagagcccttgactggggtcccaccggtggacctgatctgatcgtggatgatggtggtgatgctactctgttgatccatgaaggagttaaagccgagcaggtttatgagaaaaccgggcagctcccagatccgtcttctaccgacaatgccgagtttcagattgttttgaccataattagagatgggttga

SEQ ID NO: 11503 - DNA, 624 bp, Gossypium hirsutum
  unsure (1)..(624): unsure at all n locations; Clone ID: LIB3829-002-Q1-K6-G2
gtaccttccccgtggcgagtcatcagtgactggccctgtcgtcagacttttcaagccttttgatgaactctttgttgacttcaaggattttaatgtggaagctctagagaagtttgttgaagaatctagcattcctcttgtgactctctttaacaatgacccaagcaatcaccccttcattatcaaattctataacagtccccttgcgaaggctatgttgtttgcaaatttgagcaatgaaggagttgattccttaaaatctaaatttcgtgaagttgctgagcaatacaaaggacagggtatcggtttccttttgggagatcttgaggctagtcaagctgccttccagtattttggagttcaagaaagccaagtacctctcatcatcattctggagaatgatgggaagaagtatttgaagccaaacttggaggctgatcacattgcaccatgggtaaaggattacaaggaaggaaaagttccaccgtatgtaaaatctgaacctattccggtggaaaataatgaacctgtgaaagtggtggttgctgacacccttgatgacatggttctcaaatcangaaaaaagttctgcttgagttttatgccccctggtgcggacattgc

SEQ ID NO: 11504 - DNA, 632 bp, Gossypium hirsutum
  unsure (1)..(632): unsure at all n locations; Clone ID: LIB3829-002-Q1-K6-G3
gaagccatgacatgtggccttcctacgtttgccacattgcatggtggtcctgcagagattatcgaacatggtatatcagggttccatattgatccataccaccctgaccagaccgctgaactcctggcaactttctttgaacgttgcaaggaggacccaagccactggactaaaatatctgatggagggcttaagaggatttatgaaaggtatacatgngaaaatttattctgaaaggctgatgacattggctggagtatatggtttctggaagtacgtttcaaaactcgagagacgtgagacccgaagatatcttgaaatgttctacatcctcaagttccgtgaattggtaaaatctgttcccttggccagtgatgattaaagcttaatccctggttgcgctcgtagggtactggtagtatacatacacggttctggttgattgcgaggatgaacaatataatatataaataaagcagattaggtctccttgctatggagcattttaattcggctntgtgttggaagtaaaaaatcaaatatgtgatgggtgttgtaaataaatgcagtgttctggctttggactgcctcttgaaatctggaagatttgtatgtaaagctaacatgtacct

SEQ ID NO: 11505 - DNA, 584 bp, Gossypium hirsutum
  Clone ID: LIB3829-002-Q1-K6-G4
gcagccaccaaggccattaaggaatggggccagcccaagtccaagatcacccaccttgtcttttgcaccactagtggtgtggacatgcctggggctgactaccagctcaccaagcttttgggcctccgcccgtccgttaagcgcctcatgatgtaccaacaaggttgcttcgcaggggggacggtgctccgagtggctaaggacttagctgagaacaacaaaggtgctcgtgtacttgttgtgtgctcggagattaccgctgttaccttccgtggacctagtgacactcacctagacagtcttgtgggccaagcattgtttggtgatggtgccgcagctgttataatcggggcagaccccatgcccgaaatcgagaagcccatgtttgaactagtctcagcagcccaaacgatcttgccagatagtgatggtgcaattgatggtcaccttcgtgaagttgggcttacatttcaccttcttaaggatgttccggggcttatttcgaagatatagaaaagagcctggtagaagcatttcaaccattggggatatccgattggaactccctttttttggttgctcat

SEQ ID NO: 11506 - DNA, 654 bp, Gossypium hirsutum
  Clone ID: LIB3829-002-Q1-K6-G5
gaaacacccttttggtttcagtttgaggcaaccattttataattcgactgtccagagagttggaaccatgtctttagtaaggtctgccgaaccagctactgcgtcatgtagaaatacgaatctctattcaatacaggatagcagtgatagtactggcatggccattcgaatgtttggttctgataagcataagcctgtttatgttatggattcttacagcagcgagagctacgaaaagtacttccttgattctcctacagatgagcttatacattcatctagttctggaatttctggaagttcggttcgcctacaagatgtctcttcttgccagataagagattacttggaaatccaaagcccagatacactagactctgatttggataagatgaaactgaagcttaaagaactggagagagctctgcttgctgataatgatgttgatggggatgatgacatgtttggcactggtctaagcatggaagtagatggtgagtggtctgatcctatcaggatgggttctcatcacgactcgccaaaggagtcatcatcctcgggtacttatctcgatagcgttagtggtaacaaagaggtttcacatgtttcatctcagactcctaaagcaatgctgattgaatgtgctgctatact

SEQ ID NO: 11507 - DNA, 623 bp, Gossypium hirsutum
  unsure (1)..(623): unsure at all n locations; Clone ID: LIB3829-002-Q1-K6-G6
ngaccaagttcctttgctgtgggagttctcgaactcgaaccacataataaaatggcgatgtgggtctttggatacggttctcttatttggaaagctgggtttaactatgatgatcgtcttgttggtttcatcaaggactatcgccgtgtattctatcaagggagtactgatcacagagggacgcctgagtatcctgggagaactgtcacattggagcctgctcctggggaagtctgttggggagctgcttacaagatatccaaggaggaagataaagaagctgcaataacgtatttagaagtgagggagaagcagtatgacaagaaagcttatgttgatctcttcaccgatcccttagctacaactccagccatttctggagtaatggtgtacatagcatctcctgacaagaagcttaatccgaactacttggggcctgcttctatagaagacattgccaagcaaattgttcgtgcggaaggcccctcgggaccaaacagagaatatcttttccaactagaaaaggctcttcttcagattggttgtaaagataaacatttaatggatcttgcaaacgaagcaaggcgcattctttcagaatccgagcatactgcatcatgatg

SEQ ID NO: 11508 - DNA, 625 bp, Gossypium hirsutum
  Clone ID: LIB3829-002-Q1-K6-G7
caagctccgatccctaccaaattctatttgtaagatgaggtcattgcgttttctggatgcccacttcaatgaactttgtggacttccgaatgaaatcgggagattgacaaatctcgaggtcctcaatgtgagcagcaatttctctgatctgacagaacttcctgagtcgcttggtgaattaaccaaccttaaagagcttgatctcagtaacaaccaaatccaggttcttcctgatacatttggcaggcttgacaacctgaagaaactgaatttggaacaaaatcctcttgtcattcctcctctagaagtagtagagcaaggggttgatgcagtgaagattttcatggcaaagaggtgggccgacaaacttgtggaggaagaaagaaagagcatgatagaagtaaatgaagaggaagagaatgggtggttgacacgcagtacaacttggttgaagcgctctgtttcagtggttggtgagactgtatcagggtaccttggaactgctggtcctagggaccctattctggacgaggagcgatgagttcactctcaccttcgcttttgctgccaatttcaattattcaagttttcctcggcttttctcgaagcatcatttccatggttg

SEQ ID NO: 11509 - DNA, 573 bp, Gossypium hirsutum
  Clone ID: LIB3829-002-Q1-K6-G8
attacgacacggttcaaactttaaaggaaaacagcctttggttggctgaatgctcaaaacgtcgaatggagattacaggttcattctaaaaatcgccgaatagccattccggggaggaggtgccgaatggctattccaacctctccatcgaatgaccctttttttctcctccaaaaataccctttcttagattaaattttctctaacggtttcaacttttgttttcttttggtcattcgacaatctcaagctcaaatcaatctaaaaggaagcagatcaacttgaaggccaaatcaactagattttgttgtaagttcaattcaactagggtttgttttgcattttgattgattttttttttgtttctgatgatttgtccaaggggaattgaaatggattctgcaactgttcacgaggagatcgattcattattcgagtcaactcctcctctcaaagattcggctaaaatcatagacaaattgaatcaagtcatccaatttgattctccttcaggagaaggaaaagggaggaaggtagaggagctgctaaaacgatgcccaatcttgatccaaa

SEQ ID NO: 11510 - DNA, 546 bp, Gossypium hirsutum
  Clone ID: LIB3829-002-Q1-K6-H1
gcgagccgggccgataagagtgaccgagagcgcgcaaagaacatagcatcatcgaccaacaaggacccgaataaaccgaagagacccgccactgctttctttgtgtttatggaagagtttaggacaagttacaaacaagaacatcctaaagtgaaggctatctcagctgtgggcaaagcgggcggagagaaatggaagtcgatgtcgaatgcagaaaaggctccgtacaaagtgaaagcaacggaaaggaaatcagaatacgagaagctcatggcagcctacaacaagaaacaagaaagttcagatgatgaggaagaagccgagtccgaatcatcaaaggatgatgaagaaagtgaggacgatgattgaatccaggatggttttggattaggttctgtaaatgaaaccatgtttaaaaatactgtctttagcagcattgtatgatggtatgtttgcttgatatgtcgtgtgcttggttttcgatgtgaaagaaaacgcagctcctatatttctatattcgcagatatatgtttgtgttaccatgtt

SEQ ID NO: 11511 - DNA, 632 bp, Gossypium hirsutum
  Clone ID: LIB3829-002-Q1-K6-H10
aaaaaaaacatacgcaatgagcactgctggtcaggttattcgttgcaaagctgcggtggcatgggaggcggggaagccactatcgatagaagaagtggaagtggcaccaccccaaaagcatgaagtccgtattaagattctcttcactgctttatgtcacactgatgtatactactgggagtgtaagggttacactcctctgtttcctcgtatacttggtcatgaagcctcagggatcgtggagagtgtgggtgagggtgtgaatgatttgaaacctggagatcatgtgctccctatcttcaccggagaatgcaaagaatgtcgccactgtctgtcagaagaaagcaataacatgtgcgaactgcttaggatcaactgcgaccgaggtgttatgcttgctgatgggaaaaccagattttccatcaacggcaagcctatctaccactttgttggaacctcgacctttagccaatatactgtcgtccatgttggccaggttgccaagatcagtccaaccgcccctcttgataaagtctgtcccattagctgtgggatatgtacaggttttggggccactgtgaatgttgctaaacccaaaagggtcaaactgttgcagtttttggactgggtgc

SEQ ID NO: 11512 - DNA, 619 bp, Gossypium hirsutum
  Clone ID: LIB3829-002-Q1-K6-H11
gggggtattgcaaagataatatttttattggggaaaaaaagatggggagaggtagggttgagttgaagagaattgagaacaagattaacaggcaagtaacttttgctaagagaaggaatgggcttttgaagaaagcctatgagctttccgttctttgtgatgcagaggttgctctcatcatcttctccaataggggaaaactgtacgagttttgcagtagttcaagcatgatgaaaacattggagaggtaccagaagtgcagccatggagcaccagagacaaatgtttcaactagggaggctctggagctaagcagccagcaggaatatctgaagcttaaagcacgttatgaagccttacaaaggtcccaaaggaatttacttggagaagatctggggcctttgagcagcaaagagcttgagtcacttgagaggcagcttgattcttcattaaagctgataagatcaacgcggacccaatacatgcttgatcagctcactgatctgcaacgaaaggaacatctacttaatgaagctaataagaacctaaaacaaaggttgatggaaggctaccaagtacattcactccagctgaatccaaatgccgatgacgtcggcta

SEQ ID NO: 11513 - DNA, 641 bp, Gossypium hirsutum
  Clone ID: LIB3829-002-Q1-K6-H2
ccccgcgtccgccaactcctcatcattgccggttctaccctctcaaatcccctcgcttctcctgctcagcctctgcttcaagcacaatggctaaacaagttttggtgccgatcgcgaacgggacggagccgatggaggcggtgattacgatcgacgtgattaggagatcgggagctgacgtcacggtggcttccgtcgagaaagagcttcgcgttgacgcttgccacggtgttaaaattgttgctgatgctcttgtcgctgattgtaagaataccgttttcgatcttatcgcgcttcctggaggcatgcctggtgctagcaactttaaagattgtggagctcttgaaagtcttgtgaaaaagcaggctgcagatgggcggctttatgctgccgtgtgtgcttcacctgcagttgcgcttggttcatggggtctattgaagggactgaaagctacctgttacccatcatttatggagcaactgcaatcatgtgcaacagctgttgaatcaagagttcagcaggatggcaaagttgtaacaagtcgtggacctggcactaccatggaatttgctgtaacactggttgagcaattgtatggaaaagagaaagctgatgaagtttctgggccattggtgatgcgt

SEQ ID NO: 11514 - DNA, 600 bp, Gossypium hirsutum
  Clone ID: LIB3829-002-Q1-K6-H4
gcagatttaagaaaccgaagtaaagaagcattgcaatacatgcataccaagacgtgcttaccaattgaagaaaacgcaagaagtattcttacaccttatgcattcaatgcattacaacacgagattgtgcaatcgatgcagtatgcaacaacggaattggcaaacggatcatatcttgtgcgacactataagaaaatggaaggtgaatatcttgtgatttggatatcacaagatgagcagattcattgctcgtgtaaggagtttgaacattccgggatattgtgccggcattgtcttcgagtacttacagtgaaaaactattttgaaatcccggagaaatatattctgttccggtggagattggagagttcattggttgctctggaagatcaaaatggccaatgtaacagtgatgagtatgctcaagtctttcattctctagctgcaactcttttgactgaatcactttttacaaaggaacgattcaatcatgttcatcgggaacttacaagactcctcgagcatgtccggaacatgccagtatctaacgagtttgcttcgaatatggcagctaacacatcagtgagtcatatgtttggt

SEQ ID NO: 11515 - DNA, 654 bp, Gossypium hirsutum
  Clone ID: LIB3829-002-Q1-K6-H5
ttaaaattaagaaaaaaaacatacgcaatgagcactgctggtcaggttattcgttgcaaagctgcggtggcatgggaggcggggaagccactatcgatagaagaagtggaagtggcaccaccccaaaagcatgaagtccgtattaagattctcttcactgctttatgtcacactgatgtatactactgggagtgtaagggttacactcctctgtttcctcgtatacttggtcatgaagcctcagggatcgtggagagtgtgggtgagggtgtgaatgatttgaaacctggagatcatgtgctccctatcttcaccggagaatgcaaagaatgtcgccactgtctgtcagaagaaagcaataacatgtgcgaactgcttaggatcaactgcgaccgaggtgttatgcttgctgatgggaaaaccagattttccatcaacggcaagcctatctaccactttgttggaacctcgacctttagccaatatactgtcgtccatgttggccaggttgccaagatcagtccaaccgcccctcttgataaagtctgtcccattagctgtgggatatgtacaggttttggggccactgtgaatgttgctaaacccaaaagggtcaaactgttgcagtttttggactgggtgccgttggtcttg

SEQ ID NO: 11516 - DNA, 614 bp, Gossypium hirsutum
  Clone ID: LIB3829-002-Q1-K6-H6
aaaaaccctactgctcagtgctcacatttgctcgcattttatttaattttctggtctgccctcaaagcccaaaacgctaacaatggcagccgccgccgcccgtcctctggtttcggtgcaaaccatagagtccgatatggctaccgacgctacacctactgttcctctcgctgatgtgatgaagagcctcgatccgaccagacattgtcatcttcgtccacgataacatttccaagaacagccgccagccttacgctgtctccaagcgtgctggtcaccagacctcagctgaatcgtggggaactgggcgtgccgtctcccgtatcccgcgtgttcctggtggtggtactcaccgtgctggccaaggtgcttttgggaacatgtgtcgtggaggccgtatgtttgctcctactaagatctggcgccgttggcaccggaagatcaatgttaaccagaagaggtacgccgttgcctcggcaatcgccgcttctgctgttccttcactcgtgatggcacgtggtcaccgtatcgagtctgttccggagatgcctctggtcatatcggatgctgcggagagtgtggaaaagaacctcgctgcaattaaggttttgaaa

SEQ ID NO: 11517 - DNA, 676 bp, Gossypium hirsutum
  unsure (1)..(676): unsure at all n locations; Clone ID: LIB3829-002-Q1-K6-H7
ctttggctcaatactctcccttttcttcaggtggcagtgattattatgaattcaaatacccattcatcaaaagggcgagttcattttgggcatcatcatcatcgttctcatcatcaaacacagacgaagcatcatacgattacataatagtgggaggtggcacagcaggatgtcccttagcagccacactgtctcaaaacttcagtgtgctggtgttggagagaggaggcgttcccttctcaaacgtcaatgtctccttcctcagcaacttccacatcgccctggcagacacgtcccccacctctgcttcccaaccttttgtttcaaccgatggtgtcatcaatgcaagggctagggttctgggtggtggcacttgcatcaatgctggcttttacaccagagctaactcaggtttcatccggagagtgggttgggatgaaaggctagtgaatgagtcatatccatgggtggagaagcaaattattcaccagcctaaactagcacaatggcagggtgccttcaaggacagccttttggatgttggggtgtcaccttataatggattcacctacgatcatatccatggaactaaagntggaggtacccttttcgaccgctttggccgtcgccatactgcagccgaactgcttgcttctgcaaacccaaaatgcttact

SEQ ID NO: 11518 - DNA, 651 bp, Gossypium hirsutum
  unsure (1)..(651): unsure at all n locations; Clone ID: LIB3829-002-Q1-K6-H8
ccagacatacgactttgtgcaaaagagagggaagaatttcgaagctgaatagaatggaaatgagcatatgggaatgctgtgaattgctgaatgaggtggtggatgacagtgaccctgacctggatgaacctcaaattcagcacctcttgcagtcggctgaagctattangaaaagattatgctaatgaagattggctgcatttgactgccctcattcatgatcttgggaaggttcttcttctacctaaatttggagggcttccacaatgggctgttgttggcgacacatttcctcttgggtgtgcttttgatgaggccaatattcatcacaggtatttcaaggaaaacccagattacaacaatccctcttataacactaagaatggaatttactgggatggctgtggccttgacaatgttacaatttcatggggacatgatgattacatgtatttggtagccaaggaaaatggaaccactctaccttcagcagggctgttcattatccgatatcattcactttatcctttacataaggaggaagcgtacatgcagtttcttaatgatgaggataaggagaatctgaagtggcttagaatattcaacaagtatgacctgtacagcaagagcaaggtcgctgtggacgttgaa

SEQ ID NO: 11519 - DNA, 639 bp, Gossypium hirsutum
  Clone ID: LIB3829-002-Q1-K6-H9
tttcactaagccttcaatttttattttcctataacctatttctagctgcaacatcaaattctcattggctaaagagagaaattaaggataagcaaggggagagaaatagagagggggggggggagagactacattatttctttttttgcaatggaaactattgtttttattatactatacgtgattctctttctctcaactcttctttcatatccatttcttaggaagcaaaaaagagggtttccaatagaaaggtataagcttccaccaggttcaatgggttggccatatattggagaaactcttcaactttactctcaagacccaaatatcttctttcttacaaaacagaaaagatatggagaaatattcaaaacgcaaatactcggttgtccttgtgccatgttggctagccctgaagccgcgaggttcgtgctggtgactcatgctcacttgttcaaaccaacttaccccaaaagcaaggagatgatgattggcccttgggcgctcttctttcaccagggtgaataccacactcggctaaggaagttggttcaatactcactagcacctgataccatcaggaagctaattcctggtattgaacacatagctctctctgccttggactcatgggct

SEQ ID NO: 11520 - DNA, 251 bp, Gossypium hirsutum
  Clone ID: LIB3829-002-Q1-N6-A1
ccaaaaaaatgtttgataagataaaaatttccctttaaatcccgcaaaccggtgtacctttcctttccttggtggttccccttaaaatgcccttttccttgacaaaaaccccttcttccttggccagccaatccttatccttccatgcaaatcatgcccctaaggccctccccagcaagcatgtcctcaaatcccttgttaatctcaaaaaagggacctgagtgggtgatgaccttgccaagtccaagtcc

SEQ ID NO: 11521 - DNA, 439 bp, Gossypium hirsutum
  Clone ID: LIB3829-002-Q1-N6-A10
aaacccaaattgcaatagcattccattttggattttaggaaatatcagaactgcaacatttccaatgctttttacacaaatcattttcaaaacagagattgatatagatgttgggggcatgaatacattagacacaatggaaactgagtttgtaggggggggggatccatccaccattgagagtctttgctagcaagatgtaaccctgaaatttgaacacatgctctaaatggctctttcaaaactggtgctgacacctgaaaagccctatcgctttgaatggtatagtatggatgttgacagaaccgaagaaaaactgtagtacttgcagagaattgcccatgaacaatacatgtagccttttggcgatgcaatacgaggaagaaagaatttaccatccgattaaaactgttcggggaaagtgttagttcaactttgg

SEQ ID NO: 11522 - DNA, 301 bp, Gossypium hirsutum
  Clone ID: LIB3829-002-Q1-N6-A11
ggggtttttaaaaaattttttttttttttttttttttttttttttttaaaaatttttttttttttttttttttttttttttttttttttttttttttttttttttggaaaaaaggaataaaaaaaaaggggggaaaaaatttttttgagggaagaattcaaaaaaagtaaaaaaaaaaaccaaaagggggaaaaaataaaaaatattgaatgaaaaaaattaaaaaaattggaggaaccaaattttttcggggccttaaaaccaaaaaaaaaaaaagaggccatttaaaaaattttggaaa

SEQ ID NO: 11523 - DNA, 584 bp, Gossypium hirsutum
  Clone ID: LIB3829-002-Q1-N6-A12
gaataaatccaggtaatttgcaggcagtctttggaccagaagaaacgttatacattctttggctgcgttttatacaacacaaaaataataccccaaaagaatgcctcacaaacaagacttttccataacttaaaagctacgatgtgcatttaattacatcctcaaaaaaggaagaaaacaatcagctcagactaatttttgcaggaagacatattccgggagcttgttccttcaccacactaccttcacgtgcaactagtttcacaactgattggggattgaggttgaatttttgctcagcctcagcaaagcttcttcccagcacatttgcaacccaatcttctagagctccctttttgtccgaaaaccagacagcagcaagtatttgtaccatcacttcttcattaatctctaacagaacttcacttccaactgtcctttgaaattgtgagctgatttcctttacaattttattagcaagtccatcgaaatcgaatgacttgaaatgtatctttttatatacttcgctaaagaattcttccaaccaaacttctgagttctcagacaaggactcgctttttgac

SEQ ID NO: 11524 - DNA, 358 bp, Gossypium hirsutum
  Clone ID: LIB3829-002-Q1-N6-A2
aaggtaacgatagctgaggctatgcattgattatcaccaaacaggattacgggtactacacaggcgaaagccatttaacaagtgctagtcaaacataccttcatagatcctacaaacagcagggccaaacacccaaaaggggtgatgtttcaaccaccaccacatcaatgataaccctacttgtttaaactttcatataacttaaaaacgttcagtcattttggtaacaaccaaaagcctatacaaaacatgggggatcagcagaagaacatggaattgcagacgttctccttcaacctcggcagctgagggacagaaatggctccaggtgcggtaactccaccatggctcgagtttg

SEQ ID NO: 11525 - DNA, 465 bp, Gossypium hirsutum
  Clone ID: LIB3829-002-Q1-N6-A4
actctaaaatctgctggaaacttcaattgcacaaggaacaagcttaaatagtcttgacaacaataaaccaaatatatgagtagaatgatgtctcacaggtcacaaatgtaacactagccaaaactcgggtaaatttcttggtgaacaaatgcaagttttcataaaactaaacatcaataaattactcatcatcatcatcgatgggcttagtgcccaaacccttcagtccttcagctgggatttcaggaacagttactagagagtagagctcttccttcgcatcttcatcatcatttctcttgcgggcaatgcggaccctaatccttctaggaacacttcggatccctcggctccagatatgtttgttcagcttgacatcaactctcacatcctttgtccccattgctttttctgcaaacttcctaatctcctttatagccttgggagccttcttcttgaatgtgc

SEQ ID NO: 11526 - DNA, 510 bp, Gossypium hirsutum
  Clone ID: LIB3829-002-Q1-N6-A5
gcattaaccatcactgacgaggaaaatcgcttaaagtgaagctaataatattctttacatagtcaagagcaaagcaaatcctctattaatataaataagcaaaatcaaactggcataattgcttgagatcacaagaaccgggctcatatatgactggttaggacttaggactagcctaactaccataccaaatatcttctctctcaagttatatgctcaaatattcaaccacacccagtgcttcaaaacaagatttcttacatgcacttagtaggatcatggaagcacaaaagaaatgctgagatgaatgattttgggtattagcaggcacatcctcctgactcttgttgtgactgcgatccatttgaattgctcgacttaagattcacatccaccatgtcttcatgctttgttgaagatagtgtttccattccaggcaatgcagctgcaatcttccgaaatagagcctgtaaaatgtgatcaacagaaagagtgagagaacccaataca

SEQ ID NO: 11527 - DNA, 416 bp, Gossypium hirsutum
  Clone ID: LIB3829-002-Q1-N6-A7
gggttgggggttttttttttttttttttttttttttttttttttttttttttttttttttttttttttttttttttttttgagaaataacgaagcaattcacataacaaatggcggacaacatcacatttcatttgcaaataaatccaaaccgggggggtgggcatcctcctcatcctcccgatacatttttattattttagcacagccaactttagccttggcaaccatgaagcccatgcttttggcataacggggggggggtgaaatgcccttggagttgggcaagataacacgggcacgttcacgaccgggggacattggggcacatccaagctgggggcttttcacaagaactgcgtcacagatctgatccaagggatcctcggatacacgaatttggtattttccgggttt

SEQ ID NO: 11528 - DNA, 501 bp, Gossypium hirsutum
  unsure (1)..(501): unsure at all n locations; Clone ID: LIB3829-002-Q1-N6-A8
acaaaaggatttatctaagccattcaactttaaatcaaaaagtacatantagaagcagattatcccatctacaactattaatttcagaaggtcaaaaggaaccaacaggattcagaggtacatttctcccttagatggcatgcgcatctaaaagaataacatggaaacatcgaaagcattaacatatggttttgatcaaacactatcacagcctacattgattatgctatccaccacggaccttcctactcatcatcttcttcgtctccgctgccttcttcatcatcatcctcatcattcacctcagacactgatttgtcagactcaacatcttcgtctttaggaccctcagcctgtctcttattgtaggccttcatgttcttttcatactcgacctttcgcttttctgccttggctacataaggtgctttttcagcttcagacaagctcttccatttatctccaccagctttgccgacagcggcaacggatttgttttta

SEQ ID NO: 11529 - DNA, 494 bp, Gossypium hirsutum
  Clone ID: LIB3829-002-Q1-N6-A9
gggtttttaaataaaatcattttttttattgattgctaataatgatatttagtacattaaggctttcttctgttgggaattgaaaaaggactctagacttccttcacttccacagctccattcacttgtttctcttcatccttacccttagaacccttaacttgttcaccttcaatctcaaaagctgatacagggaaagtcctaaacagccctgaaggggtcttgaaagtgatcttcccagtgggaggatcatccacttggatatcactcagtgtgatccaaaccaaaagctctttggtcttcaccccagtcagcttcttgatcttgcctttctcaacgacagccgtgacttcagttgcataggaaaccagcttccctatcttttcgaacttgtgggtgatgctcttcttttgtttgagccacacgaaacctgtgtccttcacgtacccacattcttcgatgtctctaagtggcaaaagcccccttggcatgcc

SEQ ID NO: 11530 - DNA, 431 bp, Gossypium hirsutum
  Clone ID: LIB3829-002-Q1-N6-B1
ggttgggggttttataaaaaagttcaacgcaatgtcgattgtagtacatcatgatcatcatcaaaacacaagcgtctaaaaacgaaagtacatatgggtgaaaaagcatccatgctaacaaaatataaccagacagaaaacaaaactaaatgccagcagaggttatgccgcacaatcacagttactctctcttagcttacagtttgtcctcgaactcagaaagtggggtcatctgttccttcaatcctttcctcttgcggatttcggcgacatgggctgctgcctgagagccaggttccaatgggtctgatgacatcatatcccagtgatcaaacacacattgtgggaaagcttgtcctgatgttgcagccctcaaagtgctagagaatccaaaggactcaatgacaggaaggtatgccttgatgttgtaa

SEQ ID NO: 11531 - DNA, 564 bp, Gossypium hirsutum
  Clone ID: LIB3829-002-Q1-N6-B10
ggtttttccggccaaagttttttaactttcaagagcaaatagagctaaatttgtttaaaaataaacacagaaatcttaaattaaaataatctattaactctgaaattggaataactgattaatttttttctgcataaagaaactacgggggaagcccaggaaaatgataattgataataactatgatgatgatgatgatgataattttgatttttgatttttggttcgctccatttgagggaacttaggacctaaccaagatgcccgtccacctcctcattttggcgtcacctatcgccatagcctcctccaccccacgtgaagccttctcccaacctttttgctacttttatttatttttgcattttggttagatcccgtattacatgcatgctgattttagttccagtgttcagggcaataccaatgaagacttggagcttcttcatctgagaagaacttgcaagcttcatctgcactaaagaaattttgttcttccatcttcacaaattgctggggttggaggcacttcatagaagaagatgaagagttgaaattgagtga

SEQ ID NO: 11532 - DNA, 604 bp, Gossypium hirsutum
  Clone ID: LIB3829-002-Q1-N6-B11
attccacaatttaactaagaatcccaacaactttattacgaaatttcctacatattcaacataataaaagttcacacatgatttcccccaagtttgcggtctagtatgtgaatatcaaatatcggcaaataaaccaggggggtgcgatccttgttttctaggcacttttctcactgcacagcttctcaataagttctgcagcatcttgaacagttgtgatggattgtgcattgtcctcttccaccgtgattccgaattcttcctcaagtcccatcacaatctcaaccgtatcaagagaatcagctccaagatcaagaaatgttgattcaccggtgattggtttgtcattgtctaaagctaattgtctctttactacttcacataccttatccacggtctcttgtttggcagcacagcagatctgcaagcgagcaggcattggacgcatcgtaaatgagagggtgcttcttccctggttcataaatgaacccaatttcaacccagaaacactgcctttagcaaaggggcgaggttgcatggagatggatgaaccagcaatagaagccattggagagagaaagacgaattgcgaaacggcggagag

SEQ ID NO: 11533 - DNA, 521 bp, Gossypium hirsutum
  Clone ID: LIB3829-002-Q1-N6-B12
ggttttgggttttatgaaacaagtaattagcatataggttcataggtcaagttgacatgttaaacctaaaacataattcccagaacccataatcacacacccccactgaagataacagaaaagcacggtaatcggagacggtgttagacctaggggggtaaaccaaagcaatggtgctttccccaccagggggtttgcgtccgctactgactcgagactctaccttcccttcagcaaagatgttgctaccgctcatctcccgcagtttcgctacactgagtggtttttcagcagaacctggaggaacatcacccttaaatatgtcgtttccggatagctctgcgaatttctggttatgtattttctttgctgtcttaaccacggtctcctcacttggcgtgctacctccagcaggtttatgtgtatcaggttctcccatgtcaaaattgtccttcaaagccaaagcgcgtacagtagttggcctcggcacaatttcaggtgggggtgcaaagatgtcatgt

SEQ ID NO: 11534 - DNA, 570 bp, Gossypium hirsutum
  unsure (1)..(570): unsure at all n locations; Clone ID: LIB3829-002-Q1-N6-B2
gcatccaaaacttaatacacattgatattatcattcattacactttggttcttttaaggtattcaatccaacaagctgtccttaaaaataactctacaacttttatcagttcaatcaatggataactggcttcaaaggaggtgctctcaggttcgacaagtcgagtgcagaatccagctcttcatccagttcaccaacgacacttatgttgtcacctcttattatgtacaagcccaacacaagttgctgaacaccttccttggtggagtatacgcgttcatgagattcatcgagaatgatatttgtagcctgatcaaagccttttaaaactcccactatgttacgtccatcattggtaatgaccgagatagtctgatctacaagagactcgagcccagggccaggtgacattttgatgcttttgaaagcaatgaattacaatatctgggaatggagcggcttcagaggtgagttanggaccgaattttttggtgggtcgggtttccaaaatttgtcgcttgcttaggtagtgagactagatcgcgaacgggcgccttttttttttttttt

SEQ ID NO: 11535 - DNA, 512 bp, Gossypium hirsutum
  Clone ID: LIB3829-002-Q1-N6-B3
tttttttttggtagaatagtttgcaaaggaacttattattgccataaatttaatataagttggtacatgaattgaataggcgttaagcttcccgcccacaccatcaaagtgttctagtctttaacaataaacacacaaattcatagggtggaaataatctaaaaaaggaaaaaagaagaagataaaactgcaagccaagtggagcacgaccaattacttaaaaggcatgtttgtttaactttaagcagcaacactatggagcacaacagtctcaacagtgaggccaggtccgaacccaaagagcactccccactccagtccttctcctgttgtctgaagtccatcttcccttgatttcttcctcatctcatccaaaatgaataaaacacaagcacttgacatgttaccatactctgaaagaacgtgccttgtggctcgtagcttctctggcttcagtgctaacttggcttctacctggtccaatattgctggacccacctgatgagcaatcc

SEQ ID NO: 11536 - DNA, 484 bp, Gossypium hirsutum
  Clone ID: LIB3829-002-Q1-N6-B4
ggtttggggtttttttttttaccagaatagactgaaaattctataattccagttacgttcttgcatatgaaatcctaaggaactctattaagggaataaagacaaaaaagaagaaaacgaaatagaagatatgaatcgatcaacgtgaacgggggggcagacataaggatcagcagaatacagttcaaaagtatattaaaatttggaagctttttatcgtacctgtgaaggcgaacaaagcaaccctgaagcatctgccccgaccactgcaagatcacacaccgtacacaattgtccaccctgggtaggtacaaagcgagcggtgcaatatgggcatgatacatccttctgtcctctgtaaattggcacataagttgccccacatgtcacgaatgggtttctgaaatcatagtttagttgagaggcatcggtcatattcctctcagcagcttgtagcacttggctcgcgggcttagcttgattc

SEQ ID NO: 11537 - DNA, 491 bp, Gossypium hirsutum
  Clone ID: LIB3829-002-Q1-N6-B5
aaaatagaacaagcttcaatcaaataagcacagaacacaaacaaataaggaaactttaagttcttgcataacagaagatactatccaaaatttaggttctggacatatagcaatagcaccccataataaaaccatagatgggtgtaaaccaaaagaattcaaaagtaaaatccctttaacataagggaatgcaaaataccctctagaagacaagctcgtgcggtttcatgccagacttgagagaaaaccttgcggcgaggtaggccttcaagtctgggactccctcaatggactttatcaaagaggcgtcgactgctttctggtcttctttcttgtcttcaggcagttttttcttatcctctttttcagcctcaaaaaactctccctcagtcttcttcttcctcttctctacttccttggcaaagtacttgtcatcaaacttgtctacgttaacccctgagatgtcaaccttggtggaagtagcaatgaca

SEQ ID NO: 11538 - DNA, 601 bp, Gossypium hirsutum
  Clone ID: LIB3829-002-Q1-N6-B7
aatagaaatttatttcattaacaaagcaagcttttacaagataatttattctctcagcatataatataaaactccatataaagaactcttttctcttttttttttttttgagagagagagagttctatataggcactcttgataaccgggaaaggtagcttaagtaggcacataatataacacatagtaggacaaaacattagagttttgatccttggatgggcaaatatacagcagcaacatttccttaagcatccaaatgaatcatgcatctcagacctataccctggagcatgtagtcgaatgccttgttaatatcggcaaaaggcacagagtgtgtgatgaacttgtccatatccagccccagctccttgttcaaatatttgtcgacaaccatgggaatatcagtgcgtggtttatagttgccataaaaagcacccttaagggtcctctcacttagtagattcattggatgagttttgaatgcatcgtctttctttggcacacccaccagcacacaaacaccccaaccatcatggacgcattcaaaagcggaaatcatggcttggacgctccctgtacactccacactgcgatccac

SEQ ID NO: 11539 - DNA, 420 bp, Gossypium hirsutum
  Clone ID: LIB3829-002-Q1-N6-B9
ggtggtttttttttttttttttttttttaaggctgcatatgatcagataaccccaaatttatctaatcatatgcagacttaaaaaactaaaaaactaatcagctatgcagctaaaatatgaaaacaggtctcaaagatcaaacccaaatgggtggcttcagcttcatatcacctcagcatcactatcccaaactttcatgggtgctctctttcatctttctcattgcggattatatttgggttttaaataattatatccttcaaagcattgggaaacaatgtattttaatgccacaaggaatttcttcatacctgattctttatcagtcaaacatctgcatcagataaaaggcagccaatatattacaattgaggaaccaaagaaagaattggtaactgaagagagcaaatgtaaatact

SEQ ID NO: 11540 - DNA, 514 bp, Gossypium hirsutum
  Clone ID: LIB3829-002-Q1-N6-C1
cagctatcgggataataccacaaaggaaacaagcaatttatcaattattgttaaactataagtaacaaatggcaatgtttgcaagaaacaaatgaccacgaacaaccaaaaacacttgaacgggataaacatccggaactgtgaaaggggccagcattggtgagactgacaactcaatgatgccatctatgccttgtttgcaatgttgttcgaaagccagtccagtccctcatacaagccttcaccagaagtggcacatgtgctctggatgtaccagtgccgttggcggagagaatgaaggccaagcttgtcagtaatctcagcagcattcatagcatttggaagatcttgcttgtttgcaaatactagcaggacagcatccctcaactcatcctcattcaacatcctgtgcaactcatctctagcttcaaccacacgatcacgatcgttgctatcaaccacaaaaataagtccttgtgtgttttgggagtaatgtctccacaatggtcggatc

SEQ ID NO: 11541 - DNA, 568 bp, Gossypium hirsutum
  Clone ID: LIB3829-002-Q1-N6-C11
ggggtttttgaaactaaaataagctatatactgcatatttgcatttacacaaacatttgtgcattaaacaagcttccttatatatcagttattcgataacctaagagagaaggtagacacacggcaagcggccatacctcgtgtacgggggggaccaagccaagctaatccctaagatactgccttgcaaactacttgaataacaactcgagacacactcatgctcctatgagtattattcctatgtaaaactcacacttctatctcctaatttctcctatttgcctgcttatatagtaaggatcactttcggttacaaacatgtgagtaacttggatagtattcatgccttgggattcttcagtagaactgacctttgtaatggagttgtttattgatagcaaagtagccttatatcattatttttcttccgctgtggacatttgtctctatcaagccttcatttgagaggtttataatggaatctgctatgactctggcactggttttcatatagccacctgatgtgaccattacaatagggatctttctatcacgagcaaacctg

SEQ ID NO: 11542 - DNA, 453 bp, Gossypium hirsutum
  Clone ID: LIB3829-002-Q1-N6-C12
ggggataaaaaaaaagggtttggaacttccggtttttacacaatcggaatttagtcatttatcccggttcccccaggggggggttacactcaatcccacgggaaaaggtgatgatttacaggcttatttttcccactcacatggggaacctaaggggggggcattttaaaccaaggaagcctaatgataatttaccatcataagacatgccttctcctcacttgggtgcaaactcgtaaaccaatctcctcaagacaacaatatcattttctgccaatacgagtcactatatatcggcctttctttaaataatacactggcttaaactcaaggttcctccatttcaatataaaccaagctttgaacatcaatattgcaaaaaccgcaatgatggaaaatagcgggggggaatcattgctgacaatgggagttatccaatcaatttggggggca

SEQ ID NO: 11543 - DNA, 506 bp, Gossypium hirsutum
  Clone ID: LIB3829-002-Q1-N6-C2
aatataatattttattaatttataatttaatataataaatccaactccaatagatgacaaggaagtctaaagctcctccattttcacaagagctgctgaattaggcatctctcaagatgattctcctcttaaatcattagagggaaaatcaatgcccaatgctaagtagaatatttattatttgattacaggggaaaaaagtcggaaaattacaacattacaagaaaattgaataccccattttatgcacctttctctcaaagtcaccaccatacgttatgaatttctctacctcatcaacccaccctttctgggttgcctttttcagctcatcctttatttccccatgttagttttactccattttgttggttactacttgttaggcactcctcattttttcttactctcatcatagcccaaggttaattctttccgacatctttatgatgtcggagtgaatctgatcgccttctatctcgtccccggtggcaccagatgcaaca

SEQ ID NO: 11544 - DNA, 458 bp, Gossypium hirsutum
  Clone ID: LIB3829-002-Q1-N6-C3
aatcagtaatttgcttcacagtttatgataagtaaacttggacacgagctgttttcttaacctggcagacaggacaaacactaattagcacatcacaatctttacatatgcaaaggtgcctacacggcatcaacaaaacggacacctcctttgcgttgcaagctctgcaaatcatgccatggcgattcctggaaacacatttggcaccaccaacatcaggaatgctgagtaagttgttggggtcaatatacgaggcagcatcatcgacttcactttctccaaaaccttcctttccctgctgctcaccaccctgtgactgtgacattacttgctccaggtttctcttcaatgtcttcagttttattggcttccagttctgctgttgggcctttctcaggttcagcaacctgatctttgtgcatgtaaagtgcatcagcatctcttttgattacctccac

SEQ ID NO: 11545 - DNA, 501 bp, Gossypium hirsutum
  Clone ID: LIB3829-002-Q1-N6-C4
agggaaaacaaactcattatagtaagaagatatggaagttcattgagacaactacagtaccagagatacgctgccacagtgagaatataacctcccttcctatttacatccaacaccaaatagaaccaaatttaaaacccacttaggggtcagctcaaacagtttaaaagaatacatttttttatacctgaaattggggcttggaagtctgagatcgtcttaatgcatctttcttgccattaccctacttgatatactgagacatccacttaaagccgtccccatatcccattttgcggactatgctgcacataaatacttctagcggacggacattcgagtctgctaggtttaccttccccttgcccgtggtaaagtttgtgaggccgagatggtaacgtaattcatcctccgaggcagcgtatggtatatcaatcttgtttcctaggatagaaacgggacattagcaagggcctcgtctgaaagcagcgcatcgagttc

SEQ ID NO: 11546 - DNA, 574 bp, Gossypium hirsutum
  Clone ID: LIB3829-002-Q1-N6-C5
cctacaagagataaattatttaagttcaagtatatggtcgtgtataggttacaacctcaatttgtttccatggatcatttataaagtgttacaacgagaatttcaacttatttcacaacaccacaattcattttttcctatgattttccgggaaaatggaactcaataagtaatcaaaaaactccatgggggtatataacactaaatatgtcacatgagcttcaacctcaaatagcttctttattttggtcctttatttcttactttcaatcagcttcatatatatttaggcagccacctttttggatgttacagagttgacaattgtagcaaattccggccccttcaaggaagcgccacctacgagaaacccgtcgatatcttcctgctttgcaagctcagcacagttgcttccattaacggaccctccatatatgatacgtgttttagatgcaacttcctcagacacgttctttttaagccaatcatggacagctacatgcacttcctgagcttgttggggtgtagccactttgccagtcccgatggcccatacaggctcataagcaataac

SEQ ID NO: 11547 - DNA, 391 bp, Gossypium hirsutum
  Clone ID: LIB3829-002-Q1-N6-C6
agaagggaaaaaaagatggataatttgatttatattcacattataccgaaaaccctaaaaatctaattgctaactaaagttccacagaaggtaataatagaacaacaaccaaagccagggggggtagagatttgaatctcaggatcaacaactactacagagagagggggggaggggttgatttgtgaacggctttggggaatctaaacttatctgcattaatcatcatcggcaccggaagtcttggaggtcccggttttcttcgggaggaggaggttgtggatgttgggcatcacaccaccattggcgatcgtcacatcgccgagcagcttgctcagctcttcgtcgttccttacggcaagttggatgtgacgtggcacgattcgggttt

SEQ ID NO: 11548 - DNA, 481 bp, Gossypium hirsutum
  Clone ID: LIB3829-002-Q1-N6-C7
aaccaaacagatttaattgctattgtttagattaagtctaaaatttctaaattcgaaaactacatgagctaaattggtcaactaaaattgaccaattcgaaaaatataagactaaattcataactgggggaaattacagggactaataaaagaatttaaaataaaatttatggttggctgctctctaattcaaagcagataaaattcgtgtaaattccatcctgttaaaataaaagcgtgaacaattgatgcctccacctttggatttataataccaacctcaacctgccacaaagacctcaccttccattaaaggtgatctacaatttgctcttactctttgacatgcttcctaatgccttggccttctctcgtagaacatatttctgcgtctttccagtcgaagtcttaggcaaatcctggaaaaccactgttcgaggagtcatgtagtggggcaagttatctcgacaatatttgataa

SEQ ID NO: 11549 - DNA, 519 bp, Gossypium hirsutum
  Clone ID: LIB3829-002-Q1-N6-C8
gaacagtcagattaagatttacacattcattagtgttgtaattttaacatgacataaaatacgacagagcgagcattgtcttgacgatgagcaacaaccaaccaaacaccaacgaatttattcattagtgttgtaatgggggcatgacataaaatacgacagagcgagcattgtctcgacgatgagcaacaaccaaccaaacaccaacgaattaaacataggtgtctatcaacgatttcctcatctcatctacgatagcagtaggttgtgcttctctcagcttaaagacactctcgatgacagaaagttcggttgctgtggtatccgacccacagaaggcagtccagtcatttacagtcattcctgcagctattacttcactcccacggttgatggtgccagccaccaatggaacctgaagaagcgtcgaaagctcatccaagtcttcaatggatgtgtgaggatgaaccaagccacctcggtttgaaaatgcacagtagctcccaacaagaatatttc

SEQ ID NO: 11550 - DNA, 443 bp, Gossypium hirsutum
  Clone ID: LIB3829-002-Q1-N6-C9
agactgccaactacatcaatgatttaattaataagtaccaacaaaaatttacaggaagtaagactgcagggaagaagaccatgaaagatgaagcgagggttttgcactaaaatcggaccttttacatctaacattagacctattgttgtttttgcatcatattctgtcatgattgttttttttttttcatagtttaagacaaagaacacaacgaattttcgagagagaggcaattttatttaagagaaagtagctacagcacggtagaggaccccaattacgtattaccactagactagactagactagaaagccatgaaatctccctcaatacaataatgacttttaatatgatggcctaataaaataacctgaagctaaacttagacttgaatttctacgtgccatctgtacatctcctccgatggcactggcaatgtaag

SEQ ID NO: 11551 - DNA, 359 bp, Gossypium hirsutum
  Clone ID: LIB3829-002-Q1-N6-D1
gattatgatgacgaaaaagagtatcttatttaatggtagttaatcgtaaaaactacataaagcaagttcctgaaaaccaccaaacccagtgacgataaaaacagcaccatgggggagtctaaatgacagacattaaatattctagacattagacaacatcccaacttaacacatagttctctttttcttctctaagagagctgtccgcagtcagcaacaacaacgggcttggaagttcttccactgctagacccaactttctcaatggctttcaccacatccatgccttcaacaacttgtccaaacacaacgtgctttccgtcgagccactcagtcttagccgtgcaaatgaagaactg

SEQ ID NO: 11552 - DNA, 594 bp, Gossypium hirsutum
  Clone ID: LIB3829-002-Q1-N6-D10
aaatgaaccgttacaatttattgatctttgtatttatagattacaaagtaattttatgcatttacaggataaattgaatgaaaaaattggttaaatccatagaagctgaaggaggcgaaggaaaaccaacacaaaagaacaccccatcccacaccaaaatcacaattttcttattcgtcagccgttaagaaaattttaaaatcactgataacggaatgttgagtttatggccttggtctccaaaaagtccaatcctcccaaagctggcgacagagttgttcattgttgcattaaacattatggtcaagatctgcttctctcccgtgccaataaagaatcgagttggagtgaccttcactgacaccccatacggagcactccagcccactttgtacgtttcattgccagcagtgttggtcactgttctttcaaccgttttagattgctgcagtctagaaatggtgattgatggcaggttgaggtcagcactaccaatcgtcgaattatagacccaacagttttgaccagtgtaattcaagaccactggaccagaaccattgatgccacaaagaaaagacatataatcttcataag

SEQ ID NO: 11553 - DNA, 546 bp, Gossypium hirsutum
  Clone ID: LIB3829-002-Q1-N6-D12
gtgtttttttttttttttttttttttttttttttttttttctttaaacctccaactatttggataaatattgaaagaaaaatatactctcgcaacccgagttcaaataacatgttatcattgggattacataagactcggacgatagggggggtaatgccacaagtgattagcataaaggtagatataagaccattttattccaactcttaaaagtcggactcgtttctgaacaagacttgaagtagacccgaaggagtgcatttgcagagtagggagggatagtaatacttaaacctttgtatgaagagcaataactctcgaaagccaacagtttcatcagtctctacaaaattggagggtaaaccaaagacccatgtttatataaaaccccagtatcaagactagacaatatgctcttttggtgtggactgcggtatctcatgtatatgttacatcctgctgccagtttcacgaataatctgagcggtttttcatatatttcccatttaggataagaagcaccaaattaatgcaatagaacttc

SEQ ID NO: 11554 - DNA, 337 bp, Gossypium hirsutum
  unsure (1)..(337): unsure at all n locations; Clone ID: LIB3829-002-Q1-N6-D2
ncgccttggttttgggttttttataatttttttttttttttttttttttttttttttttttttttttttttttttttttttttttttttttttttttttttgggaaaaaaaaaaactaaaaaaattcctagttttaaatggtccctttttaaaaaaaaaagagaaaaaacttaaaaaccaagtttcaattataaagtggtttagctataaaaaataagggaactaaaatttaaaaaaaataaaaaaattgaaccaaccccaatttaattttgttgagggagttaaaaaaaccattaaatttttaaaagttaaaaaaatatccatcccctttattttc

SEQ ID NO: 11555 - DNA, 435 bp, Gossypium hirsutum
  unsure (1)..(435): unsure at all n locations; Clone ID: LIB3829-002-Q1-N6-D3
aaaagaaaaaagcattatatttatgcaaacgctccagttctactgaaacaacataaacaagactttacacacccaaggcaaacattagtttttattcaacaaggtgccatcttgcatcctanacagtgcctggggtgattggctccacttctgctctagtgttccgatgtatccgatggacatcctcaccagccccggcgatatgccggcaagttccttctcttcggcattcatttcactgctggtgctactgccggaacaagacatgagagtctcgtagtaacccaagctaaccgccatgaacccaaactgagtatagttttgcaagtggtgcatcagcctattggctctttcttcggtttccatgtcaacacaaagaagcccaccatacccatattccttgttggccatggacttcaatagctcatgctgggg

SEQ ID NO: 11556 - DNA, 549 bp, Gossypium hirsutum
  Clone ID: LIB3829-002-Q1-N6-D4
gatagaaattcataatcaaaatggatgacaaacgccacacggttttgccttcatttgtagaacatgaagttattcgaatattatcacaataacacaacaatcaaacaccataatcattggggaagcgtcagagcgcttcagtggagcagccccttagacttcaaatattccacggtttggtcgtagatttcctcgatcccatacttaaagctgaacctttcgctaataagcttctctgaggaaatgatcaacttgggtttggaggggaaatctccaaaatcggtagggactttgaagtcagggtatctttcgttgaggaacttagctagttctggcacactggtattgacagcactgcatatatatcgacccgatgcagattctttttcagccagaaaaacatgggctcggcatacgtcttccacatgtgtgatagagatcgaacctgacagcatctgcattcctttcaaagcatttatgaggaattcattgcctgaaatcaaagatgtagcaaggcctatgctgctggggacaattggggtgagggaa

SEQ ID NO: 11557 - DNA, 452 bp, Gossypium hirsutum
  Clone ID: LIB3829-002-Q1-N6-D5
ggaacaagacaaaggtattttccttattacaaatgaagataaagttcataatccaaatatgggattgacattacattcacaggcccaccaaagttgggaatcagcctgcacaaacattgaccgtgacctaacccctttcttcaacaatctcctatctctgcttttactcagcttaagacctcagattattctcaattcagttcagtacaaaagggatgcccaaatccttgtcaaagaaaatttgacactctaattacaggaaaaattgtgagtggcctacaattggccgtcaataaatttacaaaaacaacgaatatgatgaatggattatccataataaaacatgcaccatggcaataaatccaggtgcgaattcgctgcagctcagactcacataaagtctttcaagttatttcaggtgtcaagaaactgctacagcattcttccccaca

SEQ ID NO: 11558 - DNA, 463 bp, Gossypium hirsutum
  Clone ID: LIB3829-002-Q1-N6-D6
ggagcaaatcttaaatgaaccctgtgatagcaaaatctaggaaaccaaatattcagaaggtgaaacaactggatacaatgataaaactcagctttaataccaaaccttatggtttgcaaatcgatctggtaaacctaccattgccaacaacaatggtaacctcgtgtcctagccagatcacttgcgagtagttactttcggggaaacaagcactggttgattactggcagctttcattgctgcaatctcttctaaccgtttccatgtggcttcccgttttgatttagcctcattgtctcgtgcttcttcttcctgaaacatatgcaagcactcctcaaagagctcggggtcattgtcagagaaaatcttttggacgtttagcgtcaagctctgcactgcaggattccagtggcttcttgcattcctttccaaggaaggaaagataatcggaagtataacatta

SEQ ID NO: 11559 - DNA, 445 bp, Gossypium hirsutum
  Clone ID: LIB3829-002-Q1-N6-D7
gattgaaactttttcccataaagtaacatagagatcaatacatatgcaagaaaattcaggcttataacccgtatttacagtaattcacacctgggagtgacctccatgatcctctaatgtaaaaattcctcctgcaaatgggggaaacctcaatgaacactctcaacatatgcataaattcaaagcaattaacaagagtctcacaatagtaaagactcactatcattaatcccagctaaggccaacaatctagcagccatttctctttcctcagcgtcctgaagcgctctagcaaaagcctcatcactcgaaaaagcagctgggtcgagttcagcactagggttgttatcctcatcaccatcctcagcatgtgcatgcacattaaacgcatcctcatcatcatcgggatcagtcccatcatattcctcttcatcttcatcctcct

SEQ ID NO: 11560 - DNA, 561 bp, Gossypium hirsutum
  Clone ID: LIB3829-002-Q1-N6-D8
atcaaactagttaagaaatacatggtgcaaccatgcaatataaatacaatagaatcatagggtaattttgcataaatatcttggcatgatattataaaacatagggtaattttgcataaatacaatacaatataaatgcagggaagaacaatttgtcacaaaattataaaacatgataaaaaaaaaagaacaggtagcagacaagctatttgtaactttttgttttgcttccaaggcttcctcagctgccttcatcttggcaacagaatcatcttcatcatccctcacgtcgccttctccacatgcgtgtccacaagttcaacaattcattggttcgtaaaggcttgacaagatagtcagcagcaccaagcctcaggcacttaacaacaatagagacctcatcctgggccgacatcataataaccggaatgcgccgcagttcattattccgcataatatgctttagcaacttcattccttttgtcatttggaggtcgacttcagtaagtattatatcaatgtcaggtccctcacattcagtgcatcaatgacctgtctagc

SEQ ID NO: 11561 - DNA, 529 bp, Gossypium hirsutum
  Clone ID: LIB3829-002-Q1-N6-D9
agattcgaactttggatatcattaaaccagagaaaattctctgaagacaaatagaaacaaatgggcgttgattgatgcttctataaaatgtgcgaaatggcaaaccttatttagagatttcatacagtttctgagaattgggacccaaaattctacttaatagtacataaaccttaaaacaaagttgatatctgaaaatagcacatacaggcgattttgacgctccgaagattctccattaggccacaagctatttaagctcccgacatgaacctccccatttggatgatgctggaagtcatgtcaaatgaagtttttccagcaagcacttcttgatgctgcttgtgaatgaatacctatcgaagttgcaaaataataacttggaagaaattaggtttaaagactagttttgacaaagttgaagatcggttctggacggatgtttaaaataagtgccgaaaccatataggaacaagataacgatacaaaaatcttaaaccaaatggaagagaaaaagggtaaaaatgag

SEQ ID NO: 11562 - DNA, 504 bp, Gossypium hirsutum
  Clone ID: LIB3829-002-Q1-N6-E1
ggtttggggtttttttttttttcccaggcaacaacaatttgtattatacgataacaaagcaacgagtccacattgagaaccacaaaaaaaaaaaaacacacacacacacattagaatgcgcgggtctaacacgacagttccgatgaaaacagggggggagcatagccaaatcctcattactagagagacacctagcaattacaccattattacgagaaacattaccttcaataaacatatccacatcatgtcgacacattttgtaacaagcaccaaactgaaagacaaccgtcaacttgagatcaccacgttcaaaggccgccaggaccattcgtgttcttctgctttgccgctgctgccgcctctaattcatgtctagatggaaacttgcactgcagagatgttattgttgatctcaacaaactatctccgactatcaatctcagctttttgacaaaatcatcacgacttatcttctttgccctgaatagttcataatgatta

SEQ ID NO: 11563 - DNA, 542 bp, Gossypium hirsutum
  Clone ID: LIB3829-002-Q1-N6-E10
ggtaacattaataaaaacaaggcaccaatgctataatttcatacttgatacatgcaagtataggaacgttgtggctgcttgttacattcaagcacacaaaaaacatatatatatatatgagcgggaaatgtaaaggaagttaagagcaataatttatatgtttgctgctttgcatttccttttattgaaaggttgatattctacaggctatttctggttcatacttcactaaagcctgagattcctcatccttggttcttcatcgtccatgaaattgttgtatcctttgttcctccagctttcttgtaagggggcaaaggcacgtgcccagactctatctgcttgatgtcatccacaaggttctggtaatgcaacttcacttcctccacggtcttccccccaacagccctggctagcttgtgccaccggtctggtgtatccttgtcgtagatagctaaagcgttctcgaacaacttgttttgctttggcgtccagttcgaacctgacgccattgcagaacagtgataattaacaatcgcgga

SEQ ID NO: 11564 - DNA, 567 bp, Gossypium hirsutum
  Clone ID: LIB3829-002-Q1-N6-E11
aaagctcaaatatgatgcaagcattcattcacgtaagaagacaccttaagtagaagttgaacattttatcttatttcacattgctcactactcataaaaccatgcagagaaactgattctctttttaagttctgggcggcattactaacacccattagctgctataactatggatatatatcatactatctcctgacttttcaccctcaaaaatagcactactgacttcacgtatggcaggtcagtttgttttccgccggtcaagccaatggctatcgagagtagacaggtacttggacttggttgtctaagaaaacaggttactaagctttatccatagttgccttctgattatgctcagggtgtggcaacattttccttggcaagaggagcaacctcctctccttcaatgccaggttcactgccagccaccccgaggctcaacaacatcttctcccacaaccttgatggtcccttccatgaaaaatcttgtgccatacaattctggatcatttctttcagtgcttgagtcccatatgttgcaagagctctcttgacagtttttac

SEQ ID NO: 11565 - DNA, 475 bp, Gossypium hirsutum
  Clone ID: LIB3829-002-Q1-N6-E12
gggaataaccgccaccattttattaccagcttatgccgacacctaaaacattgttacttacagcaaaggattggttggtttttcctatggggaaaatattttgatatctatttctatgcattaatacaaaggggaacagcgtttaaaacagaacaaggcaacaaaactcatagggtactggctgaatatatctcacacctgtctttttaagcaaaaaagactaacaaacatgggtggcagcctcctacaactattatgcacaggattggcgatacagttattatattgacttaccagccatagataggattttccacttgggggggtaaaagatgaaggtctttacaatgttgcttgtcgtaatcccgtgtaccaggtattgccccggtgcaaagtctaagcaactcgtttcctgtaaaacaggagtgggcaaatgctaaacccccattaactatctttgaaaggtttggcaatg

SEQ ID NO: 11566 - DNA, 403 bp, Gossypium hirsutum
  Clone ID: LIB3829-002-Q1-N6-E2
ggaagcaaacccgtagattaacaaaacaaaagctgaaattgtatgtatgcttataatacatacaatatgcatatcagtttgttttgactcacactgaatatgcactgctccgtccactagggggacccaaccccacagtcccactctcggtttccaacttactataggtgcactgggaagagtgaagatgcccttgatgtgtattggttttgctagaattcacatttatagcaatatggccgtttttgttcccaagactaccattttccctagtcatttggaccatcccaataccttcagaatgtgctgcatcttcaataacctgaatgtcttcgttgtagcctttgatcaggaaatctgagcagttcttccagcatccatgatcatatggatttctaaatcg

SEQ ID NO: 11567 - DNA, 516 bp, Gossypium hirsutum
  Clone ID: LIB3829-002-Q1-N6-E3
aaccaaaaggacaagtgaagataaaaagaaaggaacaacacaccatcattgtaaacattctatgccaacaattatttaaagggaagaaggggcatgttgaggttgaacttgaaaaccaaattgattacagcacttatgagcggggtgtgaggtatctgtaacagaaataggaaccagcaaccaggagtggggcggcgaactcgacgactgcagcatatttaggcgtcaggtcatccttgataacgaatgcactcatctctttctttttgggctcctcggttgaaccaacctgttcattattctttaaagtgtgaccctggagaacaccaatctgatacttgaggagcaaattctgagccgacttgctatgtccgatatcgttgaattctttcgtcgcatccttccctgctgattccaacaacacctcttctcctcctggatgttcttccaggaactttgttacgttcagaactcggccatcgatgacaagccaacagtcgttcttggatttgtatc

SEQ ID NO: 11568 - DNA, 513 bp, Gossypium hirsutum
  Clone ID: LIB3829-002-Q1-N6-E4
gggtttttagaaaatgatcgttcaacaatattttggagaaataaaacaagaaaaacaggtaaaatattttatccctcgttgaaaacaggtagcagttcaggctagatctgttccctgacatcaaacgagcatccttatacaacaatgggagaggtagtatcaattttaagccaaaaaactatgaactgaccctccagtagttgcagtagcaggttgaccaatcgcatcattcttcttgatatccgccaagacagtatcaatttcatcattctcaaaagcgaaataaacaggatactgttgcttgttaaaaaaccaaaaatgctcgactcaaggccatgaccaagtcttccagatgcaactgctccccaacttaaagcctcacctccatcagtaacagcaactgtgtgctctgaacccaaagcagccaatttaattgtaagcccgctcaagcattccactttggttggcttatgaactgctttcgcagccttgttttatttgcacataaagaga

SEQ ID NO: 11569 - DNA, 531 bp, Gossypium hirsutum
  Clone ID: LIB3829-002-Q1-N6-E5
attattactattatactatatatatagaattcaggtatatattgctttcagtagcaaattcccgcggttttttttacatgatcgagcaaccttgtgggttttcttcactaacacaatcaccggtacggccgccgtaccgggggtagccgccgccgccgccccagctgtcataaacaggcctaccgtaagtctcgtaacatgggaacggttgttggggtggtccaccataataggtaggtcctccaccatagccattataataaccctcggagcaattatacccaactgcatacgtcatcggcggtaaaggagcaggtgccgcaaccttctgctgcgacgccacctctctaggtatatccggtttcgtctcaccaccgtctttgggctttggcggtttcttcccagcttctttcgccttctcggcttctttaggtttgtcgggtttcttctccggttccttgggcttcgccggcgacttgagctcaatgctcttgatggatccaccacctttgtaacataacttgtccctga

SEQ ID NO: 11570 - DNA, 480 bp, Gossypium hirsutum
  Clone ID: LIB3829-002-Q1-N6-E6
aaacaaatatcttaaattttatttaaaataagaaaacataaacttaacattcagttctagacacagtatctatccaaatgaaagctgtagcattatagatgtcgaatattaggaacataaaatctaaggggcacacactagtggataaaatgcttcaagaaactgacaaaccaaaaggtgtttgcttaggtccttggcttgaggtggccttcattggcaagcttgaagagacgagcctgagctgctgcagcgctgtttgaaccaagtgctgcaacaaaagtctccctgacttgcttagtcgagaatgggaacctattattcaccatggagttgagaaatgaggctgttccttcccggtaaagcgccccaagtccatcagtacgtgtgtttgaaagtgcttggggcaagctcatgcttgttccaagtccaggagcgttggtcacgccaaatgcgttgcctacagtgccccaccaaccaagc

SEQ ID NO: 11571 - DNA, 547 bp, Gossypium hirsutum
  Clone ID: LIB3829-002-Q1-N6-E7
tgtttttgtaactaaagccttctttcataaaccttgatatgataagttgacaaatacagatgaagatcttttcaattacatctaccaatttctaagtattgtcttaaaattgggataccattgaaccttagggttgcaatgatagtatgccgtagggacggttaaaaaaatacaatagggaaaagatgagagttcgtgaagttcaaaactgtcaaaagagggcctcctttaggtctttttctttttcggcagcctctgcagcttcctccacttgaggtagatttggtatgacaacccagagaagaccattagtacacaaccccattgctttggggacagtggattgccactcagcagagaagacaccacgatactgacaaatttgcgtgtggtggtgatggttgtgtttgccaaggagccaaatcgacttatggtaaggaagatgaaattttggccaacagcaccgcagaggcaatagaggagaatatcccaagcagcttctggatgcctgttggaaaactggactggctcgaaaccactaccatgc

SEQ ID NO: 11572 - DNA, 494 bp, Gossypium hirsutum
  Clone ID: LIB3829-002-Q1-N6-E8
cccaaagaaaattacccccttgaaggagcactgtgattccaatattaataatcagtggtactatttggctacaatccggcaaaggcaaaaatttattcaatttgttaggccaagcttcaaagtactggtgggggacatcagtaaacacattggggaggtggcggctattctacagtaactcaccgctcatatgtaccccgtgtgatgaacttccattcatacgtacgatctaacaagaatacgggagtggggcagaatatacaaggaatacaagcgtgctgggctaagattctggttgctcggattttaaaggtgcaccggatgaggatgcacagctcccattttgcaggtaaaggctatttgcaaccatagaatcactaaccaaaccgacatcaacatcgtcgaagttgagcgcccctctgatcttcctgccaccattcaggtgattgttgatagcagttaggtctttcgaagggctctgataggcacgagta

SEQ ID NO: 11573 - DNA, 602 bp, Gossypium hirsutum
  Clone ID: LIB3829-002-Q1-N6-E9
aattctcatttattaatatttgtaagaaactttttgtaagcctgtaataacccaacgcttggccatcaccaaccttatttcatcttcctatatatgaccccattcagaacaagaaatgtacgtgcaattataagtgggtggatattcaacagaaacatgtaaagaaattattgccagtgatgtcatgaattcgtgaatttgacgatgcgctcgcgttaccttacatgattgagcaagcatttgggttttcgtcgctaaaacattcaccgcggctcgtgtaacagtagctatacccgccgccgccgccccagctgtcataaactggcctaccgtaagtcccgtaacatgggcgtaggggtggaggtggtccaccataatagcaaggccccccaccaacgccatgatagcattccgtgcaacagcatccgatggggggataagccattggtggtggaggacaaggttctggaacctttggtggtggtggtggtggtgggttcttttggtttctcaagttccttaggcttttcgggttcttttcggcttttcggttggttcggtttctcggtttctttgggtttttcgggttctttcggtttttc

SEQ ID NO: 11574 - DNA, 424 bp, Gossypium hirsutum
  Clone ID: LIB3829-002-Q1-N6-F1
ggggttttaatataatattttattaatttataatttaatataataaatccaactccaatagatgacaaggaagtctaaagctcctccattttcacaagagctgctgaattaggcatctctcaagatgattctcctcttaaatcatgggggggaaaatcaatgcccaatgctaagtagaatatttattatttgattacaggggaaaaaagtcggaaaattacaacattacaagaaaattgaataccccattttatgcacctttctctcaaagtcaccaccatacgttatgaatttctctacctcatcaacccaccctttctgggttgcctttttcagctcatcctttatttccccatgttagttttactccattttgttggttactacttgttaggcactcctcattttttcttactctcatcat

SEQ ID NO: 11575 - DNA, 471 bp, Gossypium hirsutum
  Clone ID: LIB3829-002-Q1-N6-F10
aggccaataataactcttcattactaaagaactcaaatgatgctaatccaaatttttcagtgcgctgataaggtacaaaggtaaaaatacgttggtcgcggccactgtttttaacaaatacaacataaaatacacagaagattgatgagccttttattgggaataatgatcaaaccaaatttaacccttaccaattaaatattacctgttctctcaaatatctatgatcataagaaatgttgcttctatatcaccagggctgcaagtttccttgatatgttgtctacagatttgtcttcggtttccccctacaggtaatacgccgtgaaacagatcgcatggtcacaaactcctcggcagcggaaggatgtatgccgactgtgctgtcaaattgcgctttagtcgctccacactgcagtgcaacagcgataccctgcataatttcaggtgcctctggaccacacatagatg

SEQ ID NO: 11576 - DNA, 542 bp, Gossypium hirsutum
  Clone ID: LIB3829-002-Q1-N6-F12
ggtttttaaataggtaatatatgaaataacttaacgtagataatatcaaacattttaatatgaataataaaatgaaatgaaataaataaaatataaattgataaaaagggaatcataaatataaaaatttaaatgaagtaaaatttatggggagcgttaaattaaaatctgaataaaattcgggggtttaaaattgcaaagagaggtgaacgccgcctccgttttttccctttctctgccatttcaaatctaaggcctcttcccattcgactccgattcgtgccgaggagaagaaggcttcatcgacgcacccacgaaggtaagggtctccttcctcctctcccttcgtttctgttttgcaaacaataaataaaaagaaaagaaaggaaagaaaaaaaaagaatcgacaaaagataaaaaaaacgagaagaaaaaaaagtaactcttctccaacgccgctcagcaaaccaacgcttggaggccccaatccctcgcccgactccgattgcgacggaatgaacgacgtctcggctaccaggtgc

SEQ ID NO: 11577 - DNA, 540 bp, Gossypium hirsutum
  Clone ID: LIB3829-002-Q1-N6-F2
ggtttttagattcgaactttggatatcattaaaccagagaaaattctctgaagacaaatagaaacaaatgggcgttgattgatgcttctataaaatgtgcgaaatggcaaaccttatttagagatttcatacagtttctgagaatggggacccaaaattctacttaatagtacataaaccttaaaacaaagttgatatctgaaaatagcacatacaggcgattttgacgctccgaagattctccattaggccacaagctatttaagctcccgacatgaacctccccatttggatgatgctggaagtcatgtcaaatgaagtttttccagcaagcacttcttgatgctgcttgtgaatgaatacctatcgaagttgcaaaataataacttggaagaaattaggtttaaagactagttttgacaaagttgaagatcggttctggacggatgtttaaataagttgccgaaaccatataggaacaagataacgatacaaaaatcttaaaccaaatggaagagaaaaaggttaaaaatgagaatg

SEQ ID NO: 11578 - DNA, 465 bp, Gossypium hirsutum
  Clone ID: LIB3829-002-Q1-N6-F3
tgtttttgaagatgaaaaacaaccttcattaattttgtctaaaaataagcaattacacacttcaacttcttcaaacaccattaatgcttcaatcccaacaatcaaacattcaccatatctctagcatagcactacagattattcaggagagtcaaacccattatcgtcttcctctagtgacagaagataacttttagctcacgtggggaagaacagtcgtgcatgagcgaagggctatcatgggcgtaagtaaatgtggccggacaagcatgtttgaaaaactctgaatagctcgaagccctacaggtttgagggctattgtaatggttcctgcagcaaagctcgtcggttccgaaggcagcacaaccactcttacaacccacaactggaccatgaggaggtgacctatactgtaacttgccgggacacgtggccagaatattagccctgcacccaacgacggga

SEQ ID NO: 11579 - DNA, 417 bp, Gossypium hirsutum
  Clone ID: LIB3829-002-Q1-N6-F4
attaaacccaaatttttggggggaaaaaaaatccacccctccccaaaatccatttaccccaaagaagagaaaaaaaaaataatgcccttcaattggggcattacattcattaaaaaaacttttggaaaaaaaaaaaaaccacccaaccccccaatggagcaaaaaaaatgattggcagtcccaaaaaaaaattctaaaagcatggggaaaaaaaaaacaatgcccaagggtgcaaaagggtaaaaccccccaaagcaatcatcaaaaaccccccatatggtcccccccaaaaggtttgccacaaaaaggacagccaactgaaaaaaaaagttttgctctaaaaccggaaagggggttggaaaaaaaacccctggaaaaaaaccacttgaaaaacttttttttgcgggaggaccaaaa

SEQ ID NO: 11580 - DNA, 514 bp, Gossypium hirsutum
  Clone ID: LIB3829-002-Q1-N6-F5
aaaatcaaactctgattatagcactgaacttttttattattctttcaaaggaatacatctaaatttggtttatagtgctccctacacaaaatacaattacatgatcaaaactgcacaccagtctctttatagtaactgtgggacaagaaggcagcaggcaacatcttgtacgaaagaatgcttacaaatcaaataatataccaagaaaagaaacacagtatcagatagtactaggcagacaacaaaggctttcatgaaattttaatgttaagccagtccagatagagaaagtgtacaaaacctgatatttttctcctccatttgcgttctgttccttcgtattttacatcccagttgaggatgtccgatttatcctctgtgcacccaatttcggagcagctgctctatttcctctgcctcttcccgctgataaaggttttgccttggttgtcggagggggagcagcaatagctgcccagggatcatcatcatcaactgctccagctgttttaca

SEQ ID NO: 11581 - DNA, 462 bp, Gossypium hirsutum
  Clone ID: LIB3829-002-Q1-N6-F6
aacaaaaagaacaaatgctacataggaaatcaatttcaatacaaatcagatagaagatttaagagtcaagatcaatgtcaaatcaagcaaacacgacaacagtttgttaatcttaagacgacataggcaaagactctgaagggcgctaaaagaaacacatagatctgattccccaatcaacgaaacaacactatctttaccgtccagcgtaaataaatcattaacaatttgacatcatcggataattatttcttggttttactaccgcctccagcattgttccctccagctgccgcctgcgcagccttctttgccgccttttcttgcaaggcctttgcatctctttcacgacgttgttctggggttaagccatcgtccttggtcttgctgcctttgccgcccgctcgggattgagccctttctcgatctcgatctctctgggtaccacgagtcatgattgat

SEQ ID NO: 11582 - DNA, 488 bp, Gossypium hirsutum
  Clone ID: LIB3829-002-Q1-N6-F7
gtcatccaaatttttgcatcttcacttgcagagcaagaggggatccatccccagttcacctttcatctgctacagagtacagccaacagtcacttttaagacaattttaggataaatcatggagctgtacaaaccaagaaggggatgccaatagatccatccccaatcccacaatgctgtaaagtgattgcatgaaagaagccatccaggtctttccttacatctcatactatcatatgcactgtttcaccagctatcatcaatatattatcatcttgcagcttctctaatatagcaaagatctctgcccttgagtaatggccatcagctccggcattgacaacattctctacttcagaaatagatatggtatccttatggttcacacgcatatgctgaccaaatatagctttaaatgcttcaatcctttcaagagagccaatggcagtaggctgctgggcccttggaggatcatctacttccatagc

SEQ ID NO: 11583 - DNA, 495 bp, Gossypium hirsutum
  Clone ID: LIB3829-002-Q1-N6-F8
gaagataatgcttggtgattcattctattcacattcaaccaaaaacccctaaagctacctactaactaagcactatcaataaactacaaacttaacaaataaagaactaagtgaaacaacattcaaagctaatacccatgatggtttcaatctaagaatcacgtaaacagagggagataaattaggggattcccttagggttttatgagtctaaactgttgacataatctaatcttcatcacctccagatgcctttgaggaagttccagctttcttaggaaggaggagattgtggatgttgggcatcacaccaccgttggcaatcgtgacatctccaagtaatttgcttagctcttcatcgttccttacggctagctgaatatggcgtggcacaattcgggttttcttgttgtctctcgctgcatttccggcaagctcaagaacctcagcggcaagatattcaagaacagcgggaaggtaaaccggagctccggc

SEQ ID NO: 11584 - DNA, 589 bp, Gossypium hirsutum
  Clone ID: LIB3829-002-Q1-N6-F9
acacagcaccccaaaagtaaacaatttgattaaaacaaaaattaaacaaaacaaaagaaaggtaaaccagacaaccttaaataattggatatgtcttcaatgccataatttgcctaatacaatctcctttttctcttacttgtgctaaatacatcaaactgtaatatctgaaagcacacacatatgtatataaagttgttgagtaaagtttcctgtgttttttccaggtcttttgcattagttctggttcttgcatttctccatggctcttggagctagtccgattgcctctgaacctttcattatccgtagcctcctacacgaatcggtgaacatctcccatggaacatcaccaacaagcatccaatcaccatccttgtcttcatatgtcagcacatactcagatccgtggagaagatccatcaaacgactctcactgagaccatcaccgttggaaccgcactgcccgatagtaaagcagctgaacatcttctccaaagctgatgagaattccctatagttattgtaggtcttgaggtcaaccttcctcaagtatggtgcttcatccatgctcacctttacatacaga

SEQ ID NO: 11585 - DNA, 518 bp, Gossypium hirsutum
  Clone ID: LIB3829-002-Q1-N6-G1
ggtttggtgttttttttttttttaccagtgaaaagctggaattttattcatttccacacaaaatttgaaagaaaaaccaaaaattaaaaaactgtgacaaaagctcgagagccccttttcgtcaacacattattatttttgtctatgaagcaggggggagagatgttttcttgctcttactttttgttttcctccacaagagctttttccataaactcccaccttgttttttgctaggaacgattgctaaagatttcactgcagcattgtcttcctggattttctctccacttaaaacagcaatgctgtctggaggtgctaccgtcctgttagaaatgaaagatgaagtcggattgcctttttctttggacttaggagatgcaagatcattcgtttcagcattatcttcagctatcatctgatctagtagagatgatctttggctcatcatcttcttccttggtggagttgggattgcagtcaaagttggactagaaacaatgttgtcgaaaaggact

SEQ ID NO: 11586 - DNA, 612 bp, Gossypium hirsutum
  Clone ID: LIB3829-002-Q1-N6-G10
gggggataatcttgtaggatcttaatgcatgttctaagcaaatggaagaggacattcttgtctgaaaatcaaacttatcattcttacacactctacgcatcttaaacatggcagacgatcagatctagggtcctccatttaaggaaagttaacataatattcctgccttatatagtagctttcatctgacacaatgctaagatgttcttcactaaaactgaaacagcagcaatgaaccatgcacgcccccataacattagactagttgaagagctatctggtcttgctgcagctgagggttataataattggtggcgggttgtaaagcatcgacttggaagtagttccgagagtcatatggttgagaatgtagggcctcgaagttagcacttgaacctccgggcatcaaattcatgctctgctgcttcctctcgttctcagctatcttggctcgaagaagttggttattgttatgcaagtcaatttcccttttctgcatatactcaatttcagcaaacaacagctcattctggtagagtttaaaggggataaattaaaggagaagggaaaatttgtcagtagcaataataattaataatcttaaaggaacta

SEQ ID NO: 11587 - DNA, 588 bp, Gossypium hirsutum
  Clone ID: LIB3829-002-Q1-N6-G11
ctagtaataataatagaaatctgctcaaatttctccctaattttatctttactttacatcgaagggactaaattgcaaatctcttacaaacttttttcacaacggagcagaaaagcatttttcccatctcaacattggaaaactcaaccctcgcccactattcccctaatattacatatcaacccccttgatttttcttttttccttaaagaaaccccacttgtttaacgcataaactgataagcagggaatattatctaatcgcccctaaaattttccagattttcaaatccgtccaccgtcttcaaaaaatatcacggagggcatcggatcttgaaaattccggagatatctaaatagagacgaaacgtatcaagagagagatggagataaaaagagacgcaggcttatttggatccaaatctaaatattcgggtatcagagatcaagccgtagcaaacgcctgagatcccttgtagctgaatcatcgaccggaacctgtttcttcttcgagaaagttggtaaaggaagtgagctcggtgccggagaaacggagatagccgatccggcatacacgtcggattttac

SEQ ID NO: 11588 - DNA, 400 bp, Gossypium hirsutum
  Clone ID: LIB3829-002-Q1-N6-G12
gaaaatcatcttttttttgattaattaattgaaaaccagatgcagcaaaactggactgcaccaatggcgaaatatcatctcccacacaatccccatcaccttattcagaccccatttggtcttcttcaagcagagacctggtggcttttccaccaaaacttaccatccatcccacacgcaaactcctatcaaaatcaaaatctaaccatctaaccacaaatcatcaataaattttagtaaaaacaaacaatcaaaccatcccgttgtatggttcctttttctagtccaactctctccctctctctctctcgtattctctcctcagtacctgtagtgaggaggcttgtaaggaccctcaatggggacgctaatgtagtcagcctgatccttggtgagcttg

SEQ ID NO: 11589 - DNA, 505 bp, Gossypium hirsutum
  Clone ID: LIB3829-002-Q1-N6-G2
ggtttttgaagcaaagagaaaataaattaaaatatcctctctaggttttgctcggatgtttcctatagcaaatttaactgttacagaactattataacatcgtctaaaccttctaaaaataaaaatacatcctgcattattcatagctggggcttttttaaatgtaaagctaaggaaaaacgggagatcagtcatccgcttagtcaatagcaattctcgtatttaacgtacaatgcactatttatgcctcttctcttttcaagtcccctcttcagagctcatcttttaatgcctcttgatgagcagttttttccctgttcttctcaatgaagtcaatgatgtcttcctttgtcctctcaccttcgtatgcacttatgtttccgtccgctgatctaaagtaaacagttgggtagcctctaacatcaaagtttggatccacgatatcatttgcagttgcatcaagttttgcaatcaaaacactagcatctttttcatagtggatagc

SEQ ID NO: 11590 - DNA, 472 bp, Gossypium hirsutum
  Clone ID: LIB3829-002-Q1-N6-G3
aacagcaagcgagaccgaatttatgattgcagttcttaccagttctcatacaggtacattgttagctttacatacaaatcttccagatttcaagaggcagtccaaagccagaacactgcatttatttacaacacccatcaggggggtgattttttacttccaacacaaagccgaattaaaatgctccatagcaaggagacctaatctgctttatttatatattatattgttcatcctcgcaatcaaccagaaccgtgtatgtatactaccagtaccctacgagcgcaaccagggattaagctttaatcatcactggccaagggaacagattttaccaattcacggaacttgaggatgtagaacatttcaagatatcttcgggtctcacgtctctcgagttttgaaacgtacttccagaaaccatatactccagccaatgtcatcagcctttcagaataattttccatgtata

SEQ ID NO: 11591 - DNA, 521 bp, Gossypium hirsutum
  Clone ID: LIB3829-002-Q1-N6-G4
tgtttttgcaaaggaacttattattgccataaatttaatataagttgatacatgaattgaataggcgttaagcttcccgcccacaccatcaaagacctctagtctttaacaataaacacacaaattcatgggatttaaataatctaagggggaaaaaagaagaagataaaactgcaagccaagtggagcacgaccaattacttaaaaagcatgtttgtttaactttaagcagcaacactatggagcacaacagtctcaacagtgaggccaggtccaaacccaaagagcactccccactccaacccttctcctgtggtctgaagcccatcttcccttgatttcttcctcatctcatccaaaataaatagaacacaagcacttgacatgttaccatactctgaaagaacgtgccttgtggctcgtagcttctctggcttcagtgctaacttggcttctacctgatctaatattgctggaccaccaggatgagcaatccaaaaaagggagttccaatcggatat

SEQ ID NO: 11592 - DNA, 556 bp, Gossypium hirsutum
  unsure (1)..(556): unsure at all n locations; Clone ID: LIB3829-002-Q1-N6-G5
tgttttttttttttttttttaaagggaaaaaaagagtaagtgtcattaaagcatacattggaggggnggaaaaaaccagtggcctcacctaaacatcaacagctctccacaagccaacattttgtacagtggcggttatcatataaactgggctcaccattttttaaatttttacacccttaaaaactcgtataatcattcgatctcctctgcatgtagcattctgttgtgtccgacaacagaaacctcgggtttgctcgattctatgtatacaatcttaagctacaaaatgtacagtttccggtacaagcaacaacttcttttatttccatacagatcttacctgtctaaaaagataggtagaagcatagctctaagataggggaagctctcgtaatagcttctgttagctgtacaaacacattatttcctacaccaactaagcagtagggtgtggagattgagcagcaattctcctttctccaacagcaacaagtttctctacacgcgcaacaatatgttttccgtaagtgtacttcttcaatgcatttaaatg

SEQ ID NO: 11593 - DNA, 556 bp, Gossypium hirsutum
  Clone ID: LIB3829-002-Q1-N6-G6
ccggccaaagttttttaactttcaagagcaaatagagctaaatttgtttaaaaataaacacagaaatcttaaattaaaataatctattaactctgaaattggaataactgattaatttttttctgcataaagaaactacgggggaagcccaggaaaatgataattgataataactatgatgatgatgatgatgataattttgatttttgatttttggttcgctccatttgagggaacttaggacctaaccaagatgcccgtccacctcctcattttggcgtcacctatcgccatagcctcctccaccccacgtgaagccttctcccaacctttttgctacttttatttatttttgcattttggttagatcccgtattacatgcatgctgattttagttccagtgttcagggcaataccaatgaagacttggagcttcttcatctgagaagaacttgcaagcttcatctgcactaaagaaattttgttcttccatcttcacaaattgctggggttggaggcacttcatagaagaagatgaagagttgaaattgagtg

SEQ ID NO: 11594 - DNA, 465 bp, Gossypium hirsutum
  Clone ID: LIB3829-002-Q1-N6-G7
aacatccacaaccaataaaataaaataaaaaatcataaatgaacgtgcctgtctgtagccaaattctgatataaaaattactaaatgcaaaggggatccaaaatttatggggtgccgtgggggccagtgcgtactacaaagcatacacactactgatgatggaaataaatgttataaataaataacaagggttcttcccaatttattttcctgcaatcgagaatctcaatcagaagaggtagaaaatttgttagcttttcaaccatggaaatgatgcttcgaggaaagccgaggaaaacttgaataattgaaattggcagcaaaagcgaaggtgagagtgaactcatcgctcctcgtccagaatagggtccctaggaccagcagttccaaggtaccctgatacagtctcaccaaccactgaaacagagcgcttcaaccaagttgtactgggtgtcaaccacccat

SEQ ID NO: 11595 - DNA, 428 bp, Gossypium hirsutum
  Clone ID: LIB3829-002-Q1-N6-G8
ggatcaagattgggcattgttttagcagctcctttaccttcctcccttttccgtccccggaaggggaatcaaattggaggacctgatccaatctgcctatgactttacccgggtgtgggaaaagaggagtagcctccaataatgaatcgatctcctcgcgaacaggtgcagaaggcattgcaatcccccttggacaaatcatccgaaacaaaaaaaaaatcaatcaacaatgcaaaacacaccctagctagaattgaacttacaacaaaatctagttgatttggccaaacaaacccaactggttacttaacagaaagaaaagagcttgagattggcccatgaccaaaagaaaacaaacgttgaaaccggtagagaaaattgaatctaagaaaggccattttaggaggagaaaaaaacggtcattcaaa

SEQ ID NO: 11596 - DNA, 393 bp, Gossypium hirsutum
  Clone ID: LIB3829-002-Q1-N6-H1
ggggttttagacggcaacaagagccatgaaagactgcttgttttcattcaagtgatagttcataaggatgatacaagcaaagaggtcttggaatggggctgtcgagttgctgccactaatggccgtccgccatatcctcagtaatcgggggggcagtggcagtgccttcaacatggtaacacaaacatatatctgcgaatatagaaatataggagctgcgttttctttcacatcgaaaaccaagcacacgacatatcaagcaaacataccatcatacaatgctgctaaagacagtatttttaaacatggtttcatttacagaacctaatccaaaaccatcctggattcaatcatcgtcctcactttcttcatcatcctttgatgattcggact

SEQ ID NO: 11597 - DNA, 543 bp, Gossypium hirsutum
  Clone ID: LIB3829-002-Q1-N6-H10
ggtttgggttttttttttttttttttttttttttttttttttttttttttttttttttttttttttttttttttttttttttttttttttttttttttttttttttttttttttgggaaaaaaaatttttttaaaaaaaaaaaaaaggtgggggggggaaaattattctcccaaaaaaaaaaaaaaaaccccaaaaaaaaaaaccttttttttttttttttttttaaaaaaaaaaaaagttttatatagggcctttttaaaaccggaaaagggggtttaaaggggcaaaaaatttaaaaaatttggggaaaaaaaatttaggttttgaccctggggggggaaaaaaaaaaaaaaaaaatttttcttaaaactcaaaaaaaaatttgtttttaaaaacaatacccggaaaaatttaaacaaaagccttttaaaaatcggaaaaaagaaaaaagggggggaaaaaatgggcaaaatccaacccacagctttttgaaaaattttgggaaaaaaccagtaaatattaagcggggggtttataagtgc

SEQ ID NO: 11598 - DNA, 527 bp, Gossypium hirsutum
  Clone ID: LIB3829-002-Q1-N6-H11
gtgttttttatggcaacaacaaatgcttgtttttgttgatttaaaactaaataaggcagatgatggtcagagttggaatccctcttacaagcaaacagcaccaccacattatttcaaagagtgctgcgcagtgcttacagaattaaaggcgggaaagttaatattaaatccatgacacattacacacattttgtttcatcaaataacatgcaaacagatgataaaatgtgctgatgatgttcttatgaaggaatgcggacaccatgcatgcatgcatttgccacttcatgcttttgcttctattttcctttatgtatcatagtcatggtagccatcccgtcatgtaattattcacactcgggcccccggtgaccgccgatatcgtatcgggctgatatccgatttgtaacgttggctcgcagtccaatggatggaagaagacatcaccctgaggctgatgggttggttgtcggccgtagccgacgtcatcggcatttggattcagctggagtgaatgtacttggtag

SEQ ID NO: 11599 - DNA, 483 bp, Gossypium hirsutum
  Clone ID: LIB3829-002-Q1-N6-H12
ggtgtttttttttttttttttttttttttttttttttttttttttttttttttttttttttttttttttttttttttatataaacaaaagcccaattaaaaattaaaacccacgaacgacctaattacaaaattaaaaatccaaagggggggggtaaattaaacaaaggcaaatgcaagactcagcggtcggggggccacctttaagtccctcgcagtacaaaatcgtttaaaggtggggattaccaaaaacagaagcgatcacctttttagttcaaaagcaaaggaccaatcacccttggccaaaaaatcctaattttggtaaaattttggggggttggacccttttttgaaccgttaattttgtaaaattttaggaatagttaaacgggtaaaagggtttggatcaaaaataccctaatcaaattccttgccccagatgaaaaccttgggggatagcggaaagaagccccccaaatttttt

SEQ ID NO: 11600 - DNA, 435 bp, Gossypium hirsutum
  Clone ID: LIB3829-002-Q1-N6-H2
ggtgtttttttaaattgctgaagaattaaaaccactattatttcacaaaggatgccatcacagatgaaccaaaggtgttcattttgctcagcttgttccaacactcatttatttatcaacaaggaacaaacttatcgtacataaaaccacagattgcttactcaacttttatattctcattgatagtctcatagcaggctatacggtaacatgggcaggaccaaacactcatactagttcatctactggcgtacaacaagcagtccttttgctaactccaaggcttttgggcgtccgaaaaacttctccacgattcctagtgcaaactccatggaagttccagggcccctgctttgaatgaggttgccatccaccactactttgttggcaatatgactttgatctgatagcttgtcgcacattgcagggtaagct

SEQ ID NO: 11601 - DNA, 433 bp, Gossypium hirsutum
  Clone ID: LIB3829-002-Q1-N6-H4
aaaagagaatgaaaaagtcagtgtattcccatctctatgttgttttcacagtgttttgatgtctagtatctatcaaaagaattcaccacttgtgtatctcatcctccacataccccaatatcttttgaattccaacgttgacggctgaatgtattataaatcacgtgtatagctccgaaatgttccaacaagccagcaaactccaagtcaatctattagctgtgatttcgtaccaccaaacctatgactcactgatgttgttagctgccatattcgaagcaaactcgttagatactggcatgttccggacatgctcgaggagtcttgtaagttcccgatgaacatgattgaatcgttcctttgtaaaaagtgattcagtcaaaagagttgcagctagagaatgaaagacttgagcatactcatcactgttaca

SEQ ID NO: 11602 - DNA, 494 bp, Gossypium hirsutum
  Clone ID: LIB3829-002-Q1-N6-H5
ggtttttaatagaaatttatttcattaacaaagcaagcttttacaagataatttattctctcagcatataatataaaactccatataaagaactcttttctcttttttttttttttgagagagagagagttctatataggcactctgggtggaccgggaaaggtagcttaagtaggcacataatataacacatagtaggacaaaacattagagttttgatccttggatgggcaaatatacagcagcaacatttccttaagcatccaaatgaatcatgcatctcagacctataccctggagcatgtagtcgaatgccttgttaatatcggcaaaaggcacagagtgtgtgatgaacttgtccatatccagccccagctccttgttcaaatatttgtcgacaaccatgggaatatcagtgcgtggtttatagttgccataaaaagcacccttaaaggtcctctcacttagtagattcattggatgagttttgaatg

SEQ ID NO: 11603 - DNA, 527 bp, Gossypium hirsutum
  Clone ID: LIB3829-002-Q1-N6-H6
gataaaacactgcaaagcaacatttcaataacataaatataataatctgaccaaccagtcttgtaaactatttcaatgctagttctcattttcattgaaactattcccctaatcataaagagtgaaaacatggtggagatggctaaatgaaaagagaaatagggtccatgccattccactaattttacttccaaaactccaaacatcatcaaatgaaataaaaatgtcaaaaacaccgaaaacaaaactgatacaaccactccgcagaaactaaaatttactgcgacacacccaaccacttggagaagttctcgaactctgtgtaatcgctgtcggagatcatagtttgataccatgctttgccagctgacttgattgcggttgcttcctccttagatataggcttcctcttcttgtcaagcttctccttcttggccttaacacgctgtgcctcagccaaaagagacatccttctagcagtctttgcgtaagggttcaacttcagcatagcattcaagttcttgagt

SEQ ID NO: 11604 - DNA, 361 bp, Gossypium hirsutum
  Clone ID: LIB3829-002-Q1-N6-H7
aaaacctgtaaaatagacaattgctaaatttcccggggcaaagtaatctcttacataaactttatgccctactacgggcgctggtcttaaaatgccaccacttggtctcatgtcattattacccatgagcagcttttcctagtcttcttctcaaaatcttgactcccatgtacctgcccatcataaaaacagggccctgaggatttgttccaggggattcattaaatgtggagccatccacaattcggagtctgttggtgccaaaaactttgagggcaggatccaccactttgccgacgtggcaccctccatggtaatgccaaattgggatcacagtgtctttgcaaaactgctctaggga

SEQ ID NO: 11605 - DNA, 545 bp, Gossypium hirsutum
  Clone ID: LIB3829-002-Q1-N6-H8
ggtttttgagacaattcttttttcatttttccatttatttccagaaaatggtccaatacaatgtagtcctttctttctagcaaaaacaatgagacagttttgttgaccctttatcaccaaaaccaccacatagctctcaatttatgagggcgtggaagccttccaacttaaacatcaagactcggataatcttttttctcacagatgtcgaggaaatgaaaatagattagatgaaaacacttacaatcggtgtactgttaggtggaataaccttaataatccatgccacccataccgccaggcattgccggaacatccttctcatcctttggaagttcgactacaacagcttcagtagttgtcatcaatgacgacacgcttgcagcatccaccaaagcagttctaattactttcaatggatcaataataccagcctttaccatatcaacatattcacctttggctgcatcatagccaagatcagggttatcctgctccaacagcttaccaacaatgacagctccctcaactccagcatttgaagc

SEQ ID NO: 11606 - DNA, 415 bp, Gossypium hirsutum
  Clone ID: LIB3829-002-Q1-N6-H9
attggggaaaattttccccattaatatatttttattataattgataatatacatacatattttaaagaaaagttaacagttactagctgcaaaaataacaagaagttaataattatggtgcaaatccaggtgaaatatgatatgattgtagaaaccccagatgaaaaatagcagggttttgttagggagcaggaaagttgtggttgctgcattgatggatgggcttctttcccaaatttataacttaagggcacatattttaagaaggacagctggattgtttccaaaatctggcagggagtccttgttgagggactgggaatgggccatattggatcccactttcagaacccaccacctcccacctgaattttgttactagatgatggatcaaaatgagagcctccagcttggc

SEQ ID NO: 11607 - DNA, 629 bp, Gossypium hirsutum
  unsure (1)..(629): unsure at all n locations; Clone ID: LIB3829-011-Q6-K6-A1
ctttcagctcagctttttcagacttttgatttcccctggctgctaaagctttttcaagaagtataactcctttggtgcttttgttcatatttttaagctttgcacaaggtaaagaaatcatggttggtggcaaaacaggcgcttggaagataccttcttctgaatcagattctctcaacaaatgggctgaaaaagctcgtttccaaatcggcgactctctcgtgtggaaatatgatggtggtaaagactcggtgctccaagtgagtaaggaggattatacaagttgcaatacgtcgaacccgattgccgagtacaaagatgggaacaccaaggtgaagcttgaaaagtcaggaccatatttcttcatgagtggagcaaagggccactgcgagcaaggccagaagatgattgtggttgtgatgtntnaaaagcataggtacattggaatctctccagcaccttcgccggttgattttgaaggtccggccgttgctccaacaagcggagttgcagggttgaaggctggtttgttggtgacagtgggggttttggggttgttttgagtttgatatccattagattattttatatgtagttgagttgctatagaaatagcaaattcattttta

SEQ ID NO: 11608 - DNA, 427 bp, Gossypium hirsutum
  unsure (1)..(427): unsure at all n locations; Clone ID: LIB3829-011-Q6-K6-A2
aagaagtacctttgnatatnntatgcaggcagnaaaccatatggatgaagaaatctacaacatgttggagcagaaggctaaagacttggggtatgatgtgagcaaactgcataagacaccacaaagtgattctacaccagaaggagagcatgtcccccaaagaagggttctggtggataaaatccctgttcgggaagtaggaaaagatgaatcatggtgaagtgtacaaaaataaatatattggcatcaaaatccagtttgtgtctttttttattgaagtcgattctcatcttgtgctagtggtagtgtcctaaagagagacattgttgtatgaatgtaagcttgtgtattgttatatccatacctgaagtacagttttaatggttatggatggtggtggaacatgtgtattgatgaatattgatcc

SEQ ID NO: 11609 - DNA, 626 bp, Gossypium hirsutum
  unsure (1)..(626): unsure at all n locations; Clone ID: LIB3829-011-Q6-K6-A3
cggggttcctcctctagggaccgcacaanaattgtggaattccaatttgcatgcaggacgtttacttttctggcacagtgccattctataatgttccaaatagtgatggagaattatttagcaatcatatgaatacatcttgtgatgttgatggtgctatcactggaatcaggaccaggtctcgcccttctcgaagtcaactggactctgagaaccccttggcacagggtaatgcatcaagaagactacggctgcagtgtaaacttcaggtccactcacttcactgtgacaatgcaatatataaccggagtgatgtagagatagaagatgattcaaaatcagttgttacaaaggtaagaagtttttgactgatgtagtataaaaccgctatcaaatccagatatgtatccaaccttattaagttgtccttgcaggaggaaaaagtagtggaaaaggatatcactgtcagttgtaatgctgatttcggcattgttttgggttcaaagaccattgtttcagctcgtaaagagacttcatctcggtggtcaatggtgttttcagtgcatcactcacgtaaaccatttgctgttggttttcgggtagctgtgatgttaatcttgtttata

SEQ ID NO: 11610 - DNA, 610 bp, Gossypium hirsutum
  unsure (1)..(610): unsure at all n locations; Clone ID: LIB3829-011-Q6-K6-A4
tttctggnaaacatctggnggatcaagtgagaaatctgagcctagtgcatcagtagaattgaattcccgcaactttgatgaattggtgctcaaaagtaaagaactttggattgtggagtttttcgctccttggtgtggacactgtaaaagacttgctcctgagtggaagagggctgctaataacttgaaggggaaggtgaagcttggtcatgttgactgcgattctgagaagtctctcatgagcaggttcaatgtgcaagggttccctaccatcttagtatttggtgctgacaaagacagcccagttccttatgagggtgctagaaccgcctctgctattgaatcatttgctctagagcaactagaaacaaatgtcggaccggctgaagtgacagagctgactggcccagatgtgatggaagagaaatgtagttcagctgccatatgcttcgttgctttcttgcctgacattctagactcgaaggctgaaggaaggaacaagtacttggatatgttattgtcagttgcagagaaatttaaaaggagtccttacagctatgtttgggctgctgctggtaagcaaccggatctcgaaaaccgtgttagtgtt

SEQ ID NO: 11611 - DNA, 603 bp, Gossypium hirsutum
  Clone ID: LIB3829-011-Q6-K6-A5
gcgttcgtggaaactaatggcgctaccttttgttcacaacactgctgtcattgaaggactcttgaagaaatcaatggcctccagttcgtgaagccaaaacacttacaaactgggatgggaacactccattgaaactggacctcctacttatgcctaaagttgctgtcaattatttaagcttgagcgctaccactctggcttagagattacatggacctaaacacaaatatcatccctcctgcatattatgctagtggatgactactttatcctttcaaaagcaaactttactacacattctactattcagcacttgatatattctgtaccatgagaaggggtgccaaggagttcatgttactctctacttagatggccagcttaagcttggcccatatgttgagtgggatgcttatgtgcctgatacaaccaactttcttaataagtttgactattctgaaagcgctgaacatgatgcaagattttatccacagattcggtaagtctacccaaatcttaaaaatggatctataataccaggttattcaatgattcggccagatcttcatggacctggacagtctgcctgtgattttttaatac

SEQ ID NO: 11612 - DNA, 595 bp, Gossypium hirsutum
  unsure (1)..(595): unsure at all n locations; Clone ID: LIB3829-011-Q6-K6-A6
tttcgctaaactaanattttaagttaacgaagctttgggtcgtttcgaatatggaaacttagaaagtaaagaaggagccggaggaaggaaaggtggtggcccgaagaagaagcccgtttcaaggtctgtcaaagctggtctccagttccctgttggtaggatcggccgttatttgaagaaaggaaggtattcgcagcgggtcggaaccggagccccggtttacttggctgctgttcttgagtacttggccgctgaggttctggaattggctgggaacgctgcacgtgacaacaagaaaaacaggatcatcccaaggcacgttctactcgccgtgaggaacgacgaagaattagggaagcttctcgccggcgtaaccatcgctcacggtggtgtgttgccgaacatcaacccagttcttttgccgaagaagactgaaaaggccgccggcaaagaacccaaatctccatcaaaggccaccaagtctcctaagaaagcttaatttgttttaacaaaactagattcacagggctttatttttcttagttgtatgtccttttgggtgattgttttcacagtgtaggggaagactgcctta

SEQ ID NO: 11613 - DNA, 622 bp, Gossypium hirsutum
  unsure (1)..(622): unsure at all n locations; Clone ID: LIB3829-011-Q6-K6-B1
aaacatttgggcagaagaaaagaaggaaactgaanacgcgagagggatcgagaagtcaaatggatctcgcttttttttaggcttttccccttgtaacctcgactttctgcagttcttgagcaacagacccaacatttgatgtgctctagaccgcatggaccagtacgagaaagttgaaaagattggtgaagggacttatggcgttgtttataaggctcgtgatcgcatcaccaatgaaacaattgctttgaaaaagattcgcttggagcaggaagatgagggtgtacctagcactgctattagagaaatttctctcttgaaggaaatgcagcatggaaatatcgttaggttgcaggatgtagtgcacagtgagaagcgtttatatttggtttttgaatatttggacttggatttgaagaagcacatggattcatgtccagaattcgggaaagatccacgaataataaaaacattcctttatcaaattctccgtggcattgcttattgtcactctcatagggttcttcaccgagatctaaaaccacaaaatctgctgatagatccttgtactaatgcactaaagcttgctgattttggactggcccgaacatttggtattcct

SEQ ID NO: 11614 - DNA, 497 bp, Gossypium hirsutum
  Clone ID: LIB3829-011-Q6-K6-B2
ttcagagggaagaacacattgcattttgcatgtggatatggcgaggtgaaatgtgcccaagtccttattgaagctggagcaaaagtggatgctttggacaagaataagaatactgcacttcattatgcagctggttatggaaggaaagactgtgtggcccttttacttgagaacggtgctgctgtcacactccaaaacatggatggcaagactgctatagatgtagccaagctcaacaaccagcatgaggtgcttaagttactggagaaggatgctttcctgtgagttggagtgtcggcagcagccatgtgtattgtgtgggtcctagcatgtgataggccatttcactgtgctattagacaaaaacaaatttgctttcatttcgtatgcgggttatgatcacacagtcacggctcgactagttgtccatgctgtctggttgctacatgtagcattttttttccctctctaaatattagttttacaattgattttct

SEQ ID NO: 11615 - DNA, 606 bp, Gossypium hirsutum
  unsure (1)..(606): unsure at all n locations; Clone ID: LIB3829-011-Q6-K6-B3
gtcatcttaaaacttgttccaanagcttgaagagtgcagggcatttgaattgctcaaatcaacagctgatcgagccaattacctgatgaccaagcaggcaaagattgtggcatatgacatgtacccatgcagccctaaagagaaaagatttcttcaacttggtttcaaatatgacaacttgttgatggaagaaagtgctcaaattctcgagattgaaactttcatcccaatgttgcttcaaaggcaggaggatggttatgcacgacttaaacgctgcatattgattggtgatcatcaccagctgcctcctgttgtgaaaaatatggctttccaaaagtatagccatatggatcaaagtttgtttaccagatttgttcgactgggtattccttacattgagcttaatgcccagggtagagccaggccaagtatagcccaactttacaactggaggtaccgggatttgggggaccttccttcggtgaaagaggaagctatattctatagagcaaatgctggattttcctatgattaccaattagtggatgtacctgactaccatgggagaggtgagtctgctccctctccttggttctatcaaaatga

SEQ ID NO: 11616 - DNA, 605 bp, Gossypium hirsutum
  unsure (1)..(605): unsure at all n locations; Clone ID: LIB3829-011-Q6-K6-B4
gcgtttcnaaaaaacaaaaatctctgnaaaccccctctccgtcctttggcctgagttccaacaacggccgatgaccaccgttcacgcgcctcacgcgccatcgtacacggtggtcggaggttctaaatatctcccctttccaggcaaatcacaggtataatttctcctctttatttttaaaagtattttcctgtattacaactcaaaaatgaactgttttctctttgcttttttaaaatctgtttctggatcgtttgttgtattaaaaatacatgtatgtatataataaaaaagaaagaaaataatagagaataaaaatagtaaaacctttgaatctgctgttttcgtattgaacctatgtattttttattgcttctttgtgtgtatttttcagaacataacttttacaagtgaaatgaaaggctttatagccttggtcccttacatattctgggaaagaaatctaagatttctttccattctatgtcttctgtatatttgattgatatattgtgattttcttgccatttctgctttgctttttttcgcgtatcttctgtttgtttccttttcttgcaggtattatcgaggaatccgacagtgac

SEQ ID NO: 11617 - DNA, 605 bp, Gossypium hirsutum
  unsure (1)..(605): unsure at all n locations; Clone ID: LIB3829-011-Q6-K6-B5
tcgcaagtctgccccaanaaccctgcaaattttgatgttgataatgtccgtgtgtcaaagcttgttggagggggtttgcataattgtacaattgttagagggatggttttaaaaggtgatgctgtgggaagtataaagcgtatggagaaggcaaaggtggctgtgtttgccagtggcgttgattcatctgccactgaaacaaaaggaactgtattgattcactcagctgagcagctagagaattattctaaaactgaagaagctaaggttgaggaactcatcaaagcagttgctgattctggtgccaaagttattgtcagtggaggagctgttggtgaaatggcgttacatttctgtgaacgttacaagttaatggtcttgaaaatcagctcaaaatttgaactgaggcgtttttgccgcactacaggaacttctgctcttttaaaactcagccaaccaaagccggatgatttgggatttattgattcaatttcagtcgaggaaattggtggttctcgggtcactgttgtgagaagcgaagaagtggtaacaagattgccactgtggttctacgaggaagtactgatagtatattggatgatctt

SEQ ID NO: 11618 - DNA, 586 bp, Gossypium hirsutum
  unsure (1)..(586): unsure at all n locations; Clone ID: LIB3829-011-Q6-K6-B6
gctttcgtttggnctggccaagcttggntcagacaaagcaggcggacatgtttcaactcgagtattgggcacccaggnatacgttgctcctgaattgctttaactggacatctaactacaaaatcagatgtgtatagttatggtgttgttcttttggagttgcttacaggcagagtaccagttgatgcaaagagacctcatggggaaggtgttcttgtatcatgggctttgcctcagttaacagatagggagaaggtcgtccagataatggatccaacactagaaggtcaatactcaatgaaagaagtgattcaggttgcagctattgctgctatgtgtgtgcaaccagaagctgactacaggccattgatggcagatgttgtccagtcgctggttccgctggtgaaaactcacaggtcaacagccaatgttggtggctgctcgaccttccagtagtgcaaagtctcctacatcccgatatacattccctgttaggtagggttatgagaataatcaagaccgaagttcaaatgtccttagctgaacttagagatgaaagtctagactgctataatatggttggctc

SEQ ID NO: 11619 - DNA, 622 bp, Gossypium hirsutum
  Clone ID: LIB3829-011-Q6-K6-C1
atgtttttcatcgggatctaaagccgaaaaattcttagccaatgctgattgcaaactgaagatctgtgattttgggcttgcaagagtagcttttaatgacacccccactgcaatattctggacggactatgttgcaacaagatggtacagggctccggaattgtgtggatcctttttctccaagtataccccagcaatagatatatggagcattgggtgcatctttgctgaacttctaacagggaaacctctgtttcctggaaaaaatgttgtccatcaattggatctgatgactgatcttttgggaacaccatctgctgaagccattgctagggtgcgtaatgagaaagctcggagatacttgagcagcatgcgaaagaaaaagccaattcctctctcccacaagttccctaatgcagatcctcttgctgttcttttgttagaaaggatgcttgcttttgaacccaaggatcgacctagtgctgaagaggccctagctgatccatatttcaaggggttggccaaagttgaaagggagccttccgcacaaccagttaccaagatgggaatttgagtttgagagaacgtagattacaaaggaagatgttagggagctcatata

SEQ ID NO: 11620 - DNA, 632 bp, Gossypium hirsutum
  Clone ID: LIB3829-011-Q6-K6-C2
gttttcttgagaattaccaacaaaagggaagagggtatcatgatttagcatctctctttcatacaattagtctcggggatgtaattaagttctctttgtcaccatccaaaaccaaggatcgtttgtcaaccaatgtctctggtgtcccccttgatgataaaaacttgattattaaagcccttaacctctacaggaagaaaactggcagttccaacttcttttgggttcatcttgataaaaaggtgcctactggggcagggcttggtggtggaagcagcaatgcagcaaccgcactttgggccgctaatcagttcaatggttctgttgcaactgaaaaggagctccagcaatggtcgagcgagataggttcagatattccattctttttctcacatggagctgcttattgtactggtcgaggtgagtttgttcaagatatatcccatcctcttccatcagacatcccaatggttcttataaagcctagagaggcatgttcgacagccgaagtttacaagcgtcttcgactagatcaaacaagtaatgttgatcctttgacattgctggagaagatatcaaggaatggaatatctcaagatgtttgcattaatgatttagaacctcctgctttt

SEQ ID NO: 11621 - DNA, 628 bp, Gossypium hirsutum
  Clone ID: LIB3829-011-Q6-K6-C3
gctttcgatcaaggcaaccctgtcaacctcacactttgtttcgacaagttctcatttcagcagccatggagcagacactaaggccaatcttgcacaggttggtgccaggaatcaagccatgactcacaatggtttgcggtctttgaacaaggtcgataggttgcggatgaggaccaccaacgcaaaggctgtcgttacgaaagctatgaaacaggcagattacaggcctttgggaaaaattatttgcggaatagggatgaatatagtgtttgtgtcagctgagtgtggcccctggagcaaaactggtggactcggtgatgtcctcggtggacttcctcccgcaatggctgcctaaggacaccgtgttatgacagtgtgtcctcgctatgatcagtacaaggatgcatgggacacaagtgtgttagttgatctaaaagtcggagacaaagttgtaactgttcggttcttccactgctacaaacgtggagttgatcgtgtctttgtcgatcaccccatgttccttgagaaggtatggggcaaaacggcttccaaaatctatggccccagagcaggtttggactacgaagacaatcaactgcggttcagcttgttatgccaggctgctttg

SEQ ID NO: 11622 - DNA, 541 bp, Gossypium hirsutum
  unsure (1)..(541): unsure at all n locations; Clone ID: LIB3829-011-Q6-K6-C4
ggtggttgacaagnagggtcggtgcgctgcaggcacttcaactggtgggctcatgaacaagatgtcaggaaggatcggtgactcgcccattataggtgcagggacctacgcatgtgagttgtgcggggtgtcgtgcacaggggaaggagaagcaatcatccgaagcaccctggcaagggatgtagctgcggttatggagtacaaagggttgaatcttcatgaggcagtggattatgtgataaagaacaggttgaacgaaggtaaagcaggcctaattgctgtgtcgaagaatggtgaggtggcttgtgggtttaacaccactgggatgtttaggggctgcgccaccgagggtgggtttatggaggttggtgtctggtaaaataaaatgttattattaggattgcattacaattttttcttgtggtgttcccccaagagggtttgcttttttcgtgatttcagtcatgtgcttcacgcacgtgttttcttttttgggtttcatccatgtgattgagatgtcgaataaatatttagtatcttc

SEQ ID NO: 11623 - DNA, 557 bp, Gossypium hirsutum
  Clone ID: LIB3829-011-Q6-K6-C5
gaactactggtggtaactcgcaatgcgtggtttgttcttggagatcatctaggcctgcgccgccttgtgccgacttgatgcggatatctaagctacgtaaatctgagaacgctcttgctgtgcttgctcgggtactgcgtgcacagctcgtactcgctggttcagacgtaacaagatgtggttgccaggatctaaaggtgacgctagattcaagcatggacataaagcgcttatccaaaagtgtctgtcctagatcaccccacccttgaaatttatgtaggtactgggcttacacctgttactcaacaacccctacctctcaaacaaatggaggaagaatgcattcctttgtttcaacccaaatcagcagggcaccgaagaacttctggaaaggtatggaaattgaagagcacatgtctttcgcgatttaaagctttggactatatacctatgaagctcgatgggaacttcgagagcactcttggtgatctatactcggaagtttccaacctctcacgtcaactgaaagacctcttgatatgaattgctttcgaacc

SEQ ID NO: 11624 - DNA, 440 bp, Gossypium hirsutum
  unsure (1)..(440): unsure at all n locations; Clone ID: LIB3829-011-Q6-K6-C6
gnaaagttnagcgaaaaagcgatggnanaccatcacggagaggctgtcggctctcgataatctctatttcccacgcgcccttcaatcttcggcctccgatccctccaatcgcaaatccatcctccacgacctcctttcccgtgacgtccctgtcttcttagaaagaatgggtctcagctgactagtgatgagctccatgaatttgatgcacttaacgatgattatgaggttaattggcacttaaagcatcttagaagcaagatgagcccgacttcagaagaattgaaattgaggtccgtgactgtcaagaatcggaggcgggcttacttgaataaattggtgtgtgatgggcattacttttcggaggatgcgatgagggaaagggagccttatttgcatcatgaatatttagggaggtttcaggatttaagtgggaggag

SEQ ID NO: 11625 - DNA, 619 bp, Gossypium hirsutum
  Clone ID: LIB3829-011-Q6-K6-D1
gcttcttcctgcttaatggagcgagaagcttcactctcattaggggggtaaccccaagagggttgatttttttgggtcaggttttcatgggaaacacttatctaatttgggtttagcctttagtgtgaggatctccaggccaggaacaacaatggctccaaagtgcggcttatcagcatcaaggccagcttcacaaccacgattcatacaacacaaaaaagaggctttttggttctacaggttcctctcaattatatatgaccatgtgataaaccctggtcactggactgaagacatgaggaatgatgcacttgagccagccgatctcaacaacaggaacatgattgttgtagatgttggtggtggaactggtttcactactttgggtatcgttaagcatgtggatgctaagaatgttacaattctcgaccaatctccgcaccagcttgccaaggctaagcaaaaggagcctttgaaggagtgcaggataattgaaggtgatgcagaagatctccccttccgtactgattatgccgacagatatgtgtctgctggcagcatagagtactggccagacccacaacggggcatcaaggaagcatatagggtattgaaacta

SEQ ID NO: 11626 - DNA, 297 bp, Gossypium hirsutum
  unsure (1)..(297): unsure at all n locations; Clone ID: LIB3829-011-Q6-K6-D2
ccccgcgtccggncgtgtacggcgtgcgtggagagggccatctctgagtcttgcggcgactgggcactcgctggaggctgctacggctaggttgagtggtgctagggtttctgctttcaatgttttggggctggggtttgtattgggcttattgttgtatttgttttattatttgtggggcctgggccatttgggcctattacaattttcatactactttattgtattgatcgttaagtatgttttatttttaaaaaaatgtttattgaatgttttaggaaaataatttatttttat

SEQ ID NO: 11627 - DNA, 535 bp, Gossypium hirsutum
  unsure (1)..(535): unsure at all n locations; Clone ID: LIB3829-011-Q6-K6-D3
ngaacacttgcagnatcgccaggatgcagaacgaaaattatggccatgcttgagagagcttgtaagatgcttgccgatcattttatcggaagtggtgcagttacccgaaacagataacctggaatttggtagtaagatgctgagaaattattctattgatccactgggattctactcctcccaatccgctgaggtggagaatgcatgcggccaggaagaagaaatgccatccggtctgcattcacagaggggcgatggttctactgaaagctgcctaacttcacaggagagtccaggaggattaacaatggagggatcacctgttgaagggaagaaaaagatggttaacatggaggcaacaacaggatctgtgatatggggtgataccagggttaatccccaagggttaactggatatggaatgtagagatgtaaaatgagtgctactcttttatgtttgctcaagttattattatagtatcaagtgaaaaaagatggtgatatatctattggttattagtgagagtttgtctca

SEQ ID NO: 11628 - DNA, 602 bp, Gossypium hirsutum
  Clone ID: LIB3829-011-Q6-K6-D5
gtttaaaattaagaaaaaaatcatacgcaatgagcactgctggtcaggttattcgttgcaaagctgcggtggcatgggaggcggggaagccactatcgatagaagaagtggaagtggcaccaccccaaaagcatgaagtccgtattaagattctcttcactgctttatgtcacactgatgtatactactgggagtgtaagggttacactcctctgtttcctcgtatacttggtcatgaagcctcagggatcgtggagagtgtgggtgagggtgtgaatgatttgaaacctggagatcatgtgctccctatcttcaccggagaatgcaaagaatgtcgccactgtctgtcagaagaaagcaataacatgtgcgaactgcttaggatcaactgcgaccgaggtgttatgcttgctgatgggaaaaccagattttccatcaacggcaagcctatctaccactttgttggaacctcgacctttagccaatatactgtcgtccatgttggccaggttgccaagatcagtccaaccgcccctcttgataaagtctgtcccattagctgtgggatatgtacaggttttggggccactgtgaatgttgct

SEQ ID NO: 11629 - DNA, 600 bp, Gossypium hirsutum
  unsure (1)..(600): unsure at all n locations; Clone ID: LIB3829-011-Q6-K6-D6
tttcgctttttcactctctccctctctttactccagnatagggttcagcttccaaaacacaaaatggcagcgtcccaactccaaaaccctctcaaaaccccatcttctcagctctcgatcaaaaaacataaaccctgttttcttaaaccccggcgtttaactgtctcagctgcccatccccaccttaacggccgaaaactccgggtcgccgtgataggtggaggtccagctggctcctccgccgcggaagccctagcttcaggcggaatcgagacgtttctcttcgaacgtagcccttccaccgccaaaccctgcggcggcgctatccctctctgcatggtcgatgaattctccatccctcaccacctcatcgaccgccacgtcaccaagatgaaaatcatttccccctcaaatcttaccgtcgatttcggatccaaatcccttcgcgcccacgaatccatccccatgctccgccgcgaggtcctcgatgccttcctccgcacccgggccgaatccgccggcgcccaactaatcccttccctcgtcacccatctcgaaatccctgcctcctccttgtctccctacatcatccaccacaca

SEQ ID NO: 11630 - DNA, 613 bp, Gossypium hirsutum
  Clone ID: LIB3829-011-Q6-K6-E1
cttaaaatgaaagtctagttacaaatacataccaaactagacattagcttttggattccataaggtcttgcaaggtcaagaaatttttctaagctctctgtatagaagaggctcaactatggaagagactcgaggaaatgacggtgctggtctccctaatgttgggcaaatgtcgggaactagaagtggatggtcttcctcgatgcagggatataatacacatagtcctgtacaaccatctgcgcaagtttcctcaccatcttctgtgttgatgttccaacaagcaagcaatccagttccgaacttcaatcctactcgtaacttcaaccaggaaatggagcggggagtgagttcttttcgtgtgcctgaaacttatggggccaagttactgtcatcgtcaatcagcgaacatgattcacaacctctggcagctcaaccttcttttgggaccaatcaagaattagcctcgtgtaaaagtagctgcaggctttttggtttctccttaactgaaggagatcttgatgcaactaaggaagacaacgtggtacatgcaacattatcattgggtcgtggttcgcttttaccttgtattggagaaagtttccatccaaat

SEQ ID NO: 11631 - DNA, 637 bp, Gossypium hirsutum
  unsure (1)..(637): unsure at all n locations; Clone ID: LIB3829-011-Q6-K6-E2
gcgttcgcgtcaaggnagcaacttgtagnactttggtatggacttcttaacagtaaaacgaagttcttgcttgttgtaaggccgaattccgtcattggaaaagaggtgaaggggaggatgttgtaatggagcttatggagaagagtaaggatcgaggttacattgtaaattgggcaccacaagaggcagtcttgaaccacccggccattggcgggttctttacgcataatggatggaactcgactttagagagcattgtcgcaggggtgcctatgatttgctggcctcagtttgctgaccaacacgtgaatagtagggttgtgagtgaggtgtggaaaatagggttggatatgaaggatgtatgtgatagcaagatagtggagaaaatggtaaatgatgtcatggtggatcgaaaggaggagtttgcaaaatccgcatctgaaatggctaaggaagataagaaggagatcaagatgctataatggaggtcaattcatctaaagatttcaagagccgaaacaagaacaagaagataggctgaccaagaagacaattgctcagagtaactctagggtgctaaaagaatgatctttttacatcattccttggaatatttcctcttgttcactggtatgac

SEQ ID NO: 11632 - DNA, 624 bp, Gossypium hirsutum
  Clone ID: LIB3829-011-Q6-K6-E3
tgccgactgctttcaagttgttttcaggttcgtcgtttacaatgttaactcgtagttttgttgagttctgcatccttggtaccgacaatcttccgaggactttgctaatgtattttacaaacacgccttattcctactccaattatttccctactgtcctttgtaactctgaccagtacaagaaaactgtgataaaccataacctactgcatgtagccttcaacaaaaccttttcaacgaagcctctctcactcaagcctgaagaattcgatgctatgattcagagtggagctgcttttgcaacacatttccagtttgacagtccagtactcgaccgtatcgaccaagaaattttgaaacgcagccccggaaaagttgtaccaggtggatggtgcttaggtgatcccgccaatgacacatgttcagtttggggagatgccagtatcttgagacctggtccaggagcaaaaaggctcaaaaaacgtatcgtcgacttgcttgcagatgataagtatcgatccatgcaatgtcgatatgaatgatgtaatggatcaatctacatggagatatatgaaatcggggaaacaaagggtaactgatgctgatcactcttaaaattggccc

SEQ ID NO: 11633 - DNA, 591 bp, Gossypium hirsutum
  Clone ID: LIB3829-011-Q6-K6-E4
atattgcccgttttctgtttttctagggtttttcaatctatacctcttctcactaatcatgagtcgtaatccagaggtaaagtgggctgaaagagctgacaaggtttacattacggtgctattaccggattcgaagaatgcgaaggtcaatcttgaacccgagggagtgtttacactttcggctaatgccggagctgacaacaacctttatgaattgaagttggatctttatgataaggtcaatgtggaggaaagcaaaattagtataggagtccggaacatagtttgtgtgttggagaaagccgagaaagtgtggtggaaaaaactattgcgcggtgaaggcaaggccccccattatattaaagtggattgggacaaatgggtcgatgaagacgaagagaatggtcctggtgatattgacttgggaggaatggacttctcgagctttggcaatatgggaggcatggatggcagtggcatggacgattttgaggacagcagtgacgatgaagagcaagaagtgacgaagccatctgagcaagacatgaacaaggcagatggaaatgctaaagcagcggagcaaggtgcggg

SEQ ID NO: 11634 - DNA, 592 bp, Gossypium hirsutum
  Clone ID: LIB3829-011-Q6-K6-E5
cttttgatgtctcccttctcaccattgaagaagtatctttgaagtgaaggccactgccggagacactcaccttggaggcgaagatttcgataaccgaatggtgaaccatttcgtgcaagagttcaagagaaagaacaagaaagacattagtggtaatcctagagcccttagaaggttgaggacttcttgcgagagggcgaaaagaactctttcgtccaccgctcaaaccaccattgaaatagattcgttatacgaaggtatcgacttttactcaaccataacccgagccagatttgaggaactcaacatggatctattccgaaagtgtatggaaccagttgagaaatgcttaagggatgccaagatggacaagagcagtgtccatgatgtcgtcctcgttggtggttccactagaattcccaaagttcaacaactattgcaggatttcttcaatggtaaagagctttgcaaaagcatcaaccctgacgaagctgtcgcgtacggtgccgcagtccaagccgcaatcttaagcggcgaaggcaatgaaaaggtacaagacctcctgcttttagatgtcaccccgttatccctc

SEQ ID NO: 11635 - DNA, 607 bp, Gossypium hirsutum
  unsure (1)..(607): unsure at all n locations; Clone ID: LIB3829-011-Q6-K6-E6
ctgggaagtgttgngaggtgggcttaagaataagattgaaaacagtggtcggatattatgggtctgaaggcaaattgtnncctgataatggacccgggnacttttgaatgnnttgtgcnttggctagnacagnnccccttttctttccgggaagacnntaatccgcagcctagaaaaacacaccttatggcagacaacttcagattttacggatggtcaagctagcatacataggcaacattttctgcagtgtccccaagggttgttaaacaagcattttgaaaaactggtccaatgtgatatgcgtttgaactgtttaagcagacagccagagataattttggattcaccgtactttgaatcacggagttctgtttttgaggatcccagtgaacctaaagggcatgactatggccaaggggagactggtaaaggatctactagctctggcttccagaatatagcatcacctgttgcagctcactcctcgtctttggagattgagaaaggggattctgctgtcataacctcggaaaatatgtctagggaagctccgtctcccagttcaggaagcggagtttgtgaagcagtggattcaaaggggcct

SEQ ID NO: 11636 - DNA, 632 bp, Gossypium hirsutum
  unsure (1)..(632): unsure at all n locations; Clone ID: LIB3829-011-Q6-K6-F1
cgnagaggagaagcaacacgatgccgacggaacgctgctgaagacgaggacggcgagaatgaggaagaaagaaacgataacgagattgatggtgaaaacgtgaagaaaagtgaaggaaagaggtcgcattatccggtgagaccggatgcagagagttgcgcttattatatgaagactggactttgcaagtttggatataattgcaagtttaatcaccctattcgaaggacgacccaggctgttaaggaaaaggtcaaggaagaagttgaatcaacagagaaacctagccagacagaatgtaagtactacctaagaactggtggatgtaagtttgggaatgcttgtaggttcaaccactcaacagctaaatcttcaacgagtccaattttagagcttaactttcttgggttgcctatccgacagggggagaaagaatgcccctattacatgcgtaatgggtcctgcaagtatggagccaactgcaggtttaatcatcctgatcctacagctgctggggcttgtgacccaacttccggatatggtaatggtggatctgtttcacctcaagctgcatcacaagtgaatatgttgccctggtcatcacctagggcattgaatgagactgctgccta

SEQ ID NO: 11637 - DNA, 636 bp, Gossypium hirsutum
  unsure (1)..(636): unsure at all n locations; Clone ID: LIB3829-011-Q6-K6-F2
accanatctctttccaananatctatgcatcaaactgtcagagcttcacagcaaagctcctgagcatagctttgcctacacaaagaaaactattgaaaaagcatttggccgtaagctatctgaaatttttgaggcttttgaagaagaacctgtggcatctggaagtatagctcaggtgcaccgggcttctttgagattccgctatcctggtcagcgggtcaagcccatggtagttgcagtaaaggttaggcatcctggtgttggtgaatcaattaggagagattttgtgattatcaactcggtggctaagttatcaacgttcatccctactctgaaatggttgagattggatgagagtgtccagcagtttgctgttttcatgatgtctcaagttgaccttgcaagggaagctgcccatttgaaccgttttatatacaacttccgaagctggagggatgtttcttttcctaagcctgtgtatccacttgtgcatcccgctgttttagtggaaacttatgagcaaggggaaagtgttgcacactatgttgatggccttgaaggacatgatcggattaagtctgcactcgctcatattggaactcatgcactnttaaagatgcttctggttgacaactt

SEQ ID NO: 11638 - DNA, 624 bp, Gossypium hirsutum
  Clone ID: LIB3829-011-Q6-K6-F3
cggccgcgtgggcggccgcgtgggcggacgcgtgggcggacgcgtgggcggacgcgtgggcggacgcgtggggtttttcacgaaactctgtatttcttccctaaaatctgaaatccccaatttttccaaatcgttaagttttcccccaaatccttcgccccgtgatcaggaaaacccatctcctccgtcgccttctccccgtgcatcgcaactcattccctccatcgtcttcaccccgtgcatcgcaacccatctcctccatcgccttcgccctgtgcatctgctgcatagccgtccagtgtcccctctgctgcccgaatatatttggtaaattcaacgaggttgtcgattcctccgaacaaggctgactttacttttagtgctagcaatggatgatacggtattagatgttgatcaagtggaaaatctcataaaattttgtccaactaaagaggaaatggaacttctcaagagctacactggtgacaaggagagtctagagaagtgtgaacaggtttctgaatttaaaaggagcttaaatactgtaaattctgcatgtaatgaggctaagaagttagcatcacaatatcaaaaggaagcggacaaatgcaattcgggtatgga

SEQ ID NO: 11639 - DNA, 610 bp, Gossypium hirsutum
  Clone ID: LIB3829-011-Q6-K6-F4
gggtttttcagcattttccacctgcctcttcttttgggcttggaagtccagttaaattgcctcctggagagccacttgcattgccccctcttggagatgatttaggtccattacttcggacaaagaatggagggtttttacgatccatgaatccctcacttttcagaaattctaaaagtggtgggaacctgatcatgcaagtgtctggtccagttgtggtacctgcagaaatgggttctgatataatggacatacttaagcaactggcctcaattgggatcgaaaagctctctatgcaggcaaataagttgatgcctttggaggatataactggtaagacaatgcagcaagttgcatgggaagctgcctccactctcgaggtatcagagaggcaatatcggttgcagcatgatcttgagtttgggcaaaatatgcctagcaggcaaaagagaattaaaagatcacctggacccacttctaacaagtttagttcatcctctgtcaataagatggatttggattatgtatcccttgaagatcttgttccactggcaatggataagattgaagcactcatgatggaagggttgagaattcaatcgggcatgtc

SEQ ID NO: 11640 - DNA, 599 bp, Gossypium hirsutum
  Clone ID: LIB3829-011-Q6-K6-F5
gttgccttattgtttcttcctcttttagattttctttctctccgttttctttccttacttgtatggcagccaatttgaagatggtggagggatcgccagcttggggaagcgacttcttaaccgcacctccactcgcaccccttctcttttcatctccacttcttcacctaccaggagtcctcacgcgtcggcatacgacaagaacctggatgatcaggtccatgcggctgtggttcctgatgatgtgattcagcctcaatcggacaagtactgggctcctgacccgcggacaggggtatttggccctgctacggagcaacttaacgcatctgcgggtggggagcagggcatccattcgagtggtgcaaactcggtcctggaggaaaaggcgtggttccgccccactagtattgaggacttggagaagccacaccatcactaagtcgctgataatgagcctgctactatatagtctataggtaaaacaaagacaataggtgtggtttgcttggatcaaataaactggaaaaacgttttaatggttcatgttctatttctacctggttgttacatgggaatttgcaaatctagttactgcg

SEQ ID NO: 11641 - DNA, 586 bp, Gossypium hirsutum
  Clone ID: LIB3829-011-Q6-K6-F6
ctctcttcaaaactaactccatcgatccaagagtttgtcaccaggactgattatgacacgtggaagtgaacacattttctacggagggaagattggtccaggtagaatatgctattgaggccatcaagctgggttcaactgccattgggttaaagaccaaaaaagtgtcgtgttggctgtcgataagcgtattacttcgccattgttggagcccagcactgtcgagaagattatggcaaattgatgatacatataggatgtgctatgagtggcttgattgctgatgcccgaacacttgttgaacatgcacgatttgagactcataaccacagattctaatatggcgagccaatgactgtatagctccacaacacaagctctttgcgacctggcccttcgatttggtgaaggagatgaagaatccatgtcccggccatttggggtgtctcttctaattgctggtcatgatgagaatgggcctagcttatactatactgatccctatggcacattttggcaatgcaatgcaaaggctataggctcacgttccgtaagtgcaaacagctatttgcaagagcaatacaac

SEQ ID NO: 11642 - DNA, 630 bp, Gossypium hirsutum
  Clone ID: LIB3829-011-Q6-K6-G1
cggccgcgtgggcggacgcgtgggcttgttgtgggggagatggcatcgatgctattattaatgctgcgagcaaaagattcagcgagtctcaacagaaaagctgctggttctgtggtttggtggaggatgaaagaggctactttgtttgctttggcttccttgtctgagcaattacttgaggcagaggtttcgggacttacaaaagtgagcatagggaaccttttagagcaaatgattactgaagatatgggaattggtgtacatgaatatccctttctttatgctcgtatgttcatatcagttgctaagttttcctctgtgatgagcggtggaattcttgaacactttcttcttgctgctatgaagacaattggcatggacgtccctccagctgtgaaagtaggcgcctgtcgagcactttcacagctgcttcctgaagcaaagaagaataccattgagcctcagatgatgggattattgtcatcactgactgatcttcttcatcgggcttctgatgagacattacacctggtacttgaaacactgcaagctgcaattaaagctggtcatgagtcatcagcgtctgcagagcctattatttctcctataatcctcaatatgtgggtcttt

SEQ ID NO: 11643 - DNA, 627 bp, Gossypium hirsutum
  Clone ID: LIB3829-011-Q6-K6-G2
attttagtgtcaaaaatggccgaggagcataccagcaaggcccctgagttggagagcaacgttagcggtgaaggagcagtggagagcaaggagcgagggttgttcgatttcatggggaagaaagaagaggagaagcctcaagaggaggtgatcgtaaccgagtttgaaaaggttaatatcgaagagacaaaggcagaggaagaaggtgaggagaagaagaagcatggtctcctggagaagcttcaccgatcagatagcagcagctccagctcttcaagcgacgaggaagaaggtgaaggagaagagaagaagaagaagaaaaagaaggagaagaagggactggaagaaaagattgaagagaaattagaaggggaaaagaaagaagaggacacctcagttccagtagagaagtgcgatgagccagtagtccagccagagacgccagagaagaaaggtttcctcgagaagatcaaggagaaactccctggacaacacaagaaagctgaagaggccagtagcccggctccagccccagcagctgagccccatcacgaagaggagtcaaaggaaaagaagggaattttggagaaaatcaaggagaagcttcctggttaccactccaaatca

SEQ ID NO: 11644 - DNA, 605 bp, Gossypium hirsutum
  unsure (1)..(605): unsure at all n locations; Clone ID: LIB3829-011-Q6-K6-G4
ctctcgttctttttcctgttcaanatgtcttgcttcattagcaaatatgctgatgagttggctaaaaacgctgcttacattggaacccctggaagggtatccttgctgctgatgaatccactggcaccatcggcaagcgtctttcaagtattaatgtagagaatgttgaagacaacaggcgtgctctccgtgagctcctattcacaactcctggagctcttcagcacctcagtggtgttattctctttgaggaaaccctttatcaaaaaaccgcttcgggcaagcccttcgttgatgttttgaaggaaggtggtgtcctccctggcatcaaggttgacaagggtacggttgagcttaatggaacccatggcgaaactttcacccagggtctagatggccttgcacagcgatgccagaagtactatgaagctggtgcccgctttgctaaatggcgtgctgtccttaagattagtgctaatgaaccaaccgagcttgcaatccaagaaaatgccaacgggctagctatgtatgctgccatctgccagcaatgtggccttgtccccattgttgagcctgaaattcttgttgacggatcacatgacatt

SEQ ID NO: 11645 - DNA, 574 bp, Gossypium hirsutum
  Clone ID: LIB3829-011-Q6-K6-G5
gttctagaacgcgagcggccgctcgcggccgcgtgggcttgctttgcatgtggaacaagaatagcagaggctgatggaacttgccccatttgccgtcggagtatgaaaaagtgaggaagattttcacggtataatcagggggaacagcagtttatgctgatgtcccttaatcgagtgaatgatacactgtctgactgggttatctttatcaacacagttttcaaggtgagactcttatctatcatcgttctaaacgatgttacaccaacccgtcattgttcttgaagcattgtatccatcgaaccaatgagccatgcattttgttttcccatagtggcttttgtatccttcataaaagtagattttctttggattcaacaattcagtcatcactttacaaacaaaccaactaaaaagtaattattttcttcatgatttttagtttatcttttgaaaatctgggttgtaatgtattaagctcctaattgagttgatgttatcagtcaaccggtaccaactcagttgaataaggattaaaataactttatttacaaagtaaataatattatttatc

SEQ ID NO: 11646 - DNA, 597 bp, Gossypium hirsutum
  Clone ID: LIB3829-011-Q6-K6-G6
gcgggtcgagggctatttactaatggtaagaagaattcttgctaatcagtgaacggctcaagccgcaggaagagaagccgaggaagatcgatctaaagtcgatgatttgagagggtcgccaatgagtgtgggtaatttggaggagttgatcgatgagaatcatgctattgtttcgtcgtcggttgggccggagtattacgttgggattttatcgtttgtgcgataaggatcatttggagcctggatgcgctattttgatgcacaacaaggttctttctgttgttggccttctgcaagatgaagttgatcccatggtatcagttatgaaggttgaaaaggctccattggaatcttatgccgatataggaggtttggatgctcaaatacaggagattaaagaggcagttgagctccctctgactcatcctgaactgtatgaagacatcggtatcaaacctccaaaaggagttatcttgtatggagaacctggcactggcaagaccttgcttgcaaaggcggtggctaattctacatcagcaactttcttacgtgttgttggcagtgaattgattcagaagtacttgggagatggtccca

SEQ ID NO: 11647 - DNA, 631 bp, Gossypium hirsutum
  Clone ID: LIB3829-011-Q6-K6-H1
cggccgcgtgggtttggctattatactctccaaatcggtacatggagccttcggtagtagaaagtaagatattgcataagttgggatagactggagtatagcttttataaaacttcttttcctccctgggatagatatcttatactctagttgtcaattctttgtttcaatctatccttcaaattttgaaaagatggtctcttttttctacctaccatattaggaagtcctaaatatcgttttggatcagttgatcttcgtacaccaagtatctaagaaactgtaaccctttccccttcaagagtattggtactaaaaaagacagtagatttatcataatctgtcttagagaatgtgctccccttttagtagcttctgcaaataagatacagtcatcttcaaagagtagatgtgagatggctggaacactaagactagctttaacttcgtgaagaatattgttcgctttcgaaagtctcattagactagagattccttccccacagaataaaaacaaaaacggactaaaagggtctccttgtctaagacctctagatggaagaaaagtttctcttatatttccatttaaaatgacagaatatgatactgtagacacttttcattaacaaat

SEQ ID NO: 11648 - DNA, 615 bp, Gossypium hirsutum
  Clone ID: LIB3829-011-Q6-K6-H2
gttccgtcatgacttgcttcagccataaatccaagatgggatccaagtgctatgctaaacaatctctcattccttgggcagaagatccatcagcttcaggatttggtgtatttaatcattgggcggaagggtcaagtgttggggcgaccagacgaacttcttgttcagcaacaacagctagttactgcggatctcacttcaattatagttcagctgatatctactgctggtagtcttctcccgtctgtaaagcaaacactttctgcagccactacgtctctgggacagtgtggggagtttggtggagttgtcttcccttcttctgcacaagggctgaatgatggggttcagccacaaaatgctggtggaagcaaagtctctgagccgccaaattctgttgatattactagtaacaatggaaatgagcaaagtaatcatataatcgaggagcatgaattgaaagatgaggaagatgccgaggaaggagaaaaccttttgcctggcacgtctgagatactgcagttagaaaaggaagaaatccttgcggcccacactcatttctgcactatatgtggaaaaggattcaagagagatgcaaatttacgaatgcatatg

SEQ ID NO: 11649 - DNA, 610 bp, Gossypium hirsutum
  Clone ID: LIB3829-011-Q6-K6-H4
caagcattcaccggtcatcgcaaatgtgacaatagtactgattttacggaacaagaggttggagttggccggtgagctgcttggcgtgagcatgaagttcatattgcccatgcaaggagacgtatggcaaagactctgcagagggtatctttatgcggatcgtactgttcgaccaattgagcattatcttgatgcttccatagttacaaatgggctctctagagcattttctactggagcttggtcgcatccttacaaaaagatggaaaggatatcaggtgtagtggcaaatcttggacgagcaaattcattgcacacaatggttgatttgagaaaaacacgacagcaggttcagtacactggaaaggtcggagatgcgagatacccacatccttcttattggggaaaagtttgctttctctctactcctgatggtgaaaattgtgggcttgttaagaatctggctaccactgctcttgtgagtacgaacatagtgaaatccgtagtggaatccatagtctacacgttgtttgattctggaatggagaaagtggttaatgatacttcaagctcacttgatggggaaaggaaaggtctttctgaatggggg

SEQ ID NO: 11650 - DNA, 597 bp, Gossypium hirsutum
  unsure (1)..(597): unsure at all n locations; Clone ID: LIB3829-011-Q6-K6-H5
tgcttctanacccttctctcccatcactttatgggtttcttttttccctcttttaaagccacccctgaaaccacccagtgtcttttgtcaccccacaaatagctttgctgtcaacattttactcaagattttcctctttttctttcctcccaaactaactatgtatcgttttgcttcaagccttgcttctaaagctagggctgctaggaacactacatatcagattggtagtaggctgagttggaataggaactatgctgcaaaagatattaaatttggggtggaagctcgagcattgatgcttaaaggtgttgaagagctcgctgatgctgttagagtaaccatgggtcctaaggggcggaatgtggttattgaacaaagctacggtgctccaaaagtgactaaagatggtgtaactgttgcaaagagtattgaattcaaagacaaagtgaagaacgttggtgcgagtcttgtgaaacaagttgcaaatgccaccaatgatgtagctggtgatggaactacctgtgcaacggtgctgacacgagcaatttttaccgaaggatgcaagtctgttgctgcaggaatgaatgcaatgga

SEQ ID NO: 11651 - DNA, 534 bp, Gossypium hirsutum
  Clone ID: LIB3829-011-Q6-N6-A1
aaccaataaataaaaatgaatttgctatttctatagcaactcaactacatataaaataatctaatggatatcaaactcaaaacaaccccaaaacccccactgtcaccaacaaaccagccttcaaccctgcaactccgcttgttggagcaacggccggaccttcaaaatcaaccggcgaaggtgctggagagattccaatgtacctatgcttttgagacatcacaaccacaatcatcttctggccttgctcgcagtggccctttgctccactcatgaagaaatatggtcctgacttttcaagcttcaccttggtgttcccatctttgtactcggcaatcgggttcgacgtattgcaacttgtataatcctccttactcacttggagcaccgagtctttaccaccatcatatttccacacgagagagtcgccgatttggaaacgagctttttcagcccatttgttgagagaatctgattcagaagaaggtatcttccaagcgcctgttttgccaccaaccatgatttctttacctt

SEQ ID NO: 11652 - DNA, 425 bp, Gossypium hirsutum
  Clone ID: LIB3829-011-Q6-N6-A2
ggatcaatattcatcaatacacatgttccaccaccatccataaccattaaaactgtacttcaggtatggatataacaatacacaagcttacattcatacaacaatgtctctctttaggacactaccactagcacaagatgagaatcgacttcaataaaaaaagacacaaactggattttgatgccaatatatttatttttgtacacttcaccatgattcatcttttcctacttcccgaacagggattttatccaccagaaccctttctcttgggggacatgctctccttctggtgtagaatcactttgtggtgtcttatgcagtttgctcacatcataccccaagtctttagccttctgctccaacatgttgtagatttcttcatccatatgtttctgcctgcataatatccaaaggtacttctt

SEQ ID NO: 11653 - DNA, 526 bp, Gossypium hirsutum
  Clone ID: LIB3829-011-Q6-N6-A3
gagtggtaaaacattaacctagtttctcttggattcagcttcatctcaaaaacaagctttcatgaggcaatatgcaaaaataaaaaaaatatgtatataaactcttgtatattacaacaactaaatagatgtactcatatcataaacatcagcactcaaaaacatagctgcagccctaactaggtacgatcctcgaaagggggcaaaaaagggtgatgtgctactgttaactatacacaacgcaataagtagcatcaagttacaaggcctttggtgtgctaatcaaaactataaacaagattaacatcacagctacccgaaaaccaacagcaaatggtttacgtgagtgatgcactgaaaacaccattgaccaccgagatgaagtctctttacgagctgaaacaatggtctttgaacccaaaacaatgccgaaatcagcattacaactgacagtgatatccttttccactactttttcctcctgcaaggacaacttaataaggttggatacatatctggatttgat

SEQ ID NO: 11654 - DNA, 539 bp, Gossypium hirsutum
  Clone ID: LIB3829-011-Q6-N6-A4
ggtagatgaaatcagactccttaaatatttggatcatctctaataatctgtttcacttgggataattgtttcaatcagtaaaaaccaaaataaacgacacgaccaaacatcaaaacccttctttttatcctaaactaattccaattttattacaactcatctttacttgctgtaaaatctcccatgagttcttcaagtgagaactcatcctcttccttgatttctccatctttaccgtcccatgcttctgtctttgcaatctcgggtgtgccctccagtggtaaatttcccttgcctccgcgccctgcttccttcacaaactcaatgatatgctcgagctcaaatgcacttatgagtggagcatatgctcctttcttgacgttcaaggctacaagagctggataaccatatccaccaacacctacacggttctcgagatccggttgcttaccagcagcagcccaaacatagctgtaaggactccttttaaatttctctgcaactgacaataacatatccaagtacttgttccttccttc

SEQ ID NO: 11655 - DNA, 550 bp, Gossypium hirsutum
  Clone ID: LIB3829-011-Q6-N6-A5
agggactaaaaccacgactttcgcataggccataaactgataacaatattttatcctaataaaaggatttattggttagcgtacgacatcaagttcaacatataatcacttctcaatggcgaatctccaatacatgaaaatttctacctattgcaatgcggaagacaccaacctttgttgtgaatgtacagtagattattgtccatcatccttccaaaagtgaaggagctacatattgagcaatcgccatgcttgaagtcagcccgggtgactcgataccgaaaagagtacaagaccacccactccatgcaatgaattatccctgtattacaaaatcacaggctgtactgcacacgtccatgaagatttgtgtcgaatccctgcataacctggtattaggagatccatctttgagatttgggtagcacttccgaatctatggataaaaggttgcaacatgatcagcacttacagaatacgcaaacttattaaggaagttggctggatcatgtacatgaggaatccactcaacatctgggccaaacttgag

SEQ ID NO: 11656 - DNA, 520 bp, Gossypium hirsutum
  Clone ID: LIB3829-011-Q6-N6-A6
caaggaaactagatgtttcatttccattaaagtaacatacatcataatgagattctaacaatgcttccatattgcttaaggcagtcttcccctacactgtgaaaacaatcacccaaaagacatacaactaagaaaaataaagccctgtgaatctagttttgttaaaacaaattaagctttcttaggagacttggtggcctttgatggagatttgggttctttgccggcggccttttcagtcttcttcggcaaaagaactgggttgatgttcggcaacacaccaccgtgagcgatggttacgccggcgagaagcttccctaattcttcgtcgttcctcacggcgagtagaacgtgccttgggatgatcctgtttttcttgttgtcacgtgcagcgttcccagccaattccagaacctcagcggccaagtactcaagaacagcagccaagtaaaccggggctccggttccgacccgctgcgaataccttcctttcttcaaataacggccgatcctaccaaca

SEQ ID NO: 11657 - DNA, 538 bp, Gossypium hirsutum
  Clone ID: LIB3829-011-Q6-N6-B1
gagatgatattcactcgcttatgagccaaacaaacattaagttcagtcagactcaagacattggaaagggtacataattccaaggtaactgcaaaaaaaaaatgctcttaggaaaagaaaaaaaataccacaccatttctcacaatcaaaaacccacaaaatgctacacattgacattgattgatatacgcttctctcatgaagacggcaaatggtattaaggtacaaacccaatatccttcaagtattcatgctcaagagcacttctagccgtaattcttttgcttggatccatgcacagcattttagaaagtaggtcaatgccagctgactcaagattaggaacaacagttgccaaattcttagcaggccactttgggaaagcagacttaaaatcaggcaatgatgtcaccccaggccatgtatcctcatttggagtacccaagattctgaagatcttgaatagttcatcaatctcggaatctccaggaaataatggccgctgattcaccatctcagcaaatatacagcctactga

SEQ ID NO: 11658 - DNA, 496 bp, Gossypium hirsutum
  Clone ID: LIB3829-011-Q6-N6-B2
agaaaacaattgtaaaactaatatttagagagggaaaaaaaagctacatgtagcaaccagacagcatggacaactagtcgagccgtgactgtgtgatcataacccgcatacgaaatgaaagcaaatttgtttttgtctaatagcacagtgaaatggcctatcacatgctaggacccacacaatacacatggctgctgccgacactccaactcacaggaaagcatccttctccagtaacttaagcacctcatgctggttgttgagcttggctacatctatagcagtcttgccatccatgttttggagtgtgacagcagcaccgttctcaagtaaaagggccacacagtctttccttccataaccagctgcataatgaagtgcagtattcttattcttgtccaaagcatccacttttgctccagcttcaataaggacttgggcacatttcacctcgccatatccacatgcaaaatgcaatgctgttcttccctctgaa

SEQ ID NO: 11659 - DNA, 543 bp, Gossypium hirsutum
  Clone ID: LIB3829-011-Q6-N6-B3
atagttatataatcttttagaatataaactaaaaatatttagtaaaaatgatgtaaaataatataaaacaactctaaatatttaaccctcaacaaacccatttgcaagctttcaaacatggaatacgaaaggatttagaaccctttatctctcaacgtgtaatcctctaaattccgagaaagcaaaagtatattcgcagcttgataaagctccccgctcttagggaccgttgctaagtggcacctgcatgaaagtaagcagtcctggatggtttaagattgaagcagttagattgccaatgcgagctggctactacctttgtaactcaaggatgggatcataaactaggtcaccgtgttttcatcatttgtgctaacttgggtttcgttttccgtattgggatggtcctctgaaggtagcaccccgtcttcaccatttgcatgatcctctccatcttctttagcttcctgtccgttgttttcatgtacaccgttattaattccaccgttttcagccactgaggtatcaacttccattgcctgg

SEQ ID NO: 11660 - DNA, 544 bp, Gossypium hirsutum
  Clone ID: LIB3829-011-Q6-N6-B4
aaataaataaatgtttgtttatttaaacagttcatgctacaaagcccaaaccgtaggcccaaaatcgaaacaattcagctaagcccgtttacacccttgacccaaaaaccatacccagttataccctaccccagatatactaaactagcccaatatttaattggcccaattagcctaacttattttcagcagcagagaaaccctagctagggttcgcgccgcaatcagcctaagggttgcgcctcttcaactcccgttgtttcagctgccctccatcagcgccatgactctgcctccatgatcagcgcgcgaatccacaccagcacggtcactgtcggattcctcgatgatacctgcaagaaaaggaaacaaacagaagatacgcgaaaaaaagcaaagcagaaatggcaagaaaatcacaatatatcaatcaaatatacagaagacatagaatggaaagaaatcttagatttctttcccagaatatgtaagggaccaaggctataaagcctttcatttcacttgtaaaagttatgttctgaaa

SEQ ID NO: 11661 - DNA, 533 bp, Gossypium hirsutum
  Clone ID: LIB3829-011-Q6-N6-B5
gaatatgaatcatttcgcgcagatgatgaaattaatatgagaactcgggatctaacagaatgtcaattgtcaaaggaagcaacattcatcacatttactgatggaaaaatacagaattgattagcacaaaacggaaaacacagaaccataacaattttcaaaacaaaagcaaaactttgtttcaaagggtttttagcatctccgaagatgcctaacaaagtccgaaccagccctgatgagaaaaaaagaaaggaatggcatatcatgttgcagattagaagacttagtcctcatccattcctgcaggctgctctctccttccaggacctccagctggttttgccattataatctgatcaacccgtagaacagtgcaggcagcatcagcagcatatttgagagcgaaaaacttggtgacataaagatcccaaatattcagggttgacacatctttgcaaacaccatcctcggagtcacctccccccaagtcaatacccactttggtatttccggatgcatgtttttcatacagc

SEQ ID NO: 11662 - DNA, 530 bp, Gossypium hirsutum
  Clone ID: LIB3829-011-Q6-N6-B6
aacactaatatatattcaaccaagaaagagggatatagctttgtttcaaccctatctaccatccttggcttcaattggtttataaaatcgatggaatgtttgttgaccacagctttaacacagtagagatatatgcggttggggctttctactgataagagccaaccatattatagcagtctagactttcatctctaagttcagctaaggacatttgaacttcggtcttgattattctcataaccctacctaacagggaatgtatatcgggatgtaggagactttgcactactggaaggtcgagcagccaccaacattggctgttgacctgtgagttttcaccagcggaaccagcgactggacaacatctgccatcaatggcctgtagtcagcttctggttgcacacacatagcagcaatagctgcaacctgaatcacttctttcattgagtattgaccttctagtgttggatccattatctggacgaccttctccctatctgttaactgaggcaaagcccatgatacaa

SEQ ID NO: 11663 - DNA, 524 bp, Gossypium hirsutum
  Clone ID: LIB3829-011-Q6-N6-C1
gttaataaagaataaataaagtagagaaccaacttcataagttacagagttcacttttgccttttcctcaagtctctaactttcacatatcttatgaaggataagaaggcacagtttcatctctttgaaattagtgctataaattacaatgcatagcttcacttgtaacttgtctgagctttcctcaaccagcagtaggaagagcaatttgggagtaaatcctcaccggccttttttgttggccatttgtagttgatattaggtcaataccactgacttcttgatccaccttgggcagcagcaactttcctagccatgtactggggttttggctgcaattcattttcttcatcatctttacagacaggatttctccgtggatatgaacaatttgtggcagtatactgagttggaactgaaggattccgagccattcttcgctgttcaagagcctcacctgcggctactgccccacaattgttgtatcgcaatactgatccaactactttcccaggtctggcagc

SEQ ID NO: 11664 - DNA, 526 bp, Gossypium hirsutum
  Clone ID: LIB3829-011-Q6-N6-C2
aactgggaacgaataagggggagcttattttttaggcaaatattgggtaatataaagcttttcctcacattttgcaatccccaaagctttacatatactgatggcaattacaaacacaaattgatgtcatccagatataataactaaatcatacaagcaaaaccagttccaaccttcttcttcaaccaggaatggatgaatcactcgaaggttcgcgctgtttccagggggtcacaaacagtcgttgaaacaagttctttgtaccactcattttcttcccggtaaatgaagtttgcatctgataaaaatacttcacgataatcatcatcatcatatacaaattggggaggatctggggaaccgactccgacaatggtgcttccactcccagacataaacacggcatcgtactgcccacggccagctgcagttacccgttgctttagccgtttaagagatggtaagacttcaaaagcaggaggttctaaatcattaatgcaaacatcttgagatattccattccttg

SEQ ID NO: 11665 - DNA, 537 bp, Gossypium hirsutum
  Clone ID: LIB3829-011-Q6-N6-C3
agaagttggaacattttatcttatttcacattgctcacaactcataaaactacacaggagaaaactgattctcctttaagttcttgacaacattactaacacccattagctgctataactatgtatttatatcatactatctcctgacttttcactctcaaaaatagcaccactgacttcacgtatggcagatcagtttgttttccgccggtcaagccaatagctatcgagagtagacaggtacttggacttggttgtctaagaaaacaggttactaagctttatccatagttgccttctgattatgctcagggtgtggcaacattttccctggcaagaggagcaatctcctctccttcaatgccaggttcactgccagccaccccgaggctcaacaacatcttctcccacaaccttgatggtcccttccatgaaaaatcttgtgccatacaattctggatcatttctttcagtgcttgagtcccatatgttgcaagagctctcttgacagtttttaccaccttaatcacatcactt

SEQ ID NO: 11666 - DNA, 512 bp, Gossypium hirsutum
  Clone ID: LIB3829-011-Q6-N6-C4
gaagaactaaatatttattcgacatctcaatcacatgggatgaaacccaaaaaagaaacacgtgcgtgaagcacatgactgaaatcacgaaaaaagcaaaccctcttgggggaacaccacaagaaaaaatgtaatgcaatcctaataataacattttattttaccagacaccaacctccataaacccaccctcggtggcgcagcccctaaacatcccagtggtgttaaacccacaagccacctcaccattcttcgacacagcaattaggcctgctttaccttcgttcaacctgttctttatcacataatccactgcctcatgaagattcaaccctttgtactccataaccgcagctacatcccttgccagggtgcttcggatgattgcttctccttcccctgtgcacgacaccccgcacaactcacatgcgtaggtccctgcacctataatgggcgagtcaccgatccttcctgacatcttgttcatgagcccaccagttgaagtgcctgca

SEQ ID NO: 11667 - DNA, 522 bp, Gossypium hirsutum
  Clone ID: LIB3829-011-Q6-N6-C5
gtaatcctaagacagatctttacatttggatttatgggattcttttttttccatctaaaatttggaagagtaactaacattaacatcaagcatttgttgtcagcaaacctactaaaggcttttaatgctccaacttaaatatatcctaatgcatctccattcaaattgaccccttccatcattgggcaatctgatgaatcatgttcgaaatgcccacagcaagaatcagaataatgtcttcgttttagagttatatcaatcccatctcttggccttctatccttcagctttcctgaagtgagaggttcatgagaagtccccattgtgaagctttgaacaattccatctgcatcttctacctctggtaagatcaaatcagatggacaattgaatacgatatcatttgcactttgtgtcgtcctaggaaggtccttgatgcgggaaagaaccatggcggtttgctcacaagcaacatcgaggcgttcctttgtttcgactgactctgctatgagtgctgaagtc

SEQ ID NO: 11668 - DNA, 557 bp, Gossypium hirsutum
  Clone ID: LIB3829-011-Q6-N6-C6
agaacaaactgctcatcacattatatgcacaaaaaggatagttcacatatgccttcagagaagatttgataactactacccttggttctaatgctggtctatctgaagaatggctaccaacatgaacatgccattccataatatttatatgagaagttagttaggtacataagtagaaaaagataatcactaaccactgctataacgaagagatatctgcaaatgttgggagatgaatggatgtaattttccgttcttaatcttcagcaaaatacttctcttctgcatcatggttagcttccctaagccagtgatcatccaaggtctcatcatcatctattttagagtaatctaaatactcataatcttcaccagagagaaacttctgctgcatgatgtaggtgaactgatccatcctttcttgcatttcttctgcagaaggtgcttcttcgtgttgctccacagttgcagaagcagcaacaatgtcatccccaagatggtccaaaagcatatcctttccatggttgcctccattttccattttcatttcatcctca

SEQ ID NO: 11669 - DNA, 566 bp, Gossypium hirsutum
  Clone ID: LIB3829-011-Q6-N6-D1
gcaaattaaacaagggcaacaagcttcacttaaaaagtaagaaacgaaatgggtaatgaaaatgctaccacaaacatttgccaattaccccctctgcctctagtatgtttcagaaagctattgtggtaaacttgttcatagaggctgatctgctgaattgatccctaggctgatctctggacttttttattttctaatctcttgtttatctatgataattcagctttgaacaaagaaaacagaaagctaatatgttacacgaaaacaggcttgaagatctgaattaagaacaggataatattagatgataaaacacatagctagaagatgtcttgcattacatacgctatgactaaagaaatataggcaacttggaagggcagcagcaggtacggccgctgtttagattggttgaccttccggcacaatttgatccttcaaccacatatagatagggaccaatacataatacgtagctgccatggtacccagtataaagcgcaacaggaatgttaatgggtttattggtttcgatacatcctctgccttcgggccaagctgcaaag

SEQ ID NO: 11670 - DNA, 298 bp, Gossypium hirsutum
  Clone ID: LIB3829-011-Q6-N6-D2
ataaaaataaattattttcctaaaacattcaataaacatttttttaaaaataaaacatacttaacgatcaatacaataaagtagtatgaaaattgtaataggcccaaatggcccaggccccacaaataataaaacaaatacaacaataagcccaatacaaaccccagccccaaaacattgaaagcagaaaccctagcaccactcaacctagccgtagcagcctccagcgagtgcccagtcgccgcaagactcagagatggccctctccacgcacgccgtacacgtccggacgcgtggg

SEQ ID NO: 11671 - DNA, 515 bp, Gossypium hirsutum
  Clone ID: LIB3829-011-Q6-N6-D3
gagacaaactctcactaataaccaatagatatatcaccatcttttttcacttgatactataataataacttgagcaaacataaaagagtagcactcattttacatctctacattccatatccagttaacccttggggattaaccctggtatcaccccatatcacagatcctgttgttgcctccatgttaaccatctttttcttcccttcaacaggtgatccctccattgttaatcctcctggactctcctgtgaagttaggcagctttcagtagaaccatcgcccctctgtgaatgcagaccggatggcatttcttcttcctggccgcatgcattctccacctcagcggattgggaggagtagaatcccagtggatcaatagaataatttctcagcatcttactaccaaattccaggttatctgtttcggtaactgcaccacttccgataaaatgatcggcaagcatcttacaagctctctcaagcatggccatatattttcgttctgcatcctg

SEQ ID NO: 11672 - DNA, 474 bp, Gossypium hirsutum
  Clone ID: LIB3829-011-Q6-N6-D4
aggaaccggccccatctgaagaacccaaaagattaatcagcaattttccgggaaatatgaaaggctgaaaaaaaaactaaattttccattgggggacccccggaaatcaaataaaacatttttgaaaaaattttcaacttcaaaagctaaagccccccatacccataattttcagtcaaactacacaggcgggatccttacccagcccagcacaaaaaaaataaaatgccctgttttgacagcatcacaaatttggcatgctagggacaagttctaccgctttctgcattcctaactggggtgaaaaaaggaagaaccattgctttttttgcagggggcctttcctggagatcatatcgaagcaacttatcaaggaagtcaatggccccagggagggccaaatgttgattctcggcactaaagaactttgtccaagggtttcaactgggcctgccaacaagggccgcaaggggg

SEQ ID NO: 11673 - DNA, 544 bp, Gossypium hirsutum
  Clone ID: LIB3829-011-Q6-N6-D5
aatagagaattatttcattaacaaagcaagcttttacaagataatttattctctcagcatataatataaaactccatataaagaactcttttctcttttttttttttttgagagagagagagttctatataggcactcttgataaccgggaaaggtagcttaagtaggcacataatataacacatagtaggacaaaacattagagttttgatccttggatgggcaaatatacagcagcaacatttccttaagcctccaaatgaatcatgcatctcagacctataccctggagcatgtagtcgaatgccttgttaatatcggcaaaaggcacagagtgtgtgatgaacttgtccatatccagccccagctccttgttcaaatatttgtcgacaaccatgggaatatcagtgcgtggtttatagttgccataaaaagcacccttaagggtcctctcacttagtagattcattggatgagttttgaatgcatcgtctttctttggcacacccaccagcacacaaacaccccaaccatcatggacgca

SEQ ID NO: 11674 - DNA, 514 bp, Gossypium hirsutum
  Clone ID: LIB3829-011-Q6-N6-D6
gagttaataacaaaatttgcatttattcatgaaaaaagttgcaagttgaaggcagccatgtctctaccaacaatcttacatctcattaaactcccaaaagtacccgaaaaccatcttaagatcttcccatctatctcccttcgctaacttcttatacaagtaactatcaaaagtcatcctttgcacatactcactcccacaaacttcaaccaatgcttcccttgcctcattactcccataaaacaccctttgcaacaaatccaagaacctaaatgtactcacatactttttgtcccattccatcaaatactcccttttcaaatcatcttaacttatcatccattctccaccctccgatgctcttactattccttccccacacatcctccccgatttggccgcaaaataaatgccttcacctgagcacttcgtaacataccccgccgggtcccctactagtgccacgcgtcctcttactcttaccggtcggggatgttccgggattgggtgggcc

SEQ ID NO: 11675 - DNA, 563 bp, Gossypium hirsutum
  Clone ID: LIB3829-011-Q6-N6-E1
ggaacagaagtgcacgaggcttgaatggagaatagtagagtaccatcacagaggtcaatacattacatggtgtttttaacatatccatggagcagttaaaagttagaatcaaagtcatttcataaaattattacaagttttttcagttttaggtaatggaaaactagattcttgcaataaaaatacatgcaacttgggcaaccatagggcatctttctatgctcaaacatcagctgcataacgtttaagacaatgttgcagagttccctgtaaaaagaaagtcggaaaactatcaaatgccaaaccaactcgaaaacaaaaactaagaaccaatcattttcaataaaaccctgactatagaactccatatttgtggacccgaacatgctatttggtgattaaactacaatgcaatataaaaaaaatgcatacctttgacagcatagagattgcttacttttagtacaattgcttccaaactgtgcttgccactgcaggaggatttggatggaaactttctccaatacaaggtaaaagcgaaccacgacccaatgataatgttg

SEQ ID NO: 11676 - DNA, 435 bp, Gossypium hirsutum
  Clone ID: LIB3829-011-Q6-N6-E2
aaaaggaaacaaacaaaaaaaaaaaaaacaaaaaacaaaaaaaaaacaaaaaaaaaaaaaaaaaagaaaaaaaaaaaaaaaaaaaaaaaaaaaaaaaaaaaaaaaaaaaaaaaaaaaaaaaaaaaaaaaaaaaaaaaaaaaaaaaaaaaaaaaaaaaaaaaaaaaaaaaaaaaaaaaaaaaaaaaaaaaaaaaaaaaaaaaacaaaaaaaaaaaaaaaaaaaaaaaaaaaaaaaaaaaaaaaaaaaaagaaaaaaaaaaaaaaaaaaaaaaaaaccaaaccaaaagaaaaaaaggaaaaaagagtaaacccaaataaaagttagggaaacaagttttgggagcaaaaaccaaaattataacaaaccaaaaataaaaaacacagacctgaaggatgcagcaacagaaaagcaaaaaaacgaataacaaaaagaaca

SEQ ID NO: 11677 - DNA, 555 bp, Gossypium hirsutum
  Clone ID: LIB3829-011-Q6-N6-E3
gttaaccatagaaactacattctaaagctgatgaaaaatgtcgagtacaagaacaaatgaattataatttttactttacaacaatcatggtacaactagatgcttgataaaattttagtactcctataaagcatgtaagggccaacttttaagagtgatcagcatcagttacccctttgtttccccgatttcatatatctccatgtagattgatccattacatcattcatatcgacattgcatggatcgatacttatcatctgcaagcaagtcgacgatacgttttttgagcctttttgctcctggaccaggtctcaagatactggcatctccccaaactgaacatgtgtcattggcgggatcacctaagcaccatccacctggtacaacttttccggggctgcgtttcaaaatttcttggtcgatacggtcgagtactggactgtcaaactggaaatgtgttgcaaaagcagctccactctgaatcatagcatcgaattcttcaggcttgagtgagagaggcttcgttgaaaaggttttgttgaaggctacatg

SEQ ID NO: 11678 - DNA, 559 bp, Gossypium hirsutum
  Clone ID: LIB3829-011-Q6-N6-E4
cacaaacacgaaaccgatattggaattaccaagtctgcttaggttataatcatcgtactaaaataatcccaacacgaaatgaatatctcatttctaaattgtcaccatagaaccttgaattatgccctcaatcagttcatacaaacagcacacttttgataattataggtttttactagaatttgttgttatatcgggcagctaacaatcacatcatgtgcttacatcggtttccttcttttccatagtccccgcaccttgctccgcctgcttagcatttccatctgccttgttcatgtcttgctcagatggcttcgtcacttcttgctcttcatcgtcactgctgtcctcaaaatcgtccatgccactgccatccatgcctcccatattgccaaagctcgagaagtccattcctcccaagtcaatatcaccaggaccattctcttcgtcttcatcgacccatttgtcccaatccactttaatataatggggggccttgccttcaccgcgcaatagttttttccaccacactttctcggctttctccaacacacaaact

SEQ ID NO: 11679 - DNA, 521 bp, Gossypium hirsutum
  Clone ID: LIB3829-011-Q6-N6-E5
ataacaagttctactagtttgacattgtttattcaaaattactagatagagtgctgtatacagcttgttaactgattacatcagggcctaattctagaagtgataatttgctctaaaaacagtttctaagcatataaattccttgaaaattaggcatgctttgaatcttatcaagcaacaacagggcctttttttttctgtatatgcttagcctcagtctatactggaagaaggtcttgcacacccacaaaaacaacccttctttcgtcttccaccccgtcttccaccattgtagataaagtcccttaagaggacaccggttcgggttttccctttgttcttcctttcatcttctagtttcagcataacgtactcaatgctctgcacctcgaactgcaaccttccgatcttttcagaccctttttgtgcctgctcacgtacgtttttcaagttgccctttccaggtccttccaattccattgagtttgttccgtctaaagatgaactcccttcgacatcct

SEQ ID NO: 11680 - DNA, 550 bp, Gossypium hirsutum
  Clone ID: LIB3829-011-Q6-N6-E6
gagaactcaattacagtttacttacaaattaagatagaaccaacaaacaacctgcttgagatattacatcaaataatgcatttgctaaaaagacacctaaggttttcatatgggatttaccggaattcttcatcaaaagaattctccgaatcctgaaaaatcccattgtccaagcacccctcaacagacatttgatataatatacaagcatatcacatttccaactaacaagagggagattgggaaattcgcttaatattttttcttatcatttgttttacacagtctataaacaagaaaactatcttatctagcttgtctctctccatcttcttctgaaatgttaaacaagaacttggggagcgatgcgattcggggaagatgaagcagcaactcactaaacgagtcttttcttgacatgcctggcgcctgcctgctactagacacttcctttgtttccccttcaaaagccttcacatcatccttgcccgtaatattaaactcaaacccatgacttctgtttagctgaacatcttttccatcatcacct

SEQ ID NO: 11681 - DNA, 546 bp, Gossypium hirsutum
  Clone ID: LIB3829-011-Q6-N6-F1
cgaaaaaaagtgacgtagttcacacaccatttcaaaggaattgtattagtttgtagtatgacatgaaaccgagaaaatttacatatcctgatttcattttcagcttcaaaaactagcaacacaacagcatcctaactacgatatattatatattgccatccccaaaaagcttgtggcaaaggaacacggggtagaaacaagttaaatggagtcttgcagttcaaaaaataaaatttaaaatccttgctaatgtcagatctaaaaagctagggagcgttggctgaaaattctttttacacaggctgctgaactgcagtatcagtaccagcggcgattgcggtttgttctgtagcagcaaaatggctgaatggtggaggctgatccagtccggccattgccattgttgatggagcttcctgttttgaatggtcaaatttacaggctggtccaaacttgcaaataccatagcggctatagtgtgagcagatggtttgatcaggtctgagtggcaatcccttgtcactgagaacacatggagccatcttt

SEQ ID NO: 11682 - DNA, 540 bp, Gossypium hirsutum
  Clone ID: LIB3829-011-Q6-N6-F2
ctagaacagaatacatgatcctaaagacccttgggaggacgcatttggctaaccgtacttcggataatgttctatggagccatcaacccatcgatagtgtaagaaagagatttgcccagtcagctttgagtagcaatgtttgtagtgtttgcattacatcatatcctggatcaagtttcctttgccaaccctcaagaaccaaagttgtgaccatcacagtggatacattgccatcaatattgactttatgacgccttactttctcaagcaattcttgcatgcattcagccggatggactggatcaccctccggagtaccccagaaagtgaaggcttcttctacttcctcaataaaagccttcgggtttgggcaattttgtctttgtgatagtctaagcgtgcactctgcagcagtacggccatctctatgggcaacagccttaaaaaattccaataaattaacacgatcaccctttgaaagttcagcagtcatgcctacatcaaggaagatgacatgaggctttgttttaaaaagctgtt

SEQ ID NO: 11683 - DNA, 555 bp, Gossypium hirsutum
  Clone ID: LIB3829-011-Q6-N6-F3
aaaatccaaaagttagaactcaagttatcttaaatattaaaataaaaatttagaatcaaaactaaaataaataataaaaactagattaaacatagaaattaataaaaccagacattataatgaagttacttaaatgaaataaggaaatgcattagatttggcgaccttttctctccaccctttctgacgagctcttatttcccacattgctgttaatttcatttgagccgacagtgcttcttcagctttctcccttacttcttcgcacgtctccatacccgaattgcatttgtccgcttccttttgatattgtgatgctaacttcttagcctcattacatgcagaatttacagtatttaagctccttttaaattcagaaacctgttcacacttctctagactctccttgtcaccagtgtagctcttgagaagttccatttcctctttagttggacaaaattttatgagattttccacttgatcaacatctaataccgtatcatccattgctagcactaaaagtaaagtcagccttgttcggaggaatcgacaacc

SEQ ID NO: 11684 - DNA, 554 bp, Gossypium hirsutum
  Clone ID: LIB3829-011-Q6-N6-F4
ggttgaggagaccaataagacaacacaattgcactaagtcagacatgagttacaccatacattcttgatcacaaaaatatataaatttacaagcccagaatgaaaatgtaacctcacctttgctttagtgttgaattgaacaataaaaataaatacaagaaaatctccacaagcagaatttaccatccctttctaatctcagagttgtataccgtggctcaccaacagtcacaacatatttagcagcagttgatcctttcaagcagactacaaagcacgaacaactcatcgcaatctgctagtttcattgtggattataacatcaggatttcgaatatgtcgattgggagctgcccagtctttccatttggctcctgtaccatgaataccggacgagatgctccacaaagtgtcacctggatgaaccttcgttgttgaaggggttgaagatttagaagcagcattggacttcagtaatggatgtttactgctctttcccattccattggcaagcaaccaacgagaaccagacttttgttgggttatgctacccc

SEQ ID NO: 11685 - DNA, 498 bp, Gossypium hirsutum
  Clone ID: LIB3829-011-Q6-N6-F5
aaccccaaatttttataggaagatagcgcgcaagcatcacaaatataataagttcctgggttacaaaggtcgcagtaactagatttgcaaattcccatgtaacaaccaggtagaaatagaacatgaaccattaaaacgtttttccaggttatttgatccaagcaaaccacacctattggctttggtttacctatagactatataggagcaggctcattatcagcgacttagtgatgggggggcttttccaagtcctcaatactagggggggggaaccacgccttttcctccaggaccgagtttgcaccactcgaatggatgccctgctccccacccgaagatgcgttaagttgctccgaagcagggccaaatacccctgtccgggggtcaagagcccagtacttgtccgattgaggctgaatcacatcatcaggaaccacagccgcatggacctgatcatccaggtttttggcgtatgccaacacgtgaggactcctg

SEQ ID NO: 11686 - DNA, 549 bp, Gossypium hirsutum
  Clone ID: LIB3829-011-Q6-N6-F6
aaaaaagttcttttttctgatctggtgtaattaaattatccaactgaaagagtagatgagtttagtgccacaccaaaaataacgtttcacagcttgaatcccaagaaacaaatacaagcttctccccctcaagtcatgcatcattatgacagtaaagcaggttgttgcatggtaagatcgtatgatggcagcgcattctcataggcgagtaatgacagcttccacctctgaaggggtgtatagatggtatgttggtgctactttggcaatatcaacattgttgggagtcaccttctcttccattacttgctttaaaatggacagagcaatagtttcagcttctagaagagtcaggtccttgttgtattgctcttgcaaagagctgtctgcaccttcggaacctgagcctatagcctttgcattgcattgccaaaatgtgccagagggatcagtatagtataagctaggcccattctcatcatgaccagcaatgagaagagacaccccaaatggccgggacatggattcttcatctccttcaccaaatcg

SEQ ID NO: 11687 - DNA, 493 bp, Gossypium hirsutum
  Clone ID: LIB3829-011-Q6-N6-G1
aatagaaaaaccaaccccaatttcaatatattttttcatacgggcctatgaacaaagaaagacgaacttttagctttaaagcttgatgattaagggacttaccgtacttgacatcaacaatcgagaagtaaaaccagataagtccctcatcaatttaaagcaatcttaatagcattttgctcagcccgtgtaaaacactgacaaaaattttaaaatagttggcggtcactttgaaaaaacttcgataaaaagtcagtaaaataatttgccaagttgagctcgttaaggggatctgaaacacttaatatgtgggcttcatcctcgcccttttgattctcgttatatgcttttgccattgcttaaaaatgttcatatccaaacctgccaaatggggtggcagcagctgaggataacaaatttttgtcaaagtccatgtctccatgaattttttcccaatactatcctaatcctcggaatcccgaacttgtttttg

SEQ ID NO: 11688 - DNA, 527 bp, Gossypium hirsutum
  unsure (1)..(527): unsure at all n locations; Clone ID: LIB3829-011-Q6-N6-G2
aaacaanaaagcagnaaattgattcattaaatactgttcgaatcacaaaaagacagaatggnaaaccatgtcatttcttacatacccgaaagcaaactttttttttccttatgatttgtactaaaaatgctgggaaaagaagaaacttaaatatgaaatatacaacaaatacaacctcaaaaacaaaagcagataatttttgaacaatttaagaaacacacaatcccatcagtatttttatgtgaacttgaatctcaagccttttctttttcttcatctgatttggagtggtaaccaggaagcttctccttgattttctccaaaattcccttcttttcctttgactcctcttcgtgatggggctcagctgctggggctggagccgggctactggcctcttcagctttcttgtgttgtccagggagtttctccttgatcttctcgaggaaacctttcttctctggcgtctctggctggactactggctcatcgcacttctctactggaactgaggtgtcctcttcttt

SEQ ID NO: 11689 - DNA, 483 bp, Gossypium hirsutum
  Clone ID: LIB3829-011-Q6-N6-G3
aaaaaaaaggggtttatggaaaacaaggcccctaaaaattggggaaaagatgttataggtcccaacaggcccacatggggggggttttcaaccaagttaatacaaaaggggaccctggaatacaactaaaaaaaggggagggaaaaatcaagcccttaaacaaaacatttggatttttaacctgggtttttctggaaaacttaaaaaggggacattaaacctttgcctttgaaaactttgggggggttgcaacttcaaacgggaggggaaaattgaggccccctttgtttggcgagtccagggcaaaaaaaaaaattgtttttgaagcaaaaaacccggacggcaggaggaacggggagttcaaccccaagacgggatcctagtttaaaaaataaaagtcttccctgggtttaagctttggctttgaaaccaactcccacaattttaaaaaagcgaaaaaatttagcttccctggggatcaaa

SEQ ID NO: 11690 - DNA, 526 bp, Gossypium hirsutum
  Clone ID: LIB3829-011-Q6-N6-G4
gagtctgatttcacaacctaaattccatggagaagaaacggacaacccccaaaaacagcactaaacgtctatcatcaatacagaaaatttctctgatacacagaccacaagactaaattcttagtatttgtagtccttaacatgaaggctctctgcagcaccctcactaatctttgcatcacccttgtatgtacccaagggggcctccgagttagccttgcacctaacaaggaaagcatcttgggctttcttcacgttttcctcctttccagcccaggccttgagagtgctctgctgaagggcacgtccaaatgagaaagagagtgaccatggtttcttggtctggagcttgttcatggcattaaggttaagggtagcctcctcctcactttgcccaccagacaagaacacaatagcgggaactgcagcagggacggtacgctgcaaggcacggacagtgtactcagcaataacctctggggcaaccttcggggagtcagaaccgggggtcaccatgttaggcttc

SEQ ID NO: 11691 - DNA, 522 bp, Gossypium hirsutum
  Clone ID: LIB3829-011-Q6-N6-G5
gataaataatattatttactttgtaaataaagttattttaatccttattcaactgagttggtaccggttgactgataacatcaactcaattaggagcttaatacattacaacccagattttcaaaagataaactaaaaatcatgaagaaaataattactttttagttggtttgtttgtaaagtgatgactgaattgttgaatccaaagaaaatctacttttatgaaggatacaaaagccactatgggaaaacaaaatgcatggctcattggttcgatggatacaatgcttcaagaacaatgacgggttggtgtaacatcgtttagaacgatgatagataagagtctcaccttgaaaactgtgttgataaagataacccagtcagacagtgtatcattcactcgattaagggacatcagcataaactgctgttccccctgattataccgtgaaaatcttcctcacttttttcatactccgacggcaaatggggcaagttccatcagcctctgctattcttgtt

SEQ ID NO: 11692 - DNA, 554 bp, Gossypium hirsutum
  Clone ID: LIB3829-011-Q6-N6-G6
atgcttcatattgctactagactgtatgagcttgccatgaaatacagaagacaaatttgggaacaacttgaatccagaattacaatagaaccaaggaaagcttaattgagaacttaaaaggtttttctacatataaagtccttctggaaccccttctttcttcttaaacatcaccttttccttggccttcttaaagtctgcatgtgtcaccttcatgcgtcgctctcttaaagcaagcaaaccagcctcagtacatattgcctttatatcagctccagagaactcatcttttgtcatcacaaattcttccaagttcacatcatcagccaatgtcatccttgatgtgtgtatctgaaaaatgcgcctccttgttttgatgtcaggaagggggaactcaattttcctatcaatacggccaggacgaagcaaagctggatcaagactttcaattcggtttgttgcaagaatcactttgacgtctcctctcgaatcaaagccatccaattggttcagcaactccaacatggtcctctgaatttcacgttcaccaccag

SEQ ID NO: 11693 - DNA, 551 bp, Gossypium hirsutum
  Clone ID: LIB3829-011-Q6-N6-H1
cgaacattctatagttttcatataagcatacaaaagttggacatagccaccctatctaactttcttagagcaaattctaaggaatcattgcaatagtatgcatgaaaagaaagttgatatcatcaatatctgctagtctaagtatagcatttgatgttggatagtcaaggtcattgctaatcggcttcggatagtttttcataaatgtattgatcaggcataaagtgcatttgttccaaggaggctgattttttataatgtgttactagcatatgaaattctgcacactttaaaacacaagaaaaggaaaaaagggctgatggcagtaaagttagacatgagcaaggcctattatagggttgaatggaattttgtggagggggtaatcaagaaaatgggatttgacccaggatgggttgatttgttaatgaaaagtgtctacagtatcatattctgtcattttaaatggaaatataagagaaacttttcttccatctagaggtcttagacaaggagacccttttagtccgtttttgtttttattctgtggg

SEQ ID NO: 11694 - DNA, 544 bp, Gossypium hirsutum
  Clone ID: LIB3829-011-Q6-N6-H2
aataacacaggtgaaaaaaatattaaaaacaaacaattgtcaagattacgactttaacaagaaaaaaaaaagaactgctgttctaacaaggttagagcatttctttaagcaaccaagtacagagggctgccttaccacacaaatttaacacatccctgaatccctactgatgaaggaagaaattagccacaatcaagggctttactcctctccacttttctgactgtaattacaggacctagaaagtagaaatgcaaatgaactctctgagtcatcaaatggtggtcgagggaactcatgaaacccaccaaaattacatgtatcgaagctcaacggtgagaagtaaccaacagcatcatcaatcccccctttaatgtccatactactactttgaacctcactttcactagaaacataagagaggttgaaattcacacttccaaccttattagtggctccatcagatgttccggcgggtgctgctttaatttcatcagaaggaatggctggagtgtgaccttggaaaagatgatatgcccaaaca

SEQ ID NO: 11695 - DNA, 550 bp, Gossypium hirsutum
  Clone ID: LIB3829-011-Q6-N6-H3
catcccaacataaacgccattaatcaatgattaagacctattttagggtcttcaccataaattttccaattttcaagcgaatacaaacacaaaagatcatactagtaagtaaaaaagctcttcttccctgaacattatcaatgctaccatgagagatcattcaacaaagagacaaattcaaccaaactcactgccattgcctttaaaaagggtgatattcgacttcgaattcgagccaagcaacctgcttcacttataaaggatcggaaaactcgatattctcacatcaaaacatatcctgctcataaaacaacactcaaccaagaggcacccgtgacatatatatataggcgaataaagagcctatatggtaaatatacaactaattccaaagggtatcgatatcgctaaataatatacacatttagtggacgattgcttaaaaagggtattatgcagaatcttcaaaactaggtagagatcaccggcaaagctcaaattatacctgatatgataaaagaatgctttcggcttgaatttcacagtaggt

SEQ ID NO: 11696 - DNA, 498 bp, Gossypium hirsutum
  Clone ID: LIB3829-011-Q6-N6-H4
aaatcctgcactaacttcgatagctaatatttacctaataattcagcctaaggaacccaagtgttcgggattcgcagttataacagctgctaaagagttgagcggctaactcaacaaaggtgggtttcaaatttcaaagtaatccccctgctgaatagttcctggcacagtagcttggccccattcggtgcactaaccttcccaaagtaatcccctgtactggcaaacccggcaatagggggccctaatctttcaaccagttgctacggtcctttaaataatgttcgtaggatttttgcaaatctggcatacatgcatctgggagcaatcactaaaagtgaagaggcgctcatgcaagtagggtgatgcaccttgagcaataaggcagtgcctgtccattttaccaaatttgatcccgccataacttttcccgactggaactgggtgccttggaagtgggggcacaggtccagagcaaccaaatttcactttgtcttc

SEQ ID NO: 11697 - DNA, 517 bp, Gossypium hirsutum
  Clone ID: LIB3829-011-Q6-N6-H5
caagataaaatggtctaatacaaactacttcgttctttctagcaacaacaataagagagtcctgttgaccctttatcaccaaaaccatcaccaagtagctctcaatttatgattacatggaagccttccaacttagacatcgagactcggatattcttttttctcacagatgttgaggaaatggaaatagattatatgaaagcacttaaaatcagtgtattgttagggggaataaccttaataatccatgccacccataccgccaggcattgccggaacatccttctcatcctttggaagttcgattacaacagcttcggtagttgtcatcaacgacgacacgcttgcagcatcgaccaaagcggttctaattactttcaatggatcaataataccagcctttaccatatcgacatattcacctttggctgcatcatagccaagatcagggttatcctgctccaacagcttaccaacaataacagctccctcaactcctgcatttgaagcaattgtg

SEQ ID NO: 11698 - DNA, 636 bp, Gossypium hirsutum
  unsure (1)..(636): unsure at all n locations; Clone ID: LIB3829-012-Q6-K6-A1
attctctgtttatgatcagcttgatgctttgtttaggtgcgaggtcccaactaaccactgatttctattcacaaacatgtccatctctcctttcaacagtacgngaaacaagttcagagtgcgatcaagaccgaaatgcgaatggcagcctctctgctccggcttcatttccatgattgctttgtgaatggttgtgatgcatcagttttgttggatggagacaatagtactgagaagtttgctcttgcaaatgtcaattcggcaagaggatttgaagtcatcgacgcaataaaaagcgccgtagagagctcatgcagtggagttgtatcatgtgctgataatttagccatcgctgctcgcgattctgttgtcttaagtggaggtccaacatggagagttttattaggaaggagagacggactagtttccaacgggacactagcaaacgctgcacttccttctccattcgaggcattggatgctatcattcaaaagtttgtcgatgttggtctcaacataacagatgtagtctctttatcaggtggccatacaattggattggcaaagtgtgccaccttcgacgatagattattcaacttctcaggaactggtgctcccgacagtacgatggaggcg

SEQ ID NO: 11699 - DNA, 615 bp, Gossypium hirsutum
  Clone ID: LIB3829-012-Q6-K6-A2
tttagaataaaaaaactaaaccctatgaagaattacgggggacagagataggggagtttacgctatctgatctggaatcttgtgaggtaagattaatcggctgctgcaatgcggtttttgtgaacagattgaagaactgcaaggtttatatggggcctgtaattgggtctattttgatagaggaagtggaaggctgtgttttcgtattggcgtcgcatcagataagaattcatttggcgaaaagttgtgacttttatttgagagtgaggagtaggccaataattgaggacagcaatgttgtgaggttcgctccgtactgtttggattatgaagggatcgagatggatttggagaaggcagggttgagtgaagagacggggaattgggggaatgttgatgattttaagtggttgcgagctgtgcagtcgccgaattggtgtgttttaccggagaatgagagggttgggaaggttcggactgaggatattgggagcaaaagcgaaggtagctaaagcttgtatttgtaattagagtcttcgaattatttgagttaatatggtcatgtttgaacttatgtttgttatctcagattttttttttcgaaatagaagggga

SEQ ID NO: 11700 - DNA, 601 bp, Gossypium hirsutum
  unsure (1)..(601): unsure at all n locations; Clone ID: LIB3829-012-Q6-K6-A3
gnactttgtttttctcagnaatctgtacaaggaattttctcgggaaaaattcattttcttttcttgattgttttttttttatatatatgtatgtatattgggttttaagaaactgaagatcgtttccatttatacaaaagtgaaattgtaattatacatgcctgtcagccttaaatatggtgtttaagaagagattagattatggatttaataccttcaacgtcccagatgtgccccgtgcccctcgatctattcggaggaggtgtaggagtaagcgggtagtagaggacagtcagatttgtgcattcgaattgttagcttctttagccgggaaactattgcaggagagcgaaagttcggcttctagcaatgcatcagaaggacatgatcatgtttccataggtaaagatgtccttaaacaggaaattcagtataatgatgatgagaaaccattgaaagttgaatgtgttgagcaaggaagctgtgacgcgagtgctgttgcttctgagtcgactaatgaaaacagtgatgatttgaaggaatttaaacctgctgactccgttttggatcgtgcttcaattaagacacggcctgcttgttc

SEQ ID NO: 11701 - DNA, 626 bp, Gossypium hirsutum
  Clone ID: LIB3829-012-Q6-K6-A4
gcgttcgctactctatacctctcttatccatctgcagcctcagcctcagcctcccaaatgacaccaaagtgaatcaaccctcaatatcaagcccctcaaatcttctcaatttgaagcacatcatagaactgctcgcccttggttccactcttctgttactgttgaagggtcatgttgaataagctagccttgccagaatccagcactttcccaggaaagccaatgccacccacagctgaatgctggtttgatgatgcatgcatccttgacatggactactttgtgaagaccatctcaggcataaaggccaagggtgttcgtcccgacttagtaggctcaatcattgcacattatgcatcaaaatggctacctgatctatccggcaatgacaccgaaaagggtcctatgagtctccaagagtcatcgccggagagtgtcacagtttcatggatgaaaaagaggttctttgttgaaaccttggtgggaatcttgccacctgagagagattccatcccctgcaacttcctcctacgccttctccggacggccaacatggttggggtggagccttcctacagagcagagctggagaaaagaattcgtggcagcttgaccaagcatcactg

SEQ ID NO: 11702 - DNA, 595 bp, Gossypium hirsutum
  Clone ID: LIB3829-012-Q6-K6-A5
gtttcgcccaaaaaaaatgattgattatcaaaatttgtagcgtgaagtgtaatgaagtgcaattagagatccatttcattttttttggggggtatccagattaatattttcaattagaatgatttatggttggcttggttggaccgaaaaatgaagcatccaggctccgtttagaaaaaacccaattggtaatacatttatgattaccacctatatcataatcataaatcttttttatttacaaattcgaaatagaaataagaacgatttcaaactattaatcaatcgaataatatgagaaatacgttgaatatttggcggaaaacatgaaagaaaaaggaattaaaataaaaaaggaaatgaaatcatagcaaaaagatgtggtattgggtcatttgtcctatatgcgcaaatcaaaatcgggcggatctttactcggagtagagcataaacctaaaaaaattgaataaaaaattgatgaaacccattcaggaacaagaaaatgacatcgtgatttggattgaatcccaatgaaaaaaaaatagatcaatgaaaagtttgtgcgataagtttagcgaatttttctatattatag

SEQ ID NO: 11703 - DNA, 383 bp, Gossypium hirsutum
  Clone ID: LIB3829-012-Q6-K6-B1
gtgcttcagtttgctgggattgaagatgttttcacttcttcaggggttctaccaagactcttggtaactttgtaaaggccaccttcgagtgtcttctgaaaacttatggtttcttgactcctgatttctggaaagagactcgattcacaagatctcctttccaagagtatactgatctgttgggaaagccatcaaagacgctcgtactcgaggatgtcgagagagtggatgtatgatgtgccttcagggccttagaatagtaaaatatcaagttccttttgtgtagtttaagttaaaatgatgccatcttcactctttttgattgcttttgtattgtcagagagatatttggaatttcagcaaccgcatattgtttttctctt

SEQ ID NO: 11704 - DNA, 623 bp, Gossypium hirsutum
  unsure (1)..(623): unsure at all n locations; Clone ID: LIB3829-012-Q6-K6-B2
anaaacaaanatacattttttttttttttgggtttgagaatggcgtttgctgttacttcatcgtcttcttcaactgcgatttctggttctagctttcctcgttcaagtgcctcccctgatctcaaagttccacaaattggtgcagtccggttagcagatcgtcatgcaacggtgagtctgtctcgaagacgttgcgcagtgaagcccgtaaatgcggagccaaagcgtaatgattccatcgttcctttagcagcaaccatcgctgctccaaaaatatcggaaaaagtagaggtggaggatttcgagcaattggctaaagaactcgacaacgcttctccacttgaaattatggataaggctttagagaaattcggaaacgacattgccatcgctttcagtggagcggaggatgttgctttgattgagtatgcgaaattgactggtagaccatttagagtgttcagccttgatactggaagactgaacccagaaacttatcgattctttaatgaggttgagaaacattatggaatccgtatggaatacatgtttccagatgctgttgaagttcaggcattggtgaggagcaaagggttattttcattttacgaggatgggcacca

SEQ ID NO: 11705 - DNA, 603 bp, Gossypium hirsutum
  unsure (1)..(603): unsure at all n locations; Clone ID: LIB3829-012-Q6-K6-B3
naaaatctgtctcgtctttaggagggaaaagaagtcaatattttttactaaatccctgtaaattcgccaaaaagactcaaaaatccataattcgttgtcttcccgtaatggattttagtcagcctccagttgaaaattatgccaaccccaagacttgtttctttcatgttctcttcaaggctgcagcattggctttttacatcctttcagctctctttttcaacagctttgtgatcatatttgtggtgactgttcttctttccgcccttgatttttgggtggttaagaatgttagtgggcgtatattagtcggtttgaggtggtggaacgaaattaacgatctcggcgagagtgtatggagatttgaatgtctcgaccaagagtcgttggctaggatgaacaagaaagattcatggctattttggtggaccctttacctttcagcggtggcatggattgtgcttggaatattctctctcataaggtttcaagctgattatctcctcgtcattggagtttgtttgactctcaacattgccaatatcgtcggcttcaccaaatgtcgcaaagatgccaagaagcagattcaacagtttgccaccc

SEQ ID NO: 11706 - DNA, 409 bp, Gossypium hirsutum
  unsure (1)..(409): unsure at all n locations; Clone ID: LIB3829-012-Q6-K6-B4
cggccgcgtgggcagcgtcagcagaaacagcaagtggttcagcagtaggagccgcaacacaacctcatcctctttcatttaattagctgtttattaatggagatcactagataaaaccaaaccacccaccctatctgctttgtttgtttctgtaatgatccctgtttaagtatgtggttggttttttacttgttttgtaataaagacgatgcaatgtgatcccaagggaagtgatcatttcaattaatttagaagtgggtttcatgtaaaaaaaaaaaaaaaaaaaaaaaaaaaaaaaaaaaaaaaaaaaaaaaaaaaaaaaaaaaaaaaaaaaaaaataaaaaaagaaaanaaggataaaaaagaaaaaaaaaaaaaatacaatagaataaaaataatttaaatttat

SEQ ID NO: 11707 - DNA, 601 bp, Gossypium hirsutum
  unsure (1)..(601): unsure at all n locations; Clone ID: LIB3829-012-Q6-K6-B5
tanaaatccaanaaattttttttaaaaaaccctaattctataaaaagatcgaattaaagtagaatcagaagcaaaaatcgccngaggaaaacaagatgtcggggcagcaagaagaagataagaaacccggcgatcagtccgccgctcacatcaacctcaaagtcaaaggccaggacgggaatgaagttttcttcaggatcaaaagaagcacacaattgaagaagctcatgaatgcatattgcgaccgacaatctgtggatttcaactcgattgccttcttgttcgatggtcgccgcctgcgaggtgagcaaactccggacgagcttgagatggaggatggtgatgagatcgatgctatgcttcaccaaaccggtggtactgtgtgaagcgagtactactttgccgcatttagtatttgatgagttagttatggtctgattatgtaagatgtttccaatgtttttatatacgaccttattgccatgttatgaagacttgtggaccttgttttgaatcatcttgctcttatagaagagcttgagtttctagtgtttacaaagtgagatggaactcggaactttgttccgatatgcactcgttt

SEQ ID NO: 11708 - DNA, 609 bp, Gossypium hirsutum
  Clone ID: LIB3829-012-Q6-K6-C1
gcagtgtgtaataagggatctgattcttgcaaaacatggcattagaggcagtggtttaccctccggatcgatttacttacggtttcaaggacatcttccctgttgctggtggaggaggaggagcctggggatatgatttttgctttcaagatgaagataaagttcttcctgtgatccttgaaaccaacttacaacaacaagggagtcatgcaaattgggactcatcgtctacttcagtcatgcaaaaacaacatgcaaaggaattatgggatccttactcttcttcgcctgaaacttgtactgtcgaccagtctctccctggtcctgcagctggtttccaagctccaatagaacccccaccagcttacacggcgaccaacggtggtggtagacgaaaacgtcgtcgcaccaggagcagtaagaacaaagaagagctagagaaccagagaatgactcatattgctgttgaacgcaatcgtcggaagcaaatgaatgagtaccttgctgctattagatctttgatgccagcttcttatgttcaaaggggtgatcaagcttcgattattgggggagccattaatttcgttaaggaattagagcagctgttgc

SEQ ID NO: 11709 - DNA, 624 bp, Gossypium hirsutum
  unsure (1)..(624): unsure at all n locations; Clone ID: LIB3829-012-Q6-K6-C2
gccatgctgaggatgaccgttctgcaccctgntggggcaactgtacttctcaggcatgttgaagtcaatgatgtggtaatgngaaatgattatgaaagccacgactgatcctgcacttcctgcaaatcttttaaccagcatccgtgctgtaactaactttttcaagaattcgagctactacagctggctgcaaaagcatcgtagtgatattcttgatgcattttcaagttgtcttgcatcaccaaacaagaatttacagttggcttattcaaccctgatactaaattatgcggtgctgctaattgaaaagcaggatgaagaaggtcaatcccatgttctttcagcagctttagagattgctgaacaggaaaatctagagattgattcaaggttccgagctttagttgccattggatcactgatgcttgagggtctggtgaaaaaactagcaatggactttgatgttgggaacattgccaaagcagcaaaggcttctaaggaagccaagattgcagaaattggagctgacattgaactgttaacaaaacagagttgaaagctggtggttcctagatgagagagaatggtcgagagtttggacagatcttctgtgtagggatcaaa

SEQ ID NO: 11710 - DNA, 619 bp, Gossypium hirsutum
  Clone ID: LIB3829-012-Q6-K6-C3
ttcttctctctttttctcattcattctttagtttcaatatcaaagcaaaatgggttcttcttgtaatgttgtttcaatggccttactggcttgtttggtgttgaactccttggtttttgttgcccacggtggtgacttttaccaggatttcgacctaacatggggtgacagaagaggcaagattttcaatggtggcaagctcttgtctttgtctttagacagggtttcagggtctggttttcaatctaagaaagagtatttgtttggaaggatcgatatgcaactcaagcttgttgctggcaactcagctggcactgtcactgcttattatctgtcatctcaagggccaacccatgatgagatagactttgaattcttagggaatctgagcggtgacccttacattttacacaccaatgtctttacacaaggcaaaggcaacagagaacaacagttctatctttggtttgaccctacaagaaacttccacacctattccatcatttggaaaccccaacacatcattttcttggtggataacacccccattagagtcttcaaaaatgctgaatccattggtgtaccattccccaagagccaacccatgaggatttactct

SEQ ID NO: 11711 - DNA, 596 bp, Gossypium hirsutum
  Clone ID: LIB3829-012-Q6-K6-C5
ggtggttctgcggttgtaggaggaggtgctagtgctggatatggaggtggtggtggtagtggagaagtggtggtgttggaaatggaggtgctggtggacatggaggtggtagtggtagtggtggaggcggaggtagtgcaggtggagcttctggatatggaagtggagttggtgaaggaggtggagctggtagtggtgccggatatggaggagcaggtgggcatggagagctcccgttgaggaacagggttcaccacccaccatcccaggtggagcaacgctaatatttgacgcagagcttgtttcagtcaatgggaagccatcgagtggggaggatacaagtgaagatgagctatagttgctttgctcattagcgctaactttttttatattttactacgcttgttttccattaaaaaacgctattatgacggcgtaacctcaacaggccttctgtctaggattcagataatatttttgggggtttctttttttccacaaggaaaactatctgtttgttacgatgttggagaaacgttctttttggatggttcctcctttgattattattatatgtgggcagataaagtgaattc

SEQ ID NO: 11712 - DNA, 587 bp, Gossypium hirsutum
  unsure (1)..(587): unsure at all n locations; Clone ID: LIB3829-012-Q6-K6-C6
ggactccgtaattctcccatttcctccccagcatcactctgttttgtttcttggtcagtttccgttattaaacaatnggaaaagattcagcacagccatgtccaagcgcgaggattaaagcttcacgtagcccaaagtggaacaggtcctaaggtggtgcttttcctgcatggcttcccggagatttggtattcatggaggcaccagatgattgctgtggctaatgctggtttccgagcaattgcttttgatttcaggggctacggactctccgaccacccaccggagcccgaaaaagctagtttcaaggaccttgtcgacgatgttgttgcccttcttgatttgttgggaatcaataaggtttttcttgttgggaaggattttggagcagtgcctgcatttatggtagctgttatccaccctgaaagggtgttaggtgtcataacactaggcattcctttccttatacctggtcctgttggtatccaatttgatctcctccccaaaggcttctacatattaagatgggcagaaccaggaagagctgaagcggatttcggccgatttgatgttaagaccgttgtaag

SEQ ID NO: 11713 - DNA, 453 bp, Gossypium hirsutum
  unsure (1)..(453): unsure at all n locations; Clone ID: LIB3829-012-Q6-K6-D1
gttgctgggnacacttcttcaaactgttacacttattattatcacctggaaaactgattgggataagcaggttctcttggctcattcacgagttaacaagtggtttgtaccagaatcccgggaaacaaacagcaaccaagaaaatggtgcttgaaggggtcaatcttgttatttttcctaatggacttatatttttttgttgctatatgtcatttcttgaaacgatcgacgcatctgcgttaggattttgatttcccatgattttaagaaaagttttggtgccattttgtcttgttttgttgggttggctcatttagttaactattaaaaggtaaatgcatttaacaaaattagcttagccaccttttattaaccgagtaaaaacaaaactaaattatgtatacacgactgaatattctatattatatagatttctgacatgtttatagattg

SEQ ID NO: 11714 - DNA, 625 bp, Gossypium hirsutum
  unsure (1)..(625): unsure at all n locations; Clone ID: LIB3829-012-Q6-K6-D2
ctgttactaaccggtcaaaaggctgggtcgagaagaacaanaaggcgagcgggattttgaaggcttctaccgaaacagcgctccaacttctgctttatctctggatatctcagaggcagctacaagcatttcaaagttgcaaagagaggaagcaaagatcagtgcttgggagaatctgcagagggcaaaagctgaggcagccatacgtaaactagagatgaaattagaaaagaagagatcagcttcaatggataagatcttgaggaagctgagaacggctcaggtgaaagctcaagaaatgaggagttccatatcaggcaaagaggatgaacagattcccaagacttcaccaaagtttacattcttccatatccgcatgagttttctcagcagttgcttcacctgccatggtttctagtttcttgcaaatcttatgtccatatcctcaaatcttttccatcaggtattaagcttccaagggagtatttgtttctggatttttttccctgccggtttctcggcttccctactcttccatgtaaattatcttaagatttctagattcgatggtccaggagaccgcagctttcaacttcttgttcttagtgtatgtgattttttttgg

SEQ ID NO: 11715 - DNA, 599 bp, Gossypium hirsutum
  Clone ID: LIB3829-012-Q6-K6-D3
cggccgcgtgggcttcttcattctcactctctctccactgaactcttgctaaacggtatcgttttagtcagtctttcatcaatggcgaaagaaccggttcgcgtcctcgttactggagctgcaggacaaatcgggtatgctcttgtacccatgattgctaggggagtcatgttgggtgctgaccagcccgtgatccttcacatgcttgatatcccacctgctgcggaggctttgaatggtgtcaatggagttggtggatgctgcttttcctcttctaaagggtgttgttgctacaactgatgttgttgaggcatgcactggagtcaatgttgctgtcatggttggtggtttcccaaggaaggaaggaatggagaggaaagatgttatgtcaaagaatgtgtctatttacaagtctcaggcttctgctttggaacagcatgcagctcctaactgcaaggttttggttgttgctaaccctgccaacaccaatgcattgatcctgaaggaatttgcaccttcaatccctgcaaagaacattacctgtttgacaaggctggatcataacagggcactaggtcaaatctcagagaaactaaatg

SEQ ID NO: 11716 - DNA, 621 bp, Gossypium hirsutum
  Clone ID: LIB3829-012-Q6-K6-D4
gtgaatgtatatgatattactaattcttctgatcacttgatcatgtatggtcaccaaaatcaagatggtgacctggctttattgcatgaaagcaagcttgattttggagatccattcaggaagcatcagatgatatgtagatatcatcagaaggcacccacatcatggactgcgctgaccacggccttcttattcttcgtgatctgcttattggttggctatatcttatatggtgcagcaatacacattgttaaagttgaagatgatttccatgaaatggaagagcttaaggttcgagcagaagctgctgatgtggccaaatcacagtttttggcaacagtttctcatgaaatcaggactcccatgaatggcatccttgggatgcttgctttgcttttagatactgatttaagttcaacacaaagggattatgctcaaactgctcaagtctgtggaaaggcactgataacattgataaatgaggtgcttgaccgtgctaaaattgaagctggaaagttggagctggaaactgtcccctttgaccttcggtctatcctagatgatgtgctctctttattttctgagaagtctagaaacaaaggtgttgagctggcagtgttt

SEQ ID NO: 11717 - DNA, 592 bp, Gossypium hirsutum
  unsure (1)..(592): unsure at all n locations; Clone ID: LIB3829-012-Q6-K6-D5
gnaaaataaagctatatatattaaaaagcactattgaaagaatggagctgatgggttcgtctttcggtgaagcttttccagcaatgcaggaaactttgctggagtttcgtgctggtaaaatgatgttggaaggaaaaaggttgtccctgatacacgtaaagggctcattcgcatagctaggggtgaggagggactggttcattttcagtggcttgatcggactcaaaatgttattgaagatgatcagattattttccccgatgaggctgtttttgagaaggttaatcaagcatcaggcagggtttacatattaaagttcaataccgacgaccggaagttctttttctggatgcaggagccgaaagctgaagatgactcacaattatgttgcgcggtcaataatttcatcaatcaaccattagaacttggtgtagatgagcctgatgcttctgagcctttgcaagcgtttgaagacatggttgaagatgatatttcatcaagagctggaaacttgactgttacaaacttaggtgctgaagcgattagtgatgtaacctcttcatcagggccagttaaattggaagacttgcaa

SEQ ID NO: 11718 - DNA, 512 bp, Gossypium hirsutum
  Clone ID: LIB3829-012-Q6-K6-E1
ctcaaactatcgctgtagtaacggaggaagagctgaggatgaagctccggttgatacgacgccggctgcggcaagctgcaacgctggctgcgacggttcttaaagctgattttaaaaacacatctctagaatacacctttagctgcagaaacatctgatgaataaaacgctctagccgaggctgttgaagcccctgagacagcccctaagacaagtccaagtggatcacatgatggataacatgatatagatgatcttgttgaggatataaaaaaggattaattaaggcattgattgatggttgaaaagccagtgctaaaaaacaaggctcagaacaaggtctatgatattgtatcttgtgttaacagatggaaaacacagtcttgaagcaaatcttaaaacaatagctgaacaattggaagaaaagaaggccaagtacaccgccacattcaccaacacagtgacttaaattgacacttaaattcacaaagaaacagcaatagtcaaagcca

SEQ ID NO: 11719 - DNA, 615 bp, Gossypium hirsutum
  unsure (1)..(615): unsure at all n locations; Clone ID: LIB3829-012-Q6-K6-E2
cntattttaaaaaactgacactattattttaatagtagattattcttctctttttctctcgtctgtttcttttagcagttttttgggtcaaattttttcgactaatttttttttcccgattcttttctagaaaacctttataaatattgaagttctgtgttaacgttaggggcgatcttcactacaagattacggcgaatttacttctaagacagcgatttttagatgccgcagtgattattttatatgtttacatttagtttattttccctgctaatgattttgttttgcagtaggatattttcaacatctctaacactttctattgttttgttgatcatctgagttctgagttgcagttctctttggttaaagcaaatggaagatacatgtaaggattgtagggactgggaagaggaaatcttttggacccattttcagtctgtacatttcacacaatttctccatggtgattttcttcagcggttggaaataccagaaaagtttgctaagaacatcaagaaaaagcttccagaaactgtgactcttaaaggtcctagtggtatcatatgggatgtaagactgacagtagatgatgatgataccttgtttttc

SEQ ID NO: 11720 - DNA, 600 bp, Gossypium hirsutum
  Clone ID: LIB3829-012-Q6-K6-E3
cgatccaggcatgagatgcggtagcccataacagagaggattggaagaggaagtggtatttaaattgttatgccaagctgacaaggttggtagtttgatagggaaaggtggttctgtggtgcgggctatgcagaatgacactggtgcagcaatcaagattgctgatacttctcatgattcagatgagcggattgtagtgatatctgcacgagagcatgcagagcaaagatattctccagcacaagatgctgttgtacgagtgcagtccagaattgctgagattggatttgaacctggtgctccaattgttgctcgtcttcttgtacctttgcagcaggttggttacttgttgggtaaaggtggtcatattgtatctgaaatgagaagagctactggtgctaatatacgggtatctttgaaagaacaactttcaaagtctgctggactccagaatgatgaagttgtacaggtcattggtagtttgcagtcagttcaagatgcattgtttcatatcacaggcaggcttcgggagtctatactcccaatgaaacctccctttccaggcattaatccccctccctacttacctccttaccctga

SEQ ID NO: 11721 - DNA, 280 bp, Gossypium hirsutum
  Clone ID: LIB3829-012-Q6-K6-E4
gtctgcattctagaagcgcatttgtattgggactgaaatggtccatcggcacgtgtatcttttttggctttttatgcgtgatcattaaaccttgagctgtgtcattgcaagatgagtgatcaaggtattttatgcttgactgtgtttttcagcctacgtacccggacttagacggggaacaatgccattcatactgcatagttttgcagccgatgcacacctaaaattattcttacgtcagagcttatatatattatattagaattttttatattttatc

SEQ ID NO: 11722 - DNA, 558 bp, Gossypium hirsutum
  Clone ID: LIB3829-012-Q6-K6-E5
ggcttcaatgctagaagcgaggcaggcccctggtctgtcgcttttaactatgccgaaggtctccaatcgttaaggtatcaaaagagagaatcgaatcagtggatgaagctgagaagaatatgtttacagcatcattgatggggatctcctgaaatactacaagactttcattggcaagatcattgtggttcccaagggagagtcgagcttggttaaatggtcctgtgagtttgagaaggcaagtgaagagatccctgatccaagcgtcattaaggaatttgcagtgaagaactttaaggagatcgatgactatcttcacggtaaggcttagagaggccaggccatgccatgccatgccatgcatgatcctagccctgtttaatggattctctcatgttttcttagtaataaaataacatgcaaggatcccacttcagaatatttgtctaggatccatccttaattagttcatcttgttgagtggtgacttcttgctgcaaagtaatcctgttgctttgtattttcaatattaatttatgtattgccatgggttttctt

SEQ ID NO: 11723 - DNA, 106 bp, Gossypium hirsutum
  Clone ID: LIB3829-012-Q6-K6-E6
gtactcccctactggtatgttcatccagtctatagcagcaacattcttatcaaagcattacaatcctcgctcctgtcaaatctcctaacactgatggcatcaatcc

SEQ ID NO: 11724 - DNA, 636 bp, Gossypium hirsutum
  Clone ID: LIB3829-012-Q6-K6-F1
catttttcaaacaaactcaaaaacattaaattcaaagttcacaagccatgacaatgatggtggagatgcatctttgcctgactcagctatgttgttggctaaatatcctgctgcatttgttaattatcctgcatccttatctcaagttcaccctcaagcactgcagactcttgtccagagcactgaacgaaacttcaatggtgttccagtttattcccttaaggaaataagcagcactggggtggattatctcgtgtacgggggccatcattgcatgaaggttgcacaatttactatcgatatgaagcagcaacatgaaatgttcccccagatgtgaaggcgtaactgattctatgcaatcccgaaattacagcagcggggaagggggatggttggaactattgttgtaggtagggtaggacttctttctgattcggtagcagtacttagaatgcagtactcgaaaactaagaagccaaatgacgggcagaatgagagcatcatcagggaagaagattcatggaataggtaagggggacataggtagatagtagaaaccaaatctttctttgctgcacgcaatacaatagattttggtactgtatgcgttttaacgacacttgatgactgcgcagt

SEQ ID NO: 11725 - DNA, 619 bp, Gossypium hirsutum
  Clone ID: LIB3829-012-Q6-K6-F2
tacccaacttgtttccttcaaaatccattccttccttcgccttctctttcccagccttctgcatttcctgctccggcggctcttccttctcgaaaactccgccccatttctgtccagtgctccctggcttccgccccctctgtggcggtgacggcgtccaaggagtgcaaggtgaaatcggtcaaggctaggcagatcattgacagcaggggtaatcccacggtcgaggttgatttgatcaccgacggtctttatcgatcagccgttcctagtggcgcatctaccgggatctatgaggcccttgagctcagagatggtgacaagagtgtctatggcggcaaaggtgtgctctttgccgtccaaaacatcaatgaaattttgggtcctaagcttattggcattgatgtcagaaatcaagcggatgtagatgctgtaatgctggaaatcgatggtactccaaacaagtcaaagcttggagctaatgcaatattgggagtgtcattgagtgtatgcagagccggcgcaggggcgaaagggatgccattgtataagcatatccaggagttgtcaagaacaaaggaactcgttatgccagttccagcttttaatgtcatcaatg

SEQ ID NO: 11726 - DNA, 477 bp, Gossypium hirsutum
  unsure (1)..(477): unsure at all n locations; Clone ID: LIB3829-012-Q6-K6-F3
aaacgcggtcagnatgctggccgtcgccgcttaaggnaacaatgcattggagcagagccattctaagtgctgccggcgccaagatcaggaagaaacataagaaagcgaaggtcatcgccgatcgaggttgaggagatcatcggagattaacaaagggaagaagaaatcgacggtcgttgaaaggaagctgaaggttttgagacggcttgttcccggttgccgtaagctatcttcttactcgaacgttctagatgaagctagagattacatagcggctttagagatgcaagttcgatccatgacggctgttgccgagtttctcggtggtggcggtatcgttcgagcgccgccgccggcttatcggcttggttctaatgtcgactcttaaaaaaaagtgagaagaaagtgatattagtatttacaaattacactccttaaatgtaattagcaatttaaatataaaaaagttaatttaag

SEQ ID NO: 11727 - DNA, 493 bp, Gossypium hirsutum
  Clone ID: LIB3829-012-Q6-K6-F4
atttagggttccttagcaccagaacggttcaatgttgaccttcgagagtcaaaagattcaaggctctcagagcattgtcgctaagctcaccacccttctttccagcagtgtcagcacagcatcaccaccgtcgattgttagccctctggcgctggcggcatgctggttttcgtcaatggtaccctccaacttgccggcgaacaacatgctctgaagttcagccaagtaattatattttctcttacatctttgttcatttctatttttcgtggttttttaaaagaagctctagggtttttatgcgtaggtaggtgatcaatctatgacttaatttatgtgtcctgttgatttcatcgatcatatcgatggtcttaatttcactatgggatttgctagagaactgagtttttcatttggtaaaaattgaggctcaggattgaatcagtagagtcgggatcttaacaattcaattaagtgtgattttgttgtttat

SEQ ID NO: 11728 - DNA, 600 bp, Gossypium hirsutum
  unsure (1)..(600): unsure at all n locations; Clone ID: LIB3829-012-Q6-K6-F5
gcgttcgnaaaagaatccaacaaactgcaaacatgagctccgcggcagcaacaaccaccaaagaggccggggcaagtcaaaggctaaagccgtttcccgatccagcaaagccggactccaattccccgtcggtcgagttgcacgttttctcaagaaaggacgatacgccgagcgcgtcggatctggatcccctgtctatctctctgccgttctcgagtatctagctgctgaggttttggaattggctggaaatgcagcaagggacaacaagaagaacagaatcattccaaggcacattcagttggctgtgaggaacgacgaagaactgagcaagctgttgggaggtgtgacgattgcaaatggtggagttttgccaaacattcatcagaatctgctgccaaagaaggcttcgaaagggaagggcgagattggatctgtttctcaagaattttagaggatcttgtagtgcattggggtgattttttttttttttgggatagcatgtaatgaaacagttcgttttttacatgtataaacgtgttagtaaagaaagcgtagaattgaatcttttattctaaaaaaaaaaaaaaaaaaaaagga

SEQ ID NO: 11729 - DNA, 408 bp, Gossypium hirsutum
  unsure (1)..(408): unsure at all n locations; Clone ID: LIB3829-012-Q6-K6-G1
ctagnaacctanagaaaggggggaaatgaggccgatgccgatggaattcatgacagacccaaacgaccaagggtcagccatgaaagttgacgatgttgacacactggagatcttcgacgaaggcgtcatcgctttcgacaacaagctcgcagatgctgatttcttcaaaaacttcgaagacaattttgatgactctgatatcgactgaaaaaacaaagaaggatcgtttcaagtactcatctatcttttttttccctttttactttcgctttttagggtctgaaatttattaaaactttgttcaatttagtcgaatctgaactgtaatatggatgcttatctgtatgcaaatcaaaatagtgtagtttataagtttaaatcggtataaataaatataattttcctttt

SEQ ID NO: 11730 - DNA, 629 bp, Gossypium hirsutum
  unsure (1)..(629): unsure at all n locations; Clone ID: LIB3829-012-Q6-K6-G2
gggnacgttagatttaccaggnaaaccggtccagaggaagcgagtcgggtcggagcagcgggtttcgaagagatctggctccgtcgatgacttgaaggcggtggcgaacaatttcaagatggagaaggttacgattttgaggcgtggagagtcgttggattcgaagatcaagagcaacagcggtggtggaaaggaagacgggttggttgtcacgggtacggatcggttaggtccagatccagaaatggtttcgaaacagatcagatttgtggatatcaagtctccggtgacaggaaaatccgacgtgtacgctggatcggctttcgctgcctctccggaaccgagttctcttcctttgccttctttctcgaagaagaagcatgttccgatcgatgattcggccactagagatctcaggcgtatactccgacttgatatctgagatctgaatatgttcacccgagtagatatattcggatccagaataagatcgtttcgtctctatttagaactctccggtagtttcaagatccgattacctccgtaatattttttaaaaaacggagggcagatttgaaaatgggagataacattaggggcgattagggaaatattccatgttgatgttg

SEQ ID NO: 11731 - DNA, 647 bp, Gossypium hirsutum
  unsure (1)..(647): unsure at all n locations; Clone ID: LIB3829-012-Q6-K6-G3
gcctttcacaatcngcaccgtatagctgtcttaagatttgccaacagccattggcacacgtgtatatatatgcgcctcatctccgatagatcgcanctcagtgacacacaaggcatttcttcttggtgactaataggacaaatattacattgtgtgccaagaatacctatgcttgatggagaaccacgacnattaaggaaaagcatgcgcttgggcatatattgctaactttgcgcaatcattgttgcaaagaccctgaagctagacatttatattccttctgatagactggcattaggtaccccgctgagatcttacagttgatagaaatgacttgtgtatcaaaggataagcagcaaattatctcatgcggttacaatatggattctttatggctaatagaggctaatcaaaacaataacccatatctcataaattggcactattcctataaagcgcaacagattcctatttataaaaacaacactgtattcaggtccattagaaccagctgatgagcagcataagaattactggggtccgatcaacacaacgcatgatgaagcaagagataaagaataccggccacaccattttgatgatgggtccctgtcgcatcttgaagcttcaacatcagctcctttctt

SEQ ID NO: 11732 - DNA, 617 bp, Gossypium hirsutum
  Clone ID: LIB3829-012-Q6-K6-G4
gtaccatcaagtctttgtactttgaagtaaaaacccaaactcagtaatctaatgggggaggaagagaaaaaccagttgaagagaaaaaaaggaagagaaaaagttgaagatgatggaaagaaagtgaagaaaagaaagaaactaaagaagaaaccactccaccaccaccaccaccacctgcacaagagattgtattgaaagtttacatgcattgtgaaggctgtgctcgtaaagttcgtcgttgtctcaaagggtttcaaggagtggaagatgtaatgacggattgtaagagtaataaggtggtggtgaaaggtgaaaaagctgatcctttaaaagttctagagagagttcaaaggaaaagccataaacaagttgagcttctttcacctatccctaaaccaccgtctacggcggagggtaaaaaaccagaggaaaactaaaagcctaaatctgatgaaaagaaagaagagcctcaagtaatcatggtggtgttaaaggttcacatgcattgtgaagcttgtgctcaaggaattaagaaacgtattcaaagaatgaaaggggtggaatcagctgaaccagatctgaagagctcagaggtgacagtgaaaggagtgttt

SEQ ID NO: 11733 - DNA, 590 bp, Gossypium hirsutum
  unsure (1)..(590): unsure at all n locations; Clone ID: LIB3829-012-Q6-K6-G5
aaaaggtggatgtttgngatgaggtgagaagattaagaattaattacaaataaattataaaaatatatgggaagggattcagagtcggactcgaatggatggagtcgagctcgaggtttggtagtgaagacgctggtgttaattggaggcgcccttttgctcaagaggtttaccaaatccaccactcgttgggaccacgctagaatcgttgctcgttctcttagcggcgaaaagttctcgcgggagcaagcctctagaaatccagatagttacttcaacatcagagcacttacttgcccagcaacggagatggtggatggttcaaatgttttatatttcgaacaggcattttggaggactccccagaaaccttttcggcagaggtttttcatggtgaagccttgtccaaaggatttgaaatgtgatgttgaggtaagttcttacgcaattagagatgcagatgaatacaagaatttctgcgatcgtccaagggatcaacgcccactacctgaagaagttattgatgatattgctgaacatctgacaactatatatctcaaacgctgtgagagggggaaacgctgtttata

SEQ ID NO: 11734 - DNA, 583 bp, Gossypium hirsutum
  unsure (1)..(583): unsure at all n locations; Clone ID: LIB3829-012-Q6-K6-G6
tcggcctgatctccaanaggctcgtaagtaaaggacgaatgattgaggcaaaaaagttttgcagagactaggtggcagggaagatgttgctggtgagatggcattgttagtggagggacttggtgttggaggtgaaacatcgatagaggagtatataattggcccggccaatgaggacatagaagaccaagatatatcagatgataaggatcaaatcaagttatatggacctgaagaaggtctttcctgggtggccagacctgtcacaggacagagtactcttggtatcgtgtcacggcatggaagcatggctagtcagagcgctcttggtcttgttgatcctcttgtcaccctctttggaagtgtccatgagaaggttccagaaacgggaagtatgcgtagcgcactttttccgcactttggtagcatgttcagcgtgggaggtaatcaagctagaaatgaagagtgggatgacgatattgttcccagagagggcgaggactacccatctgatggtggtggtggtgattctgatgacaatttacatagtcctttgatctcaggacaaacaaccagtttggat

SEQ ID NO: 11735 - DNA, 655 bp, Gossypium hirsutum
  unsure (1)..(655): unsure at all n locations; Clone ID: LIB3829-012-Q6-K6-H1
tcttccgcaggttcttatgattgcgaaataactgcagttgttcaatttttatcattgaacgtgccagttttgaagcctgagctacttttnattatccgaaaattgttattattacctgtgattagtgatgattatttagctctaatgaaaatttggaagttcgtttttgttggaaaatttgtgttttttaccgatggctgtgagctacttggcaatctcagcagcgtccacagctttaagcttcataggtcttcaagtttgggcagaattttcacttgataaacttcagaatgatgggttaattagcgagaatttcattcatacggaaaatgtcgaccgtgcacttgagcttcttttaggttcttatgcctccttggttctgctcgcaaattttgtgctcaatgtatttattctactcatcctttctctaaagactgtattttttggtgacttataccccttagaaactcggaagttagtagaacgtcttatcaactatgttatctacaaggggacctttctaccattagtaattccaccaacagtattccaagcaggtctctggtcaatttggttgattgttatatgttgtctaaagatgtttcaagctttggccagggatagatttgagcgtttgaatgcatctccttctgct

SEQ ID NO: 11736 - DNA, 615 bp, Gossypium hirsutum
  Clone ID: LIB3829-012-Q6-K6-H2
gttgtgagaaggggacaagacctggaaaagtgaactttaagattggtgatgagataatagtttgtgataggcagaagattgcttctctttcggccccatttcatgctatgcttaatgggtacttcactgagtcgtcttctcaggacattgatttatctgaaaacaatatctccccattgggtatgaggacaattggtgagttcagcatcacaggcagtttgagtgaagttcatcctgatcttttattggaaatactagttttttcaaataagttctgttgcgaaagactcaaagatgcttgtgataggaaacttgcatctttggtttgcaccaaagatgatgctgtggagtttatggaatacgccatcgaacagaattcccctgtcctggcagcatcatgtctgcaagttttcttacacgaactgcctgattgtttgaatgatgaacgggtggtggaaatatttagccatgcagatagacaacagagatcaatcatggttggactggcctcattttcgctgtattgtttgttaagtgaagtagctatgaaccttgatccccgatctgataaaactgtttgtttcctagaacaattgattgaatcagctgaaactg

SEQ ID NO: 11737 - DNA, 613 bp, Gossypium hirsutum
  Clone ID: LIB3829-012-Q6-K6-H3
accatttatgattgatttatatccttattatgcttatagagattctccgcaaaagtctctttggattatgcgatgttcgagtcatcctcggaagtcatagatccaaatactggtctactttacacgaacatgttcgatgctcagatagatgccctttattttgccttgatggctttaaatttcaaaacgattaaggttatggttaccgaaaccggctggccttccaaaggttcaccgaaagagaagggtgcaactccagacaatgctcaaacttacaacaccaatctaattcgacatgttttgaatgataccggcactcctgccaagcccggtgaagagctagatgtttatattttctcattgttcaatgagaataggaagcccggattggaatcagagagaaactggggccttttctatcccgataagacgagtatatataacttggacttcaccggaaaaggtgtccttgatatgactaatagtacggatggttccaaaaatggaacaacgtggtgcattgcttctagcaaggcttctgaagcggatttacagaatgctatagattgggcttgtggccccgggaatgtagattgctccgccattcagccta

SEQ ID NO: 11738 - DNA, 616 bp, Gossypium hirsutum
  Clone ID: LIB3829-012-Q6-K6-H4
cttactacttggctgtgccctttcccatcgagaaagctccaacgaagaagataaccactttgaatgatgaagtgataatctcagagcttttgaactatccggtcaggggtcttgtctttgagggtggtaacactcttcaggccttgtctgacacagtctctgatgcctgcatttgccttcaagagaacaacataccatataatgtcctcatctccgattgtggaaagcggatctttctccttccacagtgttatgctgagaaacaagctctcggggaagtgagtccggagcttctggacacccaggtgaacccagctgtgtgggaaattagtgggcatatggtgttaaaaaggaggaaggactatgatgaggcgtctgatgaaaatgcttggaggctcctggctgaggtttctctctctgatgagaggttccgggaagtgaatgcactcatctttgaagtcattgccagtggcgaagatggcattgaacatgatgctaagagtctgcctaaggagcccgatcctaaagctgaatccactgaagaagaaagcaccatcaccaaaacctcccaccgcgctatggtgggtgggacacaagaatgcgttgttctgcagta

SEQ ID NO: 11739 - DNA, 463 bp, Gossypium hirsutum
  unsure (1)..(463): unsure at all n locations; Clone ID: LIB3829-012-Q6-K6-H5
aagttgcttattgcnatcgaantgcacattctacccgtctaaaagtgttgttgtgcttaccaaantggtggtagtgatgatgaaccatatttagtggcatctgcatcatccgatgggtttatacgtgtttgggatgttcggatggctgccaaggagaagccaaatccattggccgaggctaatacgaagtccaggctgacttgtcttgctggatcatctctcaaatcttctaaacgacctcggattgggaagagtactcctaaagaagaggatgtggcagaagaagtataagaaaatttgccagtgagcttgaactatgtagaaggggttttgagagctctctcatggttgctgaaaaaaatcctgtttttttattcacaactgataattcagttcatattgagtttgactgttgagttgtatcattttatttaaaatttattacttaaattgagattctcat

SEQ ID NO: 11740 - DNA, 547 bp, Gossypium hirsutum
  Clone ID: LIB3829-012-Q6-N6-A1
agcattaaactgaaaacgtgtcataaaatgttgtcggggcataaataggggcatatagctcgtaaaacaaaccacagaaatcatgaacattattacataagctgatatttacagcaatcatgtctcacataagtacttccttcaatctcctatcacttgaccaccaaacttgactataattatttgagcaaatcctgtttcaattaaactgcaatctaagaattaacatccctgcaattcttcctaatctctccgtcagtcccagtaagtggacttatattccccatcttgatcatggagttgacaaagtcattgaagaaaagtattgagttgctgctgtaactttcaacaaggcttttagttgtggaaacggccaaatcactagaatataaaatctgatccgaacctaataagcccttcccatttaacaagttcttgaaataatggttgtcaaataaatcagttgagttcctatcaaaagcagtgaacctgttactgtcaccgttaaccggacaaaagctttgcagatccgccaacatggtcgcct

SEQ ID NO: 11741 - DNA, 549 bp, Gossypium hirsutum
  Clone ID: LIB3829-012-Q6-N6-A2
aaatcagggttcaatgcaaaatatgttctataaaagattcaaaagactacaaaatgtatatgaagtaaataacctggactgcaggcacacatgaaatcacaactaaacaaagcagaaaagatgccatcagctttcatttgccatgagtctgacaaaataattgagaagcttgtaattaaaaacttaaaagaagaagaatgacgtaactagagcactttttgaaatataaaaagtgctcccttgccacttcatttcccattctatttcgaaaaaaaaaatctgagataacaaacataagttcaaacatgaccatattaactcaaataattcgaagactctaattacaaatacaagctttagctaccttcgcttttgctcccaatatcctcagtccgaaccttcccaaccctctcattctccggtaaaacacaccaattcggcgactgcacagctcgcaaccacttaaaatcatcaacattcccccaattccccgtctcttcactcaaccctgccttctccaaatccatctcgatcccttcataatccaaa

SEQ ID NO: 11742 - DNA, 541 bp, Gossypium hirsutum
  Clone ID: LIB3829-012-Q6-N6-A3
aaccgtaaaaattccggttagaccgatcttatttttttttcgtcgaattcatttacaaaatgtcaatggctgggaaaatgaatcaagtgagtagtgtgaggaatattacataacaatgtcaatcaaatttgtacatgttttttctttttcttcttgttcttggtcaatggtttacctttttacatcggaacagttgggactgttgcaagtccgtttctgtcgggttcagtgtcagtgatcctcaaagttccgggttgatgcttgccttgttgtttagcttgatgctgagaccagtatgcatgagcagctaataccctgtccaacagttcctgtggtactggctcccctcgtctttgctgtggggaaattttcgccgtgtgaaccaatgttttccatttatccttcaaatccacgtaagttcggtgatcggcattctcaaaagctcgcagtttgatatcacgccacctcccagtaccaagctcctcaactgcctgtaccaatgcttctacttctaaaacagaaaacggcctcctagttcgac

SEQ ID NO: 11743 - DNA, 551 bp, Gossypium hirsutum
  unsure (1)..(551): unsure at all n locations; Clone ID: LIB3829-012-Q6-N6-A4
aatacgaatcttattattgttacattattatcgcgacatgggaacatagnaaaaaggaacatatatatatataaaaacattaaatttagcagcaaattaattaggaacccctgcacaatgaagtcaagacatggattttctccacttgggaggacgaacaggcttttgtttgatatcaatgggggtttgcctcccaaattagcctctctttcttcttcaatcttctcaaatacactcacgctgctcttcagcgacggcattatccccagcttcttccacctgaaaaaccctttcttcttatccactagtttctccatttgcatttgtatcgctacgcattggttttggaccctcagcagctcttccttcagcttctttatctccatttgttgagcgttcatttcacgtttcgacatgcaccgaaccggggcttccagtcctgccgggttcggactccgggttccgttgaacgacccactccaatcaacaatgtcggttgaagcttgctttgctcgcagaacaacacttgnaatcaccgcccgaactggcaa

SEQ ID NO: 11744 - DNA, 550 bp, Gossypium hirsutum
  unsure (1)..(550): unsure at all n locations; Clone ID: LIB3829-012-Q6-N6-A5
cggaaagttcaaaaaactatgatggctccgttgctttatatatttatttcgtctgtgattcagcaatcccaaagtttctttttttttcaaaaaaaagaaagaaaaaaatagtctttttttttcgtactcttttattttataacataaatattgttataaatattgttaatagcctctggtgtgaaaagaaaaaaatttgtgacgctgagatgggcccacgaaagctaagataaaattggaaatgccctttctctcatactactctttcgatacataatctaatggtttgaaaaaaaaaagaaatcaaaaaaaatatcatatcgaattcgaagtgccatgctattattacttactaattcatatttcatatggcgaaggcatagtcttcttttttctttccatcaaataaaaaaaactcattggcgcncgagcgtgagggaatgctagacgtttggtaatttctcctccggccaggagaaaagatcccattgaagcagccaatcccatgcatattgtatgcacaatctggttgcacaaattgcatagtatc

SEQ ID NO: 11745 - DNA, 537 bp, Gossypium hirsutum
  Clone ID: LIB3829-012-Q6-N6-A6
aaaaaaaatttctattttcatattttttaaataaaaaagcgccatctccaagtaatataacctcatttgaaagatctctcgggcgacaccaaactactcctattcatgaagtcaaataacatggtcttagctccttgaggggggctaagatcaatagtggacaacagttgctaaaatacttatgactggatgggcgagaagtagcccctgaatgacaagaatgatcaggtgcttgctcccttggctggagctcggaaattgtgacctcatctccagaaactgccgcagtttcctttctggcattgcctacattttgtcgccccagaattcaagtcttccgaccacagcatctctacctctgattgcgtgtcactgcgcataaaaaatgcaggctgtgaaggtaatggaagtggcacagagtagctcgggagcctcaacgcaaccgcagccatgttgggtctctcagctacattctcttgaacgcaacgcagcccaatgtgtaaacatctcatcaccgcggtcgttgaactgtctttc

SEQ ID NO: 11746 - DNA, 384 bp, Gossypium hirsutum
  Clone ID: LIB3829-012-Q6-N6-B1
aaaaaaaaaacaatatgcggttgctggaaattccaaatatctctctgacaatacaaaagcaatcaaaagggtgaagatggcatcattttaacttaaactacacaaaaggaacttgatattttactattctaaggccctgaaggcacatcatacatccactctctcgacatcctcgagtacgagcgtctttgatggctttcccaacagatcagtatactcttggaaaggagatcttgtgaatcgagtctctttccagaaatcaggagtcaagaaaccataagttttcagaagacactcgaaggtggcctttacaaagttaccaagagtcttggtagaaccccttgaagaagtgaaaacatcttcaatcccagcaaactgaagcac

SEQ ID NO: 11747 - DNA, 552 bp, Gossypium hirsutum
  unsure (1)..(552): unsure at all n locations; Clone ID: LIB3829-012-Q6-N6-B2
aaaaaanacctcagatagaatacggaagtatgtgctgaatatacaaaagaaccagagcatggcaaaatctgggttttacaccctcacttgaatctggaaaacaagggtattggagtggaaagtcctaagctttatcagcttcattcttcagcgctcgactgatgatcagctaattcagacaaatgactttttgattcccgtcatcggagggcattaataaaggccatcaatgaatctacatctctcttctccgatgcatactttatcggcttagacgagtgtttggggaagaaaagtatggttgggaagcttcccaactgcaactctgtttttgcatactccttttgttcaccatcagctctgaatttagctaccttcaccccggagcctgccagcttctccgccagttcaacataagattcttccattgcctggcaaaaacggcaccatggggcatagagcacaacaagccacggctcttttcggttctccaatctcgccaaattctcaattccagtcctgctcaatgtgaccaagctctggctattgaaa

SEQ ID NO: 11748 - DNA, 536 bp, Gossypium hirsutum
  Clone ID: LIB3829-012-Q6-N6-B3
agattgtaattgtaggaatgtaacctttgcagaaagacattgttatcacaaagttttactgtgtgattcattatacaaaagcattagatgtaccataaaaaaaaaaaaacatcgaaaatcggcaattcgatacgcctcatttttttttacatgccacacttgttaacttctctcgtctactactgcattttcttccgtttttgttctcgtatattactatcgactatttcaaacaacactaaatgctgattgtaaggtggaagaaaatcttgaggcaatggtctgggtggcaaactgttgaatctgcttcttggcatctttgcgacatttggtgaagccgacgatattggcaatgttgagagtcaaacaaactccaatgacgaggagataatcagcttgaaaccttatgagagagaatattccaagcacaatccatgccaccgctgaaaggtaaagggtccaccaaaatagccatgaatctttcttgttcatcctagccaacgactcttggtcgagacattcaaatctccatacac

SEQ ID NO: 11749 - DNA, 475 bp, Gossypium hirsutum
  Clone ID: LIB3829-012-Q6-N6-B4
aaattaaatttaaaataaaattaaaggaaaaggagacaaacgaaggaaaaaaaggggggggagaaggaaaaaaaaaaggaaaaaaaaaaagcataaaggcaaaaaggggaaaaaaaaagaaaaaaaaaaagaaagggggggagggggggaagaaaaaagaaagggaaggcggaagaaaaagaagaaaaaaaagaaaaaaggaagaagggggggggaggaaggaaaggggaaaagaaggaaagggggggcgaaggggggacgcgcgggggggaaaggaaaaaggggcccaggggagcaaggccgggaccggcaagcgaaagaaaagggcccggggcgagcaggaggaaagaggggaggaagaggggggagggggggagccggggggaaacgggggcacaggggaacaccaggggaaaagggaagcccgaaaagaaagaaaagaacaagggggaggcaaggaaaaaagcaaaaggga

SEQ ID NO: 11750 - DNA, 545 bp, Gossypium hirsutum
  Clone ID: LIB3829-012-Q6-N6-B5
aagcaacccagaaatcaatacttatagatagtgactgctaaacagccttcaaaacgagtgcatatcggaacaaagttccgagttccatctcactttgtaaacactagaaactcaagctcttctataagagcaagatgattcaaaacaaggtccacaagtcttcataacatggcaataaggtcgtatataaaaacattggaaacatcttacataatcagaccataactaactcatcaaatactaaatgcggcaaagtagtactcgcttcacacagtaccaccggtttggtgaagcatagcatcgatctcatcaccatcctccatctcaagctcgtccggagtttgctcacctcgcaggcggcgaccatcgaacaagaaggcaatcgagttgaaatccacagattgtcggtcgcaatatgcattcatgagcttcttcaattgtgtgcttcttttgatcctgaagaaaacttcattcccgtcctggcctttgactttgaggttgatgtgagcggcggactgatcgccgggtttcttatcttcttcttg

SEQ ID NO: 11751 - DNA, 503 bp, Gossypium hirsutum
  Clone ID: LIB3829-012-Q6-N6-C1
gtctccaaaatacattgaagtaagatatatattaaagttgcagaccttgcgagaaaattgatagcaaaacaacaatggagtcccgttcgatccatcgatttttgggaaaaaaattacagcgggacacaaaagacatagaagctttatacgtctcagttttttttcagctaaaagcagcttttttttggatactgcgcagcatttgattaacagctgctgcaatttcatccacagtgttcaaatggcacccttcctcaaccttgacgctgattgaatacaaagccatttcatcaacagtggaaacattgaggtggaaaatggtgaggcttaggctttgtaacccagcaaccagtttcaagagttgtctgggtcgttttttggagagtattttaaggttagcgtgggtttccaccatggtcacttcgatatccgccacgctttcggcggccatgggctgatcagctgccatggacgacggggaaattgttgcagtgagacgttgc

SEQ ID NO: 11752 - DNA, 538 bp, Gossypium hirsutum
  Clone ID: LIB3829-012-Q6-N6-C2
gaccataaactacgcatcattaaatcaaatgaaaaccagcaatttgatccatttttgcatcattttgctttgcctgttttctgtgaacaaatgaagcctaaagatcaaccacccaagctgtcttaccatccgtaaacagtaatataaagcaagcaaaatatgctgcaaacggttgggttttatgagatgaagccccaagttccccggaatatatgattggttaaaatgaatttttccgacccacttttctctgcaatctccaatttgatccctacacagaagatctgtccaaactctcgaccattctctctcatctaggaaccaccagctttcaactctgttttgttaacagttcaatgtcagctccaatttctgcaatcttggcttccttagaagcctttgctgctttggcaatgttcccaacatcaaagtccattgctagttttttcaccagaccctcaagcatcagtgatccaatggcaactaaagctcggaaccttgaatcaatctctagattttcctgttcagcaatctctaa

SEQ ID NO: 11753 - DNA, 538 bp, Gossypium hirsutum
  Clone ID: LIB3829-012-Q6-N6-C3
aaatactcaaaaagaggaaaattttattatcagaaacagggaatttacatctattttcaagatgatttaagaagcaacaaagagaaataaaaatacataaaaagaataataataataataataacttattcaacttgaatacatagtaagaaagtagtgaaaaaaagaatatattacatggaaaagaggagaggtttgattttagaaccctgggcgtttacactctggtggaacaggtttgattttagaaccttgggcgtttacactctggtggaacaccttgagggaaacgtttcaaatcagtgcaatagttataaatcatgaaatatttttgaacccatcttaatcttcttcttcctggtgcatcaagttcgtttgtttcccatgcaccggcggagaccgagttagttttagcacatgatgaacttgttcctgaccagacacaagcattggcattgaagttcctgtaataagctgtgaaaggtgcttttgcccaatcagttttcactaatccaccccttgtggcccaatcatcagc

SEQ ID NO: 11754 - DNA, 546 bp, Gossypium hirsutum
  unsure (1)..(546): unsure at all n locations; Clone ID: LIB3829-012-Q6-N6-C5
gttaactgtggaagttgtacccttcattcatcctttgaaattgaagcttgcctgtcatcatatcagaaatgcacaacttttatcaagttttaattcgacagttgaattcaccttatctgcccacatataataataatcaaaggaggaaccatccaaaaagaacgtttctccaacatcgtaacaaacagatagttttccttgtggaaaaaaagaaacccccaaaaatattatctgaatcctagacagaaggcctgttgaggttacgccgtcataatagcgttttttaatggaaaacaagcgtagtaaaatataaaaaaagttagcgctaatgagcaaagcaactatagctcatcttcacttgtatcctccccactcgatggcttcccattgactgaaacaagctctgcgtcaaatattagcgttgctccacctgggatggtggngtggtgaaccctgttcctcaacgggagctctccatgcccacctgctcctccatatccggcaccactaccagctccacctccttcaccaactccacttccatat

SEQ ID NO: 11755 - DNA, 530 bp, Gossypium hirsutum
  Clone ID: LIB3829-012-Q6-N6-C6
ctgggtatgtgaacagatccacaaaaacaaaagatcagagtgtaacaaggcaagttgcccttagcatacactgtttaaagcttgaccattagcactagcaaaggacgcttattcttctcaatttaactcttttgtaccacacaaatgctcgcatcaaatgctgctaatctttgttgaggaaagtgatgatgagctcattcacctgctctggtagttgttcttgaacaaagtgattcccttctggcatgaaagtgatgtccagattaggcataaactgcttcactatccctttcttcatgtactcctccattcctgggaatttcataaaatagtccttctcccccattatcagcaatgatggagctgtcacttttggattggttataccataatccaattgagagcacctgtaggggacctgcaatgcggttcggaaaccagaattttgatataaagttgcatagacctcaagatcctcctctgtgaaccatggtggcagtggagtagatggatcaaccaagtccattatc

SEQ ID NO: 11756 - DNA, 460 bp, Gossypium hirsutum
  unsure (1)..(460): unsure at all n locations; Clone ID: LIB3829-012-Q6-N6-D1
caatctataaacatgtcagaaaatctatataatatagaaatattcagtccgtgtatacataatntatagttttgtttttactccggttaataaaaggtggctnaagctaattttgttaaatgcatttaccttttaatagttaactaaatgagccaacccaacaaaacaagacaaaatggcaccaaaacttttcttaaaatcatgggaaatcaaaatcctaacgcagatgcgtcgatcgtttcaagaaatgacatatagcaacaaaaaaatataagtccattaggaaaaataacaagattgaccccttcaagcaccattttcttggttgctgtttgtttcccgggattctggtacaaaccacttgttaactcgtgaatgagccaagagaacctgcttatcccaatcagttttccaggtgataataataagtgtaacagtttgaagaagtgttcccagcaac

SEQ ID NO: 11757 - DNA, 547 bp, Gossypium hirsutum
  Clone ID: LIB3829-012-Q6-N6-D2
atagaaaattcattaaatcttgttcatttttttttttgtgcattgagagaaattatttcactttcatcaattgagtccaaagttatgtacagttaaattataaaaatcaaatcgtaaagggagtaaaacttggaattttacctaaaactcgaagccgtcaagatttggacatcgtttctgtgtatcggaccaacacaacaaaaataacaaccggttcggtccgagtcatttcagcttccatgactcgaaaagtttgactagcgcaacacgagaggaacctccctcactcgtcgctacctcggctgcacgtttcatatctaacgttcgctgcctaactgagtcactttctttcgactcaatcaactctttgactcgcttctccacctcagttgaacaaacgaaccctgtttccgactccaccatcggcaatgcgatcttcatttcttctaccatcaacaccctattgagcctttgttctgcataaagtggccaggccaacattggaacccctgcacgcaccgattccagcaccgagttccagccgcaa

SEQ ID NO: 11758 - DNA, 534 bp, Gossypium hirsutum
  Clone ID: LIB3829-012-Q6-N6-D3
aaacaaaatataaaataaatcaataaacaaaaaatttaaaacacaaacagcccattttaatgtccttttacaaaccaaatcatagcctaagcccaattacatgaccctataactaataccctagcccagttacaaaacaacccaaagctctaagactcaaacggcacagaaaccaagcccagaacattacaacttcggaaccctagggttctttctctcacgccgcagccgaactcagcccccacgcctccaacagccacgtcgacaaccccgtacgccaccctcatgcccagtgccagcacacgccccgtaccagtagttcgagtggcttcggattggtgcaacggcggaggcgttgagcgccgatgaacgccgtaatcggccatgaccgaagtgccatgaccatcgtcccttcgctcccatatttttcgcccttttccccttccggatattaatttacaatccaaacatcagataagctaagcgaagcttaacatccaacgctagacctagaattcagattcttcgaactca

SEQ ID NO: 11759 - DNA, 522 bp, Gossypium hirsutum
  Clone ID: LIB3829-012-Q6-N6-D4
agaaaaaaaaaaacatggcacaaaggcctattccaaaaaagttccaaagtctagagagaatgagatttacaccttttgactctaatatgaagatctatacaaacagtcggggatggagtcattgtggtagtatacatgtactaagatactaatcaggttaaaattgaagttggttagaaatgaatgcaagaacatgcatgttttttctattggagaggtcaagaatcctcagaaatccaagcaaaccattcagtgattaaacccaaatgcaccagcaggacggggaaaattgctggcgatgtccaaccagcatataattcaaggttttgcttttggatgatgtaggaggtgttgctatgagtccgagatgggtttcgttttgaagaactttgctacagctaggtaaagattttcctcctcaaagggctttgagacgtatccgtccatcccacatttcaggcactcatcataggtggcgtgaattacatcagctgtcatggctaatatcgggatatgccactc

SEQ ID NO: 11760 - DNA, 546 bp, Gossypium hirsutum
  Clone ID: LIB3829-012-Q6-N6-D5
ccagacacccacccaaacaagaagaataaattaaaacagggatgaactattctctcctatgataaacgagagtgatgggaacggtagcagatgaaattatctgtcacttgctctcatccatggggtcattacgattacaggattgaggtcttacatctttttcatcttgtgtttctccagaagttttggaaacagaatcttcaagtgcctcaaggaaagataaaacagtgaacttatatttacttggatcagtaccgaactgagacaaatctatctgtccggttcgaagtacataggtaaatgaatctacttgctgacggaaaggaggactctgcagcaactctaacaaatcctcaggtgtccattgaccctctggtaaatatgaagctaatcgctcttccaatgacaatgtctcaattaatggcattatcaaatctggcttcaaaatatcatccaaccccaagcctccatctggctcaccagctacctctgctggaccaatattgctcagtattctttgcaagtcttccaatttaactggccctg

SEQ ID NO: 11761 - DNA, 166 bp, Gossypium hirsutum
  Clone ID: LIB3829-012-Q6-N6-D6
ataaagtgatgtgggtagtttgagtaatataagggctcaaaaggggagaggggggggggggaaaaagggcgggaaggaggggggaaggggggggggggggaaaggggggggagggggggagggcggggagggggggggaagggggaaaaagaaagagggaaaaggg

SEQ ID NO: 11762 - DNA, 540 bp, Gossypium hirsutum
  Clone ID: LIB3829-012-Q6-N6-E1
cctataacaacacatccaataatacataatttgtaatgatgtccttccacattgctcaagacacaaaaacaacatagaaacaaacaagatagataaacacaattgaaaacatggagttacaaacagaggaaaaaaaaaatgtttgcaagcaaacaaattttaatgaaattcatttcaataccggaccggaaactttcagaaacacccaaggagctttttcggactttgtccggtcgcacggtatttagcggctatttcttcggccttgagaacctcttctccacgtttggcttcgaccattgctctcttttcttctgcttccttgtgaattgaagctaccttgttcttcattgtctcggcgtactcggctttcttcttttccaattgttcctcaatttttttgagttttgcttcaagagctgctttcttgctgttctcccatgctacaatagcagagagctttttctgggccttgttctcagctttggttttttcactatcttcccatgccttaatgaatgacaattttttttcctttta

SEQ ID NO: 11763 - DNA, 540 bp, Gossypium hirsutum
  Clone ID: LIB3829-012-Q6-N6-E2
gagataaaacaggctcctagaactacattgtttgctaaaactgaacatatataattacaatcaagtcgtgttttccagtaggctactagcaaagcagattaactgctatttagaaactattaacatctactgactgaatcacgaatccatgtccggcgttgatgctattagctcgggtgagctcgggagtgggtctgcttggctcagtggaactgctttttggagaacatggaaaatgttaacatccaggatcattggtttacttcctatatttgcaggctgaaatacacacacatcatgttcctctaagttgttgtcgttcacaaagttcctccatccacctgaaagacctccacaatcacggcttctgtgataataaaatcgggtcttccatgtacgtttgttcattcgaagaatcacatccgcattatctttcgggagatatttagccacccatgcagtagggacagccatataaaaccgtctcccaacatgtgtgggcttcataattatcataaatccttcattggttaatgcttc

SEQ ID NO: 11764 - DNA, 560 bp, Gossypium hirsutum
  Clone ID: LIB3829-012-Q6-N6-E3
atggggagtcagagacagcatattagaaatcagcatttaaaataacaatgacttctacattttctcaacctaattttaaccctacaagcaaaaaaaagaaggaaattctcacataagcaaaaacctatagcagatgacctataccacgaaaacagaagaaaaaaatgaagttttatgagtttatttacaacataaaagaatagatcttcaagttgcagtttgtccgcaaaggatataagcttgaataagggtctgagtagtccgcaactgatacaaagttcccggcacaacaactaaacccttcgtagtcactggcttcgggtcatgaataaccgaatttgctccagaaatctgcctgaaggacaaacatttaacagatactcaagctgcagtttgtccgcatagaataaaagcttgaataaggctttgagcagtacgtaactgatccgatgttccagagacaacaactaaaccctcagtggcccctggctttgggtcatgaataaccaaatttgctccagaaatctgcctgatatggcccaggttactattactctccc

SEQ ID NO: 11765 - DNA, 265 bp, Gossypium hirsutum
  Clone ID: LIB3829-012-Q6-N6-E4
gatgaaatataaaaaatctaatatattatatataaactctgacgcaagaatattttagtgtgcataggctacaaaactatgcagtttgaatggcattcttcaccggctaagcccgggtacgtcggctgaaaaacaaatcaggcataaaagaacttgaccactcatgttcaatacagagttcaaggtttagtgataacgcataaaaagcaaaaaaagatacacggacgatggccattcaatccatacaaatgcctttaaaaccaac

SEQ ID NO: 11766 - DNA, 530 bp, Gossypium hirsutum
  Clone ID: LIB3829-012-Q6-N6-E5
aagaaaacccaggcaatacataaattaatattgaaaatacaaagcaacaggattactttgcagcaagaagtcaccactcaacaagatgaactaattaaggatggatcctagacaaatattctgaagtgggatccttgcatgttattttattactaagaaaacatgagagaatccattaaacagggctaggatcatgcatggcatggcatggcatggcctggcctctctaagccttaccgtgaagatagtcatcgatctccttaaagttcttcactgcaaattccttaatgacgcttggatcagggatctcttcacttgccttctcaaactcacaggaccatttaaccaagctcgactctcccttgggaaccacaatgatcttgccaatgaaagtcttgtagtatttcaggagatccccatcaatgatgctgtaaacatatttcttctcagcttcatccactgattcgattctctcttttgataccttaacgattggagacccttcggcatagttaataagacgaacagat

SEQ ID NO: 11767 - DNA, 548 bp, Gossypium hirsutum
  Clone ID: LIB3829-012-Q6-N6-E6
gatgcaacttgtcataagataattatgagaatcttaccacatgtaacaatcgacttaggttttactttaaaggattcaatcacatatgattgaccctataggtgcaagttttgagcaccactctatcaatggacaagggcttggccggaaagtcgcaagctgcgattttcttctgtccttgatcaggtaataggtcacatggccgaggactaactccacttgtgatcccctcaacatcagggcaagtccacggcaccttctttgctttagctgccattccaattgtgacattggctatgcagatttgagtaaatggatcaccctcgatgccttccaatctggccgccatcgacacgttattggccacaatgtctctataattgatcccttgaatcactggcaatgcattgggcatcgtaatgattatcagcatgttgtttatagttccctgtcatccaaaacacccatttcatggtgtgcaaagacattcttctcacgaagatgtctttcacaaaccctgctctacctcttgcagtcttgatcctgac

SEQ ID NO: 11768 - DNA, 497 bp, Gossypium hirsutum
  Clone ID: LIB3829-012-Q6-N6-F1
attattattattattattattattattttgtgtgtattttccatcaaatacaacttatacaaggatgctggaacattacaaatgacctaaaacgcacacatacactaccaaaagactggacttaataactgtacactgcgcagtcatcaagtgtcgttaaaacgcatacagtaccaaaatctattgtattgcgtgcagcaaagaaagatttggtttctactatctacctatgtcccccttacctattccatgaatcttcttccctgatgatgctctcattctgcccgtcatttggcttcttagttttcgagtactgcattctaagtactgctaccgaatcagaaagaagtcctaccctacctacaacaatagttccaaccatcccccttccccgctgctgtaatttcgggattgcatagaatcagttacgccttcacatctgggggaacatttcatgttgctgcttcatatcgatagtaaattgtgcaaccttcatg

SEQ ID NO: 11769 - DNA, 540 bp, Gossypium hirsutum
  Clone ID: LIB3829-012-Q6-N6-F2
gaaaaaaccaacatccaaacatatatttatttttgaatacctctttacaaggttcagcagaattacagagaatcacatctaatcaaagtcttcattcaacactgcaaatacaacttataccaaaacttgattattcagatcccacaaactaaaatctatcctagatgatcaaattatgtttttttcccttgagaagctcttagggttcctgaaaatttctaaaggtcggcctcactttactagagctcgttaaaacgtttctccatactaatttggtgcacaaacttgttcctgtaagttaactcctctaaggagatctgaaagcttcaccagcatagcggacatttccaagttcctcttcaatgcgaagaagctggttgtacttggccaacctctcacttctacaaggagctccagtcttgatctggccactagctaaaccaacagaaaggtcagcgatgaagttatcctctgtttcaccacttcggtggctgaccatcactccccatcctgcagcttttgagtcaagtgctgcttgaa

SEQ ID NO: 11770 - DNA, 477 bp, Gossypium hirsutum
  Clone ID: LIB3829-012-Q6-N6-F3
cttaaattaacttttttatatttaaattgctaattacatttaaggagtgtaatttgtaaatactaatatcactttcttctcacttttttttaagagtcgacattagaaccaagccgataagccggcggcggcgctcgaacgataccgccaccaccgagaaactcggcaacagccgtcatggatcgaacttgcatctctaaagccgctatgtaatctctagcttcatctagaacgttcgagtaagaagatagcttacggcaaccgggaacaagccgtctcaaaaccttcagcttcctttcaacgaccgtcgatttcttcttccctttgttaatctccgatgatctcctcaaccttcgatcggcgatgaccttcgctttcttatgtttcttcctgatcttggcgccggcagcacttagaatggctctgctccaatgcattgttcccttagcggcgacggccagcactctgtccgccgtt

SEQ ID NO: 11771 - DNA, 493 bp, Gossypium hirsutum
  Clone ID: LIB3829-012-Q6-N6-F4
ataaacaacaaaatcacacttaattgaattgttaagatcccgactctactgattcaatcctgagcctcaatttttaccaaatgaaaaactcagttctctagcaaatcccatagtgaaattaagaccatcgatatgatcgatgaaatcaacaggacacataaattaagtcatagattgatcacctacctacgcataaaaaccctagagcttcttttaaaaaaccacgaaaaatagaaatgaacaaagatgtaagagaaaatataattacttggctgaacttcagagcatgttgttcgccggcaagttggagggtaccattgacgaaaaccagcatgccgccagcgccagagggctaacaatcgacggtggtgatgctgtgctgacactgctggaaagaagggtggtgagcttagcgacaatgctctgagagccttgaatcttttgactctcgaaggtcaacattgaaccgttctggtgctaaggaaccctaaat

SEQ ID NO: 11772 - DNA, 528 bp, Gossypium hirsutum
  Clone ID: LIB3829-012-Q6-N6-F5
agaaaaaagatcaattctacgctttctttactaacacgtttatacatgtaaaaaacgaactgtttcattacatgctatcccaaaaaaaaaaaaaatcaccccaatgcactacaagatcctctaaaattttgagaaacagatccaatctcgcccttccctttcgaagccttctttggcagcagattctgatgaatgtttggcaaaactccaccatttgcaatcgtcacacctcccaacagcttgctcagttcttcgtcgttcctcacagccaactgaatgtgccttggaatgattctgttcttcttgttgtcccttgctgcatttccagccaattccaaaacctcagcagctagatactcgagaacggcagagagatagacaggggatccagatccgacgcgctcggcgtatcgtcctttcttgagaaaacgtgcaactcgaccgacggggaattggagtccggctttgctggatcgggaaacggctttagcctttgacttgccccggcctcctttggtggttgttgct

SEQ ID NO: 11773 - DNA, 534 bp, Gossypium hirsutum
  Clone ID: LIB3829-012-Q6-N6-F6
aaattgcaaagatttagtttaatgattcagatgaacgcagtttgatattttctaacgccgataacgataagaaacaagctattctacaacatgttatataaacaaagacatctcaggagacggaatgaaggatagaatgctttcaccaaacagttcgaacaccgttaccaatgtacgtccagaattcaagtcatccttccaaatttgattaaggatggctgatttcttcaatactttaccgtcttttccaactctattgggcatcttttcagatgatgacggctggcctgtttcgtatttacctggtgaagcaagtgttgtcaccgtttcaacttgcatgggagatggtgaggagttggctgaaaccgtggtggggccatcagttgctattttcttcaaggctggttcgtgttccataggctctgtgctcgccttgcgcttatttggcgctgcagtaacaactttttctttcgacttccagatagcatgggctggagttgatggtaaaggtggaaaaatcttgaggcgctcaaa

SEQ ID NO: 11774 - DNA, 408 bp, Gossypium hirsutum
  Clone ID: LIB3829-012-Q6-N6-G1
aaaaggaaaatatatttatttataccgatttaaacttataaactacactattttgatttgcatacagataagcatccatattacagttcagattcgactaaattgaacaaagttttaataaatttcagaccctaaaaagcgaaagtaaaaagggaaaaaaaagaagatgagtacttgaaacgatccttctttgttttttcagtcgatatcagagtcatcaaaattgtcttcgaagtttttgaagaaatcagcatctgcgagcttgttgtcgaaagcgatgacgccttcgtcgaagatctccagtgtgtcaacatcgtcaactttcatggctgacccttggtcgtttgggtctgtcatgaattccatcggcatcggcctcattttccccccttttctctaggcttctag

SEQ ID NO: 11775 - DNA, 552 bp, Gossypium hirsutum
  Clone ID: LIB3829-012-Q6-N6-G2
gcaacaagggatcagattgcaaatctcttacaaactttcttttttcacaacagagcagaaaacatttcatagctcgacatttaaaaactcaaccccacacctaaaattccccctaatattatatatcaaccccattaattgtcccttcttttcataatcatccccataaattaaagcacagctttttagtttctttttacttttcacaacagagtagaaaacatttcaaagccctcatacctaatattcccctaatatttttatatcaaccccctgctttgcctttattttcataatcatccccataattaaaacacagatttttagctccgtactacccataacaacatcaacatggaatatttccctaatcgcccctaatgttatctcccattttcaaatctgccctccgttttttaaaaaatattacggaggtaatcggatcttgaaactaccggagagttctaaatagagacgaaacgatcttattctggatccgaatatatctactcgggtgaacatattcagatctcagatatcaagtcggagtat

SEQ ID NO: 11776 - DNA, 557 bp, Gossypium hirsutum
  Clone ID: LIB3829-012-Q6-N6-G3
gttcaaaggaatacatggtaattgatcaatggctatttattgtttgtttatacacagatcacaaatttaacagtgtaatcatttttcttgagtatggtccattgcaaatcaagatttgaggtccttaaagaaataaccttataacgaatactatatacaacaacgaatacatgggtttcttaacatcgacactataaaacttagtccagcattagaaacctagtttcaatttcattcatctgaaggaaactaccacatcacaaactaagtgattatagatcaattgaagctcgtgggccttaaatttaaagtgggagtttctgggggtccactgtgaatatcatcaaaatgaatatttacatcctctccggcttcaagatcattcaagttagtcgttcgggataacctccaagaattccttcaatcaagaaattggtcttcatcttgcacattcctctcagagaagttatcgtatgggtggtttgaagaatgaccgttgaaatcaagaggctcaagaaagcttgtttgaagctgaacaccgtctgaaccatctctaa

SEQ ID NO: 11777 - DNA, 496 bp, Gossypium hirsutum
  Clone ID: LIB3829-012-Q6-N6-G4
ggcaaaatctacagtttcactgtagattatactttcttttatagccattaaacagaacagggagaagaacatggagacaacagaggacccaacatttttttgttgattacattatagaacaagcattagggttctcatcactgaagtactgtggaggataagcatagaactcagtggcataccttggggggtaataatagaattcatttttcttcagctccaccgccactctagtcttttccaccccgccttccgccacttctcctcctcctacggcggccacatttgcttaatcctccttcaccaccaccgattcctttcttgactttacccttgtcatctacaccgccagaagaggagtctttcttgcctttttcaccactactctcttcatttttcttctcttctttgccaccatctttgggtttttcttcttcctttttatcctccggcggcggcggcggcggcggttcttgtttcactatcactgcatgct

SEQ ID NO: 11778 - DNA, 552 bp, Gossypium hirsutum
  Clone ID: LIB3829-012-Q6-N6-G5
agccaagagaaaagccagggtcttcactcaagattatggaaaggagttaaaattttacagactatgaccatatatatttatatataaccatgaatcattcttgcaagacaaacgatccctctatccttttctccattggctgtgaaggggcaaaatttagtggtgaaaacataccattgaaactagaggcaggtgcaggcttgaattcataaggaccttccttcactccccaaacctgatttccatcgtcatcataacccctatcccaggtatgtatctcattgttcttcaaaattgtaagttctgaagtgcagaatgctgctccattccatgaatttgggaatccacctggtggagttgaaccttcgtataaacagcgtttccccctctcacagcgtttgagatatatagttgtcagatgttcagcaatatcatcaataacttcttcaggtagtgggcgttgatcccttggacgatcgcagaaattcttgtattcatctgcatctctaattgcgtaagaacttacctcaacatcacatttcaaatcctttg

SEQ ID NO: 11779 - DNA, 536 bp, Gossypium hirsutum
  Clone ID: LIB3829-012-Q6-N6-G6
gaagaaactttaaatgtcatttagaaaactgtaacaaatagaaaatcatgtttgtttttttgttctttttttaatctttctacacaaatcgaactgcctaattgacaataaaatgataaggaaaaaaaaaagataaatttgaacagccgtcaaaactttcaaactatccatcaaatatatgtaaccaaactcagttgttcttggcagctgcaacttgcttcgcaccaacagaaaagaactccgtaatgacttcgagaggcatgcctttggtttcgggtacttttaagaacacaaacacccacgatataacacacacgaccgcgtacatcccgaaaacaccggctaaaccgactgatttgagcagcactgggagtgaatacgtgacgatgatgtcgcaaatccagaatgtaagggcgcacatagcaatgcatatgccacgaacccgtgtcgggaagatctcagcacagagtatgtttgggattggcccaaatcccatgacgaagaaacagaagtagagaacaacactaacggttgag

SEQ ID NO: 11780 - DNA, 522 bp, Gossypium hirsutum
  Clone ID: LIB3829-012-Q6-N6-H1
gaaattgaaataaaatccaattaaatttcagtgaatgaagggaagaaagtgaatagttacataataatactacaagggggaaggggaaggggaaggggaaggataaggatttcagtttgagtggtggcagatgtaccattaccagcagggaatagatctacacactcctatcacccgtctctccttctctggctagaaatggcaagcagtgaccaccaatatttaacttagcacttagcagctttatttttcacaccaaaacaacattacctattatatatatcttttcacccttctcttttgccataataccatctgattctcggcaaaacttgcctttttatgtatatacagaaagaatcatccttcttcaataaatttgtagcaagacataaaacgttataagaggaaacaatcatctgttttaattaaacacctttgcctactgaactcgaccccaatgtgtccaacaaaattccatgcatcctcacatttggagaagattattcacagtaactgtaa

SEQ ID NO: 11781 - DNA, 535 bp, Gossypium hirsutum
  Clone ID: LIB3829-012-Q6-N6-H2
ggcagaagaagataacatggcattgaccaaaattcttacaggataaattacaaaggtaacatatcatgttatgatgatgataataactataatgatatcatgcaattcaaaatctcttcccccttccgtgctttttccatatataagttataatttccattttttcccctttcgcatttttaccaaaaaaaaaaaaaacagagattcatggttcatggctgttgacacggctgtgaagttccaacatttcttgatggttaggatcaacagagagagctgctcgacaatctcgaagggcagccaagacatcaccaacatgctcatggaaggcagctcgtaggtgtagaacgtgaaggtctgctttaaatgtaattgcccttgacagttctgcaatggcttccttctccttgcggctatccattaacactgcagctcgataccggtaaggatataccctgagtggatctattcgagtgaccatctcaagatctgcctttgtgaggtcacggtcacggtcacagtactcggacctctt

SEQ ID NO: 11782 - DNA, 546 bp, Gossypium hirsutum
  Clone ID: LIB3829-012-Q6-N6-H3
aatgcaaatcagtagcaataaacgcatttacataatcgtttttacagcatttcatcatcaccaccaaaacaaaaaggagaaccatagaaaaaacatccatggcttacattctcaactgttctttattttcagaatgatacatggaacacattgcccgtgttcaagataacagcgatcaaagtcgtcaaaaggaaaacgcaaatccacgagcacacgtcggtatgtgcggacgaagatgtgtttgcagtggcagtcatgttacttgatgctgttttgttgatccctccggcggtcaggtagatgcaattatcataactaggatccttgtcaactttgaccccttttcctccgaagctgcatgcaacatcacttggcccgttttgttggtagtaactgttgaatgcaaaagaggcatgagaagctagattatccggttcaaaacacggttggctaggctgaatggcggagcaatctacattcccggggccacaagcccaatctatagcattctgtaaatccgcttcagaagccttgctagaagcaatg

SEQ ID NO: 11783 - DNA, 524 bp, Gossypium hirsutum
  Clone ID: LIB3829-012-Q6-N6-H4
acacaaacattatttggtattttacatcatccaatcataatacatcatcaaatcaacaagtccaaggttaatgataaacttacaccaccgcaaactatgtttgctttatttaggctaccactgccatacacaatcatacatgccaaacgggcttagtagaaactataacatggatgaaacatggttctgtttgtggaatgccagttcctactgcagaacaacgcattcttgtgtcccacccaccatagcgcggtgggaggttttggtgatggtgctttcttcttcagtggattcagctttaggatcgggctccttaggcagactcttagcatcatgttcaatgccatcttcgccactggcaatgacttcaaagatgagtgcattcacttcccggaacctctcatcagagagagaaacctcagccaggagcctccaagcattttcatcagacgcctcatcatagtccttcctcctttttaacaccatatgcccactaatttcccacacagctgggttcacctggg

SEQ ID NO: 11784 - DNA, 466 bp, Gossypium hirsutum
  Clone ID: LIB3829-012-Q6-N6-H5
atgagaatctcaatttaagtaataaattttaaataaaatgatacaactcaacagtcaaactcaatatgaactgaattatcagttgtgaataaaaaaacaggatttttttcagcaaccatgagagagctctcaaaaccccttctacatagttcaagctcactggcaaattttcttatacttcttctgccacatcctcttctttaggagtactcttcccaatccgaggtcgtttagaagatttgagagatgatccagcaagacaagtcagcctggacttcgtattagcctcggccaatggatttggcttctccttggcagccatccgaacatcccaaacacgtataaacccatcggatgatgcagatgccactaaatatggttcatcatcactaccaccatctttggtaagcacaacaacaccttttagacgggtagaatgtgcatcttcgatgcaataagcaacctt

SEQ ID NO: 11785 - DNA, 441 bp, Gossypium hirsutum
  Clone ID: LIB3829-012-Q6-N6-H6
aaaaaaaaaaccccctcccagaaaatttggccaaaaggatttgggagaccccttttagggaaacttttaacgacaattttaaggggggggggggaaaacttttgggggaattttaagccaaaagcccccacaaacttttaaaaggggctggctaaaaccctaaaaacttataaaaacggggggccttggggggtttcaaaaaaaacttgggaatttacctcccccccaaaaaatcctaatttaaaagggggggatttccaaaaacaaaatcccccctttggttaattaaaagcccaaaggggggggggatttaacaaaatccctaagggccggtttgggggaaaaaaacaacccccacgtttttgggcacgggttttttaaaaaaagccccccaaaaaaggggggaacattttgtggaaaactggaggccgttgggggctt

SEQ ID NO: 11786 - DNA, 553 bp, Gossypium hirsutum
  Clone ID: LIB3829-013-Q6-K6-A1
gcgttcgcggccgcgtgggggacttcctgtcattcctgattggctgtacttcaacagagtgaatgctcgtgtgagtaaaagtgttaaacttggtcctgctcgtcttcttctaagattgtcgggtggacatgtagtgggtaattttcctcctcatgaagcctttgctattgggggaacgaacagcgtgagaggttataaagaaggtgctgtaggctctggtcaatcttacgtagttggctccagtgaagtttctttaaaaatgctagggcctgtggaaggagttatttttgctgattatggacatgatctatggtcaggccccaatgtgccagggaatccagccgctgcgaggaataagcgcgggagtggatacggatacgggattggtatccgactgaactcgcctttaggacttctgcgtcttgaatatgctttcaatgacaggtttgctaagaggcttcactttgcatttggcaatcctaaataaacttttaactgctttcttcagtccattaatgaccaaaatgataataatattataaattctagtctt

SEQ ID NO: 11787 - DNA, 619 bp, Gossypium hirsutum
  unsure (1)..(619): unsure at all n locations; Clone ID: LIB3829-013-Q6-K6-A2
tgatgtcctggttcatgnagagcctgagagaaagatatggttgagtactttggtgagcaattatctggttttgctttcactgttaacggatgggttcaatcttatgggtctcgctgcgtcaagccaccaatcatctacggtgatgttagccgccccaaaccaatgaccgttttctggtcatctactgcccaaagtatgactaaacgcccaatgaagggaatgcttactggccctgtcaccattctcaactggtcctttgtcagaaatgatcaaccgagattcgaaacttgctaccagattgccttggccatcaaggatgaagtggaggatcttgagaaggctggtatcaatgttatccaaatcgatgaggctgctttgagagaagggttgcctcttaggaagtccgagcatgccttctaccaaaagtgggctgtccactccttcagaatcaccaactgtggtgtccaagacattacccaggtccatatattgcttcactctttttgatcctcggaaaaattgaactttcttatttgcatattctgtattctttgatcaccaccgctctcattcatttcattgtcaaaaatccgacagatccacacccacatgtgctact

SEQ ID NO: 11788 - DNA, 346 bp, Gossypium hirsutum
  unsure (1)..(346): unsure at all n locations; Clone ID: LIB3829-013-Q6-K6-A3
tctttcgggnaaaactactggntttggtttgatttatgattctgttgagaacgccaagaagtcgagcccaagtacaggctgatcaggaatggactcgatccaaggtagagaaatcgagaacaaagaggaaggaagaacagggctaagaagatccgtggagtaaagaagaccaaggccagtgaagcagcaaagaagaagtgagagctaaaaggcaaaactcgtgcttatcacagagccaatgcttttcaacattgttttttagggttcttgaatcttttgttttggaaaccagatttttggtgttgttatctgatgtttagttatattattacgatctgatttttct

SEQ ID NO: 11789 - DNA, 502 bp, Gossypium hirsutum
  unsure (1)..(502): unsure at all n locations; Clone ID: LIB3829-013-Q6-K6-A4
tgttcggcatgtggacaaaagaaaggcatgccacaaaccttagttgaacatcatctggaagaggaggtgattngacaagatggtgaaagaagcaataaacaaaccatggctaccattgccattaggtctaaagcctccttccactgatagtgttcttgctgaactttatagacaaggcatctccaccgtccctccttacatcaatgcttccggccgttagttcatgttgacatgaaactatagctttgagatttttttcccaaattttagaactctttcagaaggaaagcacgtgcctttggagcgcgtggttcaatgtttttctttcttttgttgatagcatcatttcacaggtggacacgaagtaggaaaaagaagtttgttaaactatgtcataagtccccatacttgttgtaaatttatttttaagaattagttctgttttaaaaaaaaaaaaaaaaataaaaananaaaanaaaaaagagatagaataaagaggggg

SEQ ID NO: 11790 - DNA, 604 bp, Gossypium hirsutum
  unsure (1)..(604): unsure at all n locations; Clone ID: LIB3829-013-Q6-K6-A5
tcggnaactttcaaggtgcttctganaacaggttcattggacagaaattgaacaatatttctgcaatcttgaggtgacgttaaagaagaaatctgaagagctagtagctaaggagaaggaatatgaggtgaaagaagctgaaacccttgcattgattttagagaaggaggcagttgttgctactaaggaacaagattacttagaccgagtgcaggggctaaaagatgctgctgttgctgcaattgctgaggcacgtgcaaatttccgaccaacaactgcagaatctcttgatactgcagaaaatggagacaccaagctagccaaggcaattgctgatgagtggaaacccaagttgtctaatgcaagcagtggtgctgccattgacaattcattggaagctgaagcatttttgcagctccttgctacttttaggattgcttcggagtttgacgaagaacaactctgcaagcttgtttttgtagttgctcaccgccggcaggcacctgagctttgtcgttccattggattaacaccgaaaatgccaggccttgttgagttattgattaacagcgggagacaagtcgatgcggtacgatttattcat

SEQ ID NO: 11791 - DNA, 591 bp, Gossypium hirsutum
  Clone ID: LIB3829-013-Q6-K6-A6
tttcgattggcattgcttacttcaaccgccgttgcagttcgatccgaccagttgcactgcctcggttgagtctgataaaatatcttcgacaccacaagctccccttctttctcttcctcgtgttgacccagatggtattggtgcatcacccaattggtcttttcgggttttcggttcttgccgaaattggtgtaaagaacaaggattttcttgcaccctttttgtttaccattcaacatcaccggccttgtcttgccggttttatgccacctggtttctccgccttgtaagtcacattcggtttgtattttccttctttttcttgtcccggtagtgtaggcctttgatggtctgtggaagaaatgcctgctcaacccatctgtggtcactcctgggagtttctcaggatgggtataacaaatcccatcttcaccttcaatagtagggataaactcatcaatcaaagggtgagacttcatgtctttggcttcaactttagcttcaaggtgttctatcagttcttgatctgtgggatcaaatttcactccagctggcaaacctaaccagtccggctttccttcaagcttgtga

SEQ ID NO: 11792 - DNA, 634 bp, Gossypium hirsutum
  unsure (1)..(634): unsure at all n locations; Clone ID: LIB3829-013-Q6-K6-B1
naaaaaacccatcaaattttagcttataaagccgataaatttatcaattgggaccatacatggcggagaatgcagaagttgatgagagggtggatcttgatgacaattacatggaggaagaggatgatgatgttgaagaacatgtagatgaagacggagtggatagtggtggtgatgaaaatggggaagaaaatgatgaagaggaatttgaggactcaaaatcaggggtggatggaaaagatcaatcattggaagtagagaaaagccacattgaaacagagcatgtggaagatgaagaaaagcccacagcttctattagtgaggaagaaaaagaaaagcatgctcaacttcttgccttgcctcctaatggttctgaggttttcattggagggcttccgaaggatacctcagaagaagacttgagggaactttgtgaagcaataggagaaatttttgagattaggttgataaaagataaagaatctggtgaaagcaagggctacgcttttgtggcattcaaaacaaaagaggttgctgaaaaggctgttgatgagctgcacagcaaagagttcaggggtaaaactataaggtgttctttctctgaaactaagaacagattatttattggtaatat

SEQ ID NO: 11793 - DNA, 510 bp, Gossypium hirsutum
  unsure (1)..(510): unsure at all n locations; Clone ID: LIB3829-013-Q6-K6-B2
tgcagtttacgaatcaccggccgagngtccccttccacttccacctccttgagtccaagttgaacacccagatcaagagcctgaaagcatgccaatgcttcagccgcaaccgcagacggtacattcacatgtaaaactgatctagagcaaacaacttctgccttttcattccttaccactaacccagaacacgattctcttcgttgtctgttgcaagcggcatcaaaattaattttgattcgcgggcaaatcggagcgacccatctgacattattgacacttctctcaggacagtccctgaacaagtgcatccccgtttctgctcccgaatgacacctccagcacatggtagaatcaatcagccttctgtagtgtagattactgtagttaggcagaaaattacgagtgcaacgccagattgtaattttaattttaaaaggcagctctaggctccaaagtcgcttgtaaaattgtttgtaacaagtctgtaattgatcctggccttcttgt

SEQ ID NO: 11794 - DNA, 608 bp, Gossypium hirsutum
  unsure (1)..(608): unsure at all n locations; Clone ID: LIB3829-013-Q6-K6-B3
gnaaattggggtatgggtcgagggattttagcacccataatgctgatacatgaatatctgaggaggaggagaaggaggaagagataagggaaactaaccatatatcctagataagctacgtacttcaatcttctcttttatgaaatgcttcaagttgcacacaaaagcacaggaaaacaaatctattattagttgaactttgagcttgtttagcttggataaaatatcataaaaaagtttgcttctcttttttgtttttcaaccaacgactccttaaattatggaagtgagaggccaagaacatgatattaaaacgccagggtcttcagcctttggtcttcactcgcctggagtagagagaagaagagatggtaaccataatggtacggccgttctcacttgcactcaaaccctagatcatgttcatcgtctccagaggcagcaatcactcggtcaagggagatccccacatccggatcgagtcgctgccgccactggtgctgcagctgttgcacccatttcagttggttcaaacgcaaagccgtccagcttcgtcagataccgagagtgtcttaagaaccacgccgccagcatcggcgggaatgtgt

SEQ ID NO: 11795 - DNA, 415 bp, Gossypium hirsutum
  unsure (1)..(415): unsure at all n locations; Clone ID: LIB3829-013-Q6-K6-B4
gggnaaatctcgtttgggatcgattgttcacaagaaactgctgccgttttgtgcttgaccacagttaagaatgaggataagttggagttcagcagagtccttgaggccatcaaggcaaacttcaatgacaaatatgaggagaataggaagaagtggggaggtggtgttatgggctccaaatcacaggccagaaccaaggcaaaagagaggcttcttgccaaggaagctgctcagaggatgacctagaaatgttcattttttcctatctataatcaccattaatggtgttttctttttcttttttgattaaatgctcctttgctgtcagctgcatttgactctctttttaagtttttttttttttggcagaggaataattattatcattctagtgaaaactttcaaagccacctta

SEQ ID NO: 11796 - DNA, 582 bp, Gossypium hirsutum
  Clone ID: LIB3829-013-Q6-K6-B5
ggaccgtgggtttagggaatgggaaaatgttttcgggagtgcttgattccggtttacgatgaacggttcggaggatgctattctagcgttcgagagagcggaaaacgggtgtcatcccggatgaacaaacatttacgggactcctttcggcttgtagccattgtggtttagtcgatgaagggatggagtttcttaatcaaatgagcaaagaattcggtataatgcctaacgttcatcattatgggtgtgttgttgatcttttaggccgtgccggtttactcgaacaagcctatcgagttataatatcaatgaaggttaagcctgatgcaactatttggaggaccttgctcggagcttgtagaattcacggtcattttacgcttggtgaacgtgtgatcgaacatttgattgaactcaaggctcaagaagcaggggactatgttttgctgttgaatatatattcatcaactggtagctgggagaaagtgagtgaactgaggaagtttttgaaagataaaggaattcaaacaacacctggatgtagttcaatcgagcttaaaggaattgtacacgaattcatcg

SEQ ID NO: 11797 - DNA, 576 bp, Gossypium hirsutum
  unsure (1)..(576): unsure at all n locations; Clone ID: LIB3829-013-Q6-K6-B6
cgcacatcagnaananagagagcaattttggctaagactgaagtttcacaagcacatttggagctgttaaagcgaactaatgtgctcaatgatgctttccctatctggcatgatggagaatttggaactataaacaattttcgtcttggacgactgcctaaaattccagttgagtgggacgaaataaatgctgcctggggtcaagcttgcctcctacttcatacaatgtgccaatatttccgaccaaaatttcactatcggataaagataattcccctgggtagctaccctcggataatggacagcaacaacaatacatatgagttgtttggtccagtgaacctgttctggagtacacggtacgacaaagcaatgacactattcttaacttgcctcaaggactttgctgagtttgcaaatgccaaggatctagaaaacaacattccacctgagaaatgctttaacttaccctacaggatcgagaacgataaagttgaaaactactccatcacacaaagcttcaataagcaagagaattggaccaaagctttgaaatataccctctgtaatcttaag

SEQ ID NO: 11798 - DNA, 614 bp, Gossypium hirsutum
  unsure (1)..(614): unsure at all n locations; Clone ID: LIB3829-013-Q6-K6-C1
ccccgcgtccggaacttgtcagtgagaanataatcatccggcagggaaggttcagaatgttgagaagacaggggagacatgtgctgatattggatgatgtatgggaaagcttttcgcttgaggacgttgggattcttaagccaacatcagaaaatggatgcaaattagtgttgacaacacgttcggaaagtattgttcgatcaatggagtttaagaaagttcaagtgccttgtcttcctatagaggaggccattaacttatttttaagcaaagttggacacgacatgttgcctaatccaaatttagaatcgtagatgaaacttgttgtgagggaatgtgatggacttcctcttgcaattgtcacactagctggttgtatgaggggagtaattgatcctcgtgtgtgggaaaatgctgtagatgaattgagaggatacatcagaaacatctgcaatatggaagataaggtgcatggatgcttgaaattcagctatgagcgtcttaaacaaagagacagagaatgttttttgtattgtgcattatatcctgaagattacaaaatcggaaaaaatgagttaattgaacattggatggaaagagggcttatagatgaa

SEQ ID NO: 11799 - DNA, 608 bp, Gossypium hirsutum
  unsure (1)..(608): unsure at all n locations; Clone ID: LIB3829-013-Q6-K6-C2
gccggtgagnaccctcatgcttggcgtcgttgcccaacttgagagtcttggatctcatcggaaattcctntatcgggaaaaatcccagaccagatagggaaccttcaaaagctcaccgtcttaaacttagctgataataaaatcaacggcgaaatcccaagctccattgttcaactttccagtttaaaacacctcgatttaagcaacaacctcctcaccggcgaagtcccggccaactttggcaacctgaatgctgagccgtgcattactgagtggaaaccaactcactggaacgatcccaatctccatcagcaacatgtaccggttagccgacttggatatatcgagaaacaaaatacagggtcaaataccagcacagttaggcaaaatgaaggtgctcgcaacgttggacttaggcagcaacatgctcaccggcgaagtaccgccggcggttctgggcagtaccggtttgggtatcttaaacttgagtcgaaactcccttgaaggcaacattccggacgttttcgggccgaaatcgtacttcatggcacttgatttatcgttcaataacttgaaaggtccggtccccggatctttatcgtcggcga

SEQ ID NO: 11800 - DNA, 618 bp, Gossypium hirsutum
  Clone ID: LIB3829-013-Q6-K6-C3
gcacagcaaaactgactccgcagcgattcaaacaacgcctcaactgagacctgttatttctttcccctgatttaatcaactcaaaagtattattatttactaaaggcagaaacttcttctgcttgaggaaacaaagcagagggcaacaatgaagtgggtcgaagtcatagtatctttcatcctcacactatcgttcttgtcgtttccttcatgcgggttccaatccgatgagcttctcgttgacgacgaagagttcggactcgagggggctccgcaacatcgttcccctgaacccatccccactcgatccccaccagtcacatccccgacccgaaagaggcattcagatctagattccgattctaagatccagttctctcttgaccatgcttttggcgactccgatttctctcccgctggcactttctccgcccgcctcaaaacatggagccacggcggccagactcttacaaagctacggttttcgaggaatagtttctctgatgtggagaaggagaagttcaaaaatctgctcgaaagtgatgacttctataggataagactcccatctaatgttttgagtcctcctgggagggattttattatttcatcagtgaa

SEQ ID NO: 11801 - DNA, 599 bp, Gossypium hirsutum
  unsure (1)..(599): unsure at all n locations; Clone ID: LIB3829-013-Q6-K6-C4
gcaagaactcttgctcttggntgtcactccattgtcttccggtttggaaaccgctggtggtgttatgaccgttttgattccaaggaacaccaccattccaaccaaaaaagaacaagtcttctcaacctactccgacaaccaacctggtgtgttgatccaagtttacgaaggtgaaagaacaaggaccagagacaacaacttgctcggtaaatttgagctctctggcatccctcctgctcctagaggtgtcccacagatcactgtctgctttgatatcgatgctaatggtatcttaaacgtatctgccgaagacaaaaccactggacaaaagaacaaaatcaccatcacaaacgacaagggccgactctccaaagaagaaattgaaaagatggttcaagaagcagagagatacaaatccgaagatgaagaacataaaaagaaggtcgaggcaaagaatgcattggaaaactatgcatacaatatgaggaacacagtgaaggacgagaagattggtgctaaactcccagcagctgataaaaagaagattgaagatgctattgaacaagccattcaatggctagacagcaaccaactcgccg

SEQ ID NO: 11802 - DNA, 586 bp, Gossypium hirsutum
  Clone ID: LIB3829-013-Q6-K6-C5
ctttggccttctttggaattgtattttccgaagctgaatggccggaactgtggcctaacctcagtaggaatatataaaaggtgaagatgggaagaggaaagatagagataaagaggatcgagaacaccacgaatcgtcaggttacgttttgcaagcgcaggaatgggctgctgaagaaagcatacgagctgtcagtcctttgtgatgcagaagttgctcttatcgtcttctccacccgtggccgcctctacgagtactccaacaacaacataagatcaacaatagagaggtacaagaaggcatgttccggtacctcaaacacaaataccgtcacggaaatcaatgctcagtattatcaacaagaatcagccaagttgaggcagcagattcaaatgctacagaattctagcaggcatctaatgggagattcgttgagttccttgacagtgaaggagttaaagcagctagagaatagacttgaacgagggattactagaatcagatcaaagaagcacgaaatgctgctagctgaaattgaatattttcagaaaagggaagttgagctggaaaatgaaagtgtatgtct

SEQ ID NO: 11803 - DNA, 562 bp, Gossypium hirsutum
  Clone ID: LIB3829-013-Q6-K6-C6
ctgccgcgcgggctcagaagctgcagtgctatgttgccacccgttatggcaccctgggggttagtaatgccatgctaagctctgtggaatgaaaaaatagatgtggaattaccctaattctacaaggaactaactggctagaaggccggtcactcggaaaatataatcaaaatcaaggggtaaatatcctgacttcgctaatataatgccatgtgtatactatatttacacaataatacttttgaagacattgagatcactaatagtgctaatataccgatatacggctctaaatctaatatagaatatgcaacttgttatggttctaatgttgaggagaggcatcaggcggacaacctatatagccataaaccagaactgtttcgtgcaacacattcattataatatcatgagccctaagcataatagagtggccaagcgtggacagcgcagggagtggaaacaccctagggaaacgcaactgaattatcttatggcagattcagattaggaacactatgttttaaaggcaataggccttggcgcacaagctttccttatt

SEQ ID NO: 11804 - DNA, 617 bp, Gossypium hirsutum
  unsure (1)..(617): unsure at all n locations; Clone ID: LIB3829-013-Q6-K6-D1
cgnaattacacctgntattcacagtattgccactagcttttatttagaagagtctgatttgaaggctttgctaacacctggctgtttctataactaccatgcttatttggagatcactgtcttcatggggagaaagggcacgcattttggtgtcggagtcaagagacagcagattgggacattcaagttggcggtgggtcctgaatggggtgaagggaagccagttattcttttcaatggatggatcgggatcggtaaaaacaagcatgaaaatggaaaaccaggagcagaacttcatttgagagtacaactagatcctgatccaagatatgtattccagtttgaagatgtgacgatgttaagtcctcagattgtacagctccaaggttctgtaaaacaaccgattttcagttgcaaattcagtcgagacagggcatcacaggttgacctattaaacgcttactggccaggttctgctgacaatttagacatagagaccggtagaagagagaggaaaggatggaaggtgaagatacatgatctgtccggcttggctgttgcggcagccttcataaccactccctttgtgccatcaacaggttgtgattgggttgcca

SEQ ID NO: 11805 - DNA, 630 bp, Gossypium hirsutum
  Clone ID: LIB3829-013-Q6-K6-D2
ggcagttcagctaaaaatacctcattttcatcccaaaatccaagtccattgtcgtctgcatttccaagcccgattccttcctgtcaagtcagtccttcctcctcttctttccctagtcccactaggcttgatgctagtaaccagtctagtctattcccgttccttagaagcaccattccttcatctctgccacctctcagaatctcaaacagtgccccagtgacaccaccgctttcatcaccaacctcaagaaatcctaagccaattcccaactgggaggccattgataaagagtcaatggcctcttttaactacccattgtatgcagtctctgccccagctagtcccactcactgtcattttcatgccccggctgctatacctgaatgtgatgagtctgatgcatcaacaatcgaatcgggtcaatggataagctttcaaaagtttgcaccttctacttctcaaatgccaacttctccaacctttaatcttgtgaagcccattgctccacaaagtttgcccaatgatttgatcaaagagaaagggcatggttcggagtttcagtttgagagtggactggtgaagccatgggaaggagagaggattcatgaagttagattggatgatctc

SEQ ID NO: 11806 - DNA, 614 bp, Gossypium hirsutum
  unsure (1)..(614): unsure at all n locations; Clone ID: LIB3829-013-Q6-K6-D5
cggccgcgtgggtggaaagngaatttcttcctttgaggatgacactagcattccatgtggagttgccttgaagaggatggctggcctactggacaagtcggaaaggagcatacagaggcttatcaaactgaggaattcagtaatccgttcttatcaggagtgtaagattccagttgattggatgcttgataccggaatggtgtataaaataaagcaggcttctatgaagctggtcacaatgtacataaagagagtgggaacggagcttcaattggtacgcagtttagacaaggaatctgcacaagaggcactgcttcttcaaggcatgcattttgcaaatagggctcaccagtttgctggagatcttgattcagaaacactgtgtgcttttgaagagatcaaggaatgcattccaggacacctggtaggatccaaagaattgttggcgggaatatcgtcagcctgagtcgcatggttagttaatagatttgatttatcatcagcacttgaattttccattttgccctctgcagaactagttgtagttggggaaataacacaaggtagaggtgatgtgaaatcagaatatgtaacatatattttcacttttttga

SEQ ID NO: 11807 - DNA, 634 bp, Gossypium hirsutum
  Clone ID: LIB3829-013-Q6-K6-E1
cttgttcaatctttctctgttgttttcctctactggttatattacgtttcataaagaaataatcatctttttttaacttatttatctttactactaaggtttttttttttttttaattttatttgggtcctgctattatatattataaacaaaactcctataatggctacatcctcgggttcatcagcaacacaaatcaactcaggctcagaagaagcattaatggacgaaaggaaaaggaaacgaatgatatcgaacagggaatcagcaaggagatcaaggatgaggaaacaaaagcatttagatgatctaatgactcagttgactcagttgcagaaacaaaaccatgagatcatcacaaacataaacttcaccacacaacacctcttgaatgttgagtcagagaactcggtgcttagagctcaactcaatgaactcactcataggttacagtccttgaatgaaatcatcagcttcttgaatgatgatcatggcgatgacgacgacgatgatgataaaacaagcattgacttcactcagcctgctgtagctgatactgccttccttaatcctttccatttggctttcttgaatcaacctatcatggcctctgctgataacacgtttcagtatt

SEQ ID NO: 11808 - DNA, 594 bp, Gossypium hirsutum
  unsure (1)..(594): unsure at all n locations; Clone ID: LIB3829-013-Q6-K6-E2
aaagttctcacgggnttctgacatgagaatattgagacttcatatgttattgttgaaattttctttcaaattctaactgattgtatttgttgatgtaaagttcagtagatttggtaatcagttgcctagggctccattggacaaatgatcttccaggggccatgatacagtgtaaactggcattgaagccggatggcctattcttagcagctattcttggaggagaaaccttaaaggagctgcgaatagcttgcaccgtggctcaaatggagcgtgaaggaggcattagtccacgggtatcacctctggcacaggtcagggatgctggcaaccttttgaccagggctggttttgcacttcctggtgttgatgttgatgaatacgtggttagatacaacagtgccttggatctaattgaacatctgcgagcaatgggtgaaactaatgcacttctgcagaggaccaatatcctgaagagggaaacagctctagcaaccgcagcctatgattcaatgtttgcagccgaagatggcaccatccctgcaactttctaggtcagtgcattaatatccattccaagagctgtaatttgga

SEQ ID NO: 11809 - DNA, 615 bp, Gossypium hirsutum
  unsure (1)..(615): unsure at all n locations; Clone ID: LIB3829-013-Q6-K6-E3
gtttttaagcgatgctccaaattggggaaaaaaaccccttcgaggtttgagttactgagcgtggttangaaaacactcgaatttattaggngaaaacgacggtggatgaggaagatgctaccgacgttgaaatggacggtaaattttggcatgatgtcttcgatttgtatttcgttaggggtaaggaatcgagaggtcgacaagatgatgatctcatatttttcgttcggaaatggaaggggcatggttttaacgaaagtgaggaaagtgttgctccttactttgtacgcaggtgggcacctgagttagataagttagttggcgacagtttatcggttgtggattggcggcgctcattttacttgaatatgattgcccatacttcgtactctgtaacagtggcgatttgcagtcacaatgtccttagaaatcatcaagtggggcaagatacaccattatctgctatctacaaggttgtgaagactgtttatgcatctcccagtcgagtaaattttcatttggactcaaaaaaggaagtagagacaacacctgccatatccggacatctgttttgcaatagatgattttgactttacttttgatgcagtggtcttg

SEQ ID NO: 11810 - DNA, 488 bp, Gossypium hirsutum
  unsure (1)..(488): unsure at all n locations; Clone ID: LIB3829-013-Q6-K6-E4
gnagctacctaagnaagccanacagaagttgctggattggtggactaaacattacaaatggccttacccatcggaatcgcagaagctagcgttggcagagtcaacaggtctggccagaacaaattaacaactggttcattaataaagaaaaggcattggaagccatctgaggatatgcagtttgtggtaatggaggctacctatccacactatttcatggacaatattttggggaatcccttccctatggatctctcccacacacttctttaaagacaatgagtatggatgcatcgctgctgccaagcttgaaggcaactgcttctatatgcaaccggttatagttaattgtggggtagataattatgcattacctccggatattatttatttagtatatatcaaagattaactcctgttactagtatatacctatgttgaaactctttcatatagttttgtcaaatgcttgaatcttttcccctatt

SEQ ID NO: 11811 - DNA, 584 bp, Gossypium hirsutum
  unsure (1)..(584): unsure at all n locations; Clone ID: LIB3829-013-Q6-K6-E5
caactttgngagtgcccggtggagtttcctttgaggatttgggtcaccatgctgggtattacaagcttcctaattctcatgatgccagaatgttctacttcttcttcgaatcacgcaatagcaaaaaggaccctgttgtaatctggttgactggagggccaggttgtagcagtgaattggctttgttttatgaaaatggccctttcaccattgctgataacatgtctcttgtttggaatgaatatggttgggacaaggcttctaaccttctgtatgtggaccaacctattggtactggctttagttacagttcagaccaaagggacattcgtcataatgaagatgaagttagcaatgacctatatgatttcttgcaggcattctttgcggagcaccctgagtttgcaaagaatgacttttttataactggagaatcatatgctgggcattacattccagcttttgctgctcgagtccaccgaggaaacaaagccaaggagggaattcatataaatcttaagggatttgctattggtaatggcctgactgaccctgcaatccagtataaagcttacacagattat

SEQ ID NO: 11812 - DNA, 582 bp, Gossypium hirsutum
  unsure (1)..(582): unsure at all n locations; Clone ID: LIB3829-013-Q6-K6-E6
ccgacacgacgacacgttaaagcgaagatccaanacaagnaaggcatccccccanaccagcaacgtctcatctttgccggaaaacactcgaagacggccgtaccttggccgactacaacatccagaaggagtcaactctccaccttgtccttcgtttgcgcggcgggatgcaaatcttcgttaagacgcttaccggaaagacgatcactctcgaggtcgagagctctgacacgatcgacaacgtgaaagccaaaatccaagacaaggaaggcatcccgccagaccagcaacgtctcatcttcgccggaaagcaactcgaggacgggcggactttagccgattacaatatccagaaggaatcgactcttcatctggttctacgtcttcgaggtgggatgcagatcttcgtcaagactttgaccggtaagaccattactttagaagtggagagctcggatacgattgataacgtgaaagcgaagattcaggacaaagaaggaattccaccagatcagcaaaggttgatttttgctgggaaacagctggaagatggaaggactttggctgattacaatattcaaa

SEQ ID NO: 11813 - DNA, 603 bp, Gossypium hirsutum
  Clone ID: LIB3829-013-Q6-K6-F1
cccacgccgtccgggtgggtactttgcttgtttctttttcgggtatgcgataattcgaagggcaatgttgggaagcgggggggtttcggacgggtacgaggtcggctcaaagagacaaagaatgatggaatcaactccctacttcgcagtgaacagcggtatgggcggctatcaaccttacgggtatggtggtggctaccaacctccttcgtttccggtagtacgactagggggtcttcctttcaactgcactgatatcgacattttcaagttctttgctggattggacattgtcgatgttttactagtcaacaagaatggaaggttctctggagaagcctttgttctctttgccgggtcaatgcaggttgagtttgctttgcaaagggatcgacaaaacatgggacgccgctatgtagaagttttccggtgcaagaggcaagactattaccatgccgtagctgcagaggtgaattacgaaggaatctacgataatgatttccacggaagccccccaccctctcgagcaaagagattcaacgataaggatcaaatggaatacactgaaatactcaagttgcgtggtcttcctttctcggtgaa

SEQ ID NO: 11814 - DNA, 629 bp, Gossypium hirsutum
  Clone ID: LIB3829-013-Q6-K6-F2
cccagcgtccggcagtgttggtctcacggccggtaacgttcgtaactggaaatgccaagaagctggaagaagtgaaatccatcttgggtcaatccatccccttccaatccctcaagcttgacctgcctgaactgcaaggagaaccggaagaaatatccaaagaaaagcttgtttggctgctgtccaggtgaatggaccagtgttggttgaagatacatgtctttgtttcaatgcactaaagggtcttccagggccatacgtcaagtggtttttgcagaagattggccatgaaggtttgaataacttgttgatggcatacgaggataagtcagcttatgctttatgtgcgttttcttttgcccttggtcctgatgttgaacctgttacctttctgggaaaaaccccgggtaaaatagttccggccaggggacccaatgactttggatgggatcctatttttcagcctgacggctatgaccaaacttatgcggagatgccgaaggaagagaagaacaagatttctcaccggtcaagggctcttgatatggtgaaatcccactttgccgaagcaggatacaatttcagcacctccaactaaagaggtatatcaggaacggtggaaacagtga

SEQ ID NO: 11815 - DNA, 620 bp, Gossypium hirsutum
  Clone ID: LIB3829-013-Q6-K6-F4
tccggtaatatacaaccacgtttgtggacatcggcgatctcgaagctgtgaaaaatgccatcgtcgaaggaaagaccaaagtgttatacttcgagtcgatgtcgaatcccacgctcaccgtagccaacattccggcactaagcagaatcgggcacgagaaaggaacgacggtggtcgtggacaacacgttcgcccccatggttctttctccggcaaggctgggtgctgatgtggttctccatagtatctctaagttcatcagcggtggggccgatgttattgcaggtgctgtttgtggccctgcaagcctggtgaactcaatgatggatcttcatcaaggtgcgttgatgcttctgggcccaaccatgaacgccaaagttgccttcgaactctccgagaggattcctcacttgggcctgagaatgaaggagcattgccgaagagccatggaatatgccattagaatgaagaaattggggctcaaggtcatatacccaggcctcgaggatcacccccagcatgagctattgaagtccatggccaacaaggaatatgggtatggtgggcttctttgtgttgacatggaaaccgaagaaagagccaataggctgatgcaccac

SEQ ID NO: 11816 - DNA, 612 bp, Gossypium hirsutum
  Clone ID: LIB3829-013-Q6-K6-F5
atgagaggctgaggaccgtggtaccgggtcaaggggcgctccaaagatgtttttgaggtgattagagagatacaggttcagtttgtgagagctgccgagtcggggactgaaattgccaagctgcttgaggttggaacacttcctcatcaccgcaaacatgtttccaagattttgcatgtagttactccttcgttatctgtagtaccatctcagccatctacttctcagactggcgagtcttcttcgtctgctgacaacactgatccagcttttctagacatcaatgaagaaatggccaggaaaacgaaaaacctttccgctactttgcagaagttgcatctttgggaaaagaagctctacaatgaagtaaaggctgaggagaagatgcgggtagcttacgacaggaaatctcacaagttaaggcgactagatcaaaggggtgctgaagctaataaaattgagtcaacccggaatacaatcaggggtctgtccacgaagataagaatagcaattcaagttgttgacaagatatctgtgacaattaataaaatcagggatgaggaactatggccactgctaaatgaactgattgaagggttagacagaatgtgg

SEQ ID NO: 11817 - DNA, 551 bp, Gossypium hirsutum
  unsure (1)..(551): unsure at all n locations; Clone ID: LIB3829-013-Q6-K6-G1
tcgcggccgcgtgggcgcaggagctcaatctgccatgggnagcttacaagtacgtgtcagagctatggaggaagaagcaatccgatgtgatgaggttcttgcagagggtgaggtgctgggagtaccgtcagcacccttccatcgtgcgagttaaccacccaactcgccctgacaaggctcgtcgattggggtacaaagccaagcagggttatgatgtctatcgtgtccgtgtaaggcgtggtgggaggaagagaccagttcctaagggtattgtatatggaaagccaacaaaccagggtgttacccagctgaaattccaacgtagcaaacgatcagttgcagaggaacgagctggccggaagcttggtggtcttagggtcgtgaactcttattggatcaatgaggattcaacttacaaatactttgaagtcattttagtcgatcctgctcacaatgctatccgcaatgacccaagaatcaactggatctggaattcggttcacaaacacagggaactccgaggactgacctctgctggcaagaaatacagg

SEQ ID NO: 11818 - DNA, 368 bp, Gossypium hirsutum
  unsure (1)..(368): unsure at all n locations; Clone ID: LIB3829-013-Q6-K6-G2
cgnagccaagcaacagtttcccagtggnaaaaacaatgcagctgcagtgacaaatgtggttgcagttcaaaaacgcagagcaacgcgtcgagaattagaagcagggtcgcagaagcattgngaagatataactgcacttttctatgacgaagaacgcaacgagatatatacgggtaataggtacggtctagttcatgtgtggtctaactaagggtttgattttggttaggatgttatgtaatattagttgagtggtttgtgaattggggcattgtgattcgcatggaactgtaccattattaactattatttgtatcgaaaattcatttagtttctgctctaaatgatattcttattaggctttattc

SEQ ID NO: 11819 - DNA, 615 bp, Gossypium hirsutum
  unsure (1)..(615): unsure at all n locations; Clone ID: LIB3829-013-Q6-K6-G4
gcgttcggcttgntgttcaatagagcaatcgggttcgctccttatggagtttactggcgaaccctgaggagaatcgcggctacgcaccttttctgtcctaagcaaattaaaggtgcagaggatcagaggcgcgtgattgcctctgaaatggtcactttatttgctcacacctctaaccaaagctttcacgtacgccaagtcctcaaacgagcttctctaaacaacatgatggcttcgatattcggacgaaaatataagttagattccatcaatactgaagttgaacaacttggagatctagttgatgaaggctacgatttactgggcacatttaattgttctgaccatctcccttggttggtagattttgatcttcagaaactcagacttagatgctcaaaccttgtccctaaagtaaaccgctttgtcagccggattatagcccaacacagaggaaatggtattcaggggaactgatactgtggcggtgctgattgagtggatactagcaaggattgtgcttcatcctgaggttcaatcgagggtccatgatgagctcgacaacgttgttggcagatcacgtgctgtggacgagtctgatgtagccaaaatgat

SEQ ID NO: 11820 - DNA, 579 bp, Gossypium hirsutum
  Clone ID: LIB3829-013-Q6-K6-G5
gtttgatctagtttcttaggagctggtttacaagaaaagaagttgatgatcatagaggtcattggcttagttgctttcctgaaagctgtacctctctgatttccctgaactttgcctgccttagaggagaagtgaacttaggagctcttgaaagactcgtgtcaagatctcccaacctcaagagtttacgactaaaccgtgcggtcccgcttgataccctccagaaactattgatgcgagctcctcaactggtggacttgggcatcgggtcttatgtacatgatccattctctgaggtctataacaaattgaaaattgccattcaaaggtgcaaatcaatcaggagtttatcagggtttttggaggttgctcctcattgcatgtcggctatttatcccatttgtggaaacctgaccttcttgaacttgagttatgctccaggccttcatggtaataagctgatgaagctgattcagcattgcaggaaacttcagcgtctatgggtatgcccctttaattacttgcaatccagttgtaggtattccatctgaattaattgaatgttgataatgaatatca

SEQ ID NO: 11821 - DNA, 582 bp, Gossypium hirsutum
  unsure (1)..(582): unsure at all n locations; Clone ID: LIB3829-013-Q6-K6-G6
gctaattccacactgacaccaanaaatagttacttattggattatcttctcactgatttccttgttcgaacatgctttcatggggatccttcaatggcttccattttggccatatatgaagctaaccattgtctgttggatgatgataccccatttcgatggtgccttttatgtttataatcgatttgttcatccatgtttgtatatggatttgccaactatcattaactggttcaagaagcagcaagacttgtttttgaaggacaatttcttgttgaagtagctgatgactgtgtgaaggcacatggaccaacagaagttcaagagaaacttattgctaatgagccaaaggggacggagactagcatattgcagaaaggcataaaacctgtgcaaataacagagaaatgggaagttgctccgattccgaaaaccgatcccaatgtcattcagacagtgaacaatactactgctacacttccagaaactgtgggagaggtgggtcccgatttacctgagataccttcagataagcaagttcagaaggaatggacttgtgctatgtgtcaagtgacaaccacg

SEQ ID NO: 11822 - DNA, 639 bp, Gossypium hirsutum
  Clone ID: LIB3829-013-Q6-K6-H1
gcgttcggcaaagctgcggtggcatgggaggccgggaagccactatctatagaagaagtggaagtggcaccaccccaaaaacatgaagtccgtattaagattctcttcactgctttatgtcacactgatgtatactactgggagtgtaagggttacactcctctgtttcctcgtatacttggtcatgaagcctcagggatcgtggagagtgtgggtgagggtgtgaatgatttgaaacctggggatcatgtgcttcctatcttcaccggagaatgcaaagaatgtcgccactgtctgtcagaagaaagcaataacatgtgcgaactgcttaggatcaactgcgaccgaggtgttatgcttgctgatgggaaaaccagattttccatcaacggcaagcctatctaccactttgttggaacctcgacttttagccaatatactgtcgtccatgttggccaggttgccaagatcagtccaaccgccccgcttgataaagtctgtcccattagctgtgggatatgtacaggttttggggccactgtaaatgttgccaaacccaaaaaggtcaaactgttgcagtttttggactgggtgccgttggtcttgccgccgctgaaggtgcaagggtttgtggggctt

SEQ ID NO: 11823 - DNA, 599 bp, Gossypium hirsutum
  unsure (1)..(599): unsure at all n locations; Clone ID: LIB3829-013-Q6-K6-H3
cggncgcgtgggattcttcaagcttccatccgacgatgattgcgctatgggtaacggactgttttgagaggaaagacatagagcgggatcttttggcgaagctacttgtcaacctgacaaggtcccatgatggtgtattgagccaggctgaacttgttaaagggtttgaatctgtcctgagtacattggaggacgcagtgaatgacgcgccaaaagctccagaatttctgggacgtatttttgggaaaatgatagtagaaaatgtgatgagtctgaaggagataggacggttaataggtgagggtggggaggaacctgggcagctagtggaaatagggctgggcggggatgttatgggaagcaccttggggatgattaaaagagagaaaggagaaagtgtgttgaatgaaattaggggtagctcctgtttgcggctggaggactttcggccttcgcatcccaacagatcaaggattttagaaacttttctttatttagcacatagcaaagtgtagtgaatagtgattgctccctttgattttggtagaagaaaattcatgtctggcctannnaaaaaaaaaaaaaananaannnnnnna

SEQ ID NO: 11824 - DNA, 618 bp, Gossypium hirsutum
  Clone ID: LIB3829-013-Q6-K6-H4
gcgttcgattttggccttgcgaaaacaagcacctgaggcagaacaaattacctgtccactcgtgtaatgggcacatttgggtatgtagctcctgagtatgctatgaccggacatctactggtaaaaagtgatgtttacagctatggagttgtactgcttgagttactcactggaaggacgcctgtagatatgtcacaaccatcaggacaggagaaccttgtcacttgggcaaggccaatcctgagagacaaggatcggttggaggagcttgccgatccaaggcttggagggaaatacccgaaggaagatttcatacgagtttgcacaattgcagctgcttgtgtagctccggaagcgagccaaaggcccacaatgggtgaagtagtacagtctttaaaaatggtgcagcgtgttacggaatatcaagattccatgttaaccaattcaaacaaccggcccaaccagaggcagtcttctactacttttgagtcagacgaaacatcatcaatgttctcttctggtcctttctctggcttaagcgttttcgacaatgacaatatctcaaggactgctgttccctcagaagatcttcatgaaggacgatgaatactttgaatg

SEQ ID NO: 11825 - DNA, 550 bp, Gossypium hirsutum
  Clone ID: LIB3829-013-Q6-N6-A1
aagactagaatttataatattattatcattttggtcattaatggactgaagaaagcagttaaaagtttatttaggattgccaaatgcaaagtgaagcctcttagcaaacctgtcattgaaagcatattcaagacgcagaagtcctaaaggcgagttcagtcggataccaatcccgtatccgtatccactcccgcgcttattcctcgcagcggctggattccctggcacattggggcctgaccatagatcatgtccataatcagcaaaaataactccttccacaggccctagcatttttaaagaaacttcactggagccaactacgtaagattgaccagagcctacagcaccttctttataacctctcacgctgttcgttcccccaatagcaaaggcttcatgaggaggaaaattacccactacatgtccacccgacaatcttagaagaagacgagcaggaccaagtttaacacttttactcacacgagcattcactctgttgaagtacagccaatcaggaatgacaggaagtcccccacgcgtccgcgga

SEQ ID NO: 11826 - DNA, 553 bp, Gossypium hirsutum
  unsure (1)..(553): unsure at all n locations; Clone ID: LIB3829-013-Q6-N6-A2
ctctctgngatggtatgggattaggatttccaatatctcgggagcctatcacttggcgctggcgagttgggtgcggagcagcttggcagcagcaaccatgttgctcagggctggtttcacctcagcgtacttgcgagtcttgagcccacagtcagggttaacccacaagatgttggtctcgagcacggcaagcatcttgttaattctgtcagcaatctcttcggttgatggtattctgggagagtggatgtcatagacaccgggtccaattccagcaccatacttcactccttcacggaagactgacaggagcttctcatctgaacgtgagttctcaatggttatgacatcggcatccatgtcgatgatcgagtggatgatatcattgaagttggagtagcacatgtgggtgtggatctgtcggatttttgacaatgaaatgaatgagagcggtggtgatcaaagaatacagaatatgcaaataagaaagttcaatttttccgaggatcaaaaagagtgaagcaatatatggacctgggtaatgtcttggaca

SEQ ID NO: 11827 - DNA, 345 bp, Gossypium hirsutum
  Clone ID: LIB3829-013-Q6-N6-A3
agaaaaacagatcgtaataatataactaaacatcagataacaacaccaaaaatctggtttccaaaacaaaagattcaagaaccctaaaaaacaatgttgaaaagcattggctctgtgataagcacgagttttgccttttagctctcacttcttctttgctgcttcactggccttggtcttctttactccacggatcttcttagccctgttcttcctttccttcatttgtttcctcgatttctctaccttggtatcgagtccattcctgatcagcctgtacttgggctcgtacttcttggcgttctcaacagaatcataaatcaaaccaaatccagtagattttcc

SEQ ID NO: 11828 - DNA, 542 bp, Gossypium hirsutum
  Clone ID: LIB3829-013-Q6-N6-A5
gaaggcaaagcctcgagaaaaactgttaaattatggatttaaaaaaaggggttgggaggcaatattggaagttagcaccccagtgggcaaaaaatctaatgataaactgaacatgcatctatgataaacttttaatattaaaaaaaaaacctacagaaatggctgctgtgaatgcgaaggttgcaatccgctgccactgtagcttccatagttagaagtagctgctgcattatatgacgacgttgcaactttgtcatcttgagaatagtagtataatctttgatcattcgcttgagggacatatgcaggttgattcggtatttgataattgtagggattcggacctgcatgagtatacctttctggcattcctgtaaatgcagccctctggttgtaaactggtggagcttgcctacctggaggtccccgatatcctcgaaatccaccattgggccttgatttcttccgcgggtgatgtttaccagaatccccccctcttttcttattgtctgcttttgctttttcgagttgagccaaccttt

SEQ ID NO: 11829 - DNA, 559 bp, Gossypium hirsutum
  Clone ID: LIB3829-013-Q6-N6-A6
tcgcgatccactgtgtcacagttttctctctctcttttcttcctctattcttccttcacagtacatgaaaaaatcttcttttgaaccatacttctcatctgggttttcctcaaatttcttgtttttggttatataccacctttggttgatgataaaaatcccactgtcttcttcttcttcttcttcaatcattttgttcactaggaaaccaaactacttttttattcagacccatcactgtttaattatttgtctttttctgtgtttttttccctctagtttaaggaatatcagatctcaaaacagcttttatggtttctgttatatagagaaagctataactgggatatgagtagttggctggtgtatgaagttggtgatctgatacaagattttaagtgcttgaagcatctgccacaacaaaacaaaggagaattaaagaagcaatgaataagagtaatttgggttctgtcagcagctctgatctcatcgatgcaaagcttgaagagcatcagctgtgcggatccaagcactgccctggctgcggtcacaagcttga

SEQ ID NO: 11830 - DNA, 515 bp, Gossypium hirsutum
  Clone ID: LIB3829-013-Q6-N6-B1
aaaagcaaaacccaacttctgtttcctgctatgtaacaataaagcaatccaccaagtacaactaaacttgtcgaacaatataatttcaactacctctcctacagacctttttaagttttttatatgatgctccaaatttccccattccaacattgttttcactctctaatttcgttttataatccacgattttgggtatggaggcagtgaacgagagagataagagggtggttaaacagtccccttcaccattcatccaactacaacgtctgtctcctgtttcccagcaaaagcgctacctgatgtccacactcccacaaactaatagggtctgtaccttctactgcggttgccttcaacgcctccactatttccacttcgccctgctcctcctcccgggccattgccccgatcaactcttcgaggacgtggggttggcatctgcactcctggctgttggaggacgtatcctattcggccatctggtagaaccatgggcaccatagccatatttg

SEQ ID NO: 11831 - DNA, 510 bp, Gossypium hirsutum
  Clone ID: LIB3829-013-Q6-N6-B2
acaagaaggccaggatcaattacagacttgttacaaacaattttacaagcgactttggagcctagagctgccttttaaaattaaaattacaatctggcgttgcactcgtaattttctgcctaactacagtaatctacactacagaaggctgattgattctaccatgtgctggaggtgtcattcgggagcagaaacggggatgcacttgttcagggactgtcctgagagaagtgtcaataatgtcagatgggtcgctccgatttgcccgcgaatcaaaattaattttgatgccgcttgcaacagacaacgaagagaatcgtgttctgggttagtggtaaggaatgaaaaggcagaagttgtttgctctagatcagttttacatgtgaatgtaccgtctgcggttgcggctgaagcattggcatgctttcaggctcttgatctgggtgttcaacttggactcaaggaggtggaagtggaaggggactctcggccggtgattcgtaaactgca

SEQ ID NO: 11832 - DNA, 538 bp, Gossypium hirsutum
  Clone ID: LIB3829-013-Q6-N6-B3
acgaagaacgagacaccatcatttccccatttcaaatttccttgttttcagaaataatgagaaagaaactagcataatttaaagagaaaacaattaatacaagagataagtgctcaatgcaaagatataaccgtggtttacagtgaagaatcatacgaaaccattcaagctcaaggacagctccctcctcacactaacaagttgtctcattaatccaggctgcctcttatatatacatgtctcacatgtcattctactcgtttagcaaccatgaaaattaacaactcttattccggtggcggcttcttcacgttcttgttattatgcatccaaaccttgaatacctgccttttcaccccatactcagcacaaaatttctgtacttcctcttcgtcttgtttattgatcctccaacccactttctcggctaactccaacatcttatccttctgctcctgcgtaaattttgtgcggaacctcttctttgacaacacataaggcggaggcgggggcactccgtcggcgttagattggaaca

SEQ ID NO: 11833 - DNA, 412 bp, Gossypium hirsutum
  Clone ID: LIB3829-013-Q6-N6-B4
aagggggctttgaaagttttcactagaatgataataattattcctctgccaaaaaaaaaaaacttaaaaagaagtcaaatgcagctgacagcaaaggagcatttaatcaaaaaagaaaaagaaaacaccattaatggtgattatagataggaaaaaatgaacatttctaggtcatcctctgagcagcttccttggcaagaagcctctcttttgccttggttctggcctgtgatttggagcccataacaccacctccccacttcttcctattctcctcatatttgtcattgaagtttgccttgatggcctcaaggactctgctgaactccaacttatcctcattcttaactgtggtcaagcacaaaacggcagcagttttcttgtgaacaatcgatcccaaacgagatttccc

SEQ ID NO: 11834 - DNA, 470 bp, Gossypium hirsutum
  Clone ID: LIB3829-013-Q6-N6-B5
attaaaaaaaccagaacccgaaattggaaaaggaatataaacccgcttaaggtaaaggaaaagtttggggggggggggaacgaaacccgcaccaaagaggaatccaagtccaataccttaaagggaaataaacccaggggcagggggaattcaaatacctttaaaaaacaaaaacagcccaaaaactttcacctagtcccaggtgccagaagataaataaaaaagcaaaacaaaaaccccggcccctggtccctgggcctaaagcaaaagcaaaggcacactcccaccaacccaaaagggaaagggaccgtaaaaaccccaagccaggggcaaggaaataaaagaagggggctaaacctaaaccgtaattaaaacaaaaacgggatgggctggaaaacggaaacggcctcggccaaaaaaacacccccacacccataaaggtgagcgctaggcccaaaaccgaggctttt

SEQ ID NO: 11835 - DNA, 468 bp, Gossypium hirsutum
  Clone ID: LIB3829-013-Q6-N6-B6
aaccttgaaaaactcaagggtaaaagggggaaaatcaagaaaaaaggaagaaaaaggaaagaaaaaaaacgggaaaaaaacggaagaaaaacccaaaaagaaagcaaaaaaagggcccgaaaaaaaaacaaaaaaaaaacaaaaaaaaaaaaaaaaaaaaaaaaaaaaaaaaaaacgggaaaagaaaaaaaaaaaaaaaccccgaaaaccccagggggaaaagccaaggcaaaaacaaccccgggaaacccccgagaaggcccggaaggggccccgcggaaaacccacaaaaaaacagccggggaagaagaagggcggaaaaaaaacaagccggcaccccccccaaggcccccccaaaacccaagccggaaagaaaaaaccaaacccccagggggaaaaacgccggaaaaacccccgaaagcaaccccatggccccccaaagaacgcccaaacaggcaacccgggggc

SEQ ID NO: 11836 - DNA, 545 bp, Gossypium hirsutum
  Clone ID: LIB3829-013-Q6-N6-C1
gaatgtattaccaaatattgaagccgacataattttgacaacaatccagtagggatctcttttaagcgccgggtacatccaagattgagatatctaagattcaccagcatttccaaaccttgagggattttgttgattgcagtacttcgaagattcagtttcttcaaagcttgaagcttcaatacagaaggaaaactctctaattcgtaacaataattaagcaacaatacctcgagtttctctaaactagaaatagagttaggcaaactcttaaaagggttataagaaagatcaagaatcttaaggttcgggaagtgctcaaagaaagattctgggatttctttcaatgaattaagtgaaagcaacaatgttgtgagttttggaaattttggaaaacttcatagtttgaggaattattgagatgaaattgtccattaaagaaatcttctccaaatcttcactccattcttctccgtttggtaactctttcaactgcatacgagcttttaccataaatcttttccatgttatatgcaatgccatat

SEQ ID NO: 11837 - DNA, 521 bp, Gossypium hirsutum
  Clone ID: LIB3829-013-Q6-N6-C2
ggagaaaaacactcattaaataaattaatacacgcttacgttacatattacgtacacttctacatgttattacacataaatgaaatcggggtaataaccaaagacaaccttcaatacttctattatttctaataataacccaaaataaaacattctattacaatttaatcccccatgcacaattattaatttcattgagcaaatattattagcaagtcttgagtggattgccgcaaagacaatcattactatcaaatgatgaagcttcaaggggatcgaacggggttcccaccggaatcgtaccgcaaagatggttatggctgagatctaaatgtccgacgaacttcgccgacgataaagatccggggaccggacctttcaagttattgaacgataaatcaagtgccatgaagtacgatttcggcccgaaaacgtccggaatgttgccttcaagggagtttcgactcaagtttaagatacccaaaccggtactgcccagaaccgccggcggtacttcgccg

SEQ ID NO: 11838 - DNA, 558 bp, Gossypium hirsutum
  Clone ID: LIB3829-013-Q6-N6-C3
gcaatgctaaaacatacgattcaattgtcaatgggattatcacagataattctgatatcggaggttaaaacggaaaaaggaaaaagagaacgctgccacctaatattcttctcattagatggcttcagttcattaccaccacagatattggaaagtacacatccataatgagcttcaattcatgcaattgaagaaccctaaaagagatcaatctcaacttcatcccttcacttctaaaatggtataaatagcagcaaccttattgatcaccttctacgcacagcagaacttggcccacgctgcactgctccagctgacggctgtccttgtgcaggtacctggccagtagcttgttcctcaggcatgttcattgcttgtgttatggcattcattacaatgagtcccagagggatcaaatacatccagtatttagcccaaaaagacctttcagccggctgcacaacttcaccttcagcattctctccaccaagaatttcttcagtaaatacaggagccctgggtgcctgctcactgttcttcaaaactgtatgtgaactg

SEQ ID NO: 11839 - DNA, 539 bp, Gossypium hirsutum
  unsure (1)..(539): unsure at all n locations; Clone ID: LIB3829-013-Q6-N6-C4
agcccaaaaaggaacaaaccctataaaagttcatttcaatccgattagaaaccaaacaacaaaaccaaacagtttaaatcccaaaaaacataagagaacaatangagaaaccaggtgaagaaaatcaatgatttagtcaacttcctcaatcttaggaccagcaccacttccaccagccggaacatcctcatccatgccaccacccatgtcaccgccggcaccttggtacatcttagcaatgatggggttgcaaatactctccaactccttcatcttgtcttcaaattcatcggcttcggcgagttggttgctgtctagccattgaatggcttgttcaatagcatcttcaatcttctttttatcagctgctgggagtttagcaccaatcttctcgtccttcactgtgttcctcatattgtatgcatagttttccaatgcattctttgcctcgaccttctttttatgttcttcatcttcggatttgtatctctctgcttcttgaaccatcttttcaatttcttctttggagagtcggccct

SEQ ID NO: 11840 - DNA, 523 bp, Gossypium hirsutum
  Clone ID: LIB3829-013-Q6-N6-C5
aacacacaaaattaaacacgttacactagtataggttttcagacaatataacagaacaaaacaagtaacaaattacatgacagcttcataatatatgtagagtacatatggttgaaatgcatccttatttaatctcataatatcacaacacccttttcagatttgttctctccaactctctctacccaagatggagaatcttcttgtcatggtgggagtagggagtgggagttcctctctcaatcacatttggagtaaagaaattgcgagatgccaaggcttgaatagcattcagctctgctcctgttaccatgtttgcttcctcaaccctctctatctctgcaatcttagctcggagacatacactttcattttccagctcaacttcccttttctgaaaatattcaatttcagctagcagcatttcgtgcttctttgatctgattctagtaatccctcgttcaagtctattctctagctgctttaactccttcactgtcaaggaactcaacgaatctcccat

SEQ ID NO: 11841 - DNA, 333 bp, Gossypium hirsutum
  Clone ID: LIB3829-013-Q6-N6-C6
acatccagtaaaactttcattattctatagaaaattcccagcactataccatgttttttgccacaattagagatcacactgccttcaaaaggtactttttgtgcatacaaacaaaagacggtattaacgtatcatacgcatgtaatttccccttggttttgcgatattcaccggtgaccggcctgtcaaacctctttagatcgaaccgaatgacggataattccactgccatgtctcaaatcccagatatactaaatctcattatttactccttggggggaccaacgggtggcataaattgaacttgattctgctggagctgcctttgtacgt

SEQ ID NO: 11842 - DNA, 479 bp, Gossypium hirsutum
  Clone ID: LIB3829-013-Q6-N6-D1
ggacaaagtccccagcttgaagactggatagattaaataggggtcatttataggctggactgacaccataaacaatattttgataaaacctaaaccaaaatatcctatacacaatgccaaattatacagaaatgaaagcaaatatagagctatactttgttcatggaaacaaaacaccttaattctttggtcttttttttcaaaaaaaatggggagagcctcgggagcctttcctaaacttttttcggaaaggcttgcatgcctcgatgcttaagtcaacggctgccgcaagggccatgaaaatggcagcatcttctatgcatgtcacgtgtcgcatggccagttgcactaagggcttgctgttcttaccttccccttggactctgcagctcattacaaagccaccagagatcggacttagggctgaaaagtctccactgctttggggacttggtataggagttggggcttgccgcatt

SEQ ID NO: 11843 - DNA, 528 bp, Gossypium hirsutum
  Clone ID: LIB3829-013-Q6-N6-D2
aacaatagaaaccagtaaattaatttcattctgtgaggttttttcccaagcctataaaaagcctaaaaaaaaataaaaacatttctgtcaaccagcaaaatagccgacagtatctacaaagaattgattttgattctaaaaaaaacccagcttcccctaacaattcaaccaggggaatcaaagaatcaactgactggggaaaaaaaaacaattgcagatgaaaatgtaactcttccaatctttggtttaagatattctgcaatatgctcttctacatctcactgtgataacctgtaaggacaacagctttcgtctttacttttcttctgtttcaacatacattttcaccaacattcgatttgtactctgctagacttggtctaacaccgagcctttccacttccaagcgtgagctcgagatcatccaatctaacttcatgaatcctctctccttcccatggcttcaccagtccactctcaaactgaaactccgaaccatgccctttctctttgatcaaatcattggga

SEQ ID NO: 11844 - DNA, 506 bp, Gossypium hirsutum
  Clone ID: LIB3829-013-Q6-N6-D3
cccttgcaacagtcaaaaacacacttcatttcatcagtcatagccatagtcttcaaataacatcgaagaccctgttattacatgcgagccatagtaactggagagggcatttatttacatcaccattttttaggactcaagaactggcccccatattcaacttctgttggattaacgataagaccctcctaactttttccctcgcagctttgcaccgagggccctctcgagtttacctataatctgggggttaggaatagcttttccggattcgaactcttgaataatcgggggcttttcattgatcatctgaccaagttgaaactgggtgagtttcttctccattcgagcatgcatgagggctttcttcagttcagttggcactctttcatgagcaaaattttcagtttcctcatcaagtttccttgtattcaaagaagggctactcgatgctgccttgttcgccccagcattcgatttcttgacggattcgatctcggcaccgg

SEQ ID NO: 11845 - DNA, 531 bp, Gossypium hirsutum
  Clone ID: LIB3829-013-Q6-N6-D4
gcaagataataataaataagagaattcaatataaagcaaaaacaaaggcagctaacgagaggtcaagctatcaccctcaacctctcattagtgcaacaaattcgtacaataaattgttcaattgcattttatcgtgtgtgtttttttttcaaaaaaaaatcaatgggaatttctcgttttgatgtttagacaaacctagctcactcactgtcataatcttcgtcgtcgccaaaactgaagactgaagcatcagcagcaatggatttgatgtcacttgcgcccatcaactccatactggggagctcaagtcctgttgaatgtttgccaactccattaatggcaatgtctttggaactattattagatgaaagctcttggtttttgacagatggttttgatgttcctttttgctcggctgcagggttcaatagattgctggagattgtaggtcctgctccagcagccggttgagtcggcctactcggtgaagcccctgattcctctccatcactgtctgagaatatgtcatcg

SEQ ID NO: 11846 - DNA, 531 bp, Gossypium hirsutum
  Clone ID: LIB3829-013-Q6-N6-D5
acaagtagaaggatgcatgcatgcatgagaatattataaacccaacttcatcaaaaaagtgaaaatatatgttacatattctgatttcacatcacctctaccttgtgttatttccccaactacaactagttctgcagagggcaaaatggaaaattcaagtgctgatgataaatcaaatctattaactaaccatgcgactcaggctgacgatattcccgccaacaattctttggatcctaccaggtgtcctggaatgcattccttgatctcttcaaaagcacacagtgtttctgaatcaagatctccagcaaactggtgagccctatttgcaaaatgcatgccttgaagaagcagtgcctcttgtgcagattccttgtctaaactgcgtaccaattgaagctccgttcccactctctttatgtacattgtgaccagcttcatagaagcctgctttattttatacaccattccggtatcaagcatccaatcaactggaatcttacactcctgataagaacggattactgaatt

SEQ ID NO: 11847 - DNA, 549 bp, Gossypium hirsutum
  Clone ID: LIB3829-013-Q6-N6-D6
aaagaaaacataatgtgtttctctattgtttgttgcaattcaaagagaatcctatctttacgtatatgctacattactttcatatatgttacattctatgttcaatgttactccgaaacacatctaagtccaagtaacatacagatgattgaatctgctaagtgctaaaaccatcggaggcgaaccggtagagcagaggaaaggcggaaaaagctgattctttagaactggaagatgaagtgaaaccttaaaatttatacatccgagtgcatactgtcccgttttctttttgagctgcttttggatttctcaacctttccatcaatgaatgagagacatgtacgaagatgtgcagagaaggaattgttatgacttgtagaatccagttcctcaggacagtgtcgcctgtactggcgaaacatcaacaaagagtatacaaagagagctagaacacatgcgattccgcatataagaaatagtccccagaagctttgtaagtcgagctgctctgcttcatcctcagatttctcagaactacatgcacttctt

SEQ ID NO: 11848 - DNA, 538 bp, Gossypium hirsutum
  Clone ID: LIB3829-013-Q6-N6-E1
ggaaaaaaatctaccattaaccataccatagctttatgattttcacatattttatttcatactactgcttgtacaactatatatatatatatatatataaactgagattaaaaatcccattaaaattatggcattatagaaaattaatactgaaacgtgttatcagcagaggccatgataggttgattcaagaaagccaaatggaaaggattaaggaaggcagtatcagctacagcaggctgagtgaagtcaatgcttgttttatcatcatcgtcgtcgtcatcgccatgatcatcattcaagaagctgatgatttcattcaaggactgtaacctatgagtgagttcattgagttgagctctaagcaccgagttctctgactcaacattcaagaggtgttgtgtggtgaagtttatgtttgtgatgatctcatggttttgtttctgcaactgagtcaactgagtcattagatcatctaaatgcttttgtttcctcatccttgatctccttgctgattccctgttcgatatcattcgtt

SEQ ID NO: 11849 - DNA, 88 bp, Gossypium hirsutum
  Clone ID: LIB3829-013-Q6-N6-E2
ggcaaaaccaacttccttttcacccaaacctttcttcccttggaaacataaagataccaaatacaaaaaaattaaaccccaagtaaaa

SEQ ID NO: 11850 - DNA, 514 bp, Gossypium hirsutum
  Clone ID: LIB3829-013-Q6-N6-E3
cccatgcaaatggaaggagggaaaccttggcattcactaaaaatgttaaaagaatctgatccaatgaaagcatcacaaaaaacagtctaggttttacaataaataatgtacactatttcatcatacacccttaaaacactcaaaaacccagccccaatgtttacagagataaaagataatctcctttcatgctctggatgggggaaacattttggacatttacctgcaattgcacttctccttaggcaggtagcttctactcttaagttctggggatttcggcaacaagaaatacaggaaatctacaagttcaccggaggacttcccttgaacaaaaaatcataagcaatgtgttcccaaggcaatgttatagacattaagcaacatttgagaggtatcatttcttcatcaaaaaatgaagtggcaaaacccgctgcataagcgttctttgctgctacagatgcaacaaaagctgctttacaaacaatggagccaagtccgaaacccttttttg

SEQ ID NO: 11851 - DNA, 254 bp, Gossypium hirsutum
  unsure (1)..(254): unsure at all n locations; Clone ID: LIB3829-013-Q6-N6-E4
aatagggngaaaagattcaagcatttgacaaaactactatgaaagagtttcaacataggtatatactagtaacaggagttaatctttgatatatactaaataaataatatccggaggtaatgcataattatctaccccacaattaactataaccggttgcatatagaagcagttgccttcaagcttggcagcagcgatgcatccatactcattgtctttaaagaagtgtgtgggagagatccatagggaaggga

SEQ ID NO: 11852 - DNA, 525 bp, Gossypium hirsutum
  Clone ID: LIB3829-013-Q6-N6-E5
atccaaatccgaatttgtatccaaatttattatcaacaaaagttctttgattcatatcagtaggtaatgttcttttcaaggtaaaaacaacaacaacatgatgaacatgaagacaaggattctattgcatccccatggaaatatttacaggtactcaaagaaactacgcagaaagtccagatattttacactatgcttattcccattataaaggccaacaagatttgattctagcactgaagtaatggaactcacatctcggcaaccagtttctctgaatcactggcgtcagatagtgtacccttggtccaccttttcagcatctccaatgctgccttgggctggtccataggaaccatatgacccgcatcatgaaccttaaggaaaccaagagctccatgagttttcaagactccggcttctgcaccatctactatgaaaggaacctcaggagatgctacaaactccttctgaccagaccattccattgcatgaacccatcttgaattgccaagccagttgcag

SEQ ID NO: 11853 - DNA, 556 bp, Gossypium hirsutum
  Clone ID: LIB3829-013-Q6-N6-E6
aggtaaatatgcaaattccattcaaagagaaaccatacatagatgcaaccggtaaacaaagactagaaattatttaaaaggccatcaaagggcacaatccttcacgtaaaaccagaaaacccacattaaggaagaccttaaggcttagaacccaccacgaagacgaagaacaaggtgaagagtggactccttttgaatattgtaatcagccaaagtccttccatcttccagctgtttcccagcaaaaatcaacctttgctgatctggtggaattccttctttgtcctgaatcttcgctttcacgttatcaatcgtatccgagctctccacttctaaagtaatggtcttaccggtcaaagtcttgacgaagatctgcatcccacctcgaagacgtagaaccagatgaagagtcgattccttctggatattgtaatcggctaaagtccgcccgtcctcgagttgctttccggcgaagatgagacgttgctggtctggcgggatgccttccttgtcttggattttggctttcacgttgtcgatcgtgtcagagctctcg

SEQ ID NO: 11854 - DNA, 527 bp, Gossypium hirsutum
  Clone ID: LIB3829-013-Q6-N6-F1
aacctaataggattaggagattatattttcgagagcagatcacacataggaagaagataacccattaaatatgggttgacatgcatttcttcaggctagaatgacaaacatacaaaccaaagactacatatgcaaaaacccagataacaggacctcttcactgcctcgatcttgattcagctcgtcgagcttcgtctggtgttgaaggaaacaactccacatatcgagaccctatcatcatcttatccttgcacattgctcttttagcttcctcgacggaagcaaactccacgtatgcctctccagtggctttcccatcggggcggcatgcaatgtgtatcctgtcttcaacgattttgaaatctgcaaagaattcaacgatttcaggcttcttcaccgagaaaggaagaccacgcaacttgagtatttcagtgtattccatttgatccttatcgttgaatctctttgctcgagagggtggggggcttccgtggaaatcattatcgtagattccttcgtaattcacc

SEQ ID NO: 11855 - DNA, 544 bp, Gossypium hirsutum
  Clone ID: LIB3829-013-Q6-N6-F2
aaggtaaatgcagacaaatccagtaattgatgtttaaaccataaaccattacagttcaagacaatataggaacatccatttcaacttgtagagaagtactcaattgttcaaaataaactgaaactggcgctcaattataattcgcggtgttaagattgcggttctcaatgatttttaataccagagatttttttcccaaactaagcactaggaatatagatttatataaaatgtaatcttcaatgttttccatgcgagaaacttgctttcactgtttccaccgttcctgatatacctctttagttggaggtgctgaaattgtatcctgcttcggcaaagtgggatttcaccatatcaagagcccttgaccggtgagaaatcttgttcttctcttccttcggcatctccgcataagtttggtcatagccgtcaggctgaaaaataggatcccatccaaagtcattgggtcccctggccggaactattttacccggggtttttcccagaaaggtaacaggttcaacatcaggaccaagggcaaaag

SEQ ID NO: 11856 - DNA, 544 bp, Gossypium hirsutum
  Clone ID: LIB3829-013-Q6-N6-F3
aaaaaaaaacctgcaaattccattatttcactgtgttttttatgatgttctttgatatcagcaacaaaattaaaaaccccaaaaagtaattaaccatatatatatgaagtctggagcaaggaaattaaaaccatggggagagcaaaagagttccaatttacaactcggacagtctcttatcttgctgccttaaatccttgtaaaacctgttaatgaaatcctccgcagctttgtctacgtagccgttgtcttcatcaacatcccttaacggaaatggggagtcggttatcctaagttgcctggccaatggggtttgtccgaaccctggtaacataggggaagcagcaacagtagcttccatcatggtgttgtcattgttgttaagcatctccaagacaaccttcacggcgttcatggtcaccatgtcgtcttcgtgggtaggaggagcgtgggcgcacccgaagaagtggtggtagtagttgtgaatgccgccgttcttcttcttggcggcgaggttgaaagggaagatgtagttgggggtgtt

SEQ ID NO: 11857 - DNA, 527 bp, Gossypium hirsutum
  Clone ID: LIB3829-013-Q6-N6-F4
aaaagaaaaaagcattatatttatgcaaacgctccagttctactgaaacaacataaacaagactttacacacccaaggcaaacattagtttttattcaacaaggtgccatcttgcatcctagacagtgccttttctaattggctccacttctgctctagtgttccgatgtatccgatggacatcctcaccagccccggcgatatgccggcaagttccttctcttcggcattcatttcactgctggtgctactgccggaacaagacatgagagtctcgtagtaacccaagctaaccgccatgaacccaaactgagtatagttttgcaagtggtgcatcagcctattggctctttcttcggtttccatgtcaacacaaagaagcccaccatacccatattccttgttggccatggacttcaatagctcatgctgggggtgatcctcgaggcctgggtatatgaccttgagccccaatttcttcattctaatggcatattccatggctcttcggcaatgctccttcattc

SEQ ID NO: 11858 - DNA, 543 bp, Gossypium hirsutum
  Clone ID: LIB3829-013-Q6-N6-F5
aaaaaaaactgatgtagtttgattcaaaaatgtaaaagcaaattgcattatacaacatttgattctgggtattccagtgactcgcaaatgttcataaaaactacatttttaaaactcttcatcttacaaaactgatggagaatctgcttactccaatggttcggcacaccatctgctttcctttgcctgatattcttcaatgatacgggtgctgcttcatgccgactggacaggatatctagagttgcaccttgagtgagattttggaaatgcaatatctgtcttcggctcttgacaagcttgacagtcgatgccataagcccatccgaaacctactcctgtaaggcagatgatgaatcatctaacaattccaaggttagctcccatcttatgtctcttccaactcattcataatcaagtcttccctgacagtaaagcaaccagccaagttgtatgtttgcaggacccgtccaacccaacattgagctccatttctgagagggcaatagactgcctaaactgatcatcagttccaagggatgc

SEQ ID NO: 11859 - DNA, 535 bp, Gossypium hirsutum
  Clone ID: LIB3829-013-Q6-N6-F6
ggcatgaaaaacccaaacagattcttttatgataaagttgatacagcaaaaggtgggggtcggagactaagaacagcatcaaatggctcacttaccacccaccctctaagagcacacaggttccttctgggggttagcccatgcctatcctagaataactgcaaacatataacataaatctggtcacaaagagaatttgtaattctaataaagttcctctccgccttgccactatcaagagttgacatggaagtagcaaaatggagggaagaaagttaaaggccttgccaaaagaagatgagaacaaaaaaacctaaatgacttacaagatttcatgggtcaccagatagggacatttaaggattcctactaccatgaagattgcttgtatccatcccaacaaccctcaagttccttctttttcaaaacatcacctgccacttgatacatccttgcttgctcctctgccagggcctgtgaactcacaacagacagttgtctagatgcaagcgctattgtctcatctcttccttca

SEQ ID NO: 11860 - DNA, 518 bp, Gossypium hirsutum
  Clone ID: LIB3829-013-Q6-N6-G1
aaaaactaaaatcccatttctagtatttaataaaaaaaaacaaacaacacaatctcaatatgacaatagcattggacattttcagtgagcacataaatctcaatagcctctaacatagaagattttcaagatgtcccacacacaatataactgtctcaaaattcttataaaccctacaatagtaatgaagccaagatagcagtaacaaaaacaccaagtacggtccaggggatcaacggtagcggcgaagggagagtgtgttgtttctcttccaggttgccctccttgaaggtcgagccttgtggtgcaagtgccccttgccacgaagacccctgtatttcttgccagcagaggtcagtcctcggagttccctgtgtttgtgaaccggattgcaaatccagttgattcttgggtcattgcggatagcattgtgaacaggatcgactaagatgacttcaaagtatttgtaagttgaatcctcattgatccaataagagttcacgaccctaagaccacca

SEQ ID NO: 11861 - DNA, 425 bp, Gossypium hirsutum
  Clone ID: LIB3829-013-Q6-N6-G2
aaaaaaaaacaaaaaaaaaatttatgggagagaaaaaaacaaaaaaaattttcaaaaaaaaaaaaaaaaaaaagggggcaaacccagggaaaaaaaaaaggcccaaaaaaaaaaaaaaaaaaaaaaaaaaaaaaaaaaaccaaaaaaaaaaaaaacccttttttaaaaaaaaaaaaaaaaaaacccccccttaaaaccggaaaaattttgggggggttttcgcaaaaaaaaaagggggttaaattttcaaaaagttttgaaaaccctttttaaaaattcaaaccggggatttggggttttaaaaccaaaacaaaatttgaaacggaaaatttttttttttccaaaggaaaaaatgtttttttttcggggaccggggggtcaccccggaaattcgggccgggccccgggggggccaaaatttttcc

SEQ ID NO: 11862 - DNA, 539 bp, Gossypium hirsutum
  Clone ID: LIB3829-013-Q6-N6-G3
catagtaataggaatttatttcattaacaaagcaagcttttacaagataatttattctctcatcacataatataaaactccatataaagaactctcttttttttttttagagagagagagttctatatgggcactcttgataaccgggaaaggtagcttaagtaggcacataaatataacacatagtaggacaaaacattagagttttgatccttggttgggcaaatatacagcagcaacactctcttaagcatccaaatgaatcatgcatctcagacctataccctggagcatgtagtcgaatgccttgtttatatcggcaaaaggcacagagtgtgtgatgaacttgtccatatccagccccagctccttgttcaaatatttgtcgacaaccataggaatatcagtgcgtggtttatagttgccataaaaagcacccttaagggtcctctcacttagtagattcattggatgagttttgaatgcatcgtctttctttggcacacccaccagcacacaaacaccccaaccatcatgga

SEQ ID NO: 11863 - DNA, 376 bp, Gossypium hirsutum
  Clone ID: LIB3829-013-Q6-N6-G4
ggttaaaggcacactaatagttaattcgcacaagatatagtagtaatacagatagataattaactatgcagtaacaaatgaagattaagaacctcagacttgagggacacaaccaagacaaggttatcaagggttcacttccctactactatttttttggggggtctttgattctcatgttttcgctcttcttagttcctcattttcgagggcacaatgtcactggtgtgataggcttaatttacgtctggggcgaacattaacactcaaaggattagccatctcacaagatagtcttaaaacttcggataagtcaacgggattttgatctgagggtagccattcaaagtcgtgcaaaaaggtttgccaccccaaa

SEQ ID NO: 11864 - DNA, 544 bp, Gossypium hirsutum
  Clone ID: LIB3829-013-Q6-N6-G5
acttaaaacagatccatttataaataacaaggattacaacaatagcataaaggctagatcaccacaagctaataatacattaaaatcggttctcctaacaacgtacaactacttaaataagcaaagataaataatggctgagccaaaacaatgcacctacaaaatcaacacatattctggtgcatctttcctatgcccgactaatgttcgatacagatacatcttgtctaccttctgcttgtcgacaaggttaaattccatttgttcacactcatctatgatctccacatttaggctcggcatcttctcagcaactgacttacagcctccgagggtaacttcacaggaggacatccaaagggatcgcattgtttcatactttcccacgtcctctagaagtgctgcgtcaccaaaggggcagtccctgatctctagcttgcgaagtttcttgcaaccattcaacacgtagagcattcctttgtcactgtctgcagcaaaagcgatggacagcatctcgagctgctcggcatacattcctatgtaa

SEQ ID NO: 11865 - DNA, 524 bp, Gossypium hirsutum
  Clone ID: LIB3829-013-Q6-N6-G6
ggataacaagaaacctcacaaaccatgtactatatagcccgctatattatcacaagctaaccacatattagatgtaatgtgatcttgatatacgatgaattcccgcattacatgctgctgtaaactaagagacaaacaatcttcgaaaccatctcttttcttaaactttacagcagtaaaatatttcaagatcgattagacacactaactcaagcaagctgaccctctccaagattattcagtttttgaatattagctaagtgcttccttccccatagatgagaattcagatcctctgatcgaccgcaggttatgttacatatagtacacctaaattgaggaattttagtcttatcatgtttcttcccaacctgttgctgctgcccttgtacgttttcacttgattttacatgatttcccaccatattagttgttggtatcgccttcttcgattcttcttgtggcagattagatttgctcatctcggttttaggattaactgcattgctgcatgctgctgacga

SEQ ID NO: 11866 - DNA, 126 bp, Gossypium hirsutum
  unsure (1)..(126): unsure at all n locations; Clone ID: LIB3829-013-Q6-N6-H1
aataggaatttatttcattaacaaagcaagcttttacaagataatttattctctcatcacataatataaaactccatataaagaactctctttttttttttntagagagagagagttctatatggg

SEQ ID NO: 11867 - DNA, 526 bp, Gossypium hirsutum
  Clone ID: LIB3829-013-Q6-N6-H2
aaccaaaaaatatctaatcatccaacactgatttccattaaataaattacttcttcaacaactagtagtacatgatatagatctcacacacacattaaaaaaaagtgaacacattggtgaaatatcactttaacccccaacatattgtttccatcacagactaaaccatacagttttttttttcactacaaacaccaaaacaaagatattatagcacaacacaacttgagtcttttcttttagcatttagggaagggagtaccacaagtgctagcaactttccttgcatttggggtattaatgaatttcttgagattagggttcttaagatattggcaaaggcaaggcttttgctctttgatcttactgcaacataactttgatggtggggatgatgatgttatggcactcacacatgagcttagctgtgttgggctacatgttacagccattgacacctttgcttcggccagtaggaggaggaccaccactgctgccgctgagaatgccgccgtataggatgcct

SEQ ID NO: 11868 - DNA, 499 bp, Gossypium hirsutum
  Clone ID: LIB3829-013-Q6-N6-H3
aggccagacatgaattttcttctaccaaaatcaagggagcaatcactattcactacactttgctatgggctaaataaaaaaaatttctaaaatccttgatctgttgggatgcgaaggccgaaagtcctccagccgcaaacaggagctacccctaatttcattcaacacactttctcctttctctcttttaaacatccccaaggggcttcccataacatccccgcccagccctatttccactagctgcccaggttcctccccacccttacctattaaccggcctatctccttcaaactcatcacattttctactatcattttcccaaaaatacctcccaaaaattctggagcttttggcgcgtcattcactgggtcctccaatgtactcaggacagattcaaaccctttaacaagttcagcctggctcaatacaccatcatgggaccttgtcaggttgacaagtagcttcgccaaaaaatcccgctctatgtctttcctc

SEQ ID NO: 11869 - DNA, 524 bp, Gossypium hirsutum
  Clone ID: LIB3829-013-Q6-N6-H4
aacataaacccttgaatgcaaatccaatagaaaaggctataatgtgcatatgtacaaaatttcatccaccactgcatggggggaaatttaacagtggtacaacaattgggacaacaagaagcacccattccccttctatccaccaaattacagaatctacaacacttcctaaaggttctttttcgaaataccatcgtttcctacagagaaaaattctcactgtggtatcgagttttcatgagcttctgagtgaaggccgctgctgttccactttttcttcattcaaagtattcatcgtccttcatgaagatcttctgagggaacagcagtccttgagatattgtcattgtcgaaaacgcttaagccagagaaaggaccagaagagaacattgatgatgtttcgtctgactcaaaagtagtagaagactgcctctggttgggccggttgtttgaattggttaacatggaatcttgatattccgtaacacgctgcaccatttttaaagactgtactacttcaccca

SEQ ID NO: 11870 - DNA, 536 bp, Gossypium hirsutum
  Clone ID: LIB3829-013-Q6-N6-H5
acataaaataaagcaaatatagtataatattatatgcttttttttagagtcacaaatcagaatgatgatcattggcatttacaattaccaccaccaccaaagactatttgacaaaagaacaacacaaaagatcacttgcaaagaaagaaagaaagatcaattctacaaataccatagagcctgttgaagaagatacaaaagagtaaacccaaagtttcatattttaaacagctaaaagcaattaaaaactctcatgatgattgacaagcagaagttatttgtgctggttctacttgatgcttgactggcttttatgcaagactgatgatgagaacttgaaacaaatgttaggaataagtcccaaagatgtcatcagattctagtttgttggtgctttcttctagcatcatctcttggtacctacattctttgctgcaaaatgctttctcacttctgtacatgtaaatgtcttttcctggagaaagattctttttacaagcataacagtaggtaaggaaattttctgattggtaact

SEQ ID NO: 11871 - DNA, 532 bp, Gossypium hirsutum
  Clone ID: LIB3829-013-Q6-N6-H6
gaagatatgaatcacaaacaggataatattagatgataaaatacatagctagaagatgtcttgcattacatacgctatgactagagaaaataggcaatttggaagggcagcagcaggtatggccgctgtttagattggttgaccttccggcacaatttgatccttcaaccacatatagataggtaccaatacataatacgtagctgccatggtacccagtataaagcgcaacaggaatgttaatgggtttatcggtttcgatacatcctctgccttcgggccaagctgcaaaggagagtccccagatgcaggtttgacaccagttacagagcaccccatgatcaaaccatgtctgcgaactccacgataccacttagggccaatccttttgagttggacatccttaaatccagccttttcaaaccactcaatgtactcttcctccttagggaaaagcatccaaacatccgcaaaaaagcgtgacaaccagaatgtagggtacacaggaccaatcagacaagcttttcctcct

SEQ ID NO: 11872 - DNA, 504 bp, Gossypium hirsutum
  unsure (1)..(504): unsure at all n locations; Clone ID: LIB3829-014-Q6-K6-A1
ctgntatccccgaaactggccaaaaangnaaacagnaagaagcgaagcggcgtttcttcaatggacgtcaacgaaggaactgttcctgatcttcctcaagcaatggacacttcagagactgaagttcaaaagcctgattctgctactganaaattaaagacgaagaagggacgtcgcgatgaagagatcgaaaaatgttcggaagatgaaggccgtgngaaaaagctatcgctaagaacgagaagtacgccgagaaaagctccaagaccgaaagcaagaaatcaagaactcaatcagctaaacttctatatgactgagtgtgtttaaagaattttatttgccaaatgaacttgaatttgctgtcatttataatttagctgcgcttaggttcatgtataatagttacaaattttgcaattacaactgcttgcactgtcatttatagcttaaaagtatttgttgaggattggggtattccattgcaatagaagaatgttttggaac

SEQ ID NO: 11873 - DNA, 629 bp, Gossypium hirsutum
  Clone ID: LIB3829-014-Q6-K6-A2
ccccgcgtccgacgcagtgccgttgccggcgcccggaaaattccaacggaaaacgtattcccatcatttcttccaaatccctctcctttccctctttcaggccttccatttcctcactgaaacccttaatccccaccaaattctcctctctttcccctctccaatgctcccctaatccctccccttctacctccccgccttccctcaaatctcgcctccgcaacggcgaaaccctctacggcatcttcctcctctcattctcccccactttggctgagatcgtcgccttctctggctacgactttgtagtcatcgacatggaacacggccccgggggaatccatgagtccctccaaatgctccgcgctgtcgccacgaccaacaccccagccatcatccgcctccctgagtcctccgcagtttgggccaaaaaagcccttgaccttggtccacaagggatcatgtttccaatgatcgactcccctaaagacgctagaaaggcggtgtcgtattgccgtttccctcccaacggaatccgtggatccgctcacacggtggtgagagcttcgaactacggaatcaacgaagggtatctgagcaactataaggaggatctgttaataatgtgc

SEQ ID NO: 11874 - DNA, 540 bp, Gossypium hirsutum
  unsure (1)..(540): unsure at all n locations; Clone ID: LIB3829-014-Q6-K6-A3
gtattaccatgacaggcggtcgccggtggccggcgatcaacccgtcaacagagaaagggggtgtgtcgaagagtacgacggggaacacgtggtgcgttgcgaacggtgaagctggaaaagagaagctgcaggcagctctagatttcgcctgcggtgaaggaggtgcagatctgccatccgatccaaccaggtgccacgtgttacgatcccaacaccctgngaagcccacgcttcgttcgctttcaacagttattatcaaaagaacggacgccacatggggacgtgttattttggcggggcggcctacgtcgtcacccaaccacctaagtatggtgattgcgaatttccgacgggatactgaaagagataaggaagaaaggagtggcagaatgaaatcatgaatttttagggtggggagtattattgtgtattttagttggatttgttagcaagttactacctttgtgtataaatcaatggattctaaatatgttattctattcctactttacttttcaatctaatcatcaattcgttact

SEQ ID NO: 11875 - DNA, 523 bp, Gossypium hirsutum
  Clone ID: LIB3829-014-Q6-K6-A4
gcgtactgttgctggtgtcggtatcagtgtgtgccacggttagttcaatatttaacctaactcgaaaattttattttattttttctaccattgttatagtgtttcatgaaacaagccccttgtaaattaccttgtcacgtattttaagcataaaaattacatgcaaagagttgaacgagcatgcttaatcattttcgttctatataaatatatgtatatgtatgttcacatatttgtatttagctaatgccccccttgtacaaatatgaaatgtagtacaaaatgatacttataaagtgaatggttatttatgcaaaaaaaaaaaaaaaaaaaaaaaaaaaaaaaaaaaaaaaaaaaaataaaaaaaaaaaataaaaaaaaaaaataaaaaaaaaaaaaaagggggggttggttttaagggatccaagttttatgtacggttgattgcgaagaaatatttttttttttggtgtagttaaaattaaatttagtggccggtgttttaaaaatttttgtaatggaa

SEQ ID NO: 11876 - DNA, 614 bp, Gossypium hirsutum
  Clone ID: LIB3829-014-Q6-K6-A5
acattttccttgccttgctagcaagggagctcgcgttgaacactgtaattgttcttgaagaagaggaggaggtggatttggttattgaaataagcaagaaactttatgttcgacccgtgattggagtccgagccaagcttgagaaccaaacactcgggtcatttcggatccacctggggtgagaaaggtaagttcgggttgacaacgatccagattttaagggttgttaaaaagcttcaggattcggggatgcttgattgtctgcaattgctacacttccatattggatcccaaatcccttcaacagctttgcttcaagctggtgtcgtcgaagctgctcaaatctattccgaattagcccgtcttggtgctgacatgaaagttattgacattggaggcggccttggaatcgattacgacgggtcaaaatccggtaattctgatctctctgtttcttatggccttcaggaatatgcttcagctgttgttaatgctgttcggtttgtctgtgaccgtaaatctatcaagcatccaattatctgtagtgaaagtggtagagctattgtttcccatcattctattttgatatttgaggctaattctgctactgctcc

SEQ ID NO: 11877 - DNA, 594 bp, Gossypium hirsutum
  unsure (1)..(594): unsure at all n locations; Clone ID: LIB3829-014-Q6-K6-A6
gctttcgggnagatgttgcttccgttgntatcatgactgagctacttcgccgtttcaagtgctcctccaaaccagacaaacgcctcattctcattggcccccctggatctggaaagggcacacagtcgcctatgattaaggatgattactgcttgtgccatttagccacaggtgatatgctcagagctgcagttgctgccaaaacacctcttggtattaaagccaaagaagccatggataaaggtgaacttgtctctgatgatttggtggttgggataattgatgaagccatgaagaaaacctcttgccaaaaaggtttcattttagatggttttccaaggactgtggttcaagcacagaagcttgatgagatgcttgagaagcagggaactaagatcgacaaggtgttgaactttgccatcgatgattccatattggaagagaggatcaccggtcgttggattcatccttctagcggccgaacctaccacaccaaatttgcacctcccaaagttcctggtcttgatgatgtcactggggagccattgattcaaagaagagatgacaccccagcagttctcaagtcaaggctag

SEQ ID NO: 11878 - DNA, 312 bp, Gossypium hirsutum
  unsure (1)..(312): unsure at all n locations; Clone ID: LIB3829-014-Q6-K6-B1
ctctgtctcctacaaaacaaaacatgggaggaaaacgaaagnagaaagctttcaaagaagaaaccaacccacaatcttccacaggtcatctagggctgatgcatggcaaatcttatatgaaaatggcttcttcctcatcataatctggtgctatcctacctgagctttccttcgtttcttttcttttttctttttacttatttaattatataaataaataaataatatcttcttgaccttgtaagaccttttgttgggcatgtaaaaggcattccagtatttggtgttatagtagtggttgggtattgttct

SEQ ID NO: 11879 - DNA, 635 bp, Gossypium hirsutum
  unsure (1)..(635): unsure at all n locations; Clone ID: LIB3829-014-Q6-K6-B2
ngagtttttaccagctcctgagatctcaacttatctggagaagagagttggatgatgatgcagcaccagaattaatggatgttcttgtggatactttactttccttgctgcctcagtcgtcagcccctatgcggactgctattgagcaggtttttagatatttctgtggcgatgttactgatgacgggctgatgcggatgttgcggataattaagaaagacctaaaacctgctagacatcaggaagcaggcagtgaagatgacgacgacaatgatgatgaccttctcggtattgaagaagatgaggaagaagatgaggatatggatgaagctgagactggtgaaacagctgacagtgacgaacaatctgaagactctgaggcagtagttggcagcgagggggctgataaagatattccataagattctgacgagtctgatggaggaatggatgatgatgctatgttccgcatggacacttatcttgctcagatctttaaagagaaaaagaatcaggcaggtggcgaaactgctcagtcccagctcgtcctgttcaagctccgagttctttcacttctggaaatttatttgcatgaaaatcgaggtaagccccaagtcttgacagtattctcgaac

SEQ ID NO: 11880 - DNA, 475 bp, Gossypium hirsutum
  Clone ID: LIB3829-014-Q6-K6-B4
gctttcggggcaactcttccttaacaaaaacttacttggttggaattccgtcaagcagtggtggaaggtcatcaaaacagacaaggtcaactccggttaaggaaaccgaaacaatccatatatacatatccggctccggattgtatgtgccaagcttaaatccctaaacctcattttatagttggtatcgtgtagcgtatcaagtcgactgtggtatcaagaatggtgttgtttagcattaaatttttgcggattgtattgagtatggaccgcagagtgggggtatggaacgtataaatcatctcagttttgttcgttgcataggtctgccggtgaagccgtctgtacaactcattttcgtgttgattattacgagaaacattgatgtattgtggaagagattttgagtgtttactttgtagtttgcaacattatatttgatttttttttttttgaaataatatatttggttttg

SEQ ID NO: 11881 - DNA, 529 bp, Gossypium hirsutum
  Clone ID: LIB3829-014-Q6-K6-B5
atctgcgtccgcttggacgatacgacgctctgttttgaatctgcagaagagggatccgcatttcatcccacgttgtctacttgccaacaagagccaactcgtatactgggacggggagaatcgggcaccccgtgccgtggctcgcggcaaagcgaattcaaaagtaaaggcggtggattttgacgcgaggtcatgacacgatataacgaacgattgagagaagaggacgagtctatgggagactaaatgagaagagagttaaagaaattgaggacatgatggaattggagaagaaagctgtagatctgcagagtaaagcggaagcagaggaaactgaacgtgaaggtgaaggtgcatgtagagaagaaaccgacgaggaaaagaggatgagagtgagaaaagactcgataagtggctaacgagcaggcagagaggagagctacggcacaattgatgttcgaattgggccaaaaagcttacggaaaaggcatgtgcagacgtgccattgcaatttcttgaaggtgctctc

SEQ ID NO: 11882 - DNA, 602 bp, Gossypium hirsutum
  Clone ID: LIB3829-014-Q6-K6-C1
gttattgaaaataacccgattgaggatagtgtagttctgattgaaaaacgggatacagatcaggaacaatctgagtcagtagaaaatgttgagtgtctgaagaaaggtttcatgcccgcctccattgaggtgctggagacttctatcaccgatgtccctggagcttctgaggacactgacaagattcatgataaaactggagatgcagatcttccttcgaaagctcactcgtctgttgtgttgcatcaaaatcctggtgcagcagtgaacgagttagatgtggatcccgaaatggttgagaacatggagtcccaagataataaaactgtgtcatcagatcaaactcttggtacggtgctgaaccagttggatcgggattccaacctgattgaaaacgaggctagttgtgatgaagtgcaaacaattattgacgacctaccgtctaaagataactcaatgttattatcagatcaaaatcctagtatggtggctgaagcattgaatcaagattctgaagtggctgaaaacaagaggctattgtcaatgattctcttgcagagttatctgagcaaccggcagcaaagaggatgcaacaattgaat

SEQ ID NO: 11883 - DNA, 619 bp, Gossypium hirsutum
  Clone ID: LIB3829-014-Q6-K6-C2
atttaagggaaatctcctgtactacagtatctttattatttggcacagattggcttggctatgtctcctctgagcaacaattccttgtttctggactatcatcggaatccttttccaatgtttttcctacgtggtctgaatgtttccttgtctacggatgatccacttcaaatacacttaacaaaggaacctttggtggaagaatatagcatagctgcttctgtgtggaagctgagtgcatgtgatttatgtgagattgcccgtaattcagtctaccagtctggtttttcacatgctttgaagtcacactggattggaaaggagtattacaagagagggcctaatggaaatgagatacagaggacaaatgtacctcatatccggctggaatttcgtgacaggatctggagagaggagatgcagctggtgtacctgggtaaggccattatccctgaagaagtggagaagtaatgtgcaaccatactgcacaaaattccattgtttaacactacacatcacatatactgaggaggaggcggcaaagaagagaagctggcctttggacctgaatcctgcatgaaagaagggatatgacgatcaacatgggaagctgatggat

SEQ ID NO: 11884 - DNA, 624 bp, Gossypium hirsutum
  unsure (1)..(624): unsure at all n locations; Clone ID: LIB3829-014-Q6-K6-C3
cggccgcgtgggngaaaaactgtgtgattttcgtctggttttgcttgatcgagaagaaggataacagatttgcctcttgacgatggagtccgtgatctattgaggggctgtgaaaagcttagaagatttgctctgtatcttcgacctggtggtttaaccgatgtgggacttggttatattggacaatatagttcgaaagtaagatggatgcttctgggatatgttggggaatctgattcggggcttttggagttctccaagggatgccctagcttgcagaaactagaaatgaggggttgttgtttcagtgaacgtgcacttgcagcttccgtgatgcaattaacttctttgaggtacttgtgggtgcaaggatatagagcatcagaatcaggtcatgatctgttagctatggctcgtccattttggaatattgagctaattccccgaatagttggagaggatcctgtgattgagcatccggctcatatactggcatattactccctagctggaccaagaacagatttccctgaaagtgtcattcctttggatccatctgctgctggaatatcaagctaattcccacaagacaaaaagttatgaccaatcaggttggagtggctg

SEQ ID NO: 11885 - DNA, 394 bp, Gossypium hirsutum
  unsure (1)..(394): unsure at all n locations; Clone ID: LIB3829-014-Q6-K6-C4
atttgaacaagnagctggggctggntatggacaagttcatcacacactctgtgccttttgccgatattaacaaggcattcgactacatgctccagggtataggtctgagatgcatgattcatttggatgcttaaggaaatgttgctgctgtatatttgcccatccaaggatcaaaactctaatgttttgtcctactatgtgttatattatgtgcctacttaagctacctttcccggttatcaagagtgcctatatagaactctctctctctcaaaaaaaaaaaaaagagaaaagagttctttatatggagttttatattatatgctgagagaataaattatcttgtaaaagcttgctttgttaatgaaataaatttctattactatgattgtcc

SEQ ID NO: 11886 - DNA, 581 bp, Gossypium hirsutum
  Clone ID: LIB3829-014-Q6-K6-C5
gctaatctgcttgtactttcttctgtttctcgacaaccaaacagaatactcatcacgtaaaaccaaaagtatggctagtgtgattaatcagatgttgaggatctaaattcaaaccaagccgcgccataagagggaggagaagaggagggtccgagactttgggagatacaacagaaaaaactcgaggaacatttttgctgggtctaactgatcgaccatatttggtttcttttgcggaagttttgagaatcggatacatttgaacgacagcatagctactttctgaagaattctcgactgaattaatctctcaagaaaagccaatcaattgcttacgtatcaaaatcataagaatcttacaacacaatgaaagtcagaagaataggcttcatatatcgatattatgtagaaagaccagaacaaattttgtgtttatagcaaaggactttgaagaaaggaaagttgtaacggcagagccttagctattcagagtgcagaagatgatggagagggactccttatggagcaataacaatggtaatagcgcgaactacaacagagagagaacccggagtgatgcg

SEQ ID NO: 11887 - DNA, 597 bp, Gossypium hirsutum
  unsure (1)..(597): unsure at all n locations; Clone ID: LIB3829-014-Q6-K6-C6
gngnanaanagntgtgcttcgaaattggagaattgatgattctgtttnacatcgaaaacggaacggcaagactgagccaggaatttgacaagttggataattctgaatcagagaatggtgattccttgatgtctctttctcaggttgaccttacatcagttgctgaactgcctgctgcagtaccctctacattccatcctgcagtatccctgcagggttcaccaggagaaagccctgcatcatggaattcatgcatgcatcatccattttcttatccccatgagacttcagatattgacgcttctatggattcccccattgggagccctacatcttggaattctcactcacttgcccaaacagaagtggatgaagctcgaatgaggaagaaatggggaagtgctcagaaaccttttcatgtagctcatgtaacccaaaatcagtcacgcaaggatgtgacaaaagggatcaaaaggttattgaagtttggacggaaaagccgtgggacagacagtttggtggactggatctcagctacgacttctgaaggagatgatgacatagaggatggcagagatcctgccaatcgatcatcag

SEQ ID NO: 11888 - DNA, 593 bp, Gossypium hirsutum
  Clone ID: LIB3829-014-Q6-K6-D1
gcaatggtgatactgctaataagattggaacctatagccttgccttatgtgcaatgcatcatcatattccattttacgttgccgcaccgctcacttccatagatttatctctttcttccggacaggaaattgtaatcgaggaaagatcagctaaggagttattgcacacacggggaggactgggagaacaagtggctgcttccgggatctcagtctggaacccggctttcgatgtcacccctgccaatctaatagccggtatcataacagaaaagggcgtaattacaaagaatgacatgaaggatgatgcgtttgacattaaggatttcatagagaaggcaacaggcaaatctaccgtatgaagttggcatctctaaccataaacgattcctaggtctcaccattcacgagactcgatatcgagaccttacttaggtatcaagttttgtaccacttgaccccgaaaccgtctgtaaattttccgttgctgtaagacttaggaaccattttagttcatttatgcccgtatggttgtatttttaactttacaaggcggatgaatgcccttggaacatactatcggcaaataaaaa

SEQ ID NO: 11889 - DNA, 623 bp, Gossypium hirsutum
  unsure (1)..(623): unsure at all n locations; Clone ID: LIB3829-014-Q6-K6-D2
anaagagatggttgtaagtagttttgatttatggcaaaaaccgccttcttttcggcagcagaagaggttcaagaatccgctgatgtaatggaatcagtatacaggatgtggatcaaagagatgagagaagggcaaaagtcttcagatacggctgaactttgtcgaggattgcaaactgctttaggtactgctaaatggcagttggaagagtttgagagagctataagattgagctgtggacatggttgtgacgataatagagcatctaggcacaaacaatttattgctgccattgagagtcagatatgccgtgtagaagctgcattaaaagaagctattattgaggagggaaagcagccccttcggtgggtagatttggataaacaagaatgtgatgatttagccatgttcctttctggaacctctccgagcttgcaacaatctatggaaaacactcttttggtgaattctcataggagaaaggacacaaatcctaatgtcaatgctacttgcaacaggaatatgcctgaagtgaaaagtttaaatgattttggtaaagatgttgagtgtctcattgatgtagaagatgagcgaagttctggaaagacagatgatgttagttc

SEQ ID NO: 11890 - DNA, 623 bp, Gossypium hirsutum
  unsure (1)..(623): unsure at all n locations; Clone ID: LIB3829-014-Q6-K6-D3
gnacttccagtttttgtagggcttgaggaaagccgatgatcatctgctctacgacttcttcatcgcccaagcttcggccatgcgacgagcatctgctctcatcctcaacacgttcgaacaacttgaaacaccctttatatctaagctcgcttctattttctccaaaatttacactatcggaccattgcattgtctctccaatgtggacgacccaacagctttagcttcgacaaaagtattttttggcaagaagaaaaggttgcctcacttggcttgattctcacccatcaaaatcagttgttttcgttagctttgggagtgtagtgaccttcacccttgaccaaatgcttgaattttggcatggcttggttaacagtgggaaaccatttctatgggtcatacggtccaacgccattattggagaggatgatccaaggaaaatattggaggacctgaaagacaatacaaaagggaagggatcgatagtgagctgggcacctcaagaagaggtcttagcccaccctgctgtgggtgcattcttgactcatagcggttggaactccaccttggagagtatatacgcaggggttcccatgatttgctggcctctatttgtggatcaa

SEQ ID NO: 11891 - DNA, 622 bp, Gossypium hirsutum
  unsure (1)..(622): unsure at all n locations; Clone ID: LIB3829-014-Q6-K6-D4
tccgaaaaaaaccttattgtaactgtngaagaagaacagnanatatcaaaaaanattgaaaaaaagagagagaaaggatccataaatgaaagggaaatcgaagagctcgaagagaaatctagggttagcaactacccttttcttatgttcacttgctttcttagctggtttgttcacttcaacttttttctctcaggatgttccgattattaaacccaagctgagaaagcttgaagtggtgcatgttgaaggtgataagtctcgtggtttgatgccaattggagagactggggaaagttcgattgattctatcccttttcaggttttaagttggaaaccgcgagcttactattttcctgactttgcaactgcggaacaatgcgaacatataattggaatggcgaaattgaaccttaaaccatctactttggctttgcgcaagggagaaaccgaagaaagcactaaaggaactagaacaagttcgggaacatttattagtgcatccgaggatgaatccagaaccttggacttgatcgagaaaaaaatgcaaaggttacaagcattccacagagtcatggagaggcatttaatgttttgcggtatgagatcggacagaagtatg

SEQ ID NO: 11892 - DNA, 588 bp, Gossypium hirsutum
  Clone ID: LIB3829-014-Q6-K6-D5
tcgcgaaaggcaacaatctcaaagtgggtgtttttggttcatctgtgaggggcaaactatcaacccttcgataattgtgtcctgatggccttactgtttctggcacccgtttacgcagagtacgtgatgtggatatgaagcgcgactatgccttcgttgaattcagtgaccctagagatgctgatgatgcaagatattcattgaatggtcgagacctagacggatgccgtatcattgtggaatttgccaagggagtgccccgtggccctggtggatcacgtgattatgctggaagaggtcctactcctggatctgggcgctgcttcaattgtggaatcgatggccactgggctcgtgattgcaaagccggcgattggaagaataagtgttaccgctgtggggaacgaggccacatagaaagagattgtcaaaacagtccaaagaaactgagccgtagaccacggagttactcgcgttcacccagtgaccgacgtggtcgaagcagaagccgcagttacagccgagggcgtagtgacagtagatcaagatcacctgtgaagcgagaaagagttttgagcgtgacgatag

SEQ ID NO: 11893 - DNA, 599 bp, Gossypium hirsutum
  Clone ID: LIB3829-014-Q6-K6-D6
caaaatgtgccaaaatccattacaaaatgaacgctgtatcgaggcgagctattactggaatctttactccagcgagacaggggatcaacttattgagtcatgatctgagtcaggttcagcaaatgagagggataagggtgaaggtaaggaacggcaacttggagcaagcgttggcggtgatgcagcgggtgatgcaatctagcggaatcgaacggctgataaagcaggaacaaactcatcacattaagaattcggagaaacggattttggcacgcaagattttggagcgtaagatcaaatcacaggaccacgctcgcaagctgcaaaccatcctcatcaagaaagtcaggggtctgtgagggcagctttggtgtagttttctgggtaaacttttgttttcttacggaattccaggattgttcaaaactttatttccctttttttagttcaactggatgaattgggcattggcatttgcactttgtactggtttgacattccttcgttcgtggttgagaattgatgaatgatgatacatatgaaacacgatgattgggaactcatttggatttaaacggagctacagtacatgacttgtt

SEQ ID NO: 11894 - DNA, 514 bp, Gossypium hirsutum
  Clone ID: LIB3829-014-Q6-K6-E1
accctaatgaagacaaaggcaccatttaccttccctttttctaaaaaatagtgtaaaaaaaatacatgccattaccccattcggttaacccccaaaactttgaacaaattaatcgctcgaccattttaattgatggtgatagacatacgcgcaccacactgtagaaaccttggtttaaagtattactcaatctgagtcccttgcaaatcttatgttgacatttgatttcaacaaaggagatgaagattactatggactatttgcgaaggtaagcactctccttcccttttagggttttaaatgcaaattaaaaacgaaaatgcacataaagaaatgataggagggagatggatgacattttagagcataggactcgaagaggtggaagcacccctaaagaggaagctactagggatagaaattattgatagttatatcaaaaaccctagctaaagtagggggcggtgattatgaagctacaatgaaaattcattcagtttctactcggaattat

SEQ ID NO: 11895 - DNA, 624 bp, Gossypium hirsutum
  Clone ID: LIB3829-014-Q6-K6-E2
cgttccgctaaaaccctaggtctctcacactaagttgctattaaggccattttccctcactaggcactgccttccccctcgtatcagcttcacaggccatgggtatcgacttggtcgccggcggcaagagcaagaagacgaagagaactgctcccaagtccgatgatatctacctcaaactcatcgtcaagctttaccgatttctggtaaggactggcagcaaattcaatgctgtgattttgaagcgtctttttatgtgcaaagtgaacaagcctcctctgcctctatccagattgattgaattcatgaagggcaaggaggataagattgcagtggtagttggaactgtcaccgatgacattcgtatatatgaagttcccgctctgaaggttactgcactaaggttcactaagacagcgagggcgagaattgacaaggctggtggggaatgtttaacatttgaccaacttgctcttcgagcacctcttggacagaacacggttctccttcgaggtccaaagaatgctcgtgaggctgtgaagcacttcggacctgctcctggtgtgccacacagccacaccaagccctatgtgcggtcaaaagcaaggaaattgagagggctag

SEQ ID NO: 11896 - DNA, 606 bp, Gossypium hirsutum
  Clone ID: LIB3829-014-Q6-K6-E3
ccaaaacttccctggttgaaaaacgaggcagaagcctcaagaaggatgaatgttttgtctaatgttttacgtaccagtaattatggtgctgaaccaatgctgaaatcttgtggtgttaatataaactctaatttcacccaagtggatggacgtattctgccagcaccaaggttaagagtcggcaacggtgaagatttctttccaaggaatgggcgttggaattttaacaacaagaaattggtggagccatctaggattgaaagatgggctgttgtgaacttctcggctcctcgttgtgatccaaacaacattgcaagggatttgattcgttgtggagaaatgaaaggaattcgtattgatcccccatttgatatattcaatgagatgaaccagaatagacgcctttcacccgtcgttagagttgaaaaaatgtttgaacagatacagtctaaacttcctggagctccgcagttccttctttgtctgcttcctgataggaaaaactctgatctttatgggccatggaagcggaagaatctttctgagtatggcatcgtgactcagtgtatggcaccagctagggtgaatgatcaataccttacaaat

SEQ ID NO: 11897 - DNA, 611 bp, Gossypium hirsutum
  unsure (1)..(611): unsure at all n locations; Clone ID: LIB3829-014-Q6-K6-E4
gcgttcgggctttgctcgtgttcaaaaggagctcagnatgtagcagagaaaaagatcttcgggcattagcgtctctccaaaatcagacaatcttgctcgcttgactggcatcatccctggtccccttggcactccctatgaagggggctcctttgaaatcgatatcacattgcctgatgggtatccatttgagcctcccaaaatgaagtttgtgacgaaagtttggcacccaaacatcagcagccaaagtggggcgatatgcctggatatattgaaggaccagtggagtcctgcactcactcttaagacagctcttctttctgttcaagctttgctttcagctcctgaacctgatgatcctcaagatgctgtagtagcacaacagtatcttagagagtatcagacatttgttggtacagctcgttactggacagaaagttttgccaaggcctcttctttaggggttgaggaaaaggtacaacgactcgtggaaatgggttttcctgatggtttggtgagaagtactctagaagcggttgggggtgatgaaaacctggcccttgaaaagcttttatccagctgatctgcgctggagttgccaattgttctac

SEQ ID NO: 11898 - DNA, 523 bp, Gossypium hirsutum
  unsure (1)..(523): unsure at all n locations; Clone ID: LIB3829-014-Q6-K6-E6
nacaccttctatgatgatctttggccattcttgttctactcctatttggacagcttttcgacatacaattacttcagcagcaaaggtggacggtacatcgtggtgaacctctgagtaggcaccatcaaaattaattttgaagaactcgctaggtggctgagttcatcttttttattcctcttgtcgcactggctttgccttttcaagaccattaagttcaacaagatatcccaaaggccatagcagaagagtctattctggcacacattaaactgaccagaggcccagggcatattctgtcggttgtttcattcctttctccgcactggggacagtctttgttactgatcagttttcggtgttgtatattaaccttcgtaggcaaatagttctatgcaattctctatactgtaatatttattttggtcagtaaatttagtcgccatagttttttgtaaaaatccccgtatttggtttgtaaagcgtaagctctatgaaattaatcaaagatttgtaatagttt

SEQ ID NO: 11899 - DNA, 481 bp, Gossypium hirsutum
  Clone ID: LIB3829-014-Q6-K6-F1
atttcggttaaatggcctttctggaggctggcacgccttctcccaaggttttgttatgaatttgcagccgtctgaagcagaagctggttttgatattcgaataccaccaacagttaatgcagaattcttgtgagaaacggatagctgaggaatgggcacctgcttctcgaaacatgtcatttgagggtattatggagagtgtggaaaaaaggggaggttacatggaggttactgggtttggtgctgatgtgagggagcatatatacaaattagcatctgtgaatgtgtgttctaacataactggtcaaattcttgctagtcttggaatgagtccacctaaggttatatcttttgccatttaaagccagttatctgtttttattgaaatgacattggatgtatgacataggactaaatagattttgagctttgacaagctgcttataagcattgtttcttatagaagaacacattatttgag

SEQ ID NO: 11900 - DNA, 567 bp, Gossypium hirsutum
  Clone ID: LIB3829-014-Q6-K6-F2
aacagctcctattcttgggaagaagcagcttacctgacgagaaactccctcagagtgcctcttgatgcgtggctaaacattgatgaatcaacaaaggaggaccttctccagagacggttatggataaagtccaacttagatagctacttatcagaaatgcggaaagagcataaacgcagaagataggaaagctctatcacattgcttgctcgagattgttcacggaaacttctacattcaaggaaaaaaaaacccctttttactcataaggtgattttgattttatttatactagaaagaagagaagacagttattgctgatcaccaaattttgatgaggaaagcatccgaatctaattcttctagcaagggtactctagcataatcttttatatttctaaatacgaagttatagttttagatagctgtgttgatgctctagtaattgctgatcagctatattcatatatgaaatcatgctaactcgtatcactgatgataaattgtttgagttactcgtttgtgatactgatttctttttctagagatgaaaatcgatgagtttag

SEQ ID NO: 11901 - DNA, 605 bp, Gossypium hirsutum
  unsure (1)..(605): unsure at all n locations; Clone ID: LIB3829-014-Q6-K6-F3
ttttgcttatggcaggactggggtggtcgctgtttatgggaacggcgcanatagctgaaacccacaaatcccctttctccgtcaaggttggcctagcccaaatgctccgtggcggggtgattatggatgtcgtcacccctgaccaagctcgcatcgctgaagaagctggagcctgcgccgtcatggctcttgaacgagtccccgccgacatccgagcccaaggtggcgtggcgcggatgagtgacccacaactcatcaaagaaattaagcaagctgtcaccattcccgtcatggccaaggctcgtattggccatttcgttgaggcccagatccttgaagccattggcatcgactatgttgacgagagcgaagtccttaccctcgccgacgaagaaaaccacattaacaaacataattttcggattcctttcgtctgtgggtgccggaatttgggggaagcgctccggagaatccgagaaggagccgcgatgatccgaaccaaaggagaagcggggaccgggaatgttatcgaagctgttaggcatgtcagatccgtgatgggggatattagggcccttaggaacatggatgatgatgaggttttc

SEQ ID NO: 11902 - DNA, 609 bp, Gossypium hirsutum
  unsure (1)..(609): unsure at all n locations; Clone ID: LIB3829-014-Q6-K6-F4
aaacatanagaaggagtggttcatcgcattatggaaagaaactggnaaaatgaaaaggagatctccatctaaacctaagcatcagagttatttcgacaaggactcccatagtttcagatgccagccgggtgacagtagaaccaaaagttatgacagtaaccctcaccatggaaggtctattgatagcaaaaagcatagagaaaagagaggtgcatcacccttggagattggtaggagtcacaagagtagacatctttcagcggaagaccgaaaagatggttacagagacaacggtgatgagaagattagtgagcctacaggtggcaggagtggatgtcagagtaagccaaccgtgggtgaaacttgggagaaaacactatattaggtacgaggaagatcaagaggcatatatgtgctagcttatgtcgttttaaagcaacttttcgtccctagtagaacattgtttagtcttcctgttgggttatgtttctttggtagagctcagtaatgtggtacttactaaaaacattttcttattttgggtttatgtactattcggtcaatggattaacattggagcaattataaaaacaaaccctttttgaggcc

SEQ ID NO: 11903 - DNA, 618 bp, Gossypium hirsutum
  unsure (1)..(618): unsure at all n locations; Clone ID: LIB3829-014-Q6-K6-F5
gcgttcgcggccgcgtgggctttgtngatatgggaacttgtcattttagctttcctggttttttcagctgtttctttgtattttgggcatatgcagcttgcctttatcctagtatgcatcacaatgctattgcttctctgcnatgaaaatcacaaagcaagtaaagttggccaggaaaaagaaaagaaggatgcttcttccattatctatttagagctacttgaagcttggattagtttaaaagggaccaaatttcgtggtgcaaatttgagatttattgatcattgcattagggccacacatgcactggtatattttaaatatgtaattgtggctgaagctagctgaagaagggatatgaataggatcacctcgaaacatggtttaccacggtgaacctaatgattggaaattgaaagttgggatgttctacttctacacacagcagttagtttaaaggtatgtttccttctgactacctttatgctattaatgcaagggtctgaaaaattatattgtaattttaatccaagtgggaatatattgaacaatatttgcttcatttagtagttcttttgtcatttagttgaagacatcagaggatagagatggacggct

SEQ ID NO: 11904 - DNA, 463 bp, Gossypium hirsutum
  unsure (1)..(463): unsure at all n locations; Clone ID: LIB3829-014-Q6-K6-G1
gctttttcggncgcgtgggattttcaaaacgaagtgctgccaaattaaaaagaaggggcagcttcaacgctgctgtgttgatgtcttttccgaggtgaggccagagcttgaggccgtcaatacctgtaagtgttgaatgctcaaattctaattctagttttattctaggcgtgatagcataaaacaagcagtttttaccctagagttaaaaaacacaggtgagggaggtcgtttttgattaaaatgtacagttaaattggaattggataaatggatatgcatgcagttggggggtgaaatgaacacaagaaatccacccattttgtctattttttggtctttaagatggttgggaccaaatagctttgtaaattcacttgaattcatagagaaacccttttttttttttttaaaaaaaaaaaaaaaaaaaaaaaaaaaaaaaaaaaaaaaggggaggataatt

SEQ ID NO: 11905 - DNA, 624 bp, Gossypium hirsutum
  Clone ID: LIB3829-014-Q6-K6-G2
gcaggaaagaagagatgagtaggaaggtccgtggtggatagcataatcaatgtaggctgtgatagtgtttgatcaaaaccatatgttaatgctttcgatgtttccatgttattcttttagagcgcatgccatctaagggagaaatgtacctctgaatcctgttggttccttttgaccttctgaaattaatagttgtagatgggataatctgcttctatatgtactttttgatttaaagttgaatggcttagataaatccttttgtagagaattagtccgataatttggtcttgctgttgccatcttttataattttgctgcttgctccaatgcgatttgacaggcgtattaatgtatatatgtcgtggatgctgctggtttgtgtggttgtgtgaatgttatttcttgggtggtggtatttaataatggtttctgtattcgttttaatgggttctcatttgtgcgtcaaatctttcaaagcaatttacagatatctttaatcgttggtcttccattgtatgctgtaagctaattattggacgtggtttatttattttatgtggtttgacggtttaaagattttattccactattatatatggtcaactgctaaagttattaaaa

SEQ ID NO: 11906 - DNA, 610 bp, Gossypium hirsutum
  unsure (1)..(610): unsure at all n locations; Clone ID: LIB3829-014-Q6-K6-G3
nttggggtngaaaacttgntatggtcgatgctgatggcttgcagaacggagatgttactacnattttggaggatggggaagtggctgaagacaatgaagagggtgggtgggaccttgaagacttggaactccctcctgaggtagagacaccaagggttaatgctcgttcttctgttttcgtggcaccaactcctggtatgcctgtgagtcaaatttggagtcagagatcgtcacttgctgctgatcatgcggctgctggcaattttgatacagccatgcgtttgctgagcaggcaacttggaataagaaacattgctcctttaaaatccatgtttctcgatcttcacactggcagccatagctatcttcgtgcattttcatctgcgccagtagtgtccttggcagttgagaggggatggagtgagtctgctagccctaatgtgaggggtccaccctctctcgtattcaacttttctcagctggacgaaaagctgaaggctgggtacaaggccacaacagatggaaagtttactgaggctcttaggcttttcctcagcattcttcatacaattccattgattgttgtggagtcaaggagggaagttgatga

SEQ ID NO: 11907 - DNA, 500 bp, Gossypium hirsutum
  unsure (1)..(500): unsure at all n locations; Clone ID: LIB3829-014-Q6-K6-G4
tcgtatgactctatacttctacagagtgttttggaacttcaataccgtctgacacaagactttcatgctttataattaattgctatgtgattgagttatgcatttcatgcatcacacgatatctttgggattgaattgattgtttctcttttgagtgaataatcttgcagatgcatttagcttacggagatttactatgtttttcattgctttaggaagcagattctatcccctagagagctgtattttgttttggttttggttttttttttaatggaaaggagctgtgattagaaaggttgtattgcatttttgctggagattgtatgcattctctaaacgaatgaaacctattgggcattagagcagacanaaaaaaaaaaaaaaaaaaaaaaaaaanaagaaaaaaaaaaaaaaaaaaaaaaaaaaaanaaaaaaaaaaanaaaaagtaaaaaaaanaataaaaaaagaaaataagtaattgaaataatggaaaatt

SEQ ID NO: 11908 - DNA, 586 bp, Gossypium hirsutum
  unsure (1)..(586): unsure at all n locations; Clone ID: LIB3829-014-Q6-K6-G6
ctttctcaaactcccaccgagtctggtcttaaagctcttaatgacttcnctctctggaaaatcttacatctctgggaataagctgaccaaggatgacataaaagtttatgctgctgttctgaagaaccctggtgattctttccccaatgttagccagtggtataattctgtttcttctcaacttgcggccagcttccctggcaaagctgttggcgttgggtttggtggcaaagctgctccagctgagtctgctaaagctgaggctgcagatgatgacgacgacttggatctattcggtgatgagacagaggaggataagaaggctgcagaggagagggaagctgcaaagaagtcagctaagaagaaagaaagtggaaagtcctctgttctcatggatgttaaaccatgggatgatgagactgatatgaagaagttggaagaagctgttcgatccgttgagatgcctggacttttgtggggagcatcaaagctggttgctgttggttatggcatcaagaagctacagatcatgcttaccatagtggatgatcttgtttcagttgatacccttatagaggagtgcctc

SEQ ID NO: 11909 - DNA, 377 bp, Gossypium hirsutum
  unsure (1)..(377): unsure at all n locations; Clone ID: LIB3829-014-Q6-K6-H1
ttcgcggnaaacctcaccaaancacgnaaagccagnatctttcagaaaatggattcctattcgaagagtgcataaccgcatggataagctcacactaacccgtcaattttggatccaattcgggattttccttggggggtatcagtaaggaattggaatgtaataatattgattcatataggaggaaaaggttctctattgattcaaatgctgtacctatgggatagggatagagaaagaggaaaaaccgaagatttcacatagtgcttttgatcgaaaaatcaatctgatttatttcgtacccctcgctcaatgagaaaatgggtcagattctataggatcaaacctatgggacttagggaatgatggaagggaat

SEQ ID NO: 11910 - DNA, 618 bp, Gossypium hirsutum
  unsure (1)..(618): unsure at all n locations; Clone ID: LIB3829-014-Q6-K6-H2
gtgacttggcattttgntctgacggagacacccattttaattttgagtgagacaaaagctttcatgtcgcctgcaacatccaagtgtgagtaaacatcacgagcttggcgttttatgggttaaagcagcagctgcaattttaccatacatttatttctcacatttctaggtgtatgtcacagcaaattactggcatgcattgatatggtagccttggtagttggtttttgcccactgcaggtgtaagttaattaacctatattcaaactttgggattgttttttggcaggtgccaccgtaaggctgacatgcaaagacgctaaaaacgaattaacggtccagttcaagactgacaagaatggttatttcttcctgcaagcaccaattaccatctacaattttgatctccacaattgcagcgtctccctcgtatcttcaccattgaaagcatgcagcaagccatctaatctaaacggtggattgaagggcgcccccttgaagcctgagaaaccatctacttcaaagaagctcccatatgttctctacagcgttgggcccttcgctttcgaacccactgtcacaagaactagagtagaaatctataatcccactgttgag

SEQ ID NO: 11911 - DNA, 622 bp, Gossypium hirsutum
  Clone ID: LIB3829-014-Q6-K6-H3
gcgaattctagctgtagagctccagcctcctaaaatagggtcctaaaataatgatgtgcttgttgtggtctgtctggcttctgctgacataaactgtctttaacatcagagaacgcacagttgcttcccttatttcattgggtgcagctcccggagcattaacagatccaacaccagaatatcctttaggcagaacgcctgctgacctggcctcagccaacggacataaaggaatttctggttatcttgctgaatgtgatttgagttcccatcttctatccctcaatttggataagcaaggcagtgccagtaccacagattctagaccagatgtcatacagaaaattttggagctaaacacagctccactcaactatggggatgcttctgatggcccatcactaaaggactcattagctgctgttcgtaatgccatgcaagctgctgctcgcatccatcaagtcttcagggtacagtctttccaaaacaggcagttaaaagagtatggtaatgataaatatggaatgtcagatgagcgtgcactttcacttttagcagtcaagtcaaacaagcccggacaacatgatgagcgcgtgcatgctgctgccattcgcatacaaaa

SEQ ID NO: 11912 - DNA, 612 bp, Gossypium hirsutum
  unsure (1)..(612): unsure at all n locations; Clone ID: LIB3829-014-Q6-K6-H4
gcgttcgtttgggtttgcatttgtatgtgtgtgtttgggtggttacattgttggtccgacatcattgttgtggcgtttgaaggacaagtcaagacctcaggtctcatgtcttccttgtgtttgtgattgctcctcccatacagatgacttttttctaacaccaggattagccgacaacacatactcaggttgtggccaaaatgatcctgatttaaaccaagaactggagaaggatactgtagccttactctccgaggagattgcattacagaagatcgtaagcaaagaaaccatggaccgcacctcggcactaacaatggatgccaaaagagcctcctcacactaccagaaagaagctgaaaagtgcaatgcaggtgtagaaacatgtgaggaagccagggaatgggctgaagctcaaatcagagaggagctcaagctgactgccttatgggagcaacgagctcggcaactcggctggaaagatcgaaaaagggtatatacttgactgtctagatatatgtacaaacatattttttgttcattttccattagaaatgcaaatgcttcatcctcttccacttgcattcaatgttgttggcttctntaattaaa

SEQ ID NO: 11913 - DNA, 593 bp, Gossypium hirsutum
  unsure (1)..(593): unsure at all n locations; Clone ID: LIB3829-014-Q6-K6-H5
gcaaaggnaaaggaaaggatagatttgtagcgttcaagaggcgcttatctatctcagaaatagcagtaattaatttttgaggaaaaatggcggcagcagcagcatcagcttccatgtcggccaccgccgtgttgattcctcgtgttcctgcagccgttagaacaacccgctgttccgccttgccgcctctccctcctcgcgtttccacctcttccttttcctcgtccgttaagctaactccagaatcccggaggtttccttttctccaaacaaaagcaacagaggacacctctgtcgataccggggagctttttgatgacttgaaagaaaagtgggataaagttgagaacaagaccacggttcttctttatggtggtggggcaatagttgccgtttggctatcatctattcttgttagtgccattaactcagtgcctttgcttccaaagataatggagttggttggactcggatattcaggatggtttgtctatagataccttctcttcaagtcaagcaggaaagaactagctacggatattgaggcactgaagaagaagattgctggaactgaatagatgtacaggattggc

SEQ ID NO: 11914 - DNA, 214 bp, Gossypium hirsutum
  Clone ID: LIB3829-014-Q6-N6-A1
gttccaaaacattcttctattgcaatggaataccccaatcctcaacaaatacttttaagctataaatgacagtgcaagcagttgtaattgcaaaatttgtaactattatacatgaacctaagcgcagctaaattataaatgacagcaaattcaagttcatttggcaaataaaattctttaaacacactcagtcatatagaagtttagctgattg

SEQ ID NO: 11915 - DNA, 544 bp, Gossypium hirsutum
  Clone ID: LIB3829-014-Q6-N6-A2
ggaactcaaaacatggttgaagtctcatagataaattgaagaactgaattggaactcgatttcattgccctctaagaaaccaagccgttcaactacatttacaaaaaggattgcaaccaaacgataaacgcaaacagcaaaccaaaatgaaattttctatctatattttttattcactccaatacttctcatcggaatctttatcatcatcggaataatcagaatcagcattgagactaatcttaaacttcctaacatcctccaccaccgcatttctgaacaacccaacatcaacggcaccggaaaccatatgatacccgcgcttcccgagcgcctccggcggatcatgtggcattgcgaaaccggccaagaaggctccgccgtctttccggtcggacttaagcacttctctctccgccgtcctcaacatctcccttaccttcttgtgacccgggtcccagaggtaacccaggctagcacttaaatccaacggacccatttgaatacagtctaccccttcaacggcggcgatttcttccacttt

SEQ ID NO: 11916 - DNA, 541 bp, Gossypium hirsutum
  Clone ID: LIB3829-014-Q6-N6-A3
agtaacgaattgatgattagattgaaaagtaaagtaggaatagaataacatatttagaatccattgatttatacacaaaggtagtaacttgctaacaaatccaactgaaaatacacaataatactccccaccctaaaaattcatgatttcattctgccactcctttcttccttatctctttcagtatcccgtcggaaattcgcaatcaccatacttaggtggttgggtgacgacgtaagccgccccgccaaaataacacgtccccatgtggcgtccgttcttttgataataactgttgaaagcgaacgaagcgtgggcttccagggtgttgggatcgtaacacgtggcacctggttggatcggatggcaatctgcacctccttcaccgcaggcgaaatctagagctgcctgcagcttctcttttccagcttcaccgttcgcaacgcaccacgtgttccccgtcgtactcttcgacacacccccttttcctctgttgacgggttgattcccggccaccggcgaccgcctgtcatggtaattc

SEQ ID NO: 11917 - DNA, 540 bp, Gossypium hirsutum
  Clone ID: LIB3829-014-Q6-N6-A5
gaaaaaaactaataaagtcggcttaaaagaacatggagagggcataaaatcccggatttacagaaaaggatggattcggttctcatcccttctacccgacaaggtgctaaacaccttgtatgcatgctaacaatcactgcttacaagcgatggaaattaacagtaaaagaagaacattaaaaagggaacaaaaaactaaaataactagacattcaaggactggcaaaccatgcaataaagcaaatagtagaacactgcctcaggcgtagcaataggaccactgctcgtcctcactagccccagaatcgacagcagcattgtaatcttcctcattgcaatagtagaagccattgttattcatggcagtcaacgaacaaggggatgccactacaagataaggcatgttgtggaaagaacgagcaatggtgctaactaaagcagcatgggtgccttcattgccatggtcctgtccacaaaattcttccgcacggtgcttgagggtctcaaacattagctcgggctcgtgctgcatcactcgga

SEQ ID NO: 11918 - DNA, 477 bp, Gossypium hirsutum
  Clone ID: LIB3829-014-Q6-N6-A6
aacctcttcaatgtcactaccaaacctgtagtaaactattattttgttgggggggggggggaacccttttgggggctcccaaaaccaggaaatactcatttttgaaatgtaaacaacggtttgcccacaatgtatcggtttaattcgaaatggtcaacaaaaatttgagaacaaaataaatgaaagaggtgggatcaagtcctatgaaaaaaaaaccttctgaacctcaaaagtgaccttttttggaggcttctccccagaaaaattggcaaaaatacctttgctaccataataatggattaccggctcaatctgtcaataaaaagcctctaaccttgacttgaaaactgctggggggtcatctcttctttgaatcaatggctccccagggacatcatcaaaaccaggaactttgggaggggcaaatttggtgtggtaggttccgcccctaaaaggatgaatccaacgaccggggat

SEQ ID NO: 11919 - DNA, 405 bp, Gossypium hirsutum
  Clone ID: LIB3829-014-Q6-N6-B1
aaaaaaaaaaaaccaccccaaaaaaaaaaaaaaaaagggggggggctttaaaacccccaaaaaaaggggttaaaaggggaaaaaaaaaaaaatataaattaaaaaaaaaaaaaaaaaaaaaaaaaaaaaaaaaaaaaaaccgggggggccccctgggggaaaaccccccaattttggggggaaaaaacccctttttaaaaaaaaagggggaccaaaaaacccaaaaaaacctgggaaaaaaaggggggggggtttttttaaaaaaaagatttttttttggtccccccaaaaaaaaatttttttgaaaaaaaaaaaaaggaccccgtggtcccccccaaaaaatccgggccggcccccgggggggaaaaaattttttttaaaggggggggaaaaaaagggggggaa

SEQ ID NO: 11920 - DNA, 537 bp, Gossypium hirsutum
  Clone ID: LIB3829-014-Q6-N6-B2
aggcaggtaaatcatcttaaatataatatatatataaataaataaaggctgataaacaaaatccctcatggttttcttttttggatgattaaaccaggatgtcaacaaattttcacccactgtcaccactttaaacaaagcaaaggcactaagcaacaatgtgagagcaagcaccatacaaaaggcaaaaaggcaaagcaaaaatgaggtttccttgataagttgtttccacaaacaagggctaaccttttatacttggctctcatttgagcttcttcaacttgagaaaaacgggaccgagttgggattcacaagcagagagagtgccgggttccaaacatttcaaaaaagccttggttaggtctagtgttgttatcatttggaagatcttatcgcagcatttatgcacttcggtttttcgagacttcttttcgggcatctttgtcaccaaggtctctataagatgaccaagactctgcaggtggcttttcaaaaatttcttcgacgcatctcgcttgctttcattagagttcatgg

SEQ ID NO: 11921 - DNA, 538 bp, Gossypium hirsutum
  unsure (1)..(538): unsure at all n locations; Clone ID: LIB3829-014-Q6-N6-B3
attcaaaatcatgacttcattcaaccaagtggatctccaaaacaaacacaacagaaaatcttttggagatcaacatgccccatttaaactagngaaaaatactaaacacatcaaaacgctatttaagctatgctctccagggcctgcagtatatcggccttcaaatcttcgaagtcttcaaccccgaagctgaatcgaatcaagttatccaaaatcccgtacttgctcctctcagcttggctaagatcccagtaggacattatagctggcggatcaacaatgctttcacagccaccaaatgatggagcaatgtatggtatcttcaatgcatcaacaaacttgatggtggtcgtcagatctccatccacctcaaaactgatcacaccgccaaagccagtcatttgccgcttggcaatttcatgttcaggatgacttggcaagcctggataatagacgcgtttcaccctaggatgtgcctctaaaacttcggccatccttaatgctgttgaattttgttgctgtacacgaagatgcagtg

SEQ ID NO: 11922 - DNA, 468 bp, Gossypium hirsutum
  Clone ID: LIB3829-014-Q6-N6-B4
caaaaccaaatatattatttcaaaaaaaaaaaatcaaatataatgttgcaaactacaaagtaaacactcaaaatctcttccacaatacatcaatgtttctcgtaataatcaacacgaaaatgagttgtacagacggcttcaccggcagacctatgcaacgaacaaaactgagatgatttatacgttccatacccccactctgcggtccatactcaatacaatccgcaaaaatttaatgctaaacaacaccattcttgataccacagtcgacttgatacgctacacgataccaactataaaatgaggtttagggatttaagcttggcacatacaatccggagccggatatgtatatatggattgtttcggtttccttaaccggagttgaccttgtctgttttgatgaccttccaccactgcttgacggaattccaaccaagtaatgtttttgttaaggaagagttgccc

SEQ ID NO: 11923 - DNA, 507 bp, Gossypium hirsutum
  Clone ID: LIB3829-014-Q6-N6-B5
aaagcactacggtaacacatcgtttcgcttggacttgtttatggttaaactagtaaggaaattgtttgtacaaataaataccatacccaattcgatatccagccatagatgacagatcacaagtgtgcttgtaaatcattatagaacacatacttttgctttatacatacatcaaattaacaaggcacgataacataattaaatgaacatatatcataatccaacaacaacaataattatggagtccgttctggatgattcatatttgtagaaaaacggtattttccaccaagccaaaccataaagtcaaagaaacccaaaatgctctgttattttacagtccacacaagaggtcttacacaccagaaaatcagccataaagtctctggcagagggaaactgattggctgttgatccggttgtctctctgatctttgtccttgtacttgccaatacatgtcgctgcataggtgtcgaaactagaaccaatcagcggcattgaaacca

SEQ ID NO: 11924 - DNA, 531 bp, Gossypium hirsutum
  Clone ID: LIB3829-014-Q6-N6-B6
cgaaaaaaaaagcttttatcattatcacattcaatagtaaagtaaaatcatacatgctgtagaaaaaatgacaaatttcatgttcttgtttcttcaataagaaaaaatttaataataataagaagaaaaaaccataacaaaactcctgttttgatttctcaaattatgcattaggaggtttgtacaacttctcaaccatcttcctatattcttcttgattgctccaaagttgagctgcgtgggtgttcaaaggtgagctaatgttgggttctccaagcagactctggatggatagcagtatggttcttacatcataagcagatgaccatttatcctgaagaatgtccaagcaaatgttgccaaagacatcaacatttggatggaaacaggcagtctcaaacttaacctttggaggcttaaaagggtaatcattggagaaggaaagagatagcttgtattctgttccttcaaacactgtgtctttgcttcctgttattgttcctttccagcaaaatatgttgtcttcttctg

SEQ ID NO: 11925 - DNA, 516 bp, Gossypium hirsutum
  Clone ID: LIB3829-014-Q6-N6-C2
ataaattattattttcgaataacattgaaattagaagtctggtcaaaattgataatgcatgagaagacaagagaagagagcagacttcctaccttgataaataaatatatattatcgtagtaactatatataacagtaagtagtagtattctatgatagctttaacctacctaacaatagaagatatcatctttgattgtcatctgaaatggtcttgtttgagaattatgcttcctcctgtgtttgtcatctttgcagatgtttccctccaccaccaccacctacaagctaagctttgcttttgcttttgctttgcccaaccagtggccttgtaaataccatccatcagcttcccatgttgatcgtcatatcccttctttcatgcaggattcaggtccaaaggccagcttctcttctttgccgcctcctcctcagtatatgtgatgtgtagtgttaaacaatggaattttgtgcagtatggttgcacattacttctccacttcttcagggataatg

SEQ ID NO: 11926 - DNA, 568 bp, Gossypium hirsutum
  Clone ID: LIB3829-014-Q6-N6-C3
ccacgaacaaagggcataacagtagcccaccaagcttgcaagtgctttcaaaattacacaggaaaacacaatcttattacatcacaacttctaggaataaaatcgaaatcctctaatcgaaaaggacaaaatacaagtacatcaactttataaacagggcgtggataagaaaaatggatactaggacgaaggttatatttacagctctactccggcacctaatggatccaaaggaatgacacttacggggaattcagatcttggtttggctagggagtaagtaatacatgagaaaatgagccggatgctcaaccacagcagccactccaacctgattggtcataactttttgtcttgtgggaattagcttgatattccagcagcagatggatccaaaggaatgacactttcagggaaatctgttcttggtccagctagggagtaatatgccagtatatgagccggatgctcaatcacaggatcctctccaactattcggggaattagctcaatattccaaaatggacgagccatagctaacagatcatgacctgattctgatgctcta

SEQ ID NO: 11927 - DNA, 518 bp, Gossypium hirsutum
  Clone ID: LIB3829-014-Q6-N6-C5
aaacattctttcaaatcatctaataaatgaaaagctcttcatttgcttacaccacatattttgcttaatctaaacttttccttcttctcatatatgaaaagatcatcatttatacagttaaagactaatctcatcctttaaaaaaataaagagcaactgtctctggaaaatctcatcatcatcgacatttgcaaatacccaaaaaatcatacctttaaactgcaccttcccagctttctattcaaagtcagattccatattacccatagcctttaaacctcttggtctcttctttgtgatcttcttctccctgacttcataacgttcgagggttaaatcgcaaagccatgtcccaggacttaccagattgagggtacgttgaataaattctgatcgcttttttggcctttgaggcagtttagatcctttaaaggtcatgaaatcttcttctttctctttatttgttaaagcaatcacgaatttatgtggccaaaccatggttgcaggagctatctcac

SEQ ID NO: 11928 - DNA, 560 bp, Gossypium hirsutum
  Clone ID: LIB3829-014-Q6-N6-C6
agacaaaaaaagtcaccaacagtgtcgattatcccatttaaaattggagcttaaaatccgggattaccggtaaaatatccaaaatatccatgaacaagtgacaagtataatgaagatctcgatcagaggacgtcgcttaccaatcactaacagttcatctagaacggttttttattcaaaactgcagctaatcctattaaggcaaaccactcctcttccaaacagattatggaaatgatgaatgcattcatgagaggcatgagtaagccaattccttctcctcggtcagctcctgtccggtcaagtccaacttcttcctcgagaattcatcaattgccagtccttggacaattgtccattctccattcttacaagttacagggaaagaatagatgaccccagctggtgcattgtatgaaccatcagagtaaacccccatggaaacccatgtaccctcgggagttccaaggacccaatcacgaatgtgatcacaagcagcactagcagcagatagtgcacttgagagtttcctagctttgatgattgcagcaccacgttgt

SEQ ID NO: 11929 - DNA, 555 bp, Gossypium hirsutum
  unsure (1)..(555): unsure at all n locations; Clone ID: LIB3829-014-Q6-N6-D1
caagacactttttatttgctgatagtattgtgccaaggcattcatcgccttgtaaagttagaaatacaacaatacggcataaatgaactaaaatggttcctaagtcttacagcaacgngaaaatttacagacggtttcggggtcaagtggtacaaaacttgatacctaagtaaggtctcgatatcgagtctcgtgaatggtgagacctaggaatcgtttatggttagagatgccaacttcatacggtagatttgcctgttgccttctctatgaaatccttaatgtcaaacgcatcatccttcatgtcattctttgtaattacgcccttttctgttatgataccggctattagattggcaggggtgacatcgaaagccgggttccagactgagatcccggaagcagccacttgttctcccagtcctccccgtgtgtgcaataactccttagctgatctttcctcgattacaatttcttgtccggaagaaagagataaatctatggaagtgagcggtgcggcaacgtaaaatggaatatgatgatgcattgcacata

SEQ ID NO: 11930 - DNA, 534 bp, Gossypium hirsutum
  Clone ID: LIB3829-014-Q6-N6-D2
aatgcaagcccccttcttaatggaatatttatcaagaactatgaagcttaagctcacattgcaacgtgagtgtccatgttacataatactctggcaagaatgcatatatatatatgtacacacacacctgactaccaatgcatttacagagtatatagcaagcaaatatagaatgacatccaactcctgtataagccagctccacatcatctcgaaaacaacggggaaggaagccaccatcacaactgttgtcaacaatggattcccgagccctgaggacatagatcatccaacacctgttgtatgatctacagggcatagcagccaattgctctcaacttgaatacagtacaaagggtacgattagaaagatggctaccgttaaaacgagtttgagttgcaatgaataactaaactgcaagtgcactggacttcgtaattgtctctgtaacccaccaacccagccaaaacaccgattgaataaattaaacacacactttgcctgtgttagttctccacacctttgcttactga

SEQ ID NO: 11931 - DNA, 528 bp, Gossypium hirsutum
  Clone ID: LIB3829-014-Q6-N6-D3
gaaaaaaagagatggtgaagtgacttacttgaagaaaattatgaagcacaaggtgtggatgatatcaaacaatacattgatactttaaacctaaagcagtttgtttgctcttttgaccaaatgaaaccaatttgtgttcaacaaattggttcaacacaactttattttaagaaatgaacacaacgttttaggaactgagattttcttctatacctcaatctcttctattaatattttccagattgactgacattatgtcttgaatcattttgtccaagttgcagtaagaaggcccactttccttaacactctcttgagcttgctttgaaatctcttccattgacttcattatttcttcattcttcatttcaatcacgtccctaaccattttttcaataatggatctatgacaactatctttcatatcaaaacccactctccacacataactcacgcatctgctgttgacatattgatccacaaatagaggccagcaaatcatgggaacccctgcgtatatactctcca

SEQ ID NO: 11932 - DNA, 556 bp, Gossypium hirsutum
  Clone ID: LIB3829-014-Q6-N6-D4
gggcatgaactcacaaaaaatattaatcatttccaaaaggagaggtttataatgattttttttttaaaaaaaattaaagttacattttattaatcaaattgttgttggtctctaatccactttgtggcaacccatttctcacctttgatcactggacagcttccatgaagtgatgtcggatcaatggtgccgttcaaaaacagcgaatagaacaaaagtccatcccctcttcgaggctttacttttaaaccgacgcattgtctgtagtcatagccttcgacgctcatgccattctcaaatgggaacattgtttctccgccttcttctacatcgcataaatataacaagaatgatgcaaccctttggctcgattgtggaccatattcggacggattgaatgcatcataatgagaatcatacttctgtccgatctcataccgcaaaacattaaatgcctctccatgactctgtggaatgcttgtaacctttgcaatttttttctcgatcaagtccaaggttctggattcatcctcggatgcactaataaatgttcccg

SEQ ID NO: 11933 - DNA, 530 bp, Gossypium hirsutum
  Clone ID: LIB3829-014-Q6-N6-D5
aaaaaaggcaatttatataaatagacttcaataaaaacaagtgctttaatattccagaacacaaaattatccatcaaatatatattaactcaaaagtttctaacaaaccaacacctaccccattcaaaccactgcagcttaatttgattcgctgcgtctcggagatgcatgattgtcatcatcttcttcttcataaatagggctccgatcatccttggggagcgggctaggactgcggctgttcccattttcctttgcggagctcttataatccccgtctccagcatcagcttcacgatctggagttctgctcctccccctgggactcccactgtaatccgaaccattggcatgtctgcgatcccttggggatgggctacgtctctcttgtgggcttctttcatcacgtgctggactatgcttcctccctcgaactggggacggagaacgcctgtggcgcttaggactccttgatcttctatcgtcacgctcaaaacttctttctcgcttcacaggtgatcttgatctac

SEQ ID NO: 11934 - DNA, 535 bp, Gossypium hirsutum
  Clone ID: LIB3829-014-Q6-N6-D6
gatccaagctccaaagtgattaacaagtcatgtactgtagctccgtttaaatccaaatgagttcccaatcatcgtgtttcatatgtatcatcattcatcaattctcaaccacgaacgaaggaatgtcaaaccagtacaaagtgcaaatgccaatgcccaattcatccagttgaactaaaaaagggaaataaagttttgaacaatcctggaattccgtaagaaaacaaaagtttacccagaaaactacaccaaagctgccctcacagacccctgactttcttgatgaggatggtttgcagcttgcgagcgtggtcctgtgatttgatcttacgctccaaaatcttgcgtgccaaaatccgtttctccgaattcttaatgtgatgagtttgttcctgctttatcagccgttcgattccgctagattgcatcacccgctgcatcaccgccaacgcttgctccaagttgccgttccttaccttcacccttatccctctcatttgctgaacctgactcagatcatgactcaataagttga

SEQ ID NO: 11935 - DNA, 438 bp, Gossypium hirsutum
  Clone ID: LIB3829-014-Q6-N6-E1
cttgttgatcttattttattgttcagtttttctatttttttttttatttttttcatgcttatcattttttttttggatttacaatacccctaaaaatgtttttctgggctttatataaaacaaatggctaagaaagagaccaaaacggggaggggggggcttacctgggggaaagggcactcggaaattgcacgtcctgtggggaacctaggtggggagatgggaatttcggggctttaacaggcatgtttccaaaccaggcttaaaagggggggcccggtggcatacaacccatgtttaaaaggggggggaatgacttccataaagttagggggggaaacccataggggcaagggctaggaggcgtctttacctcccattttgaaaaaaagggggggaaaggggggcttgttttaattaggggggcacccctgggat

SEQ ID NO: 11936 - DNA, 508 bp, Gossypium hirsutum
  Clone ID: LIB3829-014-Q6-N6-E2
atggaactcaatgctgttctgatttatatataagaaaaacagacatccaacaacgttcttcagtcactctaaaatcctttccgttaaacaaattataaaagattccaaattacaatcatgggaaaaaaaaaagaacaggaaagggggaaagcaaaaaaaacaaaactgagcattcccattatcatgatgggttgataagttttttttttttccagggcagttggaatctcaaaccctgaagcctttgctgttccttcttcctctagccctctcaaatttccttgcttttgaccgcacatagggcttggtgtggctgtgtggcacaccaggagcaggtccgaagtgcttcacagcctcacgagcattctttggacctcgaaggaaaaccgtgttctgtccaagaggtgctcgaagagcaagttggtcaaatgttaaacattccccaccagccttgtcaattctcgccctcgctgtcttagtgaaccttagtgcagtaaccttcaaagcg

SEQ ID NO: 11937 - DNA, 560 bp, Gossypium hirsutum
  unsure (1)..(560): unsure at all n locations; Clone ID: LIB3829-014-Q6-N6-E3
aaagagcaaaccataaccatatttatcaaagtgtaaaaccaaacaggtaaaagccacaaaagccactgcagnaagtgagctttagctagacaaccgttcataagttcagataacatacgaaacacctaggagtgttgcaacccaaaagtctgagactactttgaaaaagcagcataaacagtttttggtagccaaaatccaaaagccctatacaaaaagatggttcaacggttttcagcagaagaacatggagctgctgacattatccttcaacctgggaagctgaggaacagaaattgctcccggagcagtcaccccaccatggctcgatgatgtctctgaagcatcctcaaacttcataaattgccccaactgtgaagctgccaaatgagcgtagcaaataggggccacaacagatatggctgtggtgctcctttgatacacgtaggatagagaatgaacaagctcctgcagatcatcagctgaaaacccaacctggtctaagagaacatgatagtgggtcggccttgtggtccctatcattccagcatgagcacaaa

SEQ ID NO: 11938 - DNA, 539 bp, Gossypium hirsutum
  Clone ID: LIB3829-014-Q6-N6-E4
agaaacagcttatattcagatataattgtgtcatcgtatagtgttcaaattcaccaggtaggtgaagaattactaaaagatgtagaacaattggcaactccagcgcagatcagctggataaaagcttttcaagggccaggttttcatcacccccaaccgcttctagagtacttctcaccaaaccatcaggaaaacccatttccacgagtcgttgtaccttttcctcaacccctaaagaagaggccttggcaaaactttctgtccagtaacgagctgtaccaacaaatgtctgatactctctaagatactgttgtgctactacagcatcttgaggatcatcaggttcaggagctgaaagcaaagcttgaacagaaagaagagctgtcttaagagtgagtgcaggactccactggtccttcaatatatccaggcatatcgccccactttggctgctgatgtttgggtgccaaactttcgtcacaaacttcattttgggaggctcaaatggatacccatcaggcaatgtgatatcgatttca

SEQ ID NO: 11939 - DNA, 523 bp, Gossypium hirsutum
  Clone ID: LIB3829-014-Q6-N6-E6
aaactattacaaatctttgattaatttcatagagcttacgctttacaaaccaaatacggggatttttacaaaaaactatggcgactaaatttactgaccaaaataaatattacagtatagagaattgcatagaactatttgcctacgaaggttaatatacaacaccgaaaactgatcagtaacaaagactgtccccagtgcggagaaaggaatgaaacaaccgacagaatatgccctgggcctctggtcagtttaatgtgtgccagaatagactcttctgctatggcctttgggatatcttgttgaacttaatggtcttgaaaaggcaaagccagtgcgacaagaggaataaaaaagatgaactcagccacctagcgagttcttcaaaattaattttgatggtgcctactcagaggttcaccacgatgtaccgtccacctttgctgctgaagtaattgtatgtcgaaaagctgtccaaataggagtagaacaagaatggccaaagatcatcatagaaggtgat

SEQ ID NO: 11940 - DNA, 480 bp, Gossypium hirsutum
  Clone ID: LIB3829-014-Q6-N6-F1
ctccaaaatgtgtttcttctataaaaaacatgcttataagcagcttgtcaaagctcaaaatctatttagtcctatgtcatacatccaatgtcatttgaataaaaacagataactggctttaaatggcaaaagatataaccttaggtggactcattacaagactagcaagaatttgaccagtgatgttagaacacacattcacagatgctaatttgtatatatgctccctcacatcagcaccaaacccagtaacctccatgtaacctcccctttttccacactctccataataccctcaaatgacatgtttcgagaagcaggtgcccattcctcagctatccgtttctccaagaattctgcattaactgttggtggtattcgaatatcaaaaccagcttctgcttcagacggctgcaaattcataacaaaacctgtgggagaaggcgtgccagccttcagaaaggccatgttaaccgaaat

SEQ ID NO: 11941 - DNA, 544 bp, Gossypium hirsutum
  Clone ID: LIB3829-014-Q6-N6-F2
ctaaactcatcgattttcatctctagaaaaagaatcagtatcacaaacgagtaactcaaacaatttatcatcagtgatacgagttagcatgatttcatatatgaatatagctgatcagcaattactagagcatcaacacagctatctaaaactataacttcgtatttagaaatataaaagattatgctagagtacccttgctagaagaattagattcggatgctttcctcatcaaaatttggtgatcagcaataactgtcttctcttctttctagtataaataaaatcaaaatcaccttatgagtaaaaaggggtttttttttccttgaatgtagaagtttccgtgaacaatctcgagcaagcaatgtgatagagctttcctatcttctgcgtttatgctctttccgcatttctgataagtagctatctaagttggactttatccataaccgtctctggagaaggtcctcctttgttgattcatcaatgtttagccacgcatcaagaggcactctgagggagtttctcgtcaggtaagctgcga

SEQ ID NO: 11942 - DNA, 564 bp, Gossypium hirsutum
  Clone ID: LIB3829-014-Q6-N6-F3
tcgcgattgtttctaaggcaggctcatcttattgcatccgtagtgatataacacggggtagaaccgggcagaatgtggcttttggtgtggtaaacaatgttgaggctcctataatgaaggaaaaatcgatcaaaatttcttctttatcatgcaaaaatgccagggtagcgcagttctttcctctagaaactgtgggatttcgaagcaaaagaaggaatagtgtgattgttgcagcaagccctcccacagaggatgctttgattgctacagaaccattgacgaaacaggatcttgttggataccttgcatctggatgtaagtctaaggaaaaatggaggataggtacagagcatgaaaagtttggttttgagatcaaaactctgcggcctatgaaatatgaacaaatagcagaattgcttaatggtatttcagagagatttgattgggagaaagtaatggaaggtgataaaattataggacttaaacaggggaagcaaagcatatcattggaacctggagggcagtttgagctcagtggtgcacctcttgaaactctgcatcaaa

SEQ ID NO: 11943 - DNA, 529 bp, Gossypium hirsutum
  Clone ID: LIB3829-014-Q6-N6-F4
ggctcaaaaggtttgtttttctattgctccaatgttaatccattgaccgaatagtacataaaaccaaaataagaaaatgtttttagtaagtaccacattactgagtactaccaaagaaacataacccaacaggaagactaaacaatgttctactagggacgaaaagttgctttaaaacgacataagctagcacatatatgcctcttgatcttcctcgtacctaatatagtgttttctcccaagtttcacccacggttggcttactctgacatccactcctgccacctgtaggctcactaatcttctcatcaccgttgtctctgtaaccatcttttcggtcttccgctgaaagatgtctactcttgtgactcctaccaatctccaagggtgatgcacctctcttttctctatgctttttgctatcaatagaccttccatggtgagggttactgtcataacttttggttctactgtcacccggctggcatctgaaactatgggagtccttgtcgaaataactctgatgctt

SEQ ID NO: 11944 - DNA, 544 bp, Gossypium hirsutum
  Clone ID: LIB3829-014-Q6-N6-F5
catcaacagggaaaaacttgaaatcctgtatggtatttgatctgttgcaaatcaactactgtatgggtacataatagatgaaaaattgtttcaatcactcaagccgtccatctctatcctctgatgtcttcaactaaatgacaaaagaactactaaatgaagcaaatattgttcaatatattcccacttggattaaaattacaatataatttttcagacccttgcattaatagcataaaggtagtcagaaggaaacatacctttaaactaactgctgtgtgtagaagtagaacatcccaactttcaatttccaatcattaggttcaccgtggtaaaccatgtttcgaggtgatcctattcatatcccttcttcagctagcttcagccacaattacatatttaaaatataccagtgcatgtgtggccctaatgcaatgatcaataaatctcaaatttgcaccacgaaatttggtcccttttaaactaatccaagcttcaagtagctctaaatagataatggaagaagcatccttcttttcttttt

SEQ ID NO: 11945 - DNA, 497 bp, Gossypium hirsutum
  Clone ID: LIB3829-014-Q6-N6-F6
ataaaaaacccttctgcaacatggaggactcctggattttgcgtaataaataagacgacaaccaactgggcctgggtattggcatagggagaagggatcacccgctctactttgggggactgggttcaccgtccataacctgttctatccctttggtctttacagcagcggcctggcaacatcctgaggcgcacctgggcgggccacactcagcacaagggccaccacaaccctgacgggaacactcttcactcttacatcccgacagagcgtggatctattgggatttttgggacttgggggatctgtgggacttgggggatcggggggcccaccggaattggggggatcccgcgggaactgtgggattggggggatttctggaattcttgggatttccggaatttgaggaaatggcggaacgaatccaccagggattacaattaccggaacaggcggaagaacaacatttatcagggaccccttcaaaaccaaaa

SEQ ID NO: 11946 - DNA, 541 bp, Gossypium hirsutum
  Clone ID: LIB3829-014-Q6-N6-G1
tttttttttttttttttttttttttttttttttttttttttttttttttttttttttttttttttttttttttttttttttttttttttttttttttttttttttttttttttttttttttttttttttttttttttttttttttttttttaaaaaaaaaaaaaaagggggtttttcaaggccaaaggggaatgaaaaaaataattgaaacccccccctctaaaaaaaaaaaaaaaaacaaaggggggggaaatgcttgggggaatataccccccccaaaaggaaaaaaaaaataaaaaaaaaaaaaaaaaaacggacaagaaaaaaaaaaaaaaacccccccccccgggtttttaaaaaaagggaaaaaaaaacgggggaattgccccccccccccaaaaaaaaaaacaattttagattgggaaccccaacccttcacggggggggggggggaaaaaggttgtcttttcccgggaaaaaaaaaaaaaacccagtcggggaaaagcccccccctttttttaaaagggggcacccttctctt

SEQ ID NO: 11947 - DNA, 538 bp, Gossypium hirsutum
  Clone ID: LIB3829-014-Q6-N6-G2
ggctagcttaaattttgctaaaacttatttataataagaaaagtacattataatggaagagaatgtgtccaagtgttatattttgcgaggaaccgactgtgttcctctttgctaaatgcaaattgctacacatctaatagattacatttgcaaagaatcagcccaaagaaaatactcaaatctatttcgaaggatatcttttggactgaaaaatccccttcaacaaagacgaaacttgtggatggcacatgagacccaattccccaattctaattgatccgcgttacccatctgggaatgataccatccccaagcggaaataatatgttgttagatgccaattttatatttatcaaataccaaaccttaacacctctatggttagaggttcaaccctcgctcatgggagtgaaacacattttctgattaatcttttatcttagatacaaccaaaataaaaaaatcttaggcaggagggttgcagcaagacagattcatgataagggacaagttatggaatcgaaaggaaatggttcct

SEQ ID NO: 11948 - DNA, 513 bp, Gossypium hirsutum
  Clone ID: LIB3829-014-Q6-N6-G3
gacacacattaacatgtaattgtcctatatatgagatatgaccattatctattttaaacaagggccctctgactaccgacgtgactggtacggcagttgctcaaaggttgagcaagattaaagaaacaagcctcgattatgtagttcaaaattatcgaatttgagaaggagaacagagcaaacctgatgcgtctgctccgatgactgcgagatcacagattgtacacaattgaccctcctgggtaggcacgaagcgagtagtacagtaagggcaagatacatctttctgtcctcggtaaatcgggacgtaagttgccccgcatgtcacaaaagggttcctgaaatcgtagtttaactcagatgcatctgtcatattcctctctgaaacttggagtacttgcctcgctgcctttgaatggttctcgttagggtttgtttctagaagacgcctggcaaagttagcagctgtagccaggtttttttgccttgcaacagatggtcattgcgtttcgc

SEQ ID NO: 11949 - DNA, 356 bp, Gossypium hirsutum
  Clone ID: LIB3829-014-Q6-N6-G4
gggggggaaaaaaaccccaaaggggtttttgttgaaaaaaaagggccaaaccccccaaaaaaaagggaaaaaaactttttaaaaaaaaaactttttttttaaaaaaaaaaacccaacccaaaaaaaaaaccggcttttggggggaaaaaaatccttctcccaaaggggaaaaaaaatggaaatccccggaggaaaaaacccccccaaaagaaattacccaaaaaaaaaaaaaaaactttccccccccaaaaatctggggggggggccaaaaaacccacaccaccccccccaagaattaaaaaaacccgaagttggtttcggcacgcagtttttagcccccaaaaccccctgggaaa

SEQ ID NO: 11950 - DNA, 520 bp, Gossypium hirsutum
  Clone ID: LIB3829-014-Q6-N6-G6
aacattcaaaacagtcatgacttccatttccgcttatgcaatctgcaatgtcactaaaactactttgggcaagctttaactaaatcaaaacatagaacatcattaaatacttgaaaatccctttcatctatgctcactatagagcagaagcactagcaaagcacagttcaagcaaaaatatatatattcgaggggaaagcaaggggcaaaaggtgataacatggccaatggcactctcaacagccgtggaaaaaaactgtgtcctctaaatcttgttgaatgcaacaatgtcacagctttgaatgtattcattgcgtggctctgtcgtgaggcactcctctataagggtatcaactgaaacaagatcatccactatggtaagcatgatctgtagcttcttgatgccataaccaacagcaaccagctttgatgctccccacaaaagtccaggcatctcaacggatcgaacagcttcttccaacttcttcatatcagtctcatcatcccatggtttaacatc

SEQ ID NO: 11951 - DNA, 575 bp, Gossypium hirsutum
  unsure (1)..(575): unsure at all n locations; Clone ID: LIB3829-014-Q6-N6-H1
tcgcccnagtgaaagccgcactattcagtcttcggtcgccgctccctctttctatctattcaatctgaggtatggcaatggccgtggcagccaccgagaccagcaaagacccgacccaacctaactacgaagtcaagcttttcaatcgctggtcttttgaggatgtccaggttactgatatctctttgagtgactacattggtgcccaagcttcgaagcacgcaacctatgtgccgcacactgctggaaggtactcagtgaagcgtttccggaaagctcaatgcccaattgttgagaggcttacgaactcactgatgatgcatggccgaaacaatgggaagaaacttatggcagttaggattgtgaagcatgccatggaaattatttatctcctgactgatcagaacccaattcaagtcattgtcgatgctataatcaacagtggacctcgtgaagatgctactcgtatcggttctgcgggtgttgtgaggcgtcaggctgttgatatttctcctcttcgtcgtgtgaatcaagccatctatctcttgaccaccggagcacgtgagtctgcattc

SEQ ID NO: 11952 - DNA, 529 bp, Gossypium hirsutum
  Clone ID: LIB3829-014-Q6-N6-H2
accacaccgaacaagatgccatcacaataagctaagagacttgtacgtagtagtttaagcacataaaagaaaaaggtaaaagggtacgagctcaacagtgggattatagatttctactctagttcttgtgacatgtgggttcgaaagcgaagggcccaacgctgtagagaacatatgggagcttctttgaagtagatggtttctcaggcttcaagggggcgcccttcaatccaccgtttagattagatggcttgctgcatgctttcaatggtgaagatacgagggagacgctgcaattgtggagatcaaaattgtagatggtaattggtgcttgcaggaagaaataaccattcttgtcagtcttgaactggaccgttaattcgtttttagcgtctttgcatgtcagccttacggtggcacctgccaaaaaacaatcccaaagtttgaatataggttaattaacttacacctgcagtgggcaaaaaccaactaccaaggctaccatatcaatgcatgccagtaatttgct

SEQ ID NO: 11953 - DNA, 543 bp, Gossypium hirsutum
  Clone ID: LIB3829-014-Q6-N6-H3
gggcaaagggcaacatttataagcaaatgaagtaataagctacaacaaagtaggaagtagcatggacccatatttattaccaaaatctatggagctgttatctcatctcacctgatcagtaatgggtcactctatgaatcgctacttccaacatttacaaattaattctagcaacacttaccaataagtacatataccagctattaaatcgaacatgatttgtaattgaattacggcgcaagatatggttcgctcaaggtgccgtgagcatgaaagtgtcctcatctaatagttttttcgagatcaatcaagtctttgtccaaatctgtcgtttctcctgcaaagttgagaaccttatcgtacaagaccttctcttggatctcggtgacaacatttttcatcctactatattgatctcggcctgcaggattctgggccatggacttaactctggcaagtgccttctgcaacctttcttcagtttgcttcctgccttttttcaagaaatcatagtcatcctcctttgggggcacagatacgcta

SEQ ID NO: 11954 - DNA, 521 bp, Gossypium hirsutum
  Clone ID: LIB3829-014-Q6-N6-H4
aactccttaaaatcaaaaccaccatcattaaactttgaccttatatgttgatgacaaagagcacaaaataaagactgcatgggggaaaataaatatctagaatgctttcactgcctttgttttaattaaagaagccaacaacattgaatgcaagtggaagaggatgaagcatttgcatttctaatggaaaatgaacaaaaaatatgtttgtacatatatctagacagtcaagtatataccctttttcgatctttccagccgagttgccgagctcgttgctcccataaggcagtcagcttgagctcctctctgatttgagcttcagcccattccctggcttcctcacatgtttctacacctgcattgcacttttcagcttctttctggtagtgtgaggaggctcttttggcatccattgttagtgccgaggtgcggtccatggtttctttgcttacgatcttctgtaatgcaatctcctcggagagtaaggctacagtatccttctccagttcttggtttaa

SEQ ID NO: 11955 - DNA, 443 bp, Gossypium hirsutum
  Clone ID: LIB3829-014-Q6-N6-H6
ggggggggcccccccccaacgggaatcccaaaaaaaccctccccccataggggggggacatttgcccattgggggccagaataaatttaaatgggaggggaaaaaaccccttaatcaaaaagggggatctgaatcgggttttaaaaaaattagggcccctatagcaaaagttcatttcccccaaaaggggggggggaaaaatcctaagggggcccccttaatcaagggaaaaaacttaagcttgccaggaaaaaaaagtaaaaagaaaccccccttttttgacaaaaaacaagtttttggcagctaaaaaaatcgtaattagggaggaaatacccggccatttcaaaaaaaaaccttttttacttcctggaaaaacttgcttggggcggcaatttggtgggtggagggcattttttaaaaaaccatcaaacccttggagcttt

SEQ ID NO: 11956 - DNA, 472 bp, Gossypium hirsutum
  Clone ID: LIB3829-016-Q1-N6-A1
aacgagtaaaaacaaatgttattcaaacaaatgaagacatggagaagaagaaatatcagcaaattcagtggaaacttgatggaaaatcgttaaaatggataagcatcaggatgaacagcaaccacccgatttgggtgcctcagtagcaggttcttggttctcatccccttgtaaaaccacggtcttcccatccaatggtgcgtcctgcttcttgagctcatgagacatcataactttccggctcaatatgttgtagatctctttaacgacagtctgaaatgcagccgctacattcgaggaatcaagtgcagaagtctccatgaaaaataaaccctgtgcctctgctaaggccttcccttcggctgtggatacttccctggcatcccggaggtccgacttgttgcctactaaaatggtgactacattcatgtctgagtgagttttgaagttcatttaaccatctaccaatgct

SEQ ID NO: 11957 - DNA, 482 bp, Gossypium hirsutum
  Clone ID: LIB3829-016-Q1-N6-A10
gttaaactgttatgttccattatacctacggtgacaataaataaaccttaaaatttctcaataataatcaaagcttcgagctagcagtcagtaagaccttcaaattactaaagtatctatagaaccttgaaactctttcatctttagtcctattcactagcattggtatcctgtattttcattgcttcaacattgtgatcctccagtggggttccattttcaccactcatatcttgtttcttatctagcacgccaaggctttcgggtgccaaagttccattcttttcagtctccatgcgtgctgaaagcctttccagcagttcctggcagtccattgctgtaaccatcacactcaaactcgaccggcctttccagcagccaatggctattgccaatgcatctgcttggatatggtcttctctcaaaacaatcacacagcagcctaacatcaggtctgctgccttctgaccgaaatcagcatc

SEQ ID NO: 11958 - DNA, 489 bp, Gossypium hirsutum
  Clone ID: LIB3829-016-Q1-N6-A11
aattacaaaatgtaaattttattaatataaatctattatttaacataaaaattggggtcagacaggtaaaaagaaaaatgggacaaatattggattcggcccatcaaggaaagccctaacgaaagaaaaaaagaagaagaaggaaaactgagccataaacatcagatccaacccaaaatttcacaaccaataaacaccatatatataaaaaccctaattcacattccaagttcaagaaccctatcagtttctcattttcaagtctgcaaaacccctatccagccacttgcccgccgactctccgaaccatgggccgagtccgtaccaagacggtaaagaaatcctctcgccatgtgatcgagaggtactactctcgcatgacgcttgatttccacaccaacaagaagatcatcgaagaagtggctatcatcccttccaagcgtctccgcatcaagatcgccggcttttccacccatctcatgaagcgga

SEQ ID NO: 11959 - DNA, 167 bp, Gossypium hirsutum
  unsure (1)..(167): unsure at all n locations; Clone ID: LIB3829-016-Q1-N6-A12
gtaaacactaaaacactaggatgtaggattgaacactggaaaatatattatgtgataacactgactttgtactgctgcataagaacatgacaaagggnctgtgcatgtgaagataccaaactnnaaaaataacagctaatttggagatagaaaatgcactcgagcaa

SEQ ID NO: 11960 - DNA, 488 bp, Gossypium hirsutum
  Clone ID: LIB3829-016-Q1-N6-A2
aaacaaaatgtcaaatcaccattaatcttgagccacattctgcataaatgtaaagttcactccaaattgaaacataaaaactcgtatgaaactccaatggtgtctgcttaacaacaataaaatgacatattaccgtccaaaacatgaaaagattcagtgactgatacccttctttgctttgagcgattcaagagccttcttcctcaactcgatctcaagcttcttctgttcagtttctgcctcctcctcgtcatcatctggacgaaactttccagttcctgcatgctcaccatctgaactagaatcatcatcgtgacgttttgttttgagcttttctgcacgccgtgcttctcttttgcgacgccgttcctcgctacgtttacgtttttcttcctttcttaatctcttttcttcctttttcctcctcttagcttctttcctgtcatcgatttcggaatcataactagaatcatcgtcgtctgaagtga

SEQ ID NO: 11961 - DNA, 489 bp, Gossypium hirsutum
  Clone ID: LIB3829-016-Q1-N6-A3
aaacaacaaaaagttcaaatcacttcattatttttagtaggttataatcaaaacaccaagataaccaggatcctatggcatccacatacatatatatacaggtattcaaagttactttgttttgttgttcccactctaagagcagcgggtaactaacactgattgcaagcagtgaaaagtgaaaaaaaaaatcacatttcagcaaacagtttctctgccttaccaccttcagctagtgaacccttggtccatcttttcagcatttctaaggctgccttgggctggtccataggcaccatgtgaccagcatcatgaaccttaagaaaaccaagaggtccatgagttttcaagactcctgcttccgagccatcaaccacaaatggaacctctggcgatgctacaaattcttttcgaccagaccattgcattgcatgaacccatcttgaattgccgagccagttgcagataagatcatattcaccagcatag

SEQ ID NO: 11962 - DNA, 491 bp, Gossypium hirsutum
  Clone ID: LIB3829-016-Q1-N6-A4
gaacaaagtacaagttttgtgccattttatttgaacaaaacactatatacatccataaagtggagttttattacagtgaacaaaattaagacttaggagctagtttatggcttattcggcactaccctacccgtcttaagatttcagccaagttgatactgctactagttttctgttacctcgtttgacttactagcttcgttcgggttaaagttggtgattgtgtttaattagtagaccataattgcctcttggagttgtcggaaacttcggtctttgcaaaccttccgtggatcctcggttgactatcggcaagtgccttcctgcaagcatacttgattttccgaccaaaattcctcttagtcttcttgttcctgtatctagaaagcttttcccttcgatcttcagaagaacagcttctgacaattaatggccacttgacggaagaatggatgacgctcacatcaccgttgccaagtgtctttatatcg

SEQ ID NO: 11963 - DNA, 391 bp, Gossypium hirsutum
  Clone ID: LIB3829-016-Q1-N6-A5
aaaaaaaaaaaggggttaggggcttttaaacggaacctaacaaaggaaaaatggggggggggggagaaaaaaaaccccaaaaggggttaaaaacattattaaaaaaacccaaaacggcaaaaagggggaaattatatttggcccccccgggaattacccccaaagtcccccgggggaataaaaaaaccccggggggtttttaaacccaaaaaggggccaaacccggggggttaaaaagggggggggaaaacccctttaggggcccccctttaacccaaaaaagggggggcccccgcccatggttccaaaaacccatggtttaaaaaaaaaaaggggtcggggccaaaaccaaaccctgggggggtttggtccgcaaaaaacggggggcccc

SEQ ID NO: 11964 - DNA, 507 bp, Gossypium hirsutum
  Clone ID: LIB3829-016-Q1-N6-A6
tcgctttgatttcatgagctccatatgatccataaagcgtagcaaaacatctgacactgttccttagttccttttgcaaatacccattacttgtaaggcattactggaatacatagaagttgtcctcttccccgaagccacatcgagggcatctcacatttgtggttattcgcttgtatcgtaggttggctagtgtaggaatatagttccaggatatccgccagacaaacagtagagtttttgatggaagttgtaaatcccataactttctctagaattctttaaaatcagtctgtaataagttattagaaattaaatcaacttcttgtaatagtttataggtgctccgtacagagaactctccggtcggtttacctttccaaacgcgcaagtcttcactgtccgtttctgcaagtggtatctccaaaatttttttagctatatccgattgaaaggttcaatccttggaatccaccgatctgtccagatgaaaacattgtttctttt

SEQ ID NO: 11965 - DNA, 431 bp, Gossypium hirsutum
  Clone ID: LIB3829-016-Q1-N6-A9
aggaacaacttaatgatcatctcaaccgggaacaaaatcccgaaattcaagaaaaaaaatcatttaaatcatttcatattttctcaaggaatataaagcatggatgggtattagcttcggccttgctctcgaatacatgttacagcaactaaatcaagggatgggcctgattctttaccaacatataatagtttggtaaccctacacaggaaagcccctggtagtccttgaacccgttatttcatcccattactttttgggcagagggaaaggagatgattaacctttgaacttttccaacttaccaactaatgcaggatcctcatcctcatttttagcataaaatttttgctcgacgccctttaccttaggaacataatgcattaacatattttcaatgccggatttcaaagtgacggatgaactggggc

SEQ ID NO: 11966 - DNA, 457 bp, Gossypium hirsutum
  unsure (1)..(457): unsure at all n locations; Clone ID: LIB3829-016-Q1-N6-B1
ctaatatatttcaacatggatataaaccatggttctccaaatatcaaatccataaaccaatactcactgagacttacatggttataaatatattaacctaaaagtttacaacttgaaatcaacctcctccattttattacttgaatgaggaaataaattactatgttccaatttgctaaactacaagttcattaaacaacatatgacacaattagcattctagttatagcagattatcatacaaaataaaaatcaaaatgttatagcttaacatcantcgtcgtcatcatcatcaatgtcatccaactccgaagagttgtcaacactagtggtctgcagttgttgcatctggttaataacatatcttgcatcagaaactaatacattttttgctgctttaaccttgtctacttggatttgaacatatcctctgttctcctttccaagtactgctttt

SEQ ID NO: 11967 - DNA, 368 bp, Gossypium hirsutum
  Clone ID: LIB3829-016-Q1-N6-B11
aagtaataaattttaaataaaatgatacaactcaacagtcaaactcaatatgaactgaattatcagttgtgaataaaaaaacaggatttttttcagcaaccatgagagagctctcaaaaccccttctacatagttcaagctcactggcaaattttcttatacttcttctgccacatcctcttctttaggagtactcttcccaatccgaggtcgtttagaagatttgagagatgatccagcaagacaagtcagcctggacttcgtattagcctcggccaatggatttggcttctccttggcagccatccgaacatcccaaacacgtataaacccatcggatgatgcagatgccactaaatatggttcat

SEQ ID NO: 11968 - DNA, 448 bp, Gossypium hirsutum
  Clone ID: LIB3829-016-Q1-N6-B2
atcacaaagaatacaaagctatatggctgaacttataggtataatagagagatcaagtaccttgaccataaacaaaaatcatagtagtcgagaaattaatactagggcggagaccaagtttggcgcagccttcgataaaaaaaactttaaaccggcttcaagtttggtggcttgggactatttgggggaacttttggcatcaaaaactgtattacactcaaatgttccattgccttgcacagtcaaagcctacataggacagttgagagcgaacccagacctttcctatttgaacccggaaggacgatggagaatatgcccagattagagaggattttgtgcaggaagaattgaatagcagaaatgaaaactaaaagagaggctattcgactgcacagagagggacgttggaaatgataagaagaggcagttggtgtctagctgtgcc

SEQ ID NO: 11969 - DNA, 476 bp, Gossypium hirsutum
  Clone ID: LIB3829-016-Q1-N6-B3
gataataatgggatttatcattgcttcttgccctaataggggccctttatacacccaaaaatggagactcagcaactagagtttaataactaaaaccagattattcagccttcctctggaaccatcatcttttcatgaggctcaagagtctagtgccgcctgttttgaagctgaaaaactattgactcttttgtctgctttgccctgtcactgaccattctctattgctggttcaaagcttttctgtggtctgatgccgagccttcgcttggattttttattggtaattgaatggcgagtatatgccaaaaactcatcccacttgaaattcctaagctcttgtttttcctcctctgaaagctcgaagttaggctcccttccacacatgaaagcagctctgtcatataagcgggcagcttcttcttgtgaaccaacagtgcctaagtgaatctgtttcttgtcgacttttattgcag

SEQ ID NO: 11970 - DNA, 482 bp, Gossypium hirsutum
  Clone ID: LIB3829-016-Q1-N6-B4
acaaaggatggaaagggcagtgtcattatatcgaaaatacactgtcagtggcaagcaaaaatttccctaagtagtatatatatgtatatatatattattctatgacttggttaggccaaaggctttgccacatagaaatctcttgttgattataaagctttctaatgccaccataaaacccatcaccttcattgcctacttctctatgattttccctatttatcattgtttttctccatcttgaacttgaaggatattgcttgaattctagcatcacagtatctgtatcttgacaacggcagtgatattcatttccattgcatgattccatgtgaccgaccacaccataccaccacccataggggaattctctgtttcttctccattggatctcgatatgatcaccgggttttaagtcaaataatgagttggaaatgtgaagatcatatgagcaagtatcgaccggcggcgctcttagccta

SEQ ID NO: 11971 - DNA, 485 bp, Gossypium hirsutum
  Clone ID: LIB3829-016-Q1-N6-B5
caaggaaactagatgtttcatttccattaaagtaacatacatcataatgagattctaacaatgcttccatattgcttaaggcagtcttcccctacattgtgaaaacaatcacccaaaaggacatacaactaagaaaaataaagccctgtgaatctagttttgttaaaacaaattaagctttcttaggagacttggtggcctttgatggagatttgggttctttgccggcggccttttcagtcttcttcggcaaaagaactgggttgatgttcggcaacacaccaccgtgagcgatggttacgccggcgagaagcttccctaattcttcgtcgttcctcacggcgagtagaacgtgccttgggatgatcctgtttttcttgttgtcacgtgcagcgttcccagccaattccagaacctcagcggccaagtactcaagaacagcagccaagtaaaccggggctccggttccgacccgctgcgaatac

SEQ ID NO: 11972 - DNA, 480 bp, Gossypium hirsutum
  Clone ID: LIB3829-016-Q1-N6-B6
gttcggaaaccactacgccgaggtatttttgtctctagtattaatgttaataaaacgtgggttccttttaagtacgataatctaccgacattttgttttggatgtggaagaatggggcacgggataacagattgcactcaaataatacctttccggaggatgtagctgagaagattattggcatcccattggcagaagaacctcatgatgattttcgggtctggagtgcagaggcgtcgggcgaattcacagtgcgaagtgcctataaactattacagagtattgaagatgatcctagagcttacgctttacaagatggctataaggaattttacaaaaaattatggctcctgaaccttccttcaaaaatcaaaattacaatttggaagatatcatggaatttcctagctatacgagttaatatgcttcaaaaaaagctaacaaacataatagtatgtccacgctgtggagttggatcag

SEQ ID NO: 11973 - DNA, 448 bp, Gossypium hirsutum
  Clone ID: LIB3829-016-Q1-N6-B7
gaaaggaggattgaagtttttcatttcaaaaacaggattattttggaaaatagtacaaatacaaatacgatttttgttgcagcaagggaaaactattaggatgtttgtatatatataaaggatgggttatcttgtttgtatctacatttgaaaaccaataataaagaaaatgagaatgtcacctttaatcaaatggatcaattcgggggtcgggttcgcttgccattgccattccggggcaaagacacgtagggcacatcacctttccggatcccaaacagtttgaacatttttccgttctgggggttgataaaggacggtctccaccatttagtgtcgaaactggttcagtaaaaacaagtgatccggtacttgagcagcgagcacaagcaagatatcctgttccaaaacaatacttgcatcgtttatgctcttgctgtttaacatt

SEQ ID NO: 11974 - DNA, 465 bp, Gossypium hirsutum
  Clone ID: LIB3829-016-Q1-N6-B8
ggcccaaattttgctcattttatttggcaagcgcagaaaatgcatttcaaaaagaaggattagagctgctgtttggtgttcctatttgctggctgattctctagcatctatcgccctcggcatactaacaaatgacctgggtgaaatatatgataagggaggagctcttgacttgagcactgagcttaaagcaacgtgggcaccctttctcctactgcacttgggtggcccagatgccattacagcttactccctggaagacaatcagctatggttaaggcacctttttggactaattgtgcagacaattgtgacaatatacatcttattcatggcatggacaggttcccttctctccaagctaaccattccaatgattgtggctggatcaattaagtatgctgagaggacatggactctatggagagcaagcccgggcgaattacgagactcgatgctaacttc

SEQ ID NO: 11975 - DNA, 474 bp, Gossypium hirsutum
  unsure (1)..(474): unsure at all n locations; Clone ID: LIB3829-016-Q1-N6-B9
acatcacaactagtaaattttccataagcgaatattagaaattagagacatacatcacaataatgaggtctgatagtatgtttactttgttagaaactcgaatccactctacacactaaacaacatgtaagccatataaaactcaatctatgtacttaggtttcttgaaaccacctcacttcccactttaccttcacaaaatgttagcccacagctatttaccgcaagaagttgacatcaacatgctcaaactttcttcttctccatttctcattgaatttattcacctctaccgttttcgcttcgactttaaagaggtgacagattgagagttgctatgccagttacgcttcctctggttgatgaaccagttgttgatttgctttagctgcaatcctgtttcctccacaagtttggccttatcatcttcagttgggtatggccactttgangtgttgttgccaccagttcttt

SEQ ID NO: 11976 - DNA, 488 bp, Gossypium hirsutum
  Clone ID: LIB3829-016-Q1-N6-C10
actattacgcctctattccattacattcaaccaaacagtgaattagctattacacctctaatccaatacacttctaatcccaatacacctctaatccaatacagcgaaccaaacgcacccttattttcatcggatgcttaatgaatatcaaataagtagtattctttgtctgagtagaaagcaagcaaaatcaaaagttgaaaaccctccaattttccccatgcccaagcaagcatatattctacgaagctgaaagaaattattagaatctgattacagcattgattgcctttggatcttctttagtttccctatgttgacggttcccctttctgcccccaccttgtttcactcctttttccttctccctgtccaccagatgtgctttgcccctcttcttatatatttattcagcctggatcatcccccaacccttgctcatctctgttacaaccctagccatggagtcaaggccccactgtttaagc

SEQ ID NO: 11977 - DNA, 480 bp, Gossypium hirsutum
  Clone ID: LIB3829-016-Q1-N6-C11
gattacccatatgtacattgccaaaatttagtaatttaccgataaaagattggaaatagctacggagagtaattaaaaagaactgtaaacctacagttcaagaaagcaaaattgagtaaacatttctgactcattgtctggtcaaaaccccacatgtgcacatggtcccctaatcccacgtgacgtcaaacatccctatattatcatcctttgccacctcaccattgcttccattcgaatacgacaatctcagcacacgtgtacggttcttgatccgtttgagttcccccacgatctctctagcatccggtctatcatccttatcagccgccacacaccggaacgccagttccgccactgcctccacgccgtccatcggctgcccatcgaggatcaaagccgggtctaccacctggtgcaacaaacccatctggatcttcgaaaccaccaaatctgccagcgccatttcccttttctccc

SEQ ID NO: 11978 - DNA, 449 bp, Gossypium hirsutum
  Clone ID: LIB3829-016-Q1-N6-C12
cacatcaggttaaaaacccaaaattaattaataagtggaggttccaatcacatactaacgcaacatctttcatacaaaaccccttccctttatttaataattattaaatatagcagaagttgccgccgttaacggccgggatcttgaatgacataaggtaatcgaccaccctgggctgccgtttactttttaaaacatcttacttactactactacttaatggacccattgaaaaacttttaaaaaggacgatttttttttttacatgcaaatcctgctccttaagtagctgcaaccttttgctaggggttttgctaccatccgccgccgtaagccaccgcctaataaacggtgatgcttgctccgggtctccccgctgtaaagccagccataaacagtaggaaagttaggttgaggcttgtcaaaaacttcagcgccaatacctttgg

SEQ ID NO: 11979 - DNA, 475 bp, Gossypium hirsutum
  Clone ID: LIB3829-016-Q1-N6-C2
aaagaaacaggatttgatatcaaagtagaaaattgaagaggaattgctagaattgatgaaatgttgagtcctcatcatagaaaccatttatagcaactacttttgctggaagctcagggattgtgttacacacaaaatcaattagaatttaaaagtcctcttatcctttacagttcatccacacatcaatttcctactaaaaacaaagaattttcagtagaatgatcaagccattcagataacatgtaatccttctgacgtgaatcccacagctaaacataagcatctggaggagcttcttcaggaatctctccaggagtccatttctcttttaaccaaatatttgagtccccagaagcaaccgttgttggcaagttatttcctaactgaacatttgtagcttctcgtccaaccacttcagaatttgagagcgagacattcaagaaagcaggagactgtatgctggatgagctga

SEQ ID NO: 11980 - DNA, 507 bp, Gossypium hirsutum
  unsure (1)..(507): unsure at all n locations; Clone ID: LIB3829-016-Q1-N6-C4
cccccccctttttcttctttaaagaaaaaaccacatgcagctgtgttctataactcaaaagtacttggtttttcaaatagtaaagttcctacagattatgttaatggtttgtacatatcctgcaacacagatgggtgcaactgcagtttccccctctagtatttttcataaatgctaattagctcatcggaaaaagcaacaatagtttacaaccaaacccttctaaataacaactaaaaagtacatattggcacaagacatgaatacctacatttcctttttgtcatttttgcatgtagttattgtccatcttgtagggtcaggcttgaacctcttgaccagcagattgggtttcgtctttctcggcatctcctttcgtcgntcttcgtcataggcttcatcagcttagtttggtaagttcttccttggatcatgagcttgattgatgacttcctcggggtgagggtcagtattgaaatgttgcgcaagaagcttcagaatgtcagt

SEQ ID NO: 11981 - DNA, 478 bp, Gossypium hirsutum
  Clone ID: LIB3829-016-Q1-N6-C5
actccacaattactaccactacatataaggaaacagatttaaaagacagttatgctccaaattatatcttatgacatgcaattctctggaatagcggcaaaaagatgtcctcaaaaaggtaatttacccttacagattgattgacatcaaatcctactaataggctacaacactcttttaagcagcagtcagaagccacatggcctccggaaaccccgcaaatttaggcctctgactccagtattgccgactgtaagctacttcattatgatggcatgtatgtagatgtatcaatctgctcaggaagctcctttatatccacctcaaacctctcctggacctggttgagcacatcagaatctgaagttgttgtatcaaatgtaattgcaagacccttggttcctaacctaccatcctttccaaccctgggccggtttgtctcagctgaattttgccttttcgtttttgatggcaaaaa

SEQ ID NO: 11982 - DNA, 488 bp, Gossypium hirsutum
  Clone ID: LIB3829-016-Q1-N6-C6
gaaaagttaagggatatttgatttaatattttactttctacaataaggaaactatgcttttaactcactcccattgtcaacaagcttaagaccccaactcatgtcctcacagtgtcttacatgaggaacaactgcacctgtgtcaatgcctcttttggctttacagtcataaaagggtggggcatggaaacatggctccattgacattactctaccacaaggtggatctggggccgtccggttctccggcttgtacagaatccacggcttcaatcctccaaggctttgagcaacataaccgaaagttgaccatgagcttgtgatcagcacatctgtcaagctcaataaatacatttcggcccatgctttcctattgtgaaactgcttctctgtttgctgatactcttcgtggctcgggttggtaaaaaccgatgacctcccctgtcacagttgggatgttcccagtacatgtcccttaatctctcaaa

SEQ ID NO: 11983 - DNA, 479 bp, Gossypium hirsutum
  Clone ID: LIB3829-016-Q1-N6-C7
cacctaaaaaaaaggcaatttattattaccataaaatataaggtggtacataaattctacaggcgttaaacaccatatgtgagagctttactctctttcaaataaccatacaaatcacaaatttcagtaataaaaaggaaaataaaataaataaaaatgcaaagcaaatggtagtgcagcctgggctagccaacatgaacattagaaccttgtttaagcagagatactatgaagcaccacggtctcaacagtgagccctggtccgaaaccaaacaggacaccccactcgagcccttcacccgtggttccaagtccatcttcctttgatttcttcctcatctcatccaatatgaacagcacacaagcacttgacatgttcccatattctgaaagcacgtgcctcgtggctcggagtttttcgggtttaagggctagcttcgcctcaacctgatccaatatggctggaccaccggggtgag

SEQ ID NO: 11984 - DNA, 486 bp, Gossypium hirsutum
  Clone ID: LIB3829-016-Q1-N6-C8
aatagaaacaaacaaagagagagccaatattttgtgttgtcaatgcaacaaatcatgtcaaacttgatgcttacattccaatatagtttatctaccataaataagtaaaaaaactatagctatatatgatatttaattgtttaagctatatatatattactttattccgtgatccgagatggatacctgaggcaggttgaaccatgattttaccacgaccgtgaaactcgtcaaacttggaaatcagaaaccaatgaatggatgcagatgaagttatgaaataatgaggcataaggtgattttttcaaatcttacgaatgccgggactcgggagctactgattcgactcggattttgcagctgtgttcccgttctgctgttgctggtggaactagttgctggtgtagctggaacatctggcggctaatgggaagctgctgcgagaccatgcctttggatggatcagaatcgccacctagttcttga

SEQ ID NO: 11985 - DNA, 415 bp, Gossypium hirsutum
  Clone ID: LIB3829-016-Q1-N6-C9
gcgtagaacaaacgtctccatttcataaccgaaacagaaaaccaagtattatattaccacgaaagcactcaaacagcgttcatttccataaaagaaaattatttggactccgattacacatacataacaataaaccaagatgctgggccaccacccatctcaccccactacttttctggtaaaacttcttccagactgcatctgttgggttggtctaataaacatgtcattcttagattgcgcagtccactgtaccccagctttcattgcggctggcctttgcctgcgatttacaatggtcacatttgccaacttctccactacatccgaagctccaacagtagttctatgcttgccgatggacattggactctttcttccaggtggtcgataccttgtttgtttcacagtgttc

SEQ ID NO: 11986 - DNA, 490 bp, Gossypium hirsutum
  Clone ID: LIB3829-016-Q1-N6-D1
ggaagggaaaatattaatcttattgcaaatcttgattgattcatggatttacattgtcacacctcacaaatattttcaactgaataatgtttcatactgtcttacaagagttcactaaaatggatagaagagaacaagttaaaattgccttggcttagcaacaatggtggaatgcttcaaaatatgaagactgaactgtccacctttctccgtggtatcaatttgagattgcccagggggaggcaagagctcaaaattctgtaccaatcgacccaaagtaataccaaggatgggcaatgcaagaataattcctgggcaacttcttctccccacgccaaaggggaggtagcggaaatcattaccattggcctcaaccttggcttcctcttcaaagaacctttcaggcctaaattcttcgggatttttccagttgcaagggttgttggcaagccaccatgcatttaccaagattttgctctcagcagggata

SEQ ID NO: 11987 - DNA, 486 bp, Gossypium hirsutum
  Clone ID: LIB3829-016-Q1-N6-D10
gacatggaagtgtatcatttcatatatatactcagatcaattcggaaatggaaaggaaataataaaaatacaaatattcatgaaacccttagactaccctttctctagtctctagtatattagcagccaaaaaatgcctcttttgctaccaccaaaaaggagaaaaataatgagggcaaactacaaaatcattatcacatccctccaaaaaaaaacactaaaatagcacattattccaaattgataagaactacggttttttctcctaaaaataaccttcaataaaaaacaaaccatgctcttaaggcttaatagctgcccattggtggcataccaaaaggtggcatcgaaggcggcattcccattcctcccatgggtggtgagtggtggagcaaaacctcctcccattccaggcattggtggtgcaggtaaggctagaggtagcaactgagcatacatgttctgttgtgcaatcacttccttctc

SEQ ID NO: 11988 - DNA, 489 bp, Gossypium hirsutum
  Clone ID: LIB3829-016-Q1-N6-D11
gcatccacaaaccattcttttattaaatccaatacaaaaatagggcaccaaacctacataattgctcattcaatccctgaaatttcttaaaatcctagtgattaaatggtaagaccttcaggagcagcagctgcaggagcctttggcttggctttctcaacgacaatagcttgagtcgtaagcaccattcccgcaaccgaagccgcgttctgcaacgcacatcttgtcacctttgccgggtcaataactccagcttccagcatgttctcatacgtgtctgtcattgcattgtaaccgatctcccaatcgctgttctttactttctccaccactacctcaccttccattcctgcattttgagctatcaacgaggccggtgctaccaaagccttctgcacaatgtcggctcctatgcgctcttcagagtcttcaagcttatccttaattgcagggacgcaagtcgagagatgaactaatgcagcaccacca

SEQ ID NO: 11989 - DNA, 363 bp, Gossypium hirsutum
  unsure (1)..(363): unsure at all n locations; Clone ID: LIB3829-016-Q1-N6-D12
ggggggggggggggggggggggggggggggcgggctgcgtntnntnntntnnnntcccnnnaaacaaaaaaaaaaaaaaaaaaaaggaggggagggagaggggggagagagtgaaaagaactaaaaccacaaaaaaaaaaaaaagaagaagggaggaagagggcccccccccccccccccccccccccaccagagcccggcaggggggagggaaaggagaaagaagggggagcgcatttcaatcgttatcaaccccacacccccccccccccccccccccccgggacggggtaagaatttaagtnggggtgtgggggggggggggggggagaaaaaaaaaaaaaaaaaaaagggggggggggg

SEQ ID NO: 11990 - DNA, 496 bp, Gossypium hirsutum
  Clone ID: LIB3829-016-Q1-N6-D2
agtagggcaaaaatggtaaaaaaataaaatgtaggacccatatttttgttttcatagattacattgtatggtacaaaagtcagtaaaaacaatgcagcaccaaccatagtaactacccttttataattcatgtcaacatgagatcattccccacatgtttaggccgaagacaaacccggatttcgtgttcttcgggcaccatccgtaattttggaaccataatctcaagcacagaacctggcccgtcgagatatgcttctatgtcggcatcttcggggattcgagttgacaatgggatttctctaacgaattcgccgggagggcaatgctcgggagaggggtctgtaagctttaacgtccggttgtgtcgtttgatgaacggcatacccgatgtgctcaaacaagatagttttataataccatgagtgaagtgtgttcctccatgagacctttacccttgtgaagatcaacaaaaggcaagctgataatgatcaag

SEQ ID NO: 11991 - DNA, 479 bp, Gossypium hirsutum
  Clone ID: LIB3829-016-Q1-N6-D3
aaaagaaatgccgttcattaattgtttctgctcagtttatactaaacataactctaacacaaggtatataacacgtttatgaatgatccaatttcaaaatatccggggaaacgatgggcatttcatagaactacaattcgcagtttccgaactccggtgctagtctttgactgaagtccgtaggatcttcacatcatgaataggcctgtcattgttgtcggtttggacactaccaagcctcttgataatttccattcccctacatactctcccaaatattgggtgtttaccatctaatgacggcgctggagataaagtaatgaagaactgacttccatttgaattcggacccgcattagccatagataaaataccagctccagtatgttttaactcggaccttatctcatcatcgaatacaggaccataaatagattctccaccttttccagtcccagttggatctccaccctgaacta

SEQ ID NO: 11992 - DNA, 480 bp, Gossypium hirsutum
  Clone ID: LIB3829-016-Q1-N6-D4
aaagtaaatccaaaatcagataatacaaaaattacaaaatatctgacctctcatcaaactacaacataactatgtaaaaataaaaaatcaaactggaattgctacaacaaaagagcataaatatttgagcctttggaagtaaacagcgtcattctaaccatcatatattgcaagtaccagcaggcaatacctaatatgccgctggttgtgacatgagcttgaagctatttcaatatagaagaaaatataaccaactttacacaatggcaagcttagcttggactgggatcataagaatctccatcagatgacaccattaaaaacaagacaacatcaggaatccgaacatcccacatctaatcctatcaatctgatctgccatggatgactgctaagaacacaggtactgggaacgtcaacatcatacatgagaaactagagacatgaatatgttttccttttcaagaggctgctgcagtg

SEQ ID NO: 11993 - DNA, 456 bp, Gossypium hirsutum
  Clone ID: LIB3829-016-Q1-N6-D5
actctcggcgaactgttacgttgactaaatgcattctgacattcaaaccaatacttacaaataattaaaaaggaatttccgtaccatagaaatatccaaaataaacatagattaaaaactctatccaacgggaatttaaaaaaaaaaaattgttcttatcggtctcccacatggaaaccaaacagaaatgctacagttcaccttatttaaacatgtattaaaaaaattgtctctcgtaatggaaaacaaaaagatttttaaaaaaaagtgtcaaaatttaagcatgttatggttgaaattttgcattcggggagctttttaacttttcaaacgagaatgatccacacctataacttaaaactctttagatgtttaaccccaaaaagggattgataaatatattacaatacctaacgccgacctccggttttcttagccgcaattggcggaagtaaa

SEQ ID NO: 11994 - DNA, 475 bp, Gossypium hirsutum
  Clone ID: LIB3829-016-Q1-N6-D6
catcagattataaaaatgaaaatataaatatgatggtagctcaagcctgcatgagtttcttcatcatccaatcccctagtttacatgcattttgtgtagaaataaaaatggaagggcatgcaactagttttcacatttcattattaaattaatttgagagctttataatgttccaagctgacctgagtggcactttttatatggtcttgaatgacttcttatcaacccaaaacttcattgtatttaaaaacgcaatcattatagccgtcctccgagaaactgggctacttcaggatgttttaccattccgatcttgagtgaatcacacttaaactgagcataaagattagtctctattccgcgacccatgccttccaaaataactaggtctgcatcacttgccaggtaggcgagctcttgtgatattctcgtaagatcaataaccggcaaatcattaccagaattggcaatcaaa

SEQ ID NO: 11995 - DNA, 479 bp, Gossypium hirsutum
  Clone ID: LIB3829-016-Q1-N6-D7
acaaagcaaaggctctaggcctaaaaccatgctttcaagttctagtctacggttacatcatcataattgtggagacaagatttactgatcccattaacgttcatgcatgctaaatgtaaatgtaaatgctcgtacacgcaaggagaaaagcacttaagggcaaaataattaagaggaaaagatgaagcctgcctctaagacagatcatgaggatggagctttctctttcagggattctttaactgcattcaacagtaatggcattaacttctggttagtgacaatgatgcctgtgtccacatcaagatgctttcccttggaaaaatccaagggctgccctgcagcatctgtgaccacacccccagcttcagttacaacaatacacccagcagcatgatcccatattttctctcgatatcctttgtgaggaaaacgcagatatatggctccatctcctctggacagagcaccatattttg

SEQ ID NO: 11996 - DNA, 480 bp, Gossypium hirsutum
  Clone ID: LIB3829-016-Q1-N6-D8
ggaagggaaaatattaatcttattgcaaatcttgattgattcatggatttacattgtcacacctcacaaatattttcaactgaataatgtttcatactgtctttcaagagttcactaaaatggatagaagagaacaagttaaaattgccttggcttagcaacaatggtggaatgcttcaaaatatgaagactgaactgtccacctttctccgtggtatcaatttgagattgcccagggggaggcaagagctcaaaattctgtaccaaacgacccaaagtaataccaaggatgggcaatgcaagaataattcctgggcaacttcttctccccacgccaaaggggaggtagcggaaatcattgccgttggcctcaaccttggcttcctcttcaaagaacctttcaggcctaaattcttcgggatttttccagttgcaggggttgttggcaagccaccatgcatttaccaagattttgctctc

SEQ ID NO: 11997 - DNA, 478 bp, Gossypium hirsutum
  Clone ID: LIB3829-016-Q1-N6-D9
aaaacacagcagatgtctacttctatcatttagcataaacttgaaacttcgtaactaatttatttacaggaaagatccaactttatagctacactatataagctcctgataaatatatatatgttgagatttgctcacaagcacatttgcattgaatgccgcattctgaaatgggagctgttagaagttatgattcagggataaggaactatgatgaaaggtggtgatatttacccacaagaacaaatgcggatgtgagacatttatcagcaactatgatggggtttcatcatcagaggaactataatgccgccttacattgagtccgggaaaaactgatggagtgggagggttttgtaatggacgtgccgaactgtatatcgttctctcattcacctttgcaacctctttgcacacttgatcaagaatggaaaggaaatccctaacgaccataaagattcggaatggatgtgcttct

SEQ ID NO: 11998 - DNA, 239 bp, Gossypium hirsutum
  Clone ID: LIB3829-016-Q1-N6-E1
aaaggtaagcataactttgcttgcagaattcatcaaaggagaggactttgaatatcacacaacaagtgaacgaattcctttttgagccagacgtcaaataaaaagcacctggttttttatcctatcagaaaggagcccacatcctaagaacacatattgattagccaggagccaggctgaagcgataaacctctaacagagatagcaaaaattcaacgcataaacactggaaagtacaa

SEQ ID NO: 11999 - DNA, 453 bp, Gossypium hirsutum
  Clone ID: LIB3829-016-Q1-N6-E10
ccattcaaagagaaaccatacatagatgcaaccggtaaacaaagactagaaattatttaaaaggccatcaaagggcacaatccttcacgtaaaaccagaaaacccacattaaggaagaccttaaggcttaaaacccaccacgaaaacaaaaaacaaggtgaagagtggactccttttgaatattgtaatcagccaaagtccttccattttccagctgtttcccagcaaaaatcaacctttgctgatctgggggaattccttctttgacctgaatcttcgctttcacgttatcaatcgtatccgagctctccacttctaaagtaatggtcttaccggccaaagtcttgacaaaaatctgcatcccacctcgaaaacgtaaaaccagatgaagagtcgattccttctggatattgaaatcggctaaagtccgcccgtcctcgagttgctttccgg

SEQ ID NO: 12000 - DNA, 473 bp, Gossypium hirsutum
  Clone ID: LIB3829-016-Q1-N6-E11
gaaggaatcaatttgctcatataaacatgaaagaaaatattcagacaattgaaccatcaaagggcatataaaagcatctaaggtattttgaacaacgtatagttcttaaacagaaacctgtctattgctgaacctatacttttttcatccaacttaccaaatctattatgcgtatgccctgttagctttgccttccaatttagggtttacctgaaaagcaaaacaaataaccataaacggaaatattgggtgcataatttaaggcgcatataattgcctctgaggatggactccggtatgggtatggtaaaggttgagttgataaatggccctggacaccaagtctttcaaatcaggatgttgtgcaaacattgttcgatctgccccttcaatggcagtcaagaccctagcttgttccaaagctttatgatcaccggcatgaatggcaaggtagcaaagcagtaccacagcat

SEQ ID NO: 12001 - DNA, 470 bp, Gossypium hirsutum
  Clone ID: LIB3829-016-Q1-N6-E2
aaacatgaattcctatcacttaacacatacaacaaacatagattctggtaaagaattacaaatccatattttcagtaactacataaataagcaagcattcattccatcaacagaagggtttttcaaatgtattattatatgccactgacaggcaagagcatatagctataaacaatcacaaacctggaaatgcatatgcaacagtggcaacttagccgtagcatcggattggatcgttgcaacctttctctgcagattgtttgaaaccaaatcgacctcctttcgcaaggtactgctggtgatatttctctgctctataaaacttcttggcgggtagaagctctgtaacaatctttcggttcaacagtttctgttgtttttccatggactcccgcgctgcattctcctgctctggtgtgtaatagtatataccggatctgtattgtgtcccaacatcattcccctggcga

SEQ ID NO: 12002 - DNA, 99 bp, Gossypium hirsutum
  unsure (1)..(99): unsure at all n locations; Clone ID: LIB3829-016-Q1-N6-E3
ggtaaatactatgagcaaccaaggcatgcattattgtctaacatanacaccaaatagcaatcaagttctgccaagaaataacttcatgttcatgctttt

SEQ ID NO: 12003 - DNA, 476 bp, Gossypium hirsutum
  Clone ID: LIB3829-016-Q1-N6-E4
cagtccatgaactgcaatcttattgatttcataaaaccaacattactcaacatagtagatttagtagtacacaattataacaaaatataacatggtaatacagttcgagaacgtagatctcgagtataggactcaatttattatttgtaacattaatttaaaaccaaaaccaaacttttacttgtctatatgagcatgattttaattggaaactgggggggagaggccagcaaagacatggagcaactccccgttgtcgatgtgccttgcaggatcggaaaaggcataaaggaagaactccatgaaatctaagtccttgaaaagccgaggatgttggtcatctataaactctttgggtgtcttgattatagtaccctcatttggaatgacgaaagctgctatagagtatcgatctttgtctccgctcatcatcactctgtgattcactgatttcaatctcccattgctccaagcct

SEQ ID NO: 12004 - DNA, 380 bp, Gossypium hirsutum
  Clone ID: LIB3829-016-Q1-N6-E5
acctatattgtgtgattacttaaattcggaaacaacatatacgcacgttaatcctatcaacagggtggaaattcgcagactcaaatggagaaatgaagaaaaaaaaaaaaaacaaaaagataacaccggaagaagcactgtgcagcataaagtccagagcacaacccaaaacaaaaaaaggaagaacccaagagcactgcaaaaaaaacaaaaatcttttaactaaaaggcgacccccaaccctccaaagcggaaagaaccacccatgtcaaccataaaataagccccccccccaaaaaaaaaccccagagcttgatccttttagccggaacacggcccctgctataaccggaaaaataggcaacactgcctgacatgcc

SEQ ID NO: 12005 - DNA, 407 bp, Gossypium hirsutum
  Clone ID: LIB3829-016-Q1-N6-E6
cccatatatgagcccgcataaaagccttggggaaaacagggccacaggccgcccccaggaaaaaaggggcaccacactgaaagggccacaaaacacccaaacaggaagcaaaaaaagaaaagccggggaagccaaaaaagcgggccaaccaaaaaaaaaggggtcgcgccaaaagcccccagaaacaaccgggaaacagaaaaagccagaagccgggggggtccccaagggggagctaaaaaggcggattggggagggggccccagggcggtttttctttaaaaaaaccggacggccaccagcaaaaagaccttccccccccggcccggaaagaggggcattaagagggccccccaggaggggccccttttgcaaaaatcccagaggagggaggtaaaaggccccaa

SEQ ID NO: 12006 - DNA, 456 bp, Gossypium hirsutum
  unsure (1)..(456): unsure at all n locations; Clone ID: LIB3829-016-Q1-N6-E7
ccaccaattgttttgtatgtaaattttttatagatatattaagtacatgattttttttcacctacatctagagtctgccacattgtcaatcctcaaaatgctatacaattgcaataaattagagaacaagagctgcataaaatcttcacacagcctgaagaagttgaccatcttcgttataggcaatctttggaggcgatctcatcacctttacccgcaatgctgccttcttatcggaaccaaactcaataacatcncgagggtcggagtcgaatagcaacatttgaaggtatccaagatcttctcccttcatgctcgatataggtcccatgttcactctgcatgtcaattaggaagaatgcaccttctttatagatgatttgagccatgtgtttttgatacctgaggtngaacgtatcaccactgattttcctggaaaattctcattcttttcac

SEQ ID NO: 12007 - DNA, 481 bp, Gossypium hirsutum
  Clone ID: LIB3829-016-Q1-N6-E8
gtaataaaaggaggtttatacagtgcatatgctatttaacaagtgaataacacagccttaagtttatatccccctatagcgaaacaaaggagaaatcaagtagcataagttcataatactagtaaagagagaacagcagccacgaaagatcgttaatatcagcacttagctatatccgacttgttgctgttgctgtggctgttgataatttccatacccaggataccctccatagtacatgttggggtcttgtggggcagcgccatagccgtaaccatatccttggctgtatccataatatccagcgttccactggtttggatctgcttgggcctgcttgtttgatgtgctacgaccccatgaaagccgaatactttgtccacccaactgagtcccgttcagtattcggagtgcttcttcagcacaactcctatcagcaaattgaacaaatccacaacgcttgttttgtggaatcttcaca

SEQ ID NO: 12008 - DNA, 450 bp, Gossypium hirsutum
  Clone ID: LIB3829-016-Q1-N6-F1
aaaactaataaaggtattatattaaagaataatattttcaatgggtcttcatacacttcactaaatttatcaaaaaaaaaaaaaaaatttgcaaaatagagtttctttactgtaatcacaatcacagcttatacatgcatatctctcttcattatgctattgatactagcattcatggaaatagataaaatacccaaaaaactgcggctgttactatagcaatgggagcttgaaacaattttaaaaaagtatgtccaaatagagaataatccatcctgccatggaaaaaactgcaaaaatatgaacccaaaacaacacagcagctgactcctttccacatcctcttaaattagcaacagccccaaaaagcacaaatgttggcattgaatgctgaaaaaaaaaaacaaatcgaaacattttatcaccagcaggaagaaaaccaagcttatc

SEQ ID NO: 12009 - DNA, 478 bp, Gossypium hirsutum
  Clone ID: LIB3829-016-Q1-N6-F10
gatatctccaggatttcttcatctttattcataacatcaaacatacgcaaacacaacgataactgtaacccccctacccctatcaacattttattgaactgtaactaacataggatacctagttggcctcttaaaacagacaaagaccagaccccaaaccaaaccaaactgctaaacaacaaagcagacagtattgaaaagatcccatccccagattgcatcattttcatttcttagaaaggaggagcatagagctggagaaccttctgccaggacggtctgctgctaatatcatcccaccaagcactcacatgcttcctgctggttatcatgtattcctttcccatttgacccaccaagtactgagtaaatggcaggtggctcaggtcagcaaggctgaagaaatcaccggctaagtacttgttctttgacagcctctcctcataaatatccagcactttgcctagcttttcctcgc

SEQ ID NO: 12010 - DNA, 460 bp, Gossypium hirsutum
  unsure (1)..(460): unsure at all n locations; Clone ID: LIB3829-016-Q1-N6-F12
aaaaaaaaaaaaaaagggcccccgcgaataaaaaaaaaaaaaacccccaaaaaaaaaaaaaaaaaaaaaaaggcggggggggggggggggggcccccccctttttccaaaaaaaaattttttaaaaaaaaaaaaaaaccccaccccccccccccaaaaaaaaaaaaaaaaaaaannnggaaaaagccgggggtttcccctccttctctccctttaagggggggccggggtgggggggaacacccccccaccccccccccccccccctactcctcttttgagagtttttattttggggggggggggggggggggggggccccccccccccccnccnaaaaaaaaaaaaaatttttttttaaaaaaaaaaaaaaaaaaaaaaaaaaanaannnnnnngngggggggtgggggggggggcgggggggagaaaaaaccaacccccccccggggtgccccccccc

SEQ ID NO: 12011 - DNA, 131 bp, Gossypium hirsutum
  Clone ID: LIB3829-016-Q1-N6-F2
actggtaatatcgagggtatcaattactggaatgttaaatgttcagagtgcaaatacaagttctttttggccctgaaacaagtggcattctatttgatgatctaattgttcaagcatgtaccatatttaca

SEQ ID NO: 12012 - DNA, 476 bp, Gossypium hirsutum
  Clone ID: LIB3829-016-Q1-N6-F3
aaaaagtaaaacattgggtataattggttttctaactggtgcaaaaccccagttatccacacattcaaaaagagttgataaaacaaaattaatccaaccaatgcatttcaaaacataatagagaatcaacataaactaaaagctcagagaataacaaaacctaaacatacgatagacggaaattcctgacaaatttgcagatttatgccttgagccgaccatagaatttctgtttttcttgtgtagtctggaaacgtccatgcccaaattttgatgaggtgtcgatgaacttgagcttgatttcctctagagctacacgagatgtctggttaatcaaagactggcgggagtgtaaccaccctcttcttaggtccaacacagccacctttgatcatcagataatcacccttcacaacaccatagtgagggaagccaccaattggagtgatatctttctcagtcctgtcatagtcggt

SEQ ID NO: 12013 - DNA, 480 bp, Gossypium hirsutum
  Clone ID: LIB3829-016-Q1-N6-F4
gaaagaagagagctgcaatatgggcacttgacatgatattgcatacagatatccaatcggtgattggaatttcttttagcattgtgctacattgaaaaagctaatatctatatagaaccgaattagtcttgatactcctcctcttcctgctaatacatctgcttgatcggctgcagttgcatcctggtactgctgatactccgacaccagatcattcatgccgctttctgcttctgtgaactccatctagtccataccttcgcccgtgtaccaatgcaagaaagcctttctcctaaacatggctgtgaactgttcactcacacgcctgaacatatcctgtatcgaagccgaggttgcaatgaatgttgaggccattttcaacccattcggagggatatagaacactgttgatttgacattggttgggatccattccacaaagaaggatgaattgttggtctggacattgagcatgtgctc

SEQ ID NO: 12014 - DNA, 476 bp, Gossypium hirsutum
  Clone ID: LIB3829-016-Q1-N6-F5
gaatcaattgaatttgttgataaacatagcactaggcattgtattcacaaacattgatttttttttctctctttacaatgaaaactgggttcgggtttcggattctgaagctgagtctgctgtcagagattaatttagcaagatgtagacctgcaaatagggttttgttcttggttttggcattgaacatggcacgagctgactttgtctctcagctcctggaaagccctcattgtttcgacatcgaatcctccagcaaactgatgtacgcggaatgcaaatctaactccttgaacaatcagctccttttcctcaggcccgcccccaactgcttcgagctcggcagatactcgtctcatgtacttcatcgctaatttgaccgacgctagcttgatctggcacacaattccagtttcaagcatccaatccataggaatttggaaacctttgtatcggcttgtagcagattctctcat

SEQ ID NO: 12015 - DNA, 478 bp, Gossypium hirsutum
  Clone ID: LIB3829-016-Q1-N6-F6
ccccgattatatatggaattttctaaaaaacaacacaccaacacagcttatttaaccttagctagctactttatctagctgagctggaaccttcttccactccttccatatcatcatcatcaacctcactgcaccttgttgcagtcagtggaggggctgatgctgtaagggagttggagaccacatttagcaggtaggccggctgcgagattgaggttattgctggtgtacggaattccgttcaccgccgatttgatgcacttgcacacgttttggcggtccggggaggtctgaacctcgccgtagagtgcttttaccccactgcagcatgcagcagcgggtgtaccgccgttttgtacgtaggacaagcacgggatcaagtggttcaccacgtcgctgcacgtgatggcggctttggctgccttgggtgcactcatcatcgtcatgcacaccatgagaatcatggaaaccaacttaa

SEQ ID NO: 12016 - DNA, 493 bp, Gossypium hirsutum
  Clone ID: LIB3829-016-Q1-N6-F7
ccttccccctctttcctcctctcctttttttttttttttttttttttttttttttttttagacgagagcaaaaatcaacatttttcatttaacaaaaaggaataataggaacaatacagttttaacttttttttttgggtggaccattatcatcatcatcatcattattatcaatggctttggaaaccctttacaaggggaaatttttcattgcctgatttggcctttgagaggagatggtctttaaagtaaaaaaggggctaaactaaattttcttaggaaaattggaaatggggaacccggcaaagatgggaatcagggggcctttagccaatggttgttttcttttaaaatatcttaaacagcagtcccccttgtgtagcaaagaagggggcaaaaacaagggattcaacagccatgagcttgatgagtatgttcagggatggcccaaatgtatcctttaaagggtctccaatgggtgtcaccaataaca

SEQ ID NO: 12017 - DNA, 484 bp, Gossypium hirsutum
  Clone ID: LIB3829-016-Q1-N6-F8
gcttaaaacaagtaccaccatcttcaaataagtcccaatatgtttgtgcaaaacacaattacacaagtgccacagaaaataaaaagagagatcaggtccacacatcataaactaatctgcatctttcaaacatctgactcgcaaagcacccataaagatgggtgattttgtcatattacacaacatttttacaagagtgcatcaaacagtggctgcgttctcttcactttcaaacattcgaaccacctctgccaccccctcggcgatttccttctggatgacactatctggcatgtcaaatgtcctcctcattgaaagtgatctcccttggggctgaggatccaccacatcaagcatcgcttccagttcgtctaccattgacttcttagcagctcgcaccattagatcagctccctcaatggcatcaacagtaaggagcagcacaatgattttctcacagaaccttttggcgttctactgcatc

SEQ ID NO: 12018 - DNA, 481 bp, Gossypium hirsutum
  unsure (1)..(481): unsure at all n locations; Clone ID: LIB3829-016-Q1-N6-G1
aaaacatagaattcctttgtttctgtattcatcaaatgatgaactttatatcatacaacaatgaaagagttacttttgtgccagagtcaaataaaatgcaccgtttttttttcctatcagaagcagcataaatctaagaacacaagtgattagtagtagtagctcaagcagaaaccctacagtgatacaaaaattcaacgcataacacttgaattacaaaatatagttacgactacagttataaaagaatgtgataataatcagaacttcatttcagccgcagctcaaccgagaatcagctgctcgcaatgtcatctgacggcggggaactccgatttcacatgcattcactctagcagcaaaacggagggagcacagagactcacccaccgaagaaggatnccggtgatacattcacaaacataaggggtttttgaatctccaccaagacaaggctggagaagatatgtcagcttggaat

SEQ ID NO: 12019 - DNA, 480 bp, Gossypium hirsutum
  Clone ID: LIB3829-016-Q1-N6-G10
agagtgtggaaaatagttttattaatatcaaggaaaggaaaatctgtgttttaatttagattatgaggcaagggttgtacttgggcagctatcaacagtgcaagccaagatgtccctatagtcccgggatattgtgaaagaatcatacacttttccatcactgctcttcttgtattcgaataagaggctcaaatggtcaaacgccgtgagttttacgaatccataatcgtagtctttgaagaaactccatttggtgtttagggttgtaaattctgcgaggcctgctcctccgccaccggcaaccacatgtatcgtcccgttcatggcgcctttgtaatgttgtttctccttgttggtgcatatattctggtaaatcggacatgtacgttcatagtggtgtgcatggccatagatggcaatgtcaactttgtatttctgccaaagtttttggaggctctcccttcccattggttccccaaa

SEQ ID NO: 12020 - DNA, 635 bp, Gossypium hirsutum
  unsure (1)..(635): unsure at all n locations; Clone ID: LIB3829-016-Q1-N6-G11
tttaaaaaaaaaaaaaaaanaaaannccccaaaaaaaggagggttttaaaaaaaaagcccccacccccttttttttttaaaaaagggaaaaaaaaaattgggaaccccccccggggggggggggcctcccccccccacaaaaaaaaaaaaaaaaaaaaacccccccccccccccccccccccggggggggaaaatnnccccctcctcctttactcttccaaaacaaaaaaaaaaaacctctttttttaaaagggggggggggaggttttttttttaataaaaaaaaaaaaaggggggggaaaaaaaaaaaaaaaaccccccccccccccctccctttttttttggaaaaaaaaaaaaaaaaccccccccccggaaaaaaaaaaaagaaaggggggaaaaannnnnnnnccccccaatttttttttttttttggggggggggtggggaaaaaaaaaaaaacccacaaaccccggggggaggggtggaaaaaaaaaaattttttttttttttataaaaaaaaaaaacacccccaaaaaaaaaaaaaattttttttttttttttttgaaaaaaggaaaaaaaaaaaaaaacacctttttttaaaaaaaaaaaagggggcccccgggttttattttgcg

SEQ ID NO: 12021 - DNA, 487 bp, Gossypium hirsutum
  Clone ID: LIB3829-016-Q1-N6-G12
gattaacaacactgcatttaataaataaacatatcatggttaatccccttcaaagaattagggatcacttccagaactctgttttcccctagcaacatatgcaaactcacaagctccagacaacaagggactggagatgttaccgttagcatactacacgcgtgattgcaaatttatgaacattcaactacaacagtccagatcctaccaaaatttctaagcaaatacctcagaatcgatttgctgaatattggggaaaatttgtttcagggtagcattgtagttaggagactgcgcacatggattattttcaaggtagatagtagtgagcttttctcttgaaccagaaacaccctcagctatgtcctcaagtgattgataatagcacagaaagttgcttcatcaacagtactaacataagctccaccttctataattaagcctatggtagctctagtcaataatcttcttccttggaacattggtg

SEQ ID NO: 12022 - DNA, 460 bp, Gossypium hirsutum
  Clone ID: LIB3829-016-Q1-N6-G2
attaagttcttcttaattaccgaaaaaaaagacccctgttacattttgtttgtctccttatatagccgattttaatacatctttctatttctattattttgcattgtttttgcctttgctttgcgtgctgtccttgcaggtaattgatggaaatagctggtggcgttggtggcagaaactagagcggcggtagacgttaggagcccccagggacgtgcggcgccttagctagggtttcagaaaagctgaaaccctatgctgacctttgttgggccttgctgtaatgggcttgtttgggtaggtttgatccttgggtctctgcttgttgggcccgggcataaattaggctgtacacacagctttagaagtaccttttcgttgtatccatctgaattctgaataacttctggtgccatccagaatggtgttcctacaaaagtctttctctgcgatatcgtcc

SEQ ID NO: 12023 - DNA, 479 bp, Gossypium hirsutum
  Clone ID: LIB3829-016-Q1-N6-G3
aactgataagattctactaacgagctccaactaaagatcggaggaatagtacaataaatcaatccccatcaatattactaaatgggataattacaaatcttgatcaagatgaccttatttgaagataatattattaaaaggcataattaccaattctgatctctgataaatagattgtggaccttcagttagacacttaaacctgaaccgcgaaacttttgcagtgttcgttggtctaaacgtcgagccatttcagttgtcaaataattcttccagtctccaaccttccctttccggaagaaaatgttattttccatcgccaaatctccttgcccgtcacgatgtttcccagttttatttacttccaagccatttaaattctcgaaactgcacagctgtacaatgttttcaggcacccccttgttgttgttcctctgacgagaaaggataacccataaattctgctattttcttaagat

SEQ ID NO: 12024 - DNA, 490 bp, Gossypium hirsutum
  unsure (1)..(490): unsure at all n locations; Clone ID: LIB3829-016-Q1-N6-G4
gaacttactatataatttttcttgcattagaaaaaatattatatacacatacatataatctaattgtatatagctgtatcgtatgtctcttgccacagagaagtaaagccattttctaactgactttcgtaacaattcaaaggaaaatcatttccaaattgcaccaagtagccatccattgacatctcttgggcatgatcttctacataccaattcatgtcatcgcttggagaggaaggcaccatttccatttcactccattcaaagtaattgttgcttccaatgtctccttcaatactgcatgaaccagcattcaccattctaatctcagcttctagagattccatcaaactagttacctgctcctcattgcagtactcctcacactgtgattcctctaacaacgacattagaagaccggcatcgatttcggggactccgatttcttccacgccatntactttcgttggtcaatcctggnattttccgt

SEQ ID NO: 12025 - DNA, 484 bp, Gossypium hirsutum
  Clone ID: LIB3829-016-Q1-N6-G5
agtcaggcatagatactctggtatgctggaacagtaaattacagtcactcatgtatgatacaatctctctcaatagtttcctacacacaaaaagacaacaatttggctttcaacataagatctctattgaaaccctccacacccttggctgagccaagttcaattacatacctaatttatgccaaaaaaacatctatctcctgcattgtgcatgcaattcatctggtagtaacccaacaaggcatcttcagtttccctctactccacaatgggttttaaacttggcccgcacagaacacaaatatcgaacctcgtataattaatatatatatatatagtcaaccaaccatctcgatgtcacttggtgtcttttcttgatcatttgcggagttaattgatgctagaagatcatctatctttagaggagaatgtcgaaccatgaactggaacaaaacctttgagtaactatctgcaaaagcacgtg

SEQ ID NO: 12026 - DNA, 429 bp, Gossypium hirsutum
  Clone ID: LIB3829-016-Q1-N6-G6
ggcaaaaaaggaacgccttccattacaaaaaaggaaatcataaaatgggttatgccaaaacctacattggaaaacgggaaaacactttttaaaaagggtaaggggggccccaaaaatacaacgggaaaaaaattggggttcctactaaagggaaaggttttaaaaccttatcacctacgggtttacgggatcttgggtttttttctttttttttttcttttggctttaaaaaaccccgggcccattaacagaaacagggggttccccgctcccctgggtctttttttttttttttttcaaaaacttttttggatcgggggaaaaaacttaaaccttaacctgggtctttttttttttttccttcccaacctttttttaagtttaagaaaaagaatccccttcactctttttaggggccttcttcttttt

SEQ ID NO: 12027 - DNA, 489 bp, Gossypium hirsutum
  Clone ID: LIB3829-016-Q1-N6-G7
gtaaatgctggctcaacctttcacatttaataatttatgatgtacagattccgcatatcaaatggttgcgcaaggagaaagtttttgttctctcaagaaacaaaaattgttaagcaagaaagacttgcccaaatttagtagattataaaacttctctaacctccttaattaactttatgtctcaggagtctttctctttttgtcagatgctgaagccgcctcagattgagcttgaccaaatacagacctgcacttgcaagtaaaaaatcaactttacatacaaggattagaggatggttaaaagaatcccaaaacactaaaaggatgtttagggtttcacaggaggagaaattgatgaagctgattccagacaaccagcacttctgtcggagaaaagttcgagaagtcacagaattttttgttattttgagaaccaactgaacttttaattgtttgatagataagacttttgcatacatgaggagacga

SEQ ID NO: 12028 - DNA, 472 bp, Gossypium hirsutum
  unsure (1)..(472): unsure at all n locations; Clone ID: LIB3829-016-Q1-N6-G8
acacaaacattattntggtattttacatcatccaatcataatacatcatcaaatcaacaagtccaaggttaatgataaacttacaccaccgcaaactatgtttgctttatttaggctaccactgccatacacaatcatacatgccaaacgggcttagtagaaactataacatggatgaaacatggttctgtttgtggaatgccagttcctactgcagaacaacgcattcttgtgtcccacccaccatagcgcggtgggaggttttggtgatggtgctttcttcttcagtggattcagctttaggatcgggctccttaggcagactcttagcatcatgttcaatgccatcttcgccactggcaatgacttcaaagatgagtgcattcacttcccggaacctctcatcagagagagaaacctcagccaggagcctccaagcattttcatcagacgcctcatcatagtccttcct

SEQ ID NO: 12029 - DNA, 484 bp, Gossypium hirsutum
  Clone ID: LIB3829-016-Q1-N6-G9
attaaacaagctacattaattaatagcatatcattcatactaagtttcggtatgcatcaattcaagattatcctttctctaaattcataagaaaatgtgataagtcacaacaatcacatttaaagtcagattctaacagagtggttcgcatgtggcataacttcatcagtcaaagcctctaaaggagcgaccaccacaatccgagaggcccatcacaccgaatatgtgttttcataagattctagatcaagagcttctcaatagcatccttgagttgttgtatttgggatttcaattggcttccttcgtttgatgtgacagaacatgcaattacagggtcttgtaaccccacatgcacgtccaagtgcttgctttgaaggaacaaatacgtagggaacattcttatcttcagcaagcaaaggaagatggagcagaatctcaggggctcggtatcagcagccatcacaatgaactccgagatacc

SEQ ID NO: 12030 - DNA, 425 bp, Gossypium hirsutum
  unsure (1)..(425): unsure at all n locations; Clone ID: LIB3829-016-Q1-N6-H1
tnnttnntnttnnntnntttnttnnttnttttttttnttnnnnnnaaaaaaaaatccgggttttgtgggcggaaaaaaatttttttaaaatataaaaatatttgggggggcttacatttttaatttaaattttttttaaaaaaattaaaaaaaatttttaaccttataaaattttttgggcccaaaaatttttgaaaaaaaaataatttttaaaaaaaaaattttttttaaaaaataaaaaaagaaatgaaaaaatttttttttgtttaccccaaaaaaaaaaaagaaattttttcttttataataaaaaaatttttttttttacaaaaaaaaaaataattgaaaaaaaaaatttttttgggaaaaaaattttttttttttttttttttttaaaaaaaaaaaaaagnttttttttcttttttttt

SEQ ID NO: 12031 - DNA, 339 bp, Gossypium hirsutum
  Clone ID: LIB3829-016-Q1-N6-H2
aaaaaaacgaggggggcccgcgcttaaaaaaaaaaaagaaaggaacagaaaaaaaaaaaaaaaaaaaaaaaaaaaaaaaaaaaaaagaaaaaaaaacaaaaaaaaaaccaacaatcataacctctaggaaaaaaaaaaaaaaaaaataaaaagggggggtttgaatgacccccaacggaaaaaaataaccctgtccaaatccacggggaaagcaggggaaaaaaagcacccaaaaaaccaaaaaggccccaaaaccgccgttatctgatctgaggcaaacaaccgggggggggcccacaaaaaacttccaaaaaaagggggtagtagaagccccccccc

SEQ ID NO: 12032 - DNA, 468 bp, Gossypium hirsutum
  Clone ID: LIB3829-016-Q1-N6-H3
attctgcatcaagcaagaaacatgcaaaatcatgcaactatttgaaaaagtgtatttagattgcaacaatcaccattaaaataaaacatgtcaaaacatgaacataaatttattacagatcatagacttgtttgccagtgaacttaacctcaatagggctaacattcttcccaatgctcctaaagttctgccccacaccttgtcgaccggggttcaccttctcagggtacaccccatctttagggtgcaaatattgaacctcaccattagggaacaccctataaaactggtacttgatcttgtacttagacctaagcctagtcccaagagccaagcactgctctttacgagccaatttcagcaggttcggaccttgtctcatgatggctgcaccacctgttggcatctcgaagatttgttccttgggtgactcccatgtgatgacgtaaaactcttccaattgtgctt

SEQ ID NO: 12033 - DNA, 481 bp, Gossypium hirsutum
  Clone ID: LIB3829-016-Q1-N6-H4
gaggtcatcaatgcaattttgtctcatcagatatattgcattctcattaaagataaggcaaacatctactaatcattgcccaggattgtgatagaaacaacagattagttcttccctcttcccatttttttcctgctattgggacaacatgaaaatatctaaatgcttggattgctaaaaaaaacttgtgttcgggggaaaaatattatggatccatgcctcaggcaatgtgccctgccaaagtgaggatcttgacatgctttttctgcctcagctcatgcggaactggcccaaaaactctggtccctattggttggccttgcttgtcaacaagaacaactgcattgtcatcgaacttgacctcactcccgtcacaacgaccccgctgcatggcagcacgcacaaccacaccatataccacctttcctttcttcacctttccattaggcatggcttcctttacagatgcaattatggtgtc

SEQ ID NO: 12034 - DNA, 479 bp, Gossypium hirsutum
  Clone ID: LIB3829-016-Q1-N6-H5
aaacaaacgcactatgatttattattattacttgtaaaagacaacatgcaaactgcctcttctaataaaaacatacaagcacaaacactaaatttaaacgacctgcttgggacccaggaaccacccattacagagaacagattgaacatgaaaaatgcccccccccccccaaaatgcctgcttgaaccttctctaaactctctctccctgccatatgccaattgcatgttagtttagccaataggcaagctatcattggtgggtcatttccatgccccagtcccaagcctcatccaccttaatactatcacatccttattcaactagaattgaaactaattgatttcaacatgcaaacttagctaacagtaagcccactacacaagcttccattgattccccatcttacaagcttatttactcggtagtagtattctcagcttgagcttcagctggtttctcttcttcctttgcagctt

SEQ ID NO: 12035 - DNA, 474 bp, Gossypium hirsutum
  Clone ID: LIB3829-016-Q1-N6-H6
attaccacggatatattattaattttgtaaacgtgggtgaggtacaacaagacgttatgctaacccagagaagatcatttagatgtgagtcgaatttgcattaggctacctgatcctgcacttattaattgacacatgcttcacatattaaaaaaaaaacgagagccgcggaggctacagtctatacaaaaggaggagagccggccggcagatgaggacttatccttcaaccaaagaccacagaggttcttgtgtgaaactgggattgtgagcctatgggcaaatccacgctggccttttcagagcctatctttggagtgactctcgatggacagaacatgaccctgttcttatcaatgtaagaaacaatgtatctgtttggccctatgaccctcatatggagtaatatccacattatctgatttaaactgaacaagtgggcaacctgctacattagagttgtcattcaatata

SEQ ID NO: 12036 - DNA, 485 bp, Gossypium hirsutum
  Clone ID: LIB3829-016-Q1-N6-H7
aaacaagaagcaaaagagaattaaactcgatttcacaatgaaatatgtccaatactaataagtactaccgcaatctcaaaggactgatcatgacacaaaaccaagccaagaatcaagcccaatggttactttttaaaaagtattaacttcctagaaatatatatattcaatcattcactcacaataaacaaaggccctaattcatgccctggtcaggaacagtaacaagctcatattcaactaaagaaagattattatcttctttaactgcgaatttagcaggttcggttacctcgatccgtccccatttgtcaactgctaacctcattgttgttcgcttgaacataacaatcttagcattacgtaaaatcacggttgcaccttttgtcataagatcaacttgttcgttgcgtgcggtgaagatgatggtgccagtctcgtccccaacgacgcactcagcgatccgggccggaggtacaggtcga

SEQ ID NO: 12037 - DNA, 436 bp, Gossypium hirsutum
  Clone ID: LIB3829-016-Q1-N6-H8
ggaacggtattaaaatgaataagcacccaacctgaaagcacacccagcagagatggtcaagaactaaaaagcaataccaaggaaccagggggggtttcccactcaaaaatgaagacttaaaaatagacagcttcattggcttggtttaacgatggaaaggccaaggccagttctttaaaaggttatttggaactttaccattcccctgggttaatgaacctacgttgaccaccccgtggtctttcatacaaaacatagttactcaacaaaaacgcctttcccaaaaccacccaatgcaggaagaaaacaggctcgcctaacccgtcaagcattttgaattttaaaacccaattatttttcctcacggtagaccaaaagtaccccaataaatgcgacgtttgggggatgataaataccgaaacagacccttgaaata

SEQ ID NO: 12038 - DNA, 473 bp, Gossypium hirsutum
  Clone ID: LIB3829-016-Q1-N6-H9
attcttggcggcaattaaagatagtcattacaattgatttgtgaggccaatggttctgaaaaggttttgcaattgaaaaaaacaaagacagctcatctgggtgcaatgatgaggatgtccactacatgtatacatactgtcctactaaaaccgatgtgggaataaccggaaccacattccagtaaccggttaaaaaatagagctgccaaaatttagtgcccattgatctaatgccttaggagctgaacccactggcaccacataaggtggtttgccgtcagacaggatgacccatttatccactatatcctatatctgttttctgatctgaaaatgatgagcaaaaagctcgaacaaactccaaagatacatgctgcttttccatagcaaacaccaatgcctttaagagagacttgtgtaggatacttcatgagttttctcacattctcatgggatggactcctctgctgccg

SEQ ID NO: 12039 - DNA, 430 bp, Gossypium hirsutum
  Clone ID: LIB3829-003-Q6-K6-A1
caaagaattgctagcaaccattctttttttttctctctctctctctctctttttgaaagccaagaaattccaggtacccgatctgtttagaagtgaagctaatttcttcgatcgaagcagctgttggaagagttgcagatctgttgtgtggctttggattctataaaacatctgcttttgttttatttttttggctgagaactggactcctataacaacaaccaacgttgttcaacagtgagcataaaactttttttttcttttctgaaaaagagagtttatattctttgttggtaattccaggaacagcttttaatttgttgctaatccaggaacagctgatttattaatgggggtttgtcatttaatagtccttttattaagataaatagtgatgctggtggtggtatctaccatctttagggtcagc

SEQ ID NO: 12040 - DNA, 599 bp, Gossypium hirsutum
  Clone ID: LIB3829-003-Q6-K6-A10
taaaatcctaaagtggggaatatgtcgaacatcatcttaaatatccaccctctgtcccatctgacaagcttactcatgtgtacactgcgatcttgaagcctgacaatgaggttagaattctgattgatggagaagagaaaaagaaggctaacttcctctcagctgatgattttgagccaccacttatccctgctaagacgattcctgatccagacgataagaaacctgaggactgggatgagagagccaaaattccagacccaaatgctgtaaagccggatgattgggatgaggatgctcccatggaaattgaagatgaggaggctgtgaaaccagaaggatggttagatgatgagcctgaggagatagatgatcctgaggcaaccaagccagaagattgggatgatgaagaggatggtgagtgggaagcccccaaaattgataacccgaagtgtgagacagcccctggttgtggtgaatggaagaggccaatgaagatgaatccagcttacaagggaaaatggtctgctccactaattgataaccccaattacaagggtatttggaagcctcaagaaattccaaaccccgactacttt

SEQ ID NO: 12041 - DNA, 612 bp, Gossypium hirsutum
  unsure (1)..(612): unsure at all n locations; Clone ID: LIB3829-003-Q6-K6-A11
ctccactgngggagnatgaaagnanagacaactacaataaagagctcagcggagaagatgaacaaagagaccagccttgaaaataaataactcagctgagaagatgaagaaagaaacatcattaaatagctcagctgagaagatgagacaagagacagctacagaaaatggttcagctgaaaagatgaagaaagagacagccttgacagtaaatatctcagctgaaaagatgaacaaagagacagccttgacaataaataactcagctgagaagatgaaggaagagatggccaggacagtgaatagctcagctgagaagatgagacaagagacagctacagttaatggctcggctgagaagatgaagaaagagacggccttgacagtaaagagctcgaacgagaaggtgaagaaagaaacagccttgacagtaaataactcagctgagaaggttaagaaagagatcgcttcacaagtgaatggctcagctgagaagatgaaaaaagagaccactgtggcagttttgaaatcacctgacattgaaactatgccggggcaattagggatgaatgagacatcaggtttatttcatgcagatccttctgttgttga

SEQ ID NO: 12042 - DNA, 587 bp, Gossypium hirsutum
  unsure (1)..(587): unsure at all n locations; Clone ID: LIB3829-003-Q6-K6-A12
gnaaaaggagctgttacgcccgtcaaaaatcaggttcatgtggatcatgctggtcttttagtacaacaggagccttggaaggtgctaattttttggcanactggaaaactcgtgagccttagtgagcaacagctcgttgattgtgatcatgagtgtgatccagaggaagcaggttcatgcgactcaggatgcaatggtggtctcatgaatagtgcttttgagtatacactcaaagctggtggactcatgcgtgaggaagactacccctacactggcactgatcgtgggacctgcaaatttgacaagtctaagattgttgctaaggtggccaatttcagtgttgtttcccttgatgaggatcaaattgctgcaaatcttgtgaagaatggtcctcttgcagttgccataaatgcagtgttcatgcaaacatacattgggggagtttcttgcccgtacatttgctctaaacgcctcgaccacggagtattgttggtggggtatggttcagcaggctatgcccccatcaggttgaaggataaaccatattggatcattaagaactcatgggngagaaacctggggtgaaa

SEQ ID NO: 12043 - DNA, 626 bp, Gossypium hirsutum
  Clone ID: LIB3829-003-Q6-K6-A2
gcattccccatgttgaccctgcaaaatccccattttgcccctaaactttcatcttccagtaagctcgtaggttgtagaaaccccagtgtagttggctttttggccccgacgttgagtctcgttgccaagactgtgaacccacttccgaaaactgcactcaaacctgccctccttacataattcaatacggtttaggttccactgctgggcttctattagtagaaaaccttgctttcccccagaaaaccttccaagatttccttgtcggatgctccatcctctccaaccgacagcccgctggaatagccgggttcggtcggagcgctgagtctataccctcccaattaggcctcaagaaattctcttactgtctcgtttctcgccggttcgatgacactggcgtcagcagcaacatgttgttggaaaccgggtcgggttccggtgatgccaagaccccaggccttagctacacaccgttttacaggaaccaagtggcttcaaacccagttttcaaagagttctactacgtaactctacgtaaaattctggtgggcgataagcacgtcaaagttccgtacagttatttggtcccaggatcagacggtaacggtggcaccatagtggac

SEQ ID NO: 12044 - DNA, 565 bp, Gossypium hirsutum
  Clone ID: LIB3829-003-Q6-K6-A4
cggaatttgacttctatctttgcagccatgccggtattcagggaacaagtcggcctgcacactaccatgttctttgggacgaaaacaattttactgcggatggaatacagtctctaacaaacaacctttgttacacgtatgcaaggtgcacgcgctcggtctctgttgttcctcctgcctattatgcacatttagctgcattccgagcacggttctacctagaaccagagatgcaagacaataatagctcaacgggtgctggttcaggtcaagcaaaaggtggtggtacaaaggcagcaggagaatccggggtgcggccgttgccggccttgaaagagaatgtgaagagagtgatgttctactgctagaaccgtagcaaaagctaggcggagatgcagcaaccatgaacgacctttcggttcacaatgttgtttgtacagttgctaatgatacttgcatggttgcatgcaaggtcttcgaattaaggtcgtcagcgcagcctttaatgtaaaaatggtcggtgggacagtgaccaaaatgatctttgatggataaaaatgtttaa

SEQ ID NO: 12045 - DNA, 437 bp, Gossypium hirsutum
  Clone ID: LIB3829-003-Q6-K6-A5
tccccttctctaattttctctcttaaagattcatgcctacccatctttaatctcaaccaacggaagagacgcggcgtgcaatttgattgttccaatttccttttcaacgttcaattaaaaccccagcctcttccttttgcttctaccgggaggggggaagggaatcatgtctttcaatctcatatgctgaagccgtcctgcagctacttcggatcctcccaagatctgtacggctgaggaccaaaagaaaaaagatgatgaggatctgtcggagaaggatttggctttgaaacaacagttggagttatatgtagagagagttcaggattccgatcctaggttacagaaagtaggtcttgagagcatgaggcatgaaatccggacttcaacaagctctatgacttctgttccgaagccattgaagtttctccatcctc

SEQ ID NO: 12046 - DNA, 574 bp, Gossypium hirsutum
  unsure (1)..(574): unsure at all n locations; Clone ID: LIB3829-003-Q6-K6-A6
ctgaactagactganaaataaacccaagccttaaaaactatcaaaatggttcaaaggctcacttaccgtactcgccatagctatgctaccaaatccaatcaacaccgtgtcgttaagacccccggtgggaaattgatctatcagactactaagaagagagcgagtgggcctaagtgtcctgttactggaaagcgaattcagggtattcctcacttgagacctgctgaatacaagcggtctcggttgcctaggaaccgtaggacggtgaatcgtgcctatggtggtgttttgtctggaagtgctgttagagaaaggataattcgagccttcttagtggaagagcaaaagattgtgaagaaggttctgaaaatccagaagactaaggaaaagcaatcctcaaagagctaggaattttaaatgctgatgaagctgaattgtgtttggcttgttagatttacctgagagaaatttttgtttgttattatggtgaattgatgaaatgtggaactgagtttgagtactttttctcatttggtagtttcatactgatatattttgctgcttggttcactag

SEQ ID NO: 12047 - DNA, 592 bp, Gossypium hirsutum
  Clone ID: LIB3829-003-Q6-K6-A7
ttttgctctctccttgtttttgagatctgtgtgtttcttcaagcttcttgaaagcttcattttggttcagaactggaaaccgctgctgtgatggctccaccaattgagactacagtcaagtcctctgactctcactgcgctccacatcctcctttgaatgaaaggatcctttcgtcaatgaccaggaggtccgtcgctgctcacccatggcatgatcttgaaattggacctggagctcctacggttttcaactgcgtgattgaaattgggaaagggagcaaggtgaaatatgaacttgacaagaaaactggtttgatcaaggttgatcgtgtgctttattcatcagttgtgtatcctcacaactatggtttcattcctcgtactctttgtgaagacaatgatcccttggatgtcctgattattatgcaggaaccagttcttccagggtgctttcttcgggctaaagctataggtctgatgcctatgattgatcagggtgagaaagatgacaagattattgctgtatgtgctgatgatcctgagtatcgtcactacaatgacatcaaggaacttccacctcaccgtttggctg

SEQ ID NO: 12048 - DNA, 584 bp, Gossypium hirsutum
  unsure (1)..(584): unsure at all n locations; Clone ID: LIB3829-003-Q6-K6-A8
cggcaggtctattctggggattctgttctgccccttatgatgctcgtaaaagagtttaactggtactgctcaagcttcatttgtggtaaagggaacttacacatttaggcaaagtctgttggaaaattcggcttccaaagtggactcgttgctggtgtattcgccacaactcgctgtgggcttcagaaataccggaagcggaacgacccgttaaacactttaatagcgggtgctgttgccggtgctgccgttgctgctcagactagaaactggaacaatatcattggggtagcatgccttgtttcagctttcagtgtcgctgctgatcatatttccagagcaaattgaaatatctagtgacccaattccaaaattgtcattaaaaggcaatgagggcatgatcgaaggagtttggattttgcaggagtaaaccttgtataatcatattattgctgctattgcattaaatagaatagggtaaaatgtttttttttaagctttgcaaagcactgtcaatcaaagcttacaacangacatgggaaattacaaaagatggcaaatacatgtcaaaaaaaggggaaaaa

SEQ ID NO: 12049 - DNA, 590 bp, Gossypium hirsutum
  unsure (1)..(590): unsure at all n locations; Clone ID: LIB3829-003-Q6-K6-A9
ggcacttatgccacaacagnattaatgttgcctttgctggagatagcttctcctgatgctcgagtcataacagtttcatctggtggaatgtatactacttccttgaccagtgatctacagtttagtgnatggaaaatttagtggggcagagcaatatgctaggaacaagcgagttcaggtagcactaactgaaagtgggctgagatgtacaagaacaaaggaattgggttttactcaatgcacccgggctgggctgagacacctggagtagctaaaagtttacctgattttaacaaatggttatcgggaaagctcagaactagtgaagaaggtgcggacacagttatatggttggctttacagcctaaagagaaactggtatctggtggtttctattttgatagagcagaagctcctaaacacttaaagttcgcagctacaaggcagtctcatgcaatcatagactccatttacgacactctacgttccttggtatagtctcaaaaaaacattagttcccaaccccaaattgttccaggaatctgcttgctgcatattgcttctgcgttatgctgtttatacgtatcttt

SEQ ID NO: 12050 - DNA, 571 bp, Gossypium hirsutum
  Clone ID: LIB3829-003-Q6-K6-B1
ggcttttacagatctcgaatcatccaaattatcctatctcattctcgatcttattactctccttaccgctacttgaaatattgaaattaattcaaatccttacaatccattttcaaccaacgctaaaaccctagcattcggcgagatccgaattcccaaaaaatggatgctccgcaaggcggatccgacggcgacaaaaccaatccttcctcttctcctgtctccgttgtctccaatttctggaaagaatttgatctggaaaaagagaaaagtgtgcttgatgaacaaggactcagaatagctgaaaatcaggaaaacagccagaaaaataggcggaagcttgctgagagtacaagagatttcaagaaagctgcgccagagaaaaaattaagtttatttaattcattacttaagggctaccaagaagaagttgataatcttaccaagagggcaaaatttggcgagaatgcttttcttaacatctatcaaaagctttatgaggctcctgatccttatcctgctcttgcttcaatttctgagcaagatctaaaaatctctgaattggaatctg

SEQ ID NO: 12051 - DNA, 608 bp, Gossypium hirsutum
  unsure (1)..(608): unsure at all n locations; Clone ID: LIB3829-003-Q6-K6-B10
gatttggatatatattcaggggnaaagctactcagtgttgttaaaaacagaccaaaacccgtacaagaactattgggtttcaattggtgtcagagggagagatcccaaaaccaaccaagccttaacccttttgagctattctgccacccctgcatcaaagctccctacaactcaaccccctgtaacacctcgatgggacgattacaatcacagcaaggccttcaccaaaagcatatatgcactcatgggatcacctcagccacccaagacttatgaccgtcggatcatccttctcaacactcagaaccgactcaatgggttcgtcaagtgggccatcaacaatgtgtccttagtgttgccttccactccttatttggggtccattaaatttggtctcaacaatgcttttgaccaaaaatcccccccagacaactacgatagcagctatgacatcatgaagcctgcacccaaccagaatacaacacaaggggagtggnggtttacttccattactnttaaacaccactgtgggatgtnngatccttcaaaacgccaatgcccttagcaaaaggattgtcagtgaaaatacatcccatgggcattttgca

SEQ ID NO: 12052 - DNA, 596 bp, Gossypium hirsutum
  unsure (1)..(596): unsure at all n locations; Clone ID: LIB3829-003-Q6-K6-B11
ggggcttgattttcctaanacatcagtgtaattgctgtctgcccgaaggaatgggaccttctgtgaggagactttatgttcaggngaaaagagataaatggcgctggaattaatgctagttttgctgtccatcaggatgttgatggtagagctacagatgtggccttgggatggtcggttgcccttggttctccttttacattcgccaccacattagagcaggaatacaaaagtgacatttttggggagagaggcatcttgctaggtgctgttcatggggttgttgaatgcttgtttagaaggtatgtggaggatggaatgagtgaagaattggcttacaaaaacaccgttgagtgcataacaggaattgtgtcaaagaccatttcaacaaagggtatgctagctgtatacaactcattgtccgaggaaggcaaaaagcgatttgaggtcgcttacagtgcctcatattatccttgcatggaaatcctatatgagtgttacgaagatgttgcaagtggaagcgagattcgcagtgttgttttggctgggcgtcggttttatgaaaaggagggcctacctgccttccctatgggtaa

SEQ ID NO: 12053 - DNA, 406 bp, Gossypium hirsutum
  unsure (1)..(406): unsure at all n locations; Clone ID: LIB3829-003-Q6-K6-B12
tccggnaaaagttgaagctgctgctngaagacttaagcgaattggaatggcttttatagttgcaactacaatggtattcggtggggccgccttgatgtttgggattgcagcctccaagttggagttgcacagtcagagtgatgatgtcagaacaaaaggaaaagacctggttcagcctaaatttgacatgattagggaacagcttgttcctctaagaacttgggnccgaaaacacatcaaagaaatggcacctggaaagggaggaagctattaaagataaacccatcataaaggagctttctaaaactttaggagcaaaaaccaacaattgactttgtaagtgaacgaaaatttggcatctacaggttcatcgaataaaataaaaagcccggaaacattttcctgc

SEQ ID NO: 12054 - DNA, 454 bp, Gossypium hirsutum
  unsure (1)..(454): unsure at all n locations; Clone ID: LIB3829-003-Q6-K6-B2
ggcaaactactggntttggtttgatttatgattctgtcgagagtgcaaagaagtacgagcccaaatacaggctgatcaggaacggactcgataagaaggtggagaaatcaaggaagcaaatgaaggaacggaagaacagggctaagaagatccggggagtaaagaagaccaaggccagtgaatcagcgaagaagaagtgaggtaagatgcccggaacagaaaaggcgaggatcgcgcttatcttaaagccgatgtttctcgagagcgatgcataagtagtctgaagtttttaggtgttcttgaacctatatttttggaaactgagtttggtgttatttgattatttagttatacgctacttatagtatctgattatcctattttgaaatattttagtgttatgcagttttatttccaataatatagaaaataaataatttattatgattttatt

SEQ ID NO: 12055 - DNA, 471 bp, Gossypium hirsutum
  Clone ID: LIB3829-003-Q6-K6-B3
cagacgcgtggagccgggttacggtgccccaactttgccgctgaacctaacaacccacaaaaggtgttagcctgactaagccagacagacggtggttattggaagtccgaaacccgctaaggagtgcgtgacacctgatctggcaacttaactaacccccaaatggttggtgcttaagctcgcaacctataccctgacgtcagagcaagggcctggcccaaatgagtaagatggcgctgcggacgccaagaaaactcccaggcgcatagcccggcctgtgcgtccttaagtgcacatcttgttggttgtctcatatattcactatgagcaactttgcaagccgaagatgggaaaggttccatgtgatcaggacttgcacatactttagtcgatcctaacaactggggatagcccagtactcagctcttccagtgctagcttaaccaggcactactactaaaattactaaac

SEQ ID NO: 12056 - DNA, 571 bp, Gossypium hirsutum
  unsure (1)..(571): unsure at all n locations; Clone ID: LIB3829-003-Q6-K6-B4
cggacgcgtgggtgaatacaagaagctgttgaagtttgataacaagcttcaaagtaatttatttctttccgaaagatacgataccaaggtatggttggtgggagatggactgaccgataaagaacagtttaaggcaccaaaaggaacaatattcattccattttcgatattcccacccaagaaagtccggaaagactgctattaccacactacaccggctatggtggctcctgcatctgtggagaacctgcactcttgtgaggactggttgccgagaagggcgatgagtgcgagccgtgtggccgggataattcatgcttcggaagggttcgacgtgaatgagtgcgatggcaccattttcagcgtcgataaagtttgggaggccagtcttgagaatggatttcgccccttgccaatctccacttaatcaataatacttatgagaaatcatgtagcagtactaatgcatgcataccaacttccatctcccttgtattttatctagttgtaatattggttggtaataatattttattatctaganaagtctaataaattataattattaatg

SEQ ID NO: 12057 - DNA, 468 bp, Gossypium hirsutum
  Clone ID: LIB3829-003-Q6-K6-B6
gttcaccaagagttttcaacaacatattaccatgtgagccattacataagtataataaaactagtctctcacagcgagcctaccttagaagaattttggttgcagttccacaaggcccagcatgtaccatcagcaatgtggtgaccgggaccctcatattgggtggaacctccaatcttctgatgctatcaccataccaatgttgctcatcgtaaggttcgtatacaatcgaacatcggaccaacacagaaaatctacactactattgcactgtcatcaaccaaccttacactatagaggatatggggctaggataacaataccttgcttagactatacctgtataccacctgctaaatgaactatacccaataatgaaccgatgaacattatagaaaccagcttataactactgctacaccaaaatctacatctacacaagctgataagaaacatatgcataatcct

SEQ ID NO: 12058 - DNA, 598 bp, Gossypium hirsutum
  Clone ID: LIB3829-003-Q6-K6-B7
gcggtagctatcaaggctttatatcctcccaacccaccaacagaacataatgaaaaatggtggttttgaagaaggtccttatatattccccaacactccatggggtgtcctaatcccacccaacattgaggatgataattctcctctccctgcctgggtagtcgaatccctcaaggccgtcaagtacatcgattcagcccattacttcgtgcctcaaggccgaagagccgtggagctagttggtggaaaagagagtgcaatcgctcaaataacaagaaccattgttggcaagacatacaggctctccttctcggtgggcgatgctaacaactcctgtgcaggttctttggtcgtcgaggcattcgccggtaaagccacactcaaagtcccatacgaatctaaagggactggtggattcaagcgagctgcacttagattcgtggctgtttccaacaggacaagaattatgttccttagcacgttctacaccatgagaagtgatgacttttcttctctatgcggtcctgttgttgacgatgtgaagcttttgagtattcgtaacccttgatcatcaccgaccttgttcgggggctgttga

SEQ ID NO: 12059 - DNA, 517 bp, Gossypium hirsutum
  Clone ID: LIB3829-003-Q6-K6-B8
gcgacattggaactgtctacctctgccggctggccgacgtggatgaaaaagttgttatgcgatgaaggtggtggataaggatgtgttggttatgaagaaaaagttcaccgtgctgagatggaaaaaaagatcctgaaatgctggatcatccatttttgcctactttgaacgctgtagtttgaagcttctaatttctcttgcatagttatggagtactgttcagggggtgacctgcattctcttacacataaacaacctaaaaaacgtttctctttgaactcctcatgattttatgcagctgaggttctggtagctctagagtaccttcacatgctgggtattatctacagagacctaataccggaaaacgttctagtcagatcatatggtcacatcatgctctcagatttagacctttcactttgctcagacgcgatcccagccgctgaatctccatcatcttcacctgacccaatgccgccacaaaaccagtgctgcaaccttacgtaaccaacac

SEQ ID NO: 12060 - DNA, 534 bp, Gossypium hirsutum
  Clone ID: LIB3829-003-Q6-K6-B9
cttgggtttatctttgggaatcttcaaagatcctttacgcctaaacaaaacctccccagaaaatggtggaagatcccaagctgcaattataggctcagcaagtgctcgtcgacgtattgaagctgggatctgacgacagagtactctgggaaggtgaacgctgagggtcctaaccccaacaatggtgacggaaccggtgaagctcaaaatattaagactagacaacaccgtatatgcttcaaacaaagactcaaagccggaattagaattattctaagcatgcaacgtaatattgcgaggtttttgcatggaaaaagctgagctgaaacccatgccaaacttgcactgaagatgatactgatttcccaggatctatcttacttaaattaatatgcctaatgggttctgaatatttaaatctatgtcgtctcttactattaatgatctatatgtaactctgctgatcatggcttaataattaatgaaatgttgatagatgctgtctgcagctggaatcaacatggatgtgggcgg

SEQ ID NO: 12061 - DNA, 596 bp, Gossypium hirsutum
  unsure (1)..(596): unsure at all n locations; Clone ID: LIB3829-003-Q6-K6-C1
ggtggccaagtgaatttatttcagtcacctgctgtttcctccgttaaacctgctgcagccgcaaatgcaaagttctttattcccatgcccatatcaacaacaatgagcgaacaatcaatggaggcaattnactgaaaatgcacaagaagagaatgctactaacaataatcccagcactcccacttccacttctagtgtcaatgacttttgtcaatctcccagaactctgccggcagtgactaggccaaggttcccaagcatggataacatccctcaagaagtcattacaacaaataccaatgcctatccatcaccacactcacgacgaacagtctcgtggagtggaggcaactttgatgatccattaagtcctcctagtaaacccgaaataagaccttcaggagaagcaccgggaaaacctccaccatcgttcatgcctggtccagctaatggtagttttggagatgaacaactacatgaggtggaactttgacctgaagattcgtcgacgatgtaaatatcaaaaagttttgttccttggatccgaatacgatatttccgagcatatacaacaatggcagcatgcaccagtctta

SEQ ID NO: 12062 - DNA, 606 bp, Gossypium hirsutum
  Clone ID: LIB3829-003-Q6-K6-C10
caaaacttcaaaattatccgatgagaacgagatgctccggtcggaaaccgtaaagggacatgaacataggtaaatcgaacgataaagtggctgctgagctagagttgacaagggctgcaaagcaagaagctattatgaagcttggacttgcaatggaggaggcagataagaataacaggaaagcaaccagggtggctgaacagcttgaggctgcacaggcggccaattcggaaatggcggccgagttgagaagattgaaggtgcaatcggagcagtggcgcaaggctgcggaattagctgctgcattgctttcagcaggtaataatggaaagaagctcattgagagaactggttcattggacagcaactataatccaaagattagctcaccttatactgaagatatggatgatgatttgctgaataagaaaaatgggaacatgctgaagaagattgggatcttatggaagaagccactgaaatagaacacctatattatatatatgtattgccaaaattgcatggaatctatattgtctcttttaccctattttcctgtggatgtcatatcggtgtatgcttacattggaaaatgcaacttgtggt

SEQ ID NO: 12063 - DNA, 603 bp, Gossypium hirsutum
  Clone ID: LIB3829-003-Q6-K6-C11
cggacgcgtgggttccatcccagcaaaagcctgagacagtattaatcgtcgataaaatggaaggacaaggtgaagatgttaggctgggagcaaataagtacagggaaaggcagcctataggaacagctgctcaaacccaagataccaaggactacaaggaaccacctgctgcaccactgtttgagcctgccgagttatcctcatggtccttttacagggctggcattgccgaattcgttgccactttcttgtttctttacatcaccgttttaactgtaatgggtgtcgctaaatcttcaaccaagtgttctactgtagggattcagggcattgcttgggcttttggtggcatgatctttgctcttgtctactgcactgctggcatttcagggggtcatattaacccagcggtgactttcgggctgttcttagcgaggaagttgtcgctgataagagcagtcttttacatgataatgcaatgccttggagctatatgtggcgctgccgtcgtaaagagcttccaaaagacccaatacgaaaggctaggcggcggtgcaaacacggttagctcgggatatagcaagagtagtggccttggtgctg

SEQ ID NO: 12064 - DNA, 580 bp, Gossypium hirsutum
  Clone ID: LIB3829-003-Q6-K6-C12
ccccgcgtccgggttcaaccgttgaatcagttggcgaaaaactgttgaaggcttttagtacgactggcatataggaatctgtcgaagtaaggtatctgaatttttaacctcttcatattccatagaaagtgagagaactctcagttcatttcttttggggtcggctgcctaatccctgaagtttgaagaaaagctcgggttatcaggtcaggcttgaatgtttgatcagggaagtcaaaatagatttgacagtgataaaaccgtactcatagttatggcatgaaatgagcttagactgaaaaaccgtgggaaccggaaaccttgctactgcttggagtattagggtaagaggacaacatgttatggtttttcatttgctataagtctcggtatgtcgtgaagttgccatcttcgtttacaagttttagctttgccccaagatcataaagtccgtgagtgctggtttcctgtttattgatttgggcatagctcttgaaccccattggtgtgtgttccgtgaatctacttcatccttttatgttatttcaaatgctagtcattttatatgcatacatacaac

SEQ ID NO: 12065 - DNA, 509 bp, Gossypium hirsutum
  unsure (1)..(509): unsure at all n locations; Clone ID: LIB3829-003-Q6-K6-C2
cggncgcgtgggctttgaagaatccttttgacgcccagatgctcttccnaggtgaatgaaggaattgatgttcagaaaaactctcccgtcctccctatcgtctgagcaaaattgtgttcaagccgatttcaagaaaaaagaacaaaagcaatctacgaaaaacctaaaaatatcatgccaaaggcggcagatagaaacgtgctagggtagcagactacacaatataaagtctcaaaatcattgtgtttttttagttttaaaattttacgcaacgtttgggcatcaaaacggcggtggaaggttgcgtttggtaatttcaagcgatcgagaaggtttaattctgccctaagtctctatatttttaagacanannaaaaaaaaaaaaaaaaaaaaaaaaaaaaaaaaaaaaaaaaaaaaaaaaaaaaaaaaaaaaaaaaaaaaaaaaaaaaaaaaaaaaaaaaaaaaaaaaaaanngggggggggccgttttaaagaacccaactttcctt

SEQ ID NO: 12066 - DNA, 621 bp, Gossypium hirsutum
  unsure (1)..(621): unsure at all n locations; Clone ID: LIB3829-003-Q6-K6-C3
cagtgctaaaatctagggatttgcgggtgngagaagacgagagcccatctctctgcttcaaagctcctgtccaggtagaattctcttcttcccttgcgttgtgttctttgctgttcaatcgccatggcttcaaagcggattttgaaagaactcaaggatttgcagaaagatccacccacttcttcagtgctggtccagtagctgaagacatgtttcattggcaagcaacaatcatgggaccctcagatagcccttatgctggaggtctgtttttagttactatccatttccctccagattatcctttcaagcctcctaaggtcgcgtttaggaccaaggtcttccatcccaacatcaacagcaatggaagcatttgtcttgatatcctcaaagaacaatggagccctgcactaaccatttccaaggttctgctctcaatctgctcgttgctgaccgatccaaaccctgatgaccctcttgttccggagattgctcacatgtataagactgatcgggcaaagtatgaagccactgctcgtagctggacccagaagtatgccatgggatgacagttgttggtgtgtaatatgtatcagctttcttatgttgccaactgtgtcg

SEQ ID NO: 12067 - DNA, 587 bp, Gossypium hirsutum
  unsure (1)..(587): unsure at all n locations; Clone ID: LIB3829-003-Q6-K6-C4
gtgccttaagccccagttttgggngaaaataggaaagctggcttgcaggaccttgctgctcttaccgggggcgaggtaataactgaagaacttggtcttgacattgagaaagttggagcggaagtgcttggctcttgcaaaaaggttacagtatcaaaggatgacacaattatccttgatggcgctggagacaaggctaccattgaagaaagatgcgatcagataagatcagcaattgaatcaagcacttctgattacgacaaggacaaattacaagagaggcttgcaaagctctctggtggcgttgcagttttgaagattggaggagcaagtgaagcagaagttggtgaaaagaaggatagagttaccgatgccctaaatgccacgaaagctgctgtggaggaaggaattgttcctggtggtggtgctgcacttctttatgcctctaaggaacttgaaaacctggagactgcaaactttgatcagaagatcggtgttcagatcatccaanatgctcttaagatgcctgtacatacaattgcatctaatgctgggagtgagggtgcagtggttgttggaaagctact

SEQ ID NO: 12068 - DNA, 599 bp, Gossypium hirsutum
  Clone ID: LIB3829-003-Q6-K6-C5
gtttcctttctcgattttctatttagccaaacaaaatgcagatcttcgttaagactctaaccggcaagacgatcactctcgaggtcgagagctccgatacgatcgacaacgtgaaggccaaaatccaagataaggaaggcatccctccagaccagcagcgtctgatcttcgccggaaaacagctcgaagacggccggaccttggccgattacaacatccaaaaggagtcaactctccacctcgtcctccgtctgcgcggtgggatgcaaatcttcgtgaaaaccttgactggcaagacaatcactctcgaggtcgagagctccgacacgatcgacaacgttaaagcgaagatccaagacaaggaaggcatccccccagaccagcaacgtctcatctttgccggaaaacaactcgaagacggccgtaccttggccgactacaacatccagaaggagtcaactctccaccttgtccttcgtttgcgcggcgggatgcaaatcttcgttaagacgcttaccggaaagacgatcactctcgaggtcgagagctctgacacgatcgacaacgtgaaagccaaaatccaagacaaggaaggcatc

SEQ ID NO: 12069 - DNA, 598 bp, Gossypium hirsutum
  unsure (1)..(598): unsure at all n locations; Clone ID: LIB3829-003-Q6-K6-C6
atagnacattcaaccaagcaaanaacgcgggctgaagtgcgtggggttataatatcaaacccatcaaatccggctggcaatcttctaaaccgggaaacactttacagcctgctagactttgccagagagaagaacatccatatcatctccaatgaaatactggctggttctactcttggaaacgaagaattcgtgagcatggcagaaatcgtcgaccaggaagatactgacaggaaaagagtccatatagtatacggtttgtcaaaagatctctctcttccaggtttccgggttggtgttatctacacttttaatgaggatgttctggctgctgctagaaagttatcgaggttctcagccacctcagctccaacccaacgtttgctcatctccatgctatctgatacaaaatttgttcgaacattcattaccacaaactgggagaggcttcaaaggatgtatgtgcagcttgtggcagggttggaaaaaagggcataaagtccataaaaagcagtgggggtttctactgttgggctgatatgagcgggtttatcagctcttacagtgagaaaggagaatggagctgtgggataagttg

SEQ ID NO: 12070 - DNA, 603 bp, Gossypium hirsutum
  unsure (1)..(603): unsure at all n locations; Clone ID: LIB3829-003-Q6-K6-C7
cggccgcgtgggttgctgttngaatagtaatatctatagcatacagagatggagaggcaaagaagcaagcaggtttgtttgttgatgtgggttttggttgctgcctttttctcccacaatagggtcattgcagtgacctccactggccttggtgagcagaaaaactactatccagctcctgaccctcatgctggaactcccccttcaggttcacatggcacaccaccatcttcaggaggtggatcacctccctctcatggaaccccgtcacatggaggtggttaccacccttcaccaacaccatcaacgccttcgggtggaaattgtggaactcccccacatgacccttcaactccatcaacaccatcacacactcctcctcatggtactccaccatcatctggaggtggtagtcccccatcgtatggaggaggcagtcccccatcgtatggaggaggcagtcccccatcgtatggaggaggcagtcccccatcatacggaggtggcagtcccccatcatatggaggtggcagtccaccaactactcccattgatccaggaactccaagcattccctcacctccattctttcctgctccaact

SEQ ID NO: 12071 - DNA, 605 bp, Gossypium hirsutum
  Clone ID: LIB3829-003-Q6-K6-C8
tggaaatatgctgtgctttggagctcagcaccgaacccctgtttgttggtaaagtagcatatacggggaagcattgttgggtttcctatgatgatattttcgctggcaaagcaaactcgaagttagttcccgagtatccggcggaatggttacttcagtttgcatcaggaatcaagacaatagtgctcgtacctgtgcttccacatggagttctgcagcttggttcattggagatggtagctgaagatttgtctattctttcatgcatcaaagatagatttgcctgcaagaacattcacacccagttgatatcatcagaaatatcaagtcctttcgagaagttagaagcgtcttcaagtgcattgatgggcccactgaactctaaagattcaaatgctgttaacagtgttgaatcaaataagcttttagctttagatcatattgtgccactgttaagtattcagaatgaattcaaggtgcctggaataattccctctgagattttagaaagtgagagtgagaataggattagtgtgccactagttagccttagtgaattaccgtcaccactaagccaatctgtaagtgttgatcagcttgcagta

SEQ ID NO: 12072 - DNA, 587 bp, Gossypium hirsutum
  unsure (1)..(587): unsure at all n locations; Clone ID: LIB3829-003-Q6-K6-C9
cggncgcgtgggcnaggatggatatagtatgattgcagatgcagaggagaagggtctcattgtaccaggcgagagtgtgctgatcgagccaactagtggtaataccggaatagggttggcattcatggcagctgctaagggttacagactcataattacgatgccttcttcaatgagtttagaaagaagaatggtcctccgagcttttggagctgagctggttcttacggatccagcccggggcatgaagggggctgttcaaaaagctgaggaaattatgtcaaagactcctaattcttacattcttcagcaatttgaaaaccctgccaacccaaagatccattatctgacaaccggaccagagatatggaaaggcagtggaggaaaggtagatgtccttgtctctggtatcgggactggaggtactgtaacaggagccgggaagtatctgaaagagcagaatcctgacattaagctcgtcggtgtggaaccagttgagagtgcagtgctttctggagggaaacctggtccacataagatccaaggaattggtgctggcttcatccctggggttttagatgtcaatt

SEQ ID NO: 12073 - DNA, 367 bp, Gossypium hirsutum
  Clone ID: LIB3829-003-Q6-K6-D1
accaagctcagggtctcttatgacgacaatgacggtgacaccgccgacaggcggcaagaagcagcatgctcttccagcgacaccataccactgggacaaccacgggcgcaaccacagtgtctgcaaaggggttgggtggaggtaccaacatcctaaggtccgactaaaacagccaccggtttctatgagccaaggctgctgagcttctcttaacaagcactgataactaacagtatggttagccttactgggacactaagggttttgacatactatcggactagaaaaggcactaacatttatgcgctggtacagtcatgcatgcatgtgactatgcatgtatagatgctactatcattttagtagc

SEQ ID NO: 12074 - DNA, 306 bp, Gossypium hirsutum
  Clone ID: LIB3829-003-Q6-K6-D10
cggacgcgtgggtgcacagcaattaagcatctccacatgtttaatgcaatcaggagacaataatcagtctcctagatgttttagcataggattctaaatcttatgtagtgttttatggaaatgtattgtactgtattgtaggagagggcaagtagtagtattctctttggttgatttatgtggtggtagatttcacctttgtaacttgtaattaacaattgcaatcaaaacaagggtgtttgaaagttaaaaaatcaataaattctaatgttgatagattatgaaataaagatattatctctttcc

SEQ ID NO: 12075 - DNA, 456 bp, Gossypium hirsutum
  Clone ID: LIB3829-003-Q6-K6-D11
gtgactccttggtatcaaaaaaaaaaaaaaaaaaaaaaaaaaaaaaaaaaaaaaaccaaaaaaaaaaaaaaaataaataaataaacaaaaaaagaatacagaaaaataagaatgtgggccctctgttttaaggggcccaagctggcctccccgttgttatgagatatttgcttgtttacactgccccctcgttgccatcaactggctcgagattgccccctttgatcgctgggaagtccctggccttgccctatttagggttctttgttccttgccccttttggcccatggggttaaacggcgttgcgtccactctgctggccctatccaaaagtttttctgtccaaagggcaactttgtcgacgctgttgtctcggacattcagtcccgctgtgttgaatgctccacccgtagaatccgtttaactgacaactttcctccattgcgataaatgcg

SEQ ID NO: 12076 - DNA, 575 bp, Gossypium hirsutum
  unsure (1)..(575): unsure at all n locations; Clone ID: LIB3829-003-Q6-K6-D12
aaattntcgaaagaaaaagaaaaaagtttgcatacgatcgcgtaagccactcgagtgccaacaaggcggatgagatagatctagaacaggggagactttgtacccgggactcagctacggcgagaaccaactccggtggggttttatccgcaaggtttacggcatcttggcagcgcagttggttctaaccaccgtggtatccgccttcgtggttctttcggctccggtcaacgagctccttcgtggaaattctggcctcttgctcttcctctgtttaatccccttcgtcttgttgtggcccttgcatgtctatcaccaaaagcaccctgtgaacttggttatcctcagcctcttcaccgtgtcattgagtctcacagttggtgtgagctgtgcaaataccgatggaagaatcgtgcttgaagcgctaattttgacagctgctgtggttgcatctcttactggctacactttctgggcatcgaagaagggcaaggacttcagctatctcggaccgattttgttcaccggccttattatcctcatcttaactggtctaatccagatgttcttcccgc

SEQ ID NO: 12077 - DNA, 614 bp, Gossypium hirsutum
  unsure (1)..(614): unsure at all n locations; Clone ID: LIB3829-003-Q6-K6-D2
aaaaatgtttttgtttttaaaatataaacttacgacatctacaaatggtgacctcagtgctacctagagtagaaagcttggcaagcagtgggattcaatcaatcccgaaagaatatatcaggcctcaagaagagcttacaagcataggtaacgtgtttgaagaagagaaaaaagaggaagggcctcaggttccgaccatcgatttgacagaaatcgagtcggaggacaaagaggtccgggaaagatgtcagcaggagctgaaaaaggctgccatggaatggggtgtgatgcaccttgttaaccatggcatctccgaggagctcatggatcgtgttaggaaagttgggcagaaattctttgaactccctgtggaggagaaagagaagtatgccaacgaccagagctctgggaatgttcagggctatggtagcaagcttgctaacaatgctagtgggcagcttgagtgggaggactacttcttccatcttatttttcctgaggataagagagacttgtcaatttggcctaaaatccccagcgaatacacntgaagttacaagtgagtatgcaaggcaactgcgaggcctagcgagcaaaatactntcagcactatc

SEQ ID NO: 12078 - DNA, 606 bp, Gossypium hirsutum
  unsure (1)..(606): unsure at all n locations; Clone ID: LIB3829-003-Q6-K6-D3
aaaattcngtaccgttaatgcccctccactttcttcccccaaanaccctcganntttccggtgatagnnaggganacgagnnaaaggggaaacaacaatggtgtctttgaagcttcagaagcggcttgccgctagcgtcctcaagtgtggtcgtggcaaggtctggttggaccctaatgaaatcaatgaaatctccatggccaattccaggcagaatgttaggaaactggtgaaggacggttttatcatcaggaagcctacaaagattcactcccgttcacgtgcatgtaggatgaaggaggccaagagaaagggccgacactctggatacggtaagaggaagggtacaagagaggcaaggttgccgacaaagatcctttggatgaggagaatgcgtgtactgaggcgattgctttgtaagtatagagaatccaagaagatcgacaagcacatgtaccatgacatgtacatngaaagttaagggcaacgtgtttaagaacaagcgtgtcttgatggaaagtattcacaagtccaaggccgaaaaagcgagagaaaagactctatccgaccagttcgaggccaagcgtgctaagaacaaggcaagca

SEQ ID NO: 12079 - DNA, 413 bp, Gossypium hirsutum
  unsure (1)..(413): unsure at all n locations; Clone ID: LIB3829-003-Q6-K6-D4
gttcagatcactccggccattaacctactgagaatgaatgcctgtccaatgaagcagtgaaacagttgtcagttgttaggttgcatttctgttattcaatagtgtgaattggccaactagaaaaaaaatgttgaaatcattctgagactgaanatataatgtttagtttattgccccagnatggtacccatttctaacttagttgtatgaatccatgtnttgccttaatcttttttcttcaccagnaattcttgaaattggtaagccaaaaacacaattttgggtggttttccgaaatttacctttttcccgggggatatggaagccttttaaaaaaaaattttttttttttttttttttaaaaaaaaattgagcgcccccccattttttggggggggggggggggggttttt

SEQ ID NO: 12080 - DNA, 589 bp, Gossypium hirsutum
  Clone ID: LIB3829-003-Q6-K6-D5
cattttctccatttcttcttattctctcccttttttaacttccaacaaaaaccaaaaaccccaatttaacgcccccaccccttgttttccttttccatgaccaaattctagcaaaaaaatgaagagagatcatcaagaaatttctgggagtggttcaaatccagctgagagttcatccattaaagggaaattatgggaagaagatccagatgctggtggcatggacgacgagttattagctgttttgggttacaaagttcggtcatcagatatggcggatgtagctcaaaaattggaaatgttggagaaagttatgggtactgctcaagaagatgggatttcacagcttggtgatactgttcattttaatccttcagatctatctggttgggttcaaaatttgttgatcgagttcaacggttcaacaacaacaccagatcccaatttcaacgatgattctgagtacgatcttagagcaataccaggggtcgccgcttacccaccggtgaaatcggatccgggtctagaaaatacccggaaacgagctaaaactgagtcgtcgtcatcatcatcttcaacaactactcgt

SEQ ID NO: 12081 - DNA, 582 bp, Gossypium hirsutum
  Clone ID: LIB3829-003-Q6-K6-D6
gggatctacttccacaagatggctaagagaagaaacagagctgaaatacttggagttcgtgcaagtagccgccgttcacgccgctttgtgcttcaccaacctttacctttacgctaaggaaagacggggccgttgaaacctagcgtcgagaccgttgagggaacggttaagagtgtggttggaccggtttatgataaataccatgatgtccctgttgaattccttaaattcgttgattccaaggtgggtgaatcagtgaccaagcttgatcgtcgagtccctccagtcatcaaacaggtctcaaccgaagccatcttggcagcccaaaaggctcccgaggttgctcgtggcgtggcttccgaagtccaccgtgctggagtggtgaacaccgcctcaggattagcaaaatcagtgtacaccaagtatgaacccacagcaaaagagctttatgcgaagtatgaacccaaagctgaacaatgtgcggtttcagcttggcgtaaactcaacatgctcccgctcttccctcaagttgcctcggtcgttgtcccaacagctgcttattgcagcgataagtataacgag

SEQ ID NO: 12082 - DNA, 584 bp, Gossypium hirsutum
  unsure (1)..(584): unsure at all n locations; Clone ID: LIB3829-003-Q6-K6-D7
ggatgcaactagnacagaacttgctcttgtagttttgtatttgaataaggctgaagcaagggataagatatgcagggctatacaatatggctcgaaattcttaagtgatgggcagcctggcacagcacaaaatgttgacaaatcaaccagcttggcacggaaagttttccgcctttttaagtttgtgaacgatttgcatggtcttattagcccagttcctcaaggaactcccgttccacttgttctgctaggaaagtcaaagaatgcactgttgtcaactttcttatttctcgatcaaattgtgtggcttggcagaacaggcatctataagaacaaagaacgtgctgagttgattggacgaatatcccttttctgttggatgggatcatcaatatgtaccacattggttgagcttggggagcttggaaggctatctgcatcaatgaaaaagttggaaaagagacttaaggatagtgacaagtacaagaatgaggagtatcgtgcgaagctccaaaattcaaatgagaggactttggcccttgttaaagcgggaatggatatagtagtagcagttgggcttcttc

SEQ ID NO: 12083 - DNA, 573 bp, Gossypium hirsutum
  Clone ID: LIB3829-003-Q6-K6-D8
cccttccttttcacacttcttcaaaattcaaaccctaatctataaaaaaaacatgaaattaagttcatcaatcttcacttttcgcttcctaaacttcaattccttattcattaaatctcatccttccttcaaaatttctgccgctaccaaaagaaccatgactcaattccctaatttttccaccaaaatttcaaattcttgtcccgccaatacggcggaggattcccaggtgtcgccgcccgagcccaggccgcagtctccgcctcgcaagccgtggctcatcgtcggtctcggtaatcccggcaagaaattcaatggcacccgccacaacgtgggtttcatgatggtagacgctatagctgaggctgaagggatttctattaacactgttaactttaaagctcagattggaaaaggatttataggaaatgttcccgtcatgcttgccaaacagcaaacgtttatgaactcaagtggtgagtctgttggggccattgtatcatattacaagattccattgaagcaagtacttgtgatttttgatgacttagatttgccttttgccaaattgag

SEQ ID NO: 12084 - DNA, 508 bp, Gossypium hirsutum
  unsure (1)..(508): unsure at all n locations; Clone ID: LIB3829-003-Q6-K6-D9
ggttggggaatcaaggcactaaaggaggtgctacgatttctgggttgacttcagcgagtgcatgtcccgttgcagangcccaagattgctctctccttcgtgaagactatctcgagtgcctccaccattccaaagagtttcagcgaagaaatcggatttacaaggaagagcaacngaaaaataagagctgccacacgaaaagaaaaggatggcggagatggtgttcaccatcatgcatgatgataatttgtgatcattcaaatttccaagaaaaataatgcatggagattgttgtatttttgttggatctttcctatatttcctgttccttggaatggagactgttgttttgagcccgtgcaacagaggcaatggttaatctttcatcactagacctggatgagacagcaatatttgcgactttaattttcaaattctgagaattttattttagtctcctccagcaggagcattgttgtttgaatcggattaaactgattagatcaga

SEQ ID NO: 12085 - DNA, 520 bp, Gossypium hirsutum
  unsure (1)..(520): unsure at all n locations; Clone ID: LIB3829-003-Q6-K6-E1
tttttgcacgcagnacataacttggaatcattccgggcggagatggggtcaatttttagaggaatcgacatgaacatattgccatcgacggcagattgtgaagaagaagctggggtttcatctccgaacagcacgatatcgagcgtgagtggaaaaaggagcgaaagagaaggcaacggagacgagcttgagatcgaaaaatcgtcatctcgtggaatcagcgacgaagaagatggcgacacttcgagaaaaaagcttagactttctaaagatcagtctgctattctcgaggaaaactttaaagaacacaacactctcaaccccgtaagtaaattcaaatagaaacttttcatatgaaaactactgtttggctgctaagaaaagtatacgagaagttaaaaatggaaaatttagtctctaatgggttgttgaattttactatcttttgcagaaacaaaagttagcattggctaagcagctgggattacgacccagacaagtcgaagtgtggtttcaaaac

SEQ ID NO: 12086 - DNA, 438 bp, Gossypium hirsutum
  Clone ID: LIB3829-003-Q6-K6-E10
gaaaattctggccagtggcttaccagaaacaatatatgtgagagctggtgaagcaaatatgggtctgcgaaggagctgtcattatgggaccttctggcactacataccatgatgggctttccttctttgattgacttcttccctcgcaaaatatgcctaatagaaccatccgatggccttattgtctatgtccggcggtcgtccgaatataatccaaatctgtttagctgcggtaaagcatgcctaagcctttagggcacttggcatggagaagagactgagatgtgggtttcaggccaatcaaccatgctacagagcttggttgccatacaagccctgaatctgaatgctaaacccttctttaacgaacctggatttgagacgccacatgtcggagctgcaggtgaaaagaggtgcatgaagtccaatgaggatgca

SEQ ID NO: 12087 - DNA, 590 bp, Gossypium hirsutum
  Clone ID: LIB3829-003-Q6-K6-E11
gaaaacttgctgcgataaacaggcaccaacaagggagcctggtccaagcaagaagatcaaaagctcattgattatatacgtatacatggtgaaggctgttggcgttccctccccaaagccgcaggtttgcaccgttgcggtaaaagttgcaggctgagatggataaattacttaagaccagatatcaaacgtggtaactttgctcaagacgaagaggacttaattatcaaactccatgctctccttggtaaccggtggtcactgatagctggtagattaccaggaagaacagataatgaagtgaagaactattggaattcccatataaagagaaagctaatgaagatggggatcgatcctaataaccataagttgaaccaatatcctcatcatgttggtccccttaaccccaccaccaccaactccatggatgtggcatgtaagcttagagtgttttcaacagaaaatgatgatggggtctcagatgctgcaagttatctcgaagacgaaacaccgcccactggtgtatccaacttggaccttgatctcacaattgcttttccttcgagtcctatcaagaatattattga

SEQ ID NO: 12088 - DNA, 587 bp, Gossypium hirsutum
  unsure (1)..(587): unsure at all n locations; Clone ID: LIB3829-003-Q6-K6-E12
cggccgcgtggngaaaggtataccgtccaaccttccttgcagcaaaagaaacacccaaagttatgttcagcggcaacttctcgaacaaagctcaccaagcaaatcttctgctggaacaactccaaagcacgaagattattgccaatcaaattggcaacaatttcaagccactggcttggaagagtcaaggctccaggagcaagcttgtggtgagagaatcaatggaccttcaaagttagagtcccttgctgatatgataaccaagcaccagagcacttacaaagagtttatacagatgtcagacacagattctccatcaaaaaccgaatccacgggtgaaaaagagtgccatgctcatgggttttgcagtaacaaaaaagaagcttcggaacaagatcaagctctaggggatcaatgtgagaaacatattaccattttgagaacttgcttgaggaaacatgacagtgcccggaagttgcttcatttgaaagtttccttttacttgtctcccgataatgaggaaaggaaaagaaaagttgcagaatctgaaggttttattacttgttgaacttagtaaatcaatggat

SEQ ID NO: 12089 - DNA, 635 bp, Gossypium hirsutum
  unsure (1)..(635): unsure at all n locations; Clone ID: LIB3829-003-Q6-K6-E2
gcaaaatctgtggatagtaattatgaacacgtttcctcccaaactgacatgctaaccgatcaaaatctgtcagagtctagagctctggttccagttccagcgatgaatgtcgaggcactagctgttgtccctgtcaaccagaaaattcggaaatctgagcttgcacagcgtagaaccaggaggccattttccgtgtcagaagtagaagcattggtacaggccgttgaggagctcggtaccggaaggtggcgggatgttaaattgcgagcttttgagaatgctgaccatcgaacttacgtggatctgaaggataaatggaaaacattggttcacacagcaaaaatttcgccgcagcaaagacgaggggaaccggtaccccaagaactattggatcgggtcatggctgctcatgcttactggtctcagcatcaaactaaacaacaaggaaagcatcatcccggaactttgagaattactgactcccaagctgacagaatcggatttgcggtcgccattccgaccattacaatgtaaaacaagaagaaaagggtaaaataacaaatgacaaagaacaggggggggaaaaagaaagaacatgtacaaattgattcangttttatgtaatattttcacac

SEQ ID NO: 12090 - DNA, 615 bp, Gossypium hirsutum
  Clone ID: LIB3829-003-Q6-K6-E3
cggccgcgtgggtgttggtactccaaagggcttgtcgttccggtagtccgtgatgctgacaagatgaattttgctgagatagagaaaacaatcaacaaccttgctaagaaagcaaatgatgggaccatttcaattgatgaaatggctggaggctcatttacgatatccaatggtggtgtctatggcagtcttttgagtacccccatcatcaaccctcctcagtcggcgatcttgggtatgcactcaatcgtgtcccgaccaatggttgttggaggtaatgtagtgccaagaccaatgatgtacattgcactcacttatgaccataggctgattgatggaagagaagcagtcttctttttacgacgtatcaaggatgttgtcgaagaccctcggaggctgctacttgatgtctaaaaggcctaaatcgcaactaccgtgataattttcatgcttttttttccggcacacttagcattggatgtatatctcctatctaaatgaacatgaataaatgtctgaagttttgtagggtttcatttgttgattcacccgtaaacgagttccaaaatcgcggctggccatcgttgaactgttctcgagtttgctgatgtggca

SEQ ID NO: 12091 - DNA, 585 bp, Gossypium hirsutum
  unsure (1)..(585): unsure at all n locations; Clone ID: LIB3829-003-Q6-K6-E4
atcctctgaagtaanaccgaatcgcggttttgcttttgtcttgtactacaacaatgcctgcgctgattattcaaggcagaaaatggcaagtgcaaattttaagctggatggcaacaaccctactgtcacatgggctgatccaaagagttcacctgatcattctgctgcttcgcaggtgaaggctctatatgtcaaaaacattcccgataacacttctacagagaagctaaaggaagtatttcagcgccatggggaagtaacaaaagtggttatgccacctggcaaagctggtaagcgggattttgggtttatacattatgccgaaagatcaagtgctttgaaagctgtcaaagatacagagaagtatgaaatagatggccaagtcttggaagttgtccttgccaaacctcaggctgataagaaaactgatgcagcatacccttacattgctgggcttaatccaaaccatcttcagcatcctgggtatggtggttttactggaactacatatggctctccaagtgctggatttggtgctgccactagttttcagcagccagtaatatattggaagagggccaatgc

SEQ ID NO: 12092 - DNA, 433 bp, Gossypium hirsutum
  unsure (1)..(433): unsure at all n locations; Clone ID: LIB3829-003-Q6-K6-E5
cggncgcgtgggcttgaacctctttaaaaatttctttttatgcttttttctaggcctgccatcgaaagccgttcttgtaaatggaagggaattaacataccgtagttacccatcgaaagcagccactgtttctcctgttcttggttgaaatgccagccaagtagatttagctgtaccgaagttacccatcgaaagcagccactgtttctcctgttcttggttgaaatgccagccaagtagatttagctgtaccgaattttctttaattttagaaaatgcgatacgctggtttcatgaattctatttctgttcgacattagtattcaggcataggtaggtatttggtgatagactaaaattttgttgcaagagttggatgggatggaatcaaacgttggctttacaatattgataactttgtaattgtgattca

SEQ ID NO: 12093 - DNA, 599 bp, Gossypium hirsutum
  unsure (1)..(599): unsure at all n locations; Clone ID: LIB3829-003-Q6-K6-E6
gngnagaacaanagtcattcaagtatgcttgggtgcttgacaagctcaaggctgaacgtgagcgtggtatcaccattgatattgccttgtggaaatttgagaccaccaaatactactgcactgtgattgatgcgcctggacaccgtgactttatcaagaacatgattactggtacctcgcaggctgactgtgctgttttgattattgattccaccactggtggttttgaggctggtatctccaaggatggtcagactcgtgagcatgctttgcttgcttttacccttggtgtcaagcaaatgatttgctgttgcaacaagatggatgccactacccctaaatactcgaaggctaggtatgatgaaatcgtgaaggaagtctcttcctacttgaagaaggttggatacaaccctgacaagattccatttgttcccatttctggttttgagggtgataacatgattgagaggtctaccaacttggactggtacaagggccctacacttcttgaggctcttgaccagatcaatgagcccaagaggccttcagacaagcctctccgtctaccacttcagnatgtgtacaaaattggtggtatt

SEQ ID NO: 12094 - DNA, 601 bp, Gossypium hirsutum
  Clone ID: LIB3829-003-Q6-K6-E7
atttttgctcccctcaatcgaaccttgaccctccatctgccatgtcaatcctccgcgatgaacggagatcggcctgttcgagtctccaggtggttttctttccgccttccactcccctcggaccccgatttcaacgaagcagaggagatctcacggcgtatttacgaggtaagatttcattccctctcccttttatacacccaaaacgcaaaataacaaaagaaattccaggaagaatgaaactaagccaagaagaaaaggaaaaatctcagaaattttgaatcggatcaccttcttgcaattgctttttgaatttttttccagtatctgtttagtatgcgtgtattgcatattgtgtattcattcctaaacgtgtgtacccgattacaagattcaaatctggctttatagccgaaaaagaaagaggaaaaattaacgaaaataaataaaaatacaataaattccttttgtttgcacttgttgttgtttttgtttgtcttcttgcaggcacgggtgcgcgctggcgtgtgtacgggagccatgctggcttatggaggcttggcgtggttgctggaggcgtcgtacgaagcaaggctggggg

SEQ ID NO: 12095 - DNA, 587 bp, Gossypium hirsutum
  Clone ID: LIB3829-003-Q6-K6-E8
gtagtcgtttgctagtaagctctgaaaagaactgttttggattggagggactatttcgatcaccatacgttacctctttcatgccgcaatccttcagcttggcctcattttcctcccgatacagggaattgatggctaattatagcgatgagatgagagtgttggctcagagactattggcattaatgtctgagagtttaggactgaaggcgtcctgcattgaagatgcagtcggggagttctatcagaacataacagccagttattatcctccttgtccgcagccagatttgacgttgggcctgcaatctcattctgatataggtgtcatcacgcttctaatacaggacgatgttggcggccttcaagtgctcaaggatggggagtggctcttggtcgatccccttccaaatgccatccttgttcttgtggctgaccaaactgagattataactaatgggaaatacaaaacctgtgtgcaccgagccataacaaatgcaagcaaagcccgtctctcaatcgccacttttcatgacccagccaagactgtccgaatatcccccgtctctgatcttgtgagtcaatct

SEQ ID NO: 12096 - DNA, 585 bp, Gossypium hirsutum
  unsure (1)..(585): unsure at all n locations; Clone ID: LIB3829-003-Q6-K6-E9
caaaacagnaccattcttttgcaatgcttcccattcctcagcagtgctaattctgtagacgaattcttccccttgacctgcggccattgtttacgctcagcaatagataattgtgataactgtgttgtagcgactaggcttaatagtattattaattagcttggacgtgtatccttatgggctttttatctaaatcaagctccgcagtccatatatataaataaaaggctcttaactccaggctttaccttctagcgttagttcgttcagcgccttcgattccaatagagatagagagagaggaggagatcttcgcttctctccgtcgttctgctccatttgataaccgcttgcagttctctcagacgtgaaaaatggggttgtctttcacaaagctattcagccggcttttcgccaagaaggagatgcgtatactgatggttgggcttgatgctgctggtaaaaccaccattctttacaagcttaagttgggagagattgtcactaccattcctaccatcggtttcaatgttgagaccgtggaatacaagaacatcagcttcacggtttgggatgttggtggcc

SEQ ID NO: 12097 - DNA, 104 bp, Gossypium hirsutum
  Clone ID: LIB3829-003-Q6-K6-F1
cttattcatatatctcgtatatatacagatatataaactatcttacttttgttatgatacttctagtatactttctatttagaaatgaaaattgtttcccttct

SEQ ID NO: 12098 - DNA, 621 bp, Gossypium hirsutum
  Clone ID: LIB3829-003-Q6-K6-F10
gtcgtcaatgaaaccgccggcgaatcgctatctcactctcaattcgtttctcaagtacgttccctagcttactctctacagcagcgttactctctttcccaaaacgacgtcgctttcgttgtctcaccgccttcgattcatattcccgttgtttacttcgccttgctgtctttgggaatcatcgtttctccctcaaatccactcagttccaactcggaaatcgcttaccagatccaactcagtaaatccgttattgccttcgctacttcaaaagccttccataaaatcccttttcttaaacacggaaccatactcctcgactcgcccgagtttctctccatgttaactgagtccaatatcgataacatcattaaaagcgtgaaggtaaaccagtccgacacggcagcgatattgtattcttcgggaaccaccggccgagtcaaaggcgtgatggtgactcaccgaaacctaatcggaattttggcgattattcatcgctataacatggatcaaggcaaagataacggtatgccgccgtggcgaccggtgacgtttttcaccgtgcctttgttccacgctttcggtttctttatgttgttggggatggttttgtcagcgagt

SEQ ID NO: 12099 - DNA, 581 bp, Gossypium hirsutum
  Clone ID: LIB3829-003-Q6-K6-F11
ctttatcatcatcactgtctctttagcctttaccctttgtttcgttgatttgtttctaaggatttaatctccaaaccttcttcccatttcttcattacattgttcaagaaaaaagaagcaaaaaaacatggccaaagttctgttgttcattgcactatgtgtgcttccagctttggttagtgctacacgcattctgaataatcaattggtggtagaaggctatgtgtactgtgatacttgccgtgctggttttgaaacccctaagactagaagcctagctgatgccatggttaggttggtatgctccgacaggaagagcggccaagttgtcttcaaaaaggagggatacaccgacaaaaccggaaaataccagattcgtgtatccgaggatcacttggatcagatctgtgatgcagttcttgtgaagagctcccagcttggttgtgccacaatgtcccccggtcgtgaacgtgcccgtgttatcttgaccaacttcaatggcatttcatccaccacccgttatgccaatgccatgggcttcatggttgacgagcctgaagcaggctgtgctgagatgatga

SEQ ID NO: 12100 - DNA, 612 bp, Gossypium hirsutum
  Clone ID: LIB3829-003-Q6-K6-F2
ctcttcaggtaaattcttggttgtttcgttcgttttaagaacagagattcgaagatgagtaagcttcagagtgatgcccttagagaagctatttcaaccattgtggctaattccaaggagaaaagtcgcaagttcaccgagaccattgaactccagattgggctgaaaaactatgatccccaaaaagacaagcgtttcagtggttccgtgaagctgccacacattcctcgtcccaagatgaagatttgcatgcttggagatgctcaacatgttgaagaggctgagaagattggtttggattatatggatgttgaagcattgaagaagctaaacaagaacaagaagttggtcaagaagcttgctaagaaatatcatgcatttttggcctctgaatctgtcatcaagcagatcccccgtctcttgggtcctggtctcaacaaagcagggaaattcccaacccttgttactcaccaggaatctttggagtccaaagtgaatgagacaaaggcaatggtgaagttccaattgaagaaagttctttgcatgggagtcgccgttgggaatgtagcaatggaggagaagcagatcttccaaaacgtgcaaatgagcgtc

SEQ ID NO: 12101 - DNA, 521 bp, Gossypium hirsutum
  unsure (1)..(521): unsure at all n locations; Clone ID: LIB3829-003-Q6-K6-F3
ncaccatccacaggnactccgacaactccgagtacagggactccgacaactcctactacagggactccaacaacacctaccacagggactcctaccacaacaccaaccacagggactcctaccacaccaacaacggggacaccgacaacagggacaagcaccgggattccttccacgacacccaccacggggacaaccaccggcacaaccaccgggtctccaacggtgtttggtggtggcaccacctcacttagtccgtcgggaacaaccaccggcatcaatgatccaagtcatgctgtgcctctcttcacgagcaccagcaacaacattctcttcagccttgctgtcacactttggattctggcatactattgggcttgaaaaggttttaacattcatgcacttcgacattcatgcatgcatgtatgtatgtatttatgtatgtagtgatcattttagtagtagaggtaaaaaagatgcgtttttgggcatgaccagtaatattaatatttaattaagct

SEQ ID NO: 12102 - DNA, 639 bp, Gossypium hirsutum
  unsure (1)..(639): unsure at all n locations; Clone ID: LIB3829-003-Q6-K6-F4
gngcactgccggtcaggttattcgttgcaaagctgcggtggcatgggaggccgggaagccactatctatagaagaagtggaagtggcaccaccccaaaaacatgaagtccgtattaagattctcttcactgctttatgtcacactgatgtatactactgggagtgtaagggttacactcctctgtttcctcgtatacttggtcatgaagcctcagggatcgtggagagtgtgggtgagggtgtgaatgatttgaaacctggggatcatgtgcttcctatcttcaccggagaatgcaaagaatgtcgccactgtctgtcagaagaaagcaataacatgtgcgaactgcttaggatcaactgcgaccgaggtgttatgcttgctgatgggaaaaccagattttccatcaacggcaagcctatctaccactttgttggaacctcgacttttagccaatatactgtcgtccatgttggccaggttgccaagatcagtccaaccgccccgcttgataaagtctgtcccattagctgtgggatatgtacaggttttggggccactgtaaatgttgccaaacccaaaagggtcaaactgttgcagttttttggactgggtgcccgtggtcttgccgccgctgaaag

SEQ ID NO: 12103 - DNA, 608 bp, Gossypium hirsutum
  Clone ID: LIB3829-003-Q6-K6-F5
tcccgggttcgacccacgccgtccgagttcatcaagtttttagaaaaaagtcgatatgtgcctgtgaagttggcaccatccggattcgttcttctcagagacctgtgccctaatgaaccggaggtgctctctctaacagatgcacccacatccacggcatccccggcaggtggatcaacagcagctgcaggacaacagagttcatcagccatggccgttgatgatgaacctcagccgcctcagccattcgagtactcatcctgattttacccaatcctggaactgaaacagggccaagaatacttttatacttgagcagtgccttttgacatcatggctgttcaacctagagtgaaactaggagaactgatgctcgattcccatcctcaacttagggacattctgagtttagattacatcattcttaattccacgaggatatgttttacttgggttagggttgaacttaatttcccttttcaggcatgagtgtgcgttttaaaggatgttggtcccattgttgattgttccctttttatcttatgtttttattcctttggaaagatagttgtatacatttatacatgttcaaccgttattcccttttc

SEQ ID NO: 12104 - DNA, 581 bp, Gossypium hirsutum
  unsure (1)..(581): unsure at all n locations; Clone ID: LIB3829-003-Q6-K6-F6
gttccttaaaatcgctgataccgtgctggtattgtcccagtctcctttcgtagagtgccgtgccngaaagcacgggnggaataagattcacggtcaacggattccgttacttcaacttggttttaatcaccaacgtagccggtgcaggagacctcgtgaaggttagtatcaaaggaaccaaaaccggttggatgagcatgagccgtaactggggccaaaactggcaatcaaacgccgtgctgatcggtcaggcactctcttttagagtcaccggcagtgacaaacgcacttccacttcatggaatgtggcaccacctaattggcagttcggccaaaccttcaccggcaagaatttccgtatttgaaaaaaaaaaaaacacaagacaagccgtttgaaatcaaacttttttgttcttggtttcccgccttcaattttcctttattttcccggaaaatctgaagtggggtaaaagaaagtgttattattaggatttagggaaaggaaacctaaaagcttaggttataagtttgtaaactatgtgtgtggcgttaacttttttttactgttgtttttatttgtg

SEQ ID NO: 12105 - DNA, 584 bp, Gossypium hirsutum
  unsure (1)..(584): unsure at all n locations; Clone ID: LIB3829-003-Q6-K6-F7
tggttttcaagggactttcagttagcacattatgattaagcaaggttaggattgaagtcctttcactatcatctcttctaatggtgcagatatgacagatttacattacntcaacactgcctcatgngaaattttattctattgtaacgtttaatcattggtcaaccagatgaaacctgtgagagagagcatgacagaagcattgcaattatggaagaagattgcaggaaaaggggaagatggagctgcagatgacctgaaagccttgtctcatgatggtgacaatattcagtcagctgaatcatcagaaaagaatggctccaaagatccaagtgcgggtgataaaaaaaaacacatacttcagattctgtttctgaaggcaaaggtggaagcattattgacaaagcagttgtaattttaaagaagaaatcacctgcattaacagacagagagttgaatcctgaattctttcagaaactcgaaacaaggggttctgatgatttgccagttgaagtagttgttcctcgaagatatcttaattcttcaaacttgaagagtgaagaagtgtctgatccaaatggttc

SEQ ID NO: 12106 - DNA, 587 bp, Gossypium hirsutum
  unsure (1)..(587): unsure at all n locations; Clone ID: LIB3829-003-Q6-K6-F8
ggnaaaaaatgtcagctcctacctccccaggcagccggtgttgcagctgtctcttcttcactttacaataacaccaaaccctcctctcttttttcttcatcgattcacttccttccttcaagacttagctctaagcagttaaaaccttccaacctcaaaacccaaagcctcaattcccttcctttgtctcttaacttatctctcccacgtctgccctgcttttcagcagcttttgacagcttccaagttactgaagatgaccaaagcagtggagaagaatacccagaaacagaatctcaagaccttgaagaacaaccacaacaagaggaagctgaagaagataaggtttcagagtctggcggtgaagaaggaaagttgtatgttgggaatttgccttattcaatgacttcttctgagttaactgagatttttagtgaggctggtagtgttgctaaagtggagattgtttatgatcgagttacggataggagcaggggatttggctttgtaacaatgggngagcgttgatgaggccaaagaagcaattagactgtttgatggatctcaagtcggaggtcggacagtga

SEQ ID NO: 12107 - DNA, 578 bp, Gossypium hirsutum
  Clone ID: LIB3829-003-Q6-K6-F9
caaatctctgtttatcatttgtattttattccctagtcggcgaaaccctatctaacgaaactcaaggatgtcgccagctgctgtggttgaagccgccaatcctgagactgagcaggttccttctactgaggaatccaagatagagcttcagagcgaggaggctgtggttgaagatgttaaagaagatgagaaagaacatgacgacgacgacgacgaggatgacgacgacgacgacgacgatgataaggaagatggtgcccaaggtgctaatggaagttcaaagcaaagcagaagtgagaagaagagtaggaaggccatgttaaagttaggcatgaagcctgttactggtgtaagcagggtcaccattaagagaacaaaaaatgtgctatttttcatctcgaaacctgatgttttcaagagcccaaattcagagacctatgtcattttcggtgaggctaagatagaggatttgagctctcagctccagacacaagctgcccagcagttcaggatgccagacattggttctttggcagctaagccagacacttctactgcagctgctgcaccggctgatg

SEQ ID NO: 12108 - DNA, 601 bp, Gossypium hirsutum
  unsure (1)..(601): unsure at all n locations; Clone ID: LIB3829-003-Q6-K6-G1
gttctagacgctcgcgactagaacgtcctccatttctctatttctctctcttctctcaaatttcccttttttctttttgtagcgtttcatttcttctcagtccgataaaggacggagaattccttttttctctgttttatcaatcaatggtctttcattcaatctcagaaacgagaaataactcgaccgaaaccgtaaccgaaaccgaaggtgtggtgatggcttcttcttcggccttgaaatctcagcctcttcataactttcaactacatgacctcaaatgggccatgaaccacagtaacaatcaacgccttcgaaagctcgctgattcctctcagaaatctcctcagcgcagcgataccgataccgactccgacaataaccggaaggggaatacagtgcgggaagctcctttcaataacggagcttcttctggttcttctctcgatcataagactggaaaatcggagaagaaagttatcaacggtcctgattctctggttgatagtgacagcttngggaagaaagttgctccacctgcaggtagatcgaagatctacatacgtttgcgaacgaagaatcataacctgttgaggaggtc

SEQ ID NO: 12109 - DNA, 604 bp, Gossypium hirsutum
  Clone ID: LIB3829-003-Q6-K6-G10
ggtggtgagaagtgctccagtgaatggagggatgtcgaagccgaaggtcgacaatggtggggtggattcgatgctgtttacgagaagtattgcgagcgtatgttgttctacgataagatgattgcacaacagctcaaggaagctggctcctcaaatccttcaactccatccccgaaatctgaaaataagaaacttcggtcccccttgagttgccttttcttgaagaagatcgaagaacctgatgaagaagccgagcaactacaacagtctattaataacccgtatcaggatctcgaaacagcatatgttgctcaattttgcttaacatgggaggcgcttcattgccaatactcgcaactcagtcagatagttttgtgccaacctgagaatcccatctgttacaaccacagtgctcagcaacttcaacaatttcaggtcttattacaaaggtttatcgaaaatgaaccttttcaggatggtccgaggtcagaaatctatgcccgagctcgaaatattttacctaagcttcttcaaattccaaacattcaaggttcagatcggaaggaaaaggtggaagaagaatcggattattcggtccttgccc

SEQ ID NO: 12110 - DNA, 583 bp, Gossypium hirsutum
  Clone ID: LIB3829-003-Q6-K6-G11
gcaattaccactttatgaaggggtggtggagatttgacagccacagccatcggaaagcattggggttacgaggaaatgcaggtatggaaagatgttgatggtgttttgacctgtgaccctaacatatatcaacatgcataacctgtccagtatctgacttttgaagaggcagctgaacttgcttactttggtgctcaggttctgcatccgcaatctatgagaccagctagagagggtgatattcctgtcagggttaaaaattcttacaatcctaatgctccaggaactctcatcaccaggaatagagatatgagtaaggcagtactgaccagcatcgttttgaagaggaatgtcaccatgctggatattgtgagcacacgcatgcttggtcaatttggctttcttgcaaaggtattctctatctttgaagatttaggtatctcagtggatgttgtagctactagtgaggtcagtatttctttgactttggatccatcaaaactttggagccgagagttaattcagcaggaacttgaccatgttgtagaagaactcgaaaaaattgccgttgtcaatcttcttc

SEQ ID NO: 12111 - DNA, 137 bp, Gossypium hirsutum
  Clone ID: LIB3829-003-Q6-K6-G12
ctagttcgcgagcggctgccctgtgttttttttttttatcgcagtaaaaactgctttgtgatttcctcacatagatattactttttactttgttaaccattaatcaaaaatgagagagggagagcatataaagagct

SEQ ID NO: 12112 - DNA, 505 bp, Gossypium hirsutum
  unsure (1)..(505): unsure at all n locations; Clone ID: LIB3829-003-Q6-K6-G2
gtccggcggcttcgtaaaaactgcactacaanaagcagcaaanaagagagaaatgagatattctgacttgaagaagattgaccgtggtgtccgccggcatttccacgacgatatcacggtaatcgtggtgtttctcaactcaaacctcatgagcagggctagctcagcaaagggccctaatctatccgttagagggggcggagttaacttccctccgatatactagccccgtgtgccacgccaaccgaacccggcggcacctgatcatatatatatctatgtcgtgttttttttttcgttgttgcatcattttcttatgtgaatacctggtagcttccgaaaagcgataaaaaccggaacaagccttcgattctttgatgtacaccaccgttacttttaaccggaaaaactaatacctgcatttagttttcgtctatgttgaaaaactcgaaacaaacctagagaaatagtacaaggtgttgattgttatagttatttctgggat

SEQ ID NO: 12113 - DNA, 602 bp, Gossypium hirsutum
  Clone ID: LIB3829-003-Q6-K6-G3
tgtgaagtgcggctcaggtactgtcctgaagtgacagtcagccgtaatatggtggaagcatagtggaataccaggactttatggtgcgcaattattctccacctccatccatcaacaatagcatcaagatggaagttggaattgaagactgcctgcacattgaatttgagtacaataaaagcaagtatcatctgaaagatgttattattggcaagatatattttcttcttgtgaggatcaagattaagaatatggatcttgagatacggcgtcgagagtcaacaggatcaggagcaaatacccatgttgagactgagacactagctaaatatgagttgatggatggtgctcctgtcagaggtgaatcaattccaatcaggctgtttctcagcccatatgaactgacaccgacacatcgcaacataaacaacaaattcagtgtgaagtattacttgaatctcgtgcttgtcgatgaagaggatcgtcgatatttcaaacagcaagaaattacgatatacaggctacaggattcctgagtaagcatcacatacatgtaaactttaacattccatccagtaaagaaaaacagtgattaaacttgt

SEQ ID NO: 12114 - DNA, 595 bp, Gossypium hirsutum
  Clone ID: LIB3829-003-Q6-K6-G4
ctctatcatgggtctctcagttgagaattcggtaacacaatctcatacccgaacccacaaaaccttcctcatcaccaactacatcctcttgggagctgcttccgcctgtatcttcctcatcctctccctacgcttgttcccgtccttgtgtggattcttccttatcctcctccacgtcgtcaccatagccgccgccgtctcgggttgctccgtcgccacttccgggtccaacaagttctacgcagctcacatggtagtgatggtgttgacatcgatattccagggctcggtttcggtgcttatattgacccgaacttctgacttcttggggtacttgaagtcctacgtgagggaagatgatggggcggtgatattgaagttggctggtgggctatgtgtggctgttttctgcttggaatggatggtgttggggcttgcttttgtgttgagatactatgcctttgtggaaggtcatggggttggcaatggcagccaagcagcatatcagagaaatgagaaggttcaagatgaagatttgaagaagtggccatggccaatccaagtttaaaaatgataatattcatatatgcttgtc

SEQ ID NO: 12115 - DNA, 602 bp, Gossypium hirsutum
  unsure (1)..(602): unsure at all n locations; Clone ID: LIB3829-003-Q6-K6-G5
cggncgcgtgggngaaaaccttttcaggatggggaactaatgagggcttaatcatagatatattgggtcacagaaatgccgagcaacgaaacttgattcgaaaaacctacgctngaaacctatggagaggatctcctcaaggcactagacaaggagctctcgaatgactttgagaggctggttttgctttgggctcttgatcctgctgaacgtgatgcccttttggctaatgaagccaccaaaaggtggacttcaagcaatcaggtccttatggaaatagcttgcacaaggtctgccaaccaactgcttcacgcaaggcaggcttatcatgctcgttataagaagtcgcttgaagaggatgttgctcatcacacgactggcgacttccgtaagctcctcctacctctagtgagttcatacagatatgagggagaggaggtgaacatgaatctggcgaaaacagaggcgaagttgcttcatgagaaaatttcagacaaagcttacagtgatgacgatgtcataagggttttggctacaagaagcaaggcacagatcaatgcaactctgaatcactacaaaatgaatatggaaatgacataaac

SEQ ID NO: 12116 - DNA, 356 bp, Gossypium hirsutum
  unsure (1)..(356): unsure at all n locations; Clone ID: LIB3829-003-Q6-K6-G7
taaaaaaaanagccaaaggcagagcagagcaaaagcggggacggaggtagcaaatgttgtcgccaaaagccaagtgcaagggaagaaggaacctgcaacaccgtacaatgatgtgatcgaggagacagccagtaagctagtagctgaaaagaggaggaacaaggtgagagcactagttggtgcatttgagaatgtcatagataaagaaactactaacgccaaatgaagtcattttcgtccaaaaatcggtagtcatataaattatcttaacgattccctgagtttcactcacatgcgtgaacactttgtataccatagcttatacatttctcatcatcatcatcatctacatctaa

SEQ ID NO: 12117 - DNA, 372 bp, Gossypium hirsutum
  unsure (1)..(372): unsure at all n locations; Clone ID: LIB3829-003-Q6-K6-G8
gtttgcttgtagnatataacggattataagaaggatcaattaccaatggtattggatgctttggaacgaatgcatgcacatctaaccgctgctgttgtctcaaatgatcccttcttcttgcaagtaagacttagcacttgggactttataaacctttatatcttcagcgcattatagtgttcatcaaatgtaaatccacaggatgtgatcggaaaaacggtgaatgggacaacctatgctggattgagagcaaggactactggagctccacaaaaccattggtaagtaaattgaaaattaaaatttgtttcatgtataatatatcatatttggtaggagatgaaaatggaagactgttcggtacaacgaacg

SEQ ID NO: 12118 - DNA, 302 bp, Gossypium hirsutum
  unsure (1)..(302): unsure at all n locations; Clone ID: LIB3829-003-Q6-K6-G9
tccgcnatactgctccaggtataggtctgagaagcatgattcatttggatgcttaagagagtgttgctgctgtatatttgcccaaccaagnatcaaaactctaatgttttgtcctactatgtgttatatttatgtgcctacttaagctacctttcccggttatcaagagtgcccatatagaactctctctctctaaaaaaaaaaaagagagttctttatatggagttttatattatgtgatgagagaataaattatcttgtaaaagcttgctttgttaatgaaataaattcctattactatg

SEQ ID NO: 12119 - DNA, 595 bp, Gossypium hirsutum
  unsure (1)..(595): unsure at all n locations; Clone ID: LIB3829-003-Q6-K6-H1
aaaaaaaagacaattggttgaagcatggaatagactgtagagcaagaaaaatggtggttcaaggtattaaaagaacagaaaaaaacagcatgaaatcatagctcccctatttcttcaacctctctattaattcatctctttctttttcttcaattattccttcctttttgttgtctttatttaatcctttttggggttgtcattatcagtccaaaatccaaaaccccaccctgaaattatcaaattcccactcccaatttgcttatagtttttctttttcaaagtaaaggaaataaaagagatatagaacaaaaaaggaagcaaaagtttccatggattctcaggttttggtggcgcttgctctctctctcgtcggtggattgagtacttctctaggtgctcttttcgtaattcttaatcaagctcccaatttgaaaatgctcgggcttttacagggttttgctgcaggtctaatgttgagcatatcattccttgatttagctcataacgctatgaactcaattgggttcttgaaaggcaacctctggtttttttctggtgttatcttctttgctgtggttgccaattntatacc

SEQ ID NO: 12120 - DNA, 397 bp, Gossypium hirsutum
  Clone ID: LIB3829-003-Q6-K6-H10
atcaaaagcaaaaagcttgcagaattagaaaaaaaattatgggttctgaacagaatgaaggaacaagctttccaccatcggagccaaagctttgtgccaacggttgtgggtttttcgggacggcagcgaatatgaatttatgttcaaagtgttaccgggacctccgtgttggggaggagcaagcggcgaaggcgaaagctgttatggagaaatctctcagtatcaaaacgaagcatgaacctgtcgttgtggagacttttaagcctcatgtgggttcttcgtctacatcgattgagcaacaacaaccggctgttgttgccgttaatcaacaaccggaaccaaaggcggcgaacaggtgttttatttgtaggaaaaaggttgggttaactgggtttaa

SEQ ID NO: 12121 - DNA, 563 bp, Gossypium hirsutum
  unsure (1)..(563): unsure at all n locations; Clone ID: LIB3829-003-Q6-K6-H11
tccgaccattcatagcatagcagcttagtccaactccacacccaccaccattggctgtttgtaatcatccgaaaaagatggtgaccgtgngaagaagttcgtaaggctcaacgtgcccaaggccctgccaccgtgttggccatcggcacatcaaccccgcctaattgtgttgatcagagcacataccctgactactatttccgtatcacaaatagtgagcacaaaaccgagttgaaagagaagttcaagcgcatgtgtgaaaaatcgatgatcaagaagcgatacatgtaccttacagaagagattttgaaagagaatcccaatgtatgtgaatacatggctccttcactggacgctaggcaagatatggtggtagttgaggtgccaaagctaggcaaagaagcagccaccaaggccattaaggagtggggccagcccaagtccaagatcacccaccttgtcttttgcaccactagcggtgtggacatgcctggggctgactaccagctcaccaagcttttaggcctccgcccctccgttaagcgcctcatgatgtaccaaca

SEQ ID NO: 12122 - DNA, 570 bp, Gossypium hirsutum
  unsure (1)..(570): unsure at all n locations; Clone ID: LIB3829-003-Q6-K6-H12
aaatactttgnggnagaaaagccagggtactgggaaagttgtgtttggcatagatgatgcgttgaaggctctggaaagggtgctgtagaaacccttattgtgtgggaaaatctagagatcaataggtacgtgctaaagcacagtgcaaccggagaaatttcataaaacacctggggagtagggggaggctgatcagagcaacttccgtgatcctgaaacctctgcagagttggaagttcaagaaaaaatgcccttactcgaatggtttgccaacgagtacaagcgctttggttgttctcttgaattcgtcacaaacaaatcccaagaaggatcacagttttgcagaggcttcggtggcattggaggtatcctccgctatcagcttgacataagatcattcgatgagctatccgatggagaagtttacgaggattctgactgataaagcactgcttaaagatggcatgatggcttgagagcctatagagccctgatgtaatgcttcgtgtttttacttatttcaccttttaatttcaaaaactatagacacttgtgggttggtttttgctg

SEQ ID NO: 12123 - DNA, 596 bp, Gossypium hirsutum
  unsure (1)..(596): unsure at all n locations; Clone ID: LIB3829-003-Q6-K6-H2
gtcccctttgcctcgttttggccggatctagnagtctagcaccttttttttgacaaaaaaacaaataaaagaggactctcggtccttttagccaaaccttaaatggttatgtggtccttggcgccgatgacacacccacgacgacggaggacgtgaggctaccaaggtacgtttatttcttctctttttaatttgaaagattttagttatgaaatagaaaaaataaaaacgaaagagacaaaaacgaaaatagataaaaaaatccacctttcgaaacttttgttctgttctttttgattaatggtgtgcgtaaaaaaataaagggattgatttcggctttttatagccgagttacactgatttgttctttgtttttttttcattttgtttgcttcctttcgtttttttttttgcttgtcgtttttctctttgttcgtttctctgctgttggtgtttgcttgcgtgtggaccttcattttgcaggtggtgtcagaggctggtggttggtgccccgagcggtggtggcgcacgtggcagaggaggcatgcggcggctgaggctgaaggaggctagggttgctaaagtgttttgggtag

SEQ ID NO: 12124 - DNA, 620 bp, Gossypium hirsutum
  unsure (1)..(620): unsure at all n locations; Clone ID: LIB3829-003-Q6-K6-H3
atcaaggcaaccctgncaacctcacactttgtttcgacaagttctcatttcagcagccatggagcagacactaaggccaatcttgcacaggttggtgccaggaatcaagccatgactcacaatggtttgcggtctttgaacaaggtcgataggttgcggatgaggaccaccaacgcaaaggctgtcgttacgaaagctatgaaacaggcagattacaggcctttgggaaaaattatttgcggaatagggatgaatatagtgtttgtgtcagctgagtgtggcccctggagcaaaactggtggactcggtgatgtcctcggtggacttcctcccgcaatggctgcctaaggacaccgtgttatgacagtgtgtcctcgctatgatcagtacaaggatgcatgggacacaagtgtgttagttgatctaaaagtcggagacaaagttgtaactgttcggttcttccactgcntacaaacgtggagttgatcgtgtctttgtcgatcaccccatgttccttgagaaggtatggggcaaaacggcttccaaaatctatggccccagagcaggtttggactacgaagacaataactgcggttcagcttgttatgccaggctgcttt

SEQ ID NO: 12125 - DNA, 623 bp, Gossypium hirsutum
  Clone ID: LIB3829-003-Q6-K6-H4
gccatatggtgtttgcttgattattacttccgcagagaactgtcttgttcttgttctaacaaggattctcatgaacccaagaggtgaaaaatcaatcatgtctgctactgattacacagatgcagttcacaattttatattatcacagaagctgacaacattattgggaaattttcctgaggttctgcaaataagcgacttacttgagcataatggcgcagtcagtgatcagagtgtagtaattttgctcgttttcctgttgtcccagcttattgtcaagaaaaatgtggatcagttgaatttccataaactactgggttgcggttgccaaagcctagagaggaggcattcattaactcaaagacagtcagcaagttcagataccgttgtgcacaataaggaaagagacatagataccactaaagatgctgctaaaaagtttaaggccattcaggcttggtggcgaaatatgacagaacaaaactacaggagttctgtaagatccgccacttctatttcgaattgttccacagctcagaagacaagctttgacattttaagagaaaatgctgcaacaatcatacagtctcactatagacgactgaaagagcgtcgtaattttc

SEQ ID NO: 12126 - DNA, 563 bp, Gossypium hirsutum
  unsure (1)..(563): unsure at all n locations; Clone ID: LIB3829-003-Q6-K6-H5
cnataaacctccccctactgatttctctatataatctaatgttctcccgttgttttagccgtctttaacacttttcaatggcttcctcttctgttattgcttggggctcaggtgaagatggtcaattgggtatcgngaaacaatgaagaaagagaatgggtttgcgttgttcaagctcttgagcctcacaatgttcgctccgtcgtcgctggcagccgtaattctctcgctatttgtgatgatggcaagttgtttacttggggatggaaccagagaggaaccctagggcaccctcccgagaccaaaactgagaatattccaagtcaggttaaggctcttgctaatgttaaaattgttcaggcggctattggtgggtggcattgtttggctgttgatgatgaaggcagagcttatgcctggggtgggaacgaatatgggcagtgtggtgaagagcctgagcggaaagatgatactggtaggcctttgagaagggacattgtgattcctcagcgctgtgcgccaaagcttgtagttcgccaggtagctgctgggggtacccattc

SEQ ID NO: 12127 - DNA, 424 bp, Gossypium hirsutum
  unsure (1)..(424): unsure at all n locations; Clone ID: LIB3829-003-Q6-K6-H6
cttcactcatggacactgntagtacttcaaatccaatcaaacttttccataagctagtctctcaactaaacaatgaaatccgtggctttaaggcaaaggtaaaggagctgtggtatgtggaggaatatgatgtgttggcccttgccttaaatggaaaaatgaaggtgcgcaggttccaaatgggttgctcaagtacctgaagttccaaattcagatgcaattttaagcatatttcaacttccatttctcctacagagttgttacgatagggtacaattcatagttttattttggccgggattaaatatgctaagatacctttctactactccaaacatgaatttgggatgttatcaacgagtttgatttgatgtaaaacctatgatgcccaaaattctactttttttggtgttaacaaacgatg

SEQ ID NO: 12128 - DNA, 591 bp, Gossypium hirsutum
  unsure (1)..(591): unsure at all n locations; Clone ID: LIB3829-003-Q6-K6-H7
gttcattgagnacattttttaaaacagatagtgtgtgtgagtgagagagaaagagaaaaatggagctctcacagcatggtttcttagaggagttaatggctgctgctccaagaagggacagttggaccactttttcaaatggggtgaccgagttcttccctaatggatggaacttcgaatcttttgatgctacaccaccaaatcttgccttcttagggttctctacaacaacaactgatgaaattgaaaacccaagctttgaatgtccttttagtgaccaaccttacccttttggtgatgggttttcagtatcagagatggatgcttcaacttcacctttcccacctgctcatgaagattacccatcaatggttgatgatgaagatcagcttggccttctcaccactgaccaccatcatcagcagcagcacagcttggaagaaacgaagcatagttgcaaagttgaaatggagcaaactatcaacaacattcaaggtttcaacatgggcttgtttgtagagaaaaagactaaagccaagagattagaaggtcaaccctcanagaatctaatggctgaaaggaggaggagga

SEQ ID NO: 12129 - DNA, 567 bp, Gossypium hirsutum
  unsure (1)..(567): unsure at all n locations; Clone ID: LIB3829-003-Q6-K6-H8
gctgattcctggctactgcagnagttgtaacagctcaaactgcaatccatgnnaggagaaacctgaanaagtggtcaaggttgaagaaattgcaacagaagaggtagtggctgttgctcctgcaacagaacctgttgctgaagaaccaaaggaagcagtgcctgaagcagcatccgaagaaccccaggctccagaaactgaagccacagttgaaactgaatcaaaggaggtggttgaagagcccaaggctgtgactgaggagccagaagttgagaaaaaagaagaagagactcctgaggaaacagtagcagagccagttgcggaggagtccaaggagactactgagccaaccgttgaagaaaccaaagaaagcacagagtctacagaagcagcagtagctgcagcagcagaagaagaagtaaaagcagaagccgaagccgaagccgccccagtggaagcacccaaagaggaagctgcaaaggaagaagaggaaccagctgaagctcaagctgagaagactactaccgagtaaaataagcttgtaagatggggagtcaatggaagctt

SEQ ID NO: 12130 - DNA, 597 bp, Gossypium hirsutum
  unsure (1)..(597): unsure at all n locations; Clone ID: LIB3829-003-Q6-K6-H9
ggagctttaggctcaacagaaaggcaatgcaaacggcggnncgttgaaacaacggcaacagttacgagcttcgatgatgaaacataaagaggaagagctcgcattgtttctcgagatgcggaaacgtgagaaggaacaaagtagttttcttaatcactgctcagaagacttcgatgctcctttaggatctatacctggaacttctccgatatttagtctctcggcatcggcaactgctccggcgagaaagatgggaggtgctgctgacgattttcttaattctgaatgtgataaaaatgattatgaatggcttttaacacctcctggtactccactttttccttccttggaatcacaaaagactgtaatgagtcagattggcgctcctaaggctagcccgactgtgctgaaatctaagctagcaaatccacaggctgagtctgctgccaggagcaacttatcaccaaagcaacctgctttgtcccctgggttgaattctacagggattcgcaggccttcatcatcagggggtccaggttcaagacctgcaacacccactgggcgccctacattgactggagcttctaaacctacaaa

SEQ ID NO: 12131 - DNA, 462 bp, Gossypium hirsutum
  Clone ID: LIB3829-003-Q6-N6-A1
agtgccaatatccatttagacgattttcagaatgatagtgggaattcagggaaaacaataactactattcaattgtttgttggaaacaggctacggttaaaccccaatgcgccaatgggtaaaccacaaatcctaacaattttcagacgcacaatcctaaaaagtatttatcaccctaatgcggggggaaggatcggattcactcgctgcagctctttcttgtatcttagctttgcaggaaaaattatggggccaagaggaaacgttttcaaaaaccgagctgcaaacggcattttaatccaactggaaactaatgggggagatggttctaacattggtggtgattcctttataaaataaaacctctgggggtaatgaggcaaaaaaggaggaaatttggtctgaagggtccccctatttaaaccacaaatgccggaagagattgtagaattgaggttgaag

SEQ ID NO: 12132 - DNA, 540 bp, Gossypium hirsutum
  unsure (1)..(540): unsure at all n locations; Clone ID: LIB3829-003-Q6-N6-A10
gggttgttttttttataaaaattttttggctagttataacaaaattatacaagttggaggatatacattaaggttgggggtttgaagancataataccataaagttcatatacctgtaattggtttttgctttttgagggatatgatatgaaaaagtgtgtttgtttacagtgttgagttaatacaatataatgaggttgnatcaagtaaaactaaaaaaaaaattaccaggtaccgggaatgtttcagttatgaagaccacctataaagcccaaaaatctggccatactaaaaacagattatnaccattcacctatggtttaagtgttaagcctactnctgggaggagcagnagaggttgcttntttcttttcttattattattgttgttcaggcttttttacactggttgattgattgtttgatgtctaagaaacctncggtttgttatttacttttgggtgctttttggcaccgaaaagaaggttgaagagaactgtgaccataattaccaaaatggagaccatgaccccccccccc

SEQ ID NO: 12133 - DNA, 489 bp, Gossypium hirsutum
  unsure (1)..(489): unsure at all n locations; Clone ID: LIB3829-003-Q6-N6-A11
gtaaaagaaaacaatgcgagatggaaacaatttattacaacgatgattattttgcgggatgtttgaaagttcaaaatgtattgatttacactcaaattgactcacaaacactgagaagcattgaattttaagagggactggggggggggcacacatcctatcgacccggtttcagtttcaaagcaagtgtgtattaatttacaccacaaaggatatgtgttttgaacctaatagtgccaacaactcctgaaatcacaataagatcacctnctgcactctacttgagttgccttggcatttntgtgtntggatgacagtggtctgtcggttttggttccttccttccctgcatgaaccagtctttgcgtccttggtgactgtgagttgattttactattggctgaaattgggagagactggcgacgagcgaggttaattttttgacctgcgtgctggctaaatcgaggggaagccttgcaatgtgaggtt

SEQ ID NO: 12134 - DNA, 489 bp, Gossypium hirsutum
  unsure (1)..(489): unsure at all n locations; Clone ID: LIB3829-003-Q6-N6-A12
gtgtgtttttttttgaaaacaaagttaattggtacttttttgcactaacaaacatttcggttgtttttacacaaatacagaaacatgaggaatttaaaagggttacgtgaaaaacatnaagttttttcccaaatacctgcgtaaaacattgtggtgttggcaaaccaattggggcgtacacacacattagtacattactcagaggtggggttaacaggagcaacagtggagaccaaggaatttacaccacaaacattgggacccctgcaaattttgtggaacccattttcaccccaggtttgttcccatgagttcttaatgatccaatatgggttatccttcaacctgatgggggcataggctggtgaaccataccccaccaacaatactccgtgggcgaggggtttagagcaaatgtacgggcaagaaactgcctcaatgtattgtttggtgaacactggatttatgggaactgcaagaggaccattc

SEQ ID NO: 12135 - DNA, 574 bp, Gossypium hirsutum
  Clone ID: LIB3829-003-Q6-N6-A2
aaaagaaaagtagacttttatattcatggcgcaaaacacaaaattaacaaagtgcagctaacgcacagcttcgttcagcccatccaaacctattgtttgcgatatcaaattcgatgtaataattctgctgctgaaagctccctagtattattgcaggaccgctgtgtgagccttggccgaccacattgtctgaaacgatcatcaaacacacaaccttatcatcaccgtcaaatgagaaatagttaaccaaaggcaatgccattttggctcctcctttgaactggaaactcaattcggggatttctattgaagtatagcccgaagtgttgaagcatggggctaaacccgatctgttttctatttcacgcactcttctataatttcccatttgtttctcgaactctttcgagactacctcgaacactggtctctccataaaagtgaatgttgatcccgagtccactatggtgccaccgttaccgtctgatcctgggaccaaataactgtacgggaactttgacgtgcttatcgcccaccagaattttacgtagaagtacgtagtagaactctttga

SEQ ID NO: 12136 - DNA, 556 bp, Gossypium hirsutum
  Clone ID: LIB3829-003-Q6-N6-A4
ctcagccaaaatttcctacgttaagatttgattctaaataagcattgctttacatatacctactttaaacatttttatccatcaaagatcattttggtcactgtcccaccgaccatttttacattaaaggctgcgctgacgaccttaattcgaagaccttgcatgcaaccatgcaagtatcattagcaactgtacaaacaacattgtgaaccgaaaggtcgttcatggttgctgcatctccgcctagcttttgctacggttctagcagtagaacatcactctcttcacattctctttcaaggccggcaacggccgcaccccggattctcctgctgcctttgtaccaccaccttttgcttgacctgaaccagcacccgttgagctattattgtcttgcatctctggttctaggtagaaccgtgctcggaatgcagctaaatgtgcataataggcaggaggaacaacagagaccgagcgcgtgcaccttgcatacgtgtaacaaaggttgtttgttagagactgtattccatccgcagtaaaattgttttcgtcccaa

SEQ ID NO: 12137 - DNA, 543 bp, Gossypium hirsutum
  Clone ID: LIB3829-003-Q6-N6-A5
caattaacataactctatagaactacgaaatgaaacaatctgtcgcacaagctccatatgacaaagagaaagttatacgttcatatgaaatgaaacaatctgttgcacaagctccagtagatcttcaattgcagcctcttcgctctgtcgcttcccatactcttgtgcaatttctccagccaagttccaaaaataaattcgcataggtgatcttctggttacaaaccctaagtcggagcaccaacacaaagtggaactcacatactcatgaccccacgaaccaatatcaccttctaaacccaacaatctctacttcaaactctccttcaaatcggattctggcattgtctcataaaaagcttttaaggttccataatgaggatggagaaacttcaatggcttcggaacagaagtcatagagcttgttgaagtccggatttcatgcctcatgctctcaagacctactttctgtaacctaggatcggaatcctgaactctctctacatataactccaactgttgtttcaaagccaaatccttctc

SEQ ID NO: 12138 - DNA, 425 bp, Gossypium hirsutum
  Clone ID: LIB3829-003-Q6-N6-A6
gggggggggggtttttgggggacccatccccaaaccttattgtgggcgaaccccccgcggggggaaaaagctcaaaatgggcatcttccttgtcctaatcgcccgaaaagaaaaaaaaaatttttttttgggggtttataaaaggcaaaaccaattttggcctcagcagcgaaaaaaaatcgggcctcctgggggggggccttctctcttttttgggggggtaaaaaaaattttaacaaataagggtgcttccccaaaaaggggggtgatttttttttttttttgaaatattttaaaaaaaaaaccccctaggggggcaaaaaaacccgcttccggtttttaagaacccaaaaccctttttttttaccgggggttgggggggaaaaacccctttttttttttcttaaaaaaggggtttttccccc

SEQ ID NO: 12139 - DNA, 524 bp, Gossypium hirsutum
  unsure (1)..(524): unsure at all n locations; Clone ID: LIB3829-003-Q6-N6-A7
gacaaaaaggaaaaanattataggcattatcattacaatggagaaaatccaaaattatggtcatcatcattgcataattatcataacttcaaacctttttctttcttccatccagaaaatgaaaatgtattttaggggataagcacacaatacttcgtaggtgaatgcagtatgcatgacagtacttcagtatatagcagaaacatattcataactatgtaatatactataaagacggaatgctatgaacaactaccgccttaagctctccacaatgtagtccgcgtataaattcatggaatgctggattgcctcataagcagttgaggcgggcaggaagtcattgacagcaacttccttgttctcattcttcttatagtcctcaaagaagcggcgaatctcagccaaacggtgaggtggaagttccttgatgtcattgtagtgacgatactcaggatcatcagcacatacagcaataatcttgtcatctttctcaccctgatcaatcataggcatcagaccta

SEQ ID NO: 12140 - DNA, 516 bp, Gossypium hirsutum
  Clone ID: LIB3829-003-Q6-N6-A8
gaaatacaaaaaaaatatataaaatcttgttttgacagtggttactcatttacaggtgtgcacaagtaaacagattgatccaaatgcaaaggtagaattaagacccaacacagaagatgacccacacaagaggaggcctgatttctaaagagccaaggagctactcggttgggaacccaaagctatctccgaagggtattcctatgatggtttcggatttccgggaacgtatatttggtgatcataaggagggcaggaggaacaatgaatcatcattttaaggtggcaatggcaaaaggccaatcaaatattatttggactgggaaaagaactcccaacatatatagttagcaatagcagcagtttcagtttaagtcccgtttagaggtttttttccccttttttgacatgtatttgccatcttttgtaatttcccatgtctgatgtaagctttgattgacagtgctttgcaaaccttaaaaaaaaacattttaccctattctatttaatgcaata

SEQ ID NO: 12141 - DNA, 523 bp, Gossypium hirsutum
  Clone ID: LIB3829-003-Q6-N6-A9
gtagaaaaagatcttctttttcgctatagctgaatttgatatacagttcctttcaaagtgcccattctaaaccaatgcacatatgggaaaagcattataacataaagctgattatccttcctatgagctaaagatgcgtgtaaacagcataacgcagaagcaatatgcagcaagcagattcctggaacaatttggggttgggaactaatgtttttttgagactataccaaggaacgtagagtgtcgtaaatggagtctatgattgcatgagactgccttgtagctgcgaactttaagtgtttaggagcttctgctctatcaaaatagaaaccaccagataccagtttctctttaggctgtaaagccaaccatataactgtgtccgcaccttcttcactagttctgagctttcccgataaccatttgttaaaatcaggtaaacttttagctactccaggtgtctcagcccagcccgggtgcattgagtaaaacccaattcctttgttcttgtacatctcagccc

SEQ ID NO: 12142 - DNA, 572 bp, Gossypium hirsutum
  unsure (1)..(572): unsure at all n locations; Clone ID: LIB3829-003-Q6-N6-B1
aagatcggaaagaatggatgtatattattagctattttgaacataacatgattgtgttacatgtacagtttattaagtctgtaaatttaatttcaatgccatattcttctcacaagaacaaaccataaatgaagaaatggctaagggtagatgtcactaatatccacgcggaaggttcaagtttttctcaacgacggcagtttcctcagagccatggctgaggtagcttagagcggacattcggtatagacaagtaaacactaggatatgcaaaccaattgtgtagaaaaatgcaaatgttcgagcacacttgtttcccagaagaaaacgtccgctgctgagtgtgattctgtctctgaagcccagctccttgtatctttgatccctctccttttttgagaatgctgcaaagggattaatatcatcctcatatatcttcttgtacttggattcaacatctgaggtgaaaccactttcaagatcctggggatacttctttgatcctntagaaattacttttttctggttataatcctggacataacgaatctttccataaagtttaacattat

SEQ ID NO: 12143 - DNA, 520 bp, Gossypium hirsutum
  Clone ID: LIB3829-003-Q6-N6-B10
cgatgttatcgaagtttagtagcgacttgcaagctgtcaaacaaagtttccctcaacccattgaaacaagatggacttggagacttcagccaatgcccaaatgacctgacatgagatacatattataccaagacaagaccaggcccaaactagaaccattgtccatggctagcccatgacaagtagcctacccttattccttaaccaagaccaaccccatctaacaaaaacactacttctcatcattcagctcaaatcagaccaaataccaaacacgagcaaataaagaaaaaaagcctgacagcaaatccctaatacataaattagctcaaatcagtctctcagttctgcttgtttcctgttaatccacaagcaagagcctcttttggtatttgacctacacgatggacaccttgagcaaaaataacccccatccccatatgcaaatgtggctcaatgtggcagtgaaatgcccaaacccctggattatcagcaacaaacctcaatgcagtccacccaa

SEQ ID NO: 12144 - DNA, 417 bp, Gossypium hirsutum
  Clone ID: LIB3829-003-Q6-N6-B11
gtgttttttttttgttttttgtttttcttggtcattgtgtttttttcaaatagcgtacagggtaggcgaaacgtaccttttcgcagttaagtcgactgacgataatcttagaaagttggccttcaattatccaatcgttctagaatccaggggcgttgttaacaccattcaacatccgcatgaccagaaactttaaccatccctttctttgcaaaaagactaatttaggatttctgcgctaaagaggcggcgactggaaaaagtgatccatgggccacctttcattctatgggcgcaattgaggctctaccataaacttcctggggggcactgatatagcaacaattggcagttacctttatccatacttcctgagcataaagaaccggaacagatagtacgtttcttttcgggccc

SEQ ID NO: 12145 - DNA, 401 bp, Gossypium hirsutum
  Clone ID: LIB3829-003-Q6-N6-B12
gcaggaaaagtttccgggctttttattttattcgatgaacctgtagatgccaaattttcgttcacttacaaagtcaattgttggtttttgctcctaaagttttagaaagctcctttatgatgggtttatctttaatgggtgggctccctttccaggtgccatttctttgatgtgttttcggcccaagttcttagaggaacaagctgttccctaatcatgtcaaatttaggctgaaccaggtcttttccttttgttctgacatcatcactctgactgtgcaactccaacttggaggctgcaatcccaaacatcaaggcggccccaccgaataccattgtagttgcaactataaaagccattccaattcgcttaagtccttcagcagcagctttcaacttctc

SEQ ID NO: 12146 - DNA, 456 bp, Gossypium hirsutum
  Clone ID: LIB3829-003-Q6-N6-B2
aataaaatcataataaattatttatgttctatattatctggaaataaaactgcataacactaaaatatttcaaaataggataatcagatactataagtagcgtataactaaataatcaaataacaccaaactcagtttccaaaaatataggttcaagaacacctaaaaacttcagactacttatgcatcgctctcgagaacatcggctttaagataagcgcgatcctcgcctttttctgttccgggcatcttacctcacttcttcttcgctgattcactggccttggtcttctttactccccggatcttcttagccctgttcttccgttccttcatttgcttccttgatttctccaccttcttatcgagtccgttcctgatcagcctgtatttgggctcgtacttctttgcactctcgacagaatcataaatcaaaccaaatccagtagatttgcc

SEQ ID NO: 12147 - DNA, 557 bp, Gossypium hirsutum
  Clone ID: LIB3829-003-Q6-N6-B4
cattaataattataatttattagacttttctagataataaaatattattaccaaccaatattacaactagataaaatacaagggagatggaagttggtatgcatgcattagtactgctacatgatttctcataagtattattgattaagtggagattggcaaggggcgaaatccattctcaagactggcctcccaaactttatcgacgctgaaaatggtgccatcgcactcattcacgtcgaacccttccgaagcatgaattatcccggccacacggctcgcactcatcgcccttctcggcaaccagtcctcacaagagtgcaggttctccacagatgcaggagccaccatagccggtgtagtgtggtaatagcagtctttccggactttcttgggtgggaatatcgaaaatggaatgaatattgttccttttggtgccttaaactgttctttatcggtcagtccatctcccaccaaccataccttggtatcgtatctttcggaaagaaataaattactttgaagcttgttatcaaacttcaacagcttcttgtatt

SEQ ID NO: 12148 - DNA, 545 bp, Gossypium hirsutum
  Clone ID: LIB3829-003-Q6-N6-B6
gaaaacctgattgctcaagaataatcatattttatcagcggtgaaacactacatgagagaaagtccaacttcctggattcgctgaaaactttatataggtcctgtaaaactaacacccacgtgctacatatattctattcaagctagctaaaacggtaacccacaaagcttgctcttacaaaagtttgccttgccactacttggagggttctacgcattggctgcattggtactgtctaactcgctctaatactagccgtgtataagtgactggtgggtcagaagttcctcggcttgcttgaacatgactccttgctctataggctaacaattgctctaccccatgacccagcttgcacacccccaaaacatcctattatcagaaaacgatttgaagacagtgatcccatatgagaatccactgctcgagggaccagtgtcatgaatgcaaacttctcctgagacaggagacttgctaaaactccccatgagggagacaaagactgttatcgggcgcccgacctacataatggcttgtaagggaa

SEQ ID NO: 12149 - DNA, 513 bp, Gossypium hirsutum
  Clone ID: LIB3829-003-Q6-N6-B7
ccccacaatatatagctttagctcacacgaaacctttgattttccaagcccacaaagaaccaaagaaaaaaaatcatccttaggaagacaaatgttgatagaccacgtccaacaatggatcatcaacagccccgaacaaggtcggtgatgatcaagggttacgaatactcaaaagcttcacatcgtcaacaacaggaccgcatagagaagaaaagtcatcacttctcatggtgtagaacgtgctaaggaacataattcttgtcctgttggaaacagccacgaatctaagtgcagctcgcttgaatccaccagtccctttagattcgtatgggactttgagtgtggctttaccggcgaatgcctcgacgaccaaagaacctgcacaggagttgttagcatcgcccaccgagaaggagagcctgtatgtcttgccaacaatggttcttgttatttgagcgattgcactctcttttccaccaactagctccacggctcttcggccttgaggcacga

SEQ ID NO: 12150 - DNA, 416 bp, Gossypium hirsutum
  Clone ID: LIB3829-003-Q6-N6-B8
caaaaagatcgacttatcaaccccataaaattgtgattcattcattatcttgttatattcacgtaattgggtatgagcggagcataaagtaacatgtggcgcaaacgacgccgttgcgtttctcataagaaatccaaggcgggtgattgctcttcgctctttggaaggaaatacgacgccgttgattgccgtcttaacccagcaatctccggcggcgtaaccgaaccttatgagcgcgaaattcagtgctttaaaaaaaggatgcgttttgactttggcagcaccccgtttggatcccaaccaagctttgggttccttgttcaacaagccggaaatgaggtcacccacttgttgctcaactaaggacgaaggcgactggtattgtcgaaagcttgaggtttttttactatgttccg

SEQ ID NO: 12151 - DNA, 506 bp, Gossypium hirsutum
  Clone ID: LIB3829-003-Q6-N6-B9
accaactatcatcatttaattaattttaaaaacatgatttgcagggttacagatgaacgattaatactaagcgacgacttcaattgaaagatgagaacacattaaacatattagtttaattagggaaaatgtggggatttttttgctttttctttttttttgttgcatgggtttcaacccgaattttcccatgccaaaaccttacaatttgacgaggcttgctgacaataattccttattccactttcaaactttgtttgaagcttatggggcggttgatagtgttggtattttgagctttaccggctccggcaccattgttggggtttggacccaacgatttcacttacagagacaccgtcccaggtcccagtttgacaacgtctacaactacttgctgagccgataaaagaaggctgggatcttccaccatatttttggggacgctactgtatatggtgttaagtaaaatcggaaggaatgccaaggaaaaacccaaacggacc

SEQ ID NO: 12152 - DNA, 406 bp, Gossypium hirsutum
  Clone ID: LIB3829-003-Q6-N6-C1
ctatccaaaaattaccaaccaaatgaaacctaagaaaattacctgaaaaatatcaaaatacaaatgcttgaaaagggggagggtaaagagggttaaaaagttaagactggtgcatgctgccattgttgtatatgctcggaaatatcgtattcggatccaaggaacaaaactttttgatatttacatcgtcgacgaatcttcaggtcaaagttccacctcatgtagttgttcatctccaaaactaccattagctggaccaggcatgaacgatggtggaggttttcccggtgcttctcctgaaggtcttatttcgggtttactaggaggacttaatggatcatcaaagttgcctccactccacgagactgttcgtcgtgagtgtggtgatggataggcatcgggattc

SEQ ID NO: 12153 - DNA, 493 bp, Gossypium hirsutum
  Clone ID: LIB3829-003-Q6-N6-C10
aagggatggcctaatattaagcaagcagcttagctgaaacaacaatggaatccaaatccaacatcaccacaagttgcattttccaatgtaagcatacaccgatatgacatccacagggaaaatagggtaaaagagacaatatagattccatgcaattttggcaatacatatatataatataggtgttctatttcagtggcttcttccataagatcccaatcttcttcagcatgttcccatttttcttattcagcaaatcatcatccatatcttcagtataaggtgagctaatctttggattatagttgctgtccaatgaaccagttctctcaatgagcttctttccattattacctgctgaaagcaatgcagcagctaattccgcagccttgcgccactgctccgattgcaccttcaatcttctcaactcggccgccatttccgaattggccgcctgtgcagcctcaagctgttcagccaccctggttgcttt

SEQ ID NO: 12154 - DNA, 327 bp, Gossypium hirsutum
  Clone ID: LIB3829-003-Q6-N6-C11
aagaagtaaaaaaggtcaattcgcctgccttaatcataacttttgtcgggcctcaattacattcatattaggaaaaaaccattgatttgtgaaccaccactagtacaatataggggcccatgctttgtcccttaaccgacccttaattccattatattaaaaataaacatcaaactcactccttggaagagaaacgataatggagaccacttgatcatggacgggcccttatcaagcacctgtgccctccctcactcccttactcggacttaaaagggatgggccttatcactatggcctggggcaaagctgatgaggccggctccc

SEQ ID NO: 12155 - DNA, 536 bp, Gossypium hirsutum
  Clone ID: LIB3829-003-Q6-N6-C12
gaaattaagaataatatatataaacacaaacatatataacatgaagaatcagtttgccattaatcagaccagtagcactatatcgaaaccagaaggacaagatatgcagtaaaagctaattaatttctgtgtttgtggtgttttacgtgtcaatgaacccgaccattcataaacactggcataaaacatccaaatcccacaacaaagcatatcctcacccaataaagcttccatcaagatataatatcatggatgtgatgagatgtgcacttgtatgtatgcatataaaatgactagcatttgaaataacataaaaggatgaagtagattcacggaacacacaccaatggggttcaagagctatgcccaaatcaataaacaggaaaccagcactcacggactttatgatcttggggcaaagctaaaacttgtaaacgaagatggcaacttcacgacataccgagacttatagcaaatgaaaaaccataacatgtggtcctcttaccctaatactccaagcagtagcaaggtttccg

SEQ ID NO: 12156 - DNA, 376 bp, Gossypium hirsutum
  Clone ID: LIB3829-003-Q6-N6-C2
ggggggaaaaaaaaaagggccggggggggaaaaaaaacctttggggggggggggaaaaaccaaacgcaacctccccccgggggttggaggcccaaacgggggggaaaatttaaaaacaaaaaaaaccccggggtgtggggactttttttgggggagtccccccccctagcccgtttttaagcccccgccttgggaaaaaaaatatgagggtttcgagagaagggcttgggttttttgtctggaaagggggggaaaaacaatttggccaaaaaaaaagggggggggggagagtttttttgaacaaaaatttttttattccccgggaaaaagctcccgggcgtgaaaaaggaactcttaaaaaccccccccgccccgg

SEQ ID NO: 12157 - DNA, 588 bp, Gossypium hirsutum
  Clone ID: LIB3829-003-Q6-N6-C3
gcacaaagttcaatacccagtattaagttgagcgaaagaaccaaagacttttttgttacattgaacgaaacaaagggtttcacagcgacttcgagaacgaaacaagggtttcacacaagttataaagcgcggaataaataaaaagaatgtccatatcttcccatatccaaagcacaatgacaaattcctttaagaaaaaacaccccctcccttccccaaaagaaaacataaaatggttcgacacagttggcaacataagaaagctgatacatattacacaccaacaactgtcatcccatggcatacttctgggtccagctacgagcagtggcttcatactttgcccgatcagtcttatacatgtgagcaatctccggaacaagagggtcatcagggtttggatcggtcagcaacgagcagattgagagcagaaccttggaaatggttagtgcagggctccattgttctttgaggatatcaagacaaatgcttccattgctgttgatgttgggatggaagaccttggtcctaaacgcgaccttaggaggcttgaaaggataatctggagggaaatggatagtaactaaa

SEQ ID NO: 12158 - DNA, 532 bp, Gossypium hirsutum
  Clone ID: LIB3829-003-Q6-N6-C4
gggggaataaagaggattcaaattattatatggattttactcaatgaataaaagccatccccttgcccagtctggggacctaaagtaaattattaaatattctcttgttctcatctcatgtttacaaggcttcatcatataaaaattgtgtcttaacagagcagcaatggaggtaccctgtgaaagcccttagtaatctagaccgcccatgccgcctgcggtggctgccccttccttgtcatcctttggaagttcagtaacaatggcttcagttgtggtcatcaatgaactcacacttgcagcatctaccaaggctgttcttatgactttcaaaggatcgataattccagctttaaccatatctacatactcacccttggcagcatcataaccgaggtcgggattgtcctgttccagtagctttccaacaaccactgcaccctcaactccagcattagatgcaattgtatgtacaggcatcttaagagcattttggatgatctgaacaccgatcttctgatcaaagtttgca

SEQ ID NO: 12159 - DNA, 547 bp, Gossypium hirsutum
  Clone ID: LIB3829-003-Q6-N6-C5
aggtaaatatgcaaattccatttcaaagagaaccatacatagatgcaaccggtaaacaaagactagaaattatttaaaaggccatcaaagggcacaatccttcacgtaaaaccagaaaacccacattaaggaagaccttaaggcttagaacccaccacgaagacgaagaacaaggtgaagagtggactccttttgaatattgtaatcagccaaagtccttccatcttccagctgtttcccagcaaaaatcaacctttgctgatctggtggaattccttctttgtcctgaatcttcgctttcacgttaatcaatcgtatccgagctctccacttctaaagtaatggtcttaccggtcaaagtcttgacgaagatctgcatcccacctcgaagacgtagaaccagatgaagagtcgattccttctggatattgtaatcggctaaagtccgcccgtcctcgagttgctttccggcgaagatgagacgttgctggtctggcgggatgccttccttgtcttggattttggctttcacgttgtcgatcgtgtc

SEQ ID NO: 12160 - DNA, 565 bp, Gossypium hirsutum
  Clone ID: LIB3829-003-Q6-N6-C6
gtccaaaacctagaataaatcaacagcattacaactattcaatttacaggcttcaaaactttctgaatccgttccataactatagggatatctttttctgtcaatgtagcaaaacagaagcggaaccatccaggttcaatacaatggcaacaagatcctggagttacattgaccttgcctatattcaacaacttatcccacagctccacttctcctttctcactgtaagagctgataaacccgctcatatcagcccaacagtagaaacccccactgctttttatggactttatgcccattttttccaaccctgccacaagctgcacatacatcctttgaagcctctcccagtttgtggtaatgaatgttcgaacaaattttgtatcagatagcatggagatgagcaaacgttgggttggagctgaggtggctgagaacctcgataactttctagcagcagccagaacatcctcattaaaagtgtagataacaccaacccggaaacctggaagagagagatcttttgacaaaccgtatactatatggactcttttcctgtcagtat

SEQ ID NO: 12161 - DNA, 504 bp, Gossypium hirsutum
  Clone ID: LIB3829-003-Q6-N6-C7
aaacaaatatcttaaattttatttaaaataagaaaactaaacttaacattcagttctagacacagtatctatccaaatgaaagctgtagcattatagatgtcgaatattaggaacataaaatctaagtagcacacactagtggataaaatgcttcaagaaactgacaaaccaaaaggtgtttgcttaggtccttggcttgaggtggccttcattggcaagcttgaagagacgagcctgagctgctgcagcgctgtttgaaccaagtgctgcaacaaaagtctccctgacttgcttagtcgagaatgggaacctattattcaccatggagttgagaaatgaggctgttccttcccggtaaagcgccccaagtccatcagtacgtgtgtttgaaagtgcttggggcaagctcatgcttgttccaagtccaggagcgttggtcacgccaaatgcgttgcctacagtgccccaccaaccaagcagaccccatatcagtgtggggtgac

SEQ ID NO: 12162 - DNA, 467 bp, Gossypium hirsutum
  Clone ID: LIB3829-003-Q6-N6-C8
caactcaaaattataattttttgtttaaacaaagcacgaatttgggtcttagcaaaaaaaaaaaaaaaaaaaagggggaaatcggggtagtattcgggaaacaacaataataattaacattctaaagaaccaacttaagctttaaacaagggctggggttgattttccaccaagccaacagccacgtggcacaaaggttaaactggccccttgtttgcatgcatgcaagcagcccggtctgactgatacaatcgttagcaacattcctacagcccacagattaatgggttttaatcgttaaatcttgcttgaaacagggtttttttgaccctgaaaagaggttcatcaaaggccaaaaaatatccagtttgggaaagccactaaaagtctccacaatgaaaggagcccatgttttgtttaaacagttttccgaaacacccttcaaaattgtaaagtaaaagctttta

SEQ ID NO: 12163 - DNA, 533 bp, Gossypium hirsutum
  Clone ID: LIB3829-003-Q6-N6-C9
attctaatgtaacatatttattaatatgtgttaaaactttgaaaagaatacagtgaacagcaacaaacagggttcaacaccatgtccaaacacattcttttttttttatataaccctagaagaaaacagtaaccatcaatgggagaaagttggtaatgttgcttggtcaataggttaccttctccatgtttcatctgaaggctcaaacaccatactctgtgcttcccgtttcacggactcgaacagcacggaagacaagtatcgctctccaaagctggggaagaccacaacaatgagtttcccggcattttctggcctcttggctatctcaatcgcggcagcggcggcagcaccagatgatatacctaccaacaatccttctttcagagcaagttgttttgcagtttcaatagctacttcacttgatatttgaacaacttcatcgattaaattgacatctaaaaccccagggatgaagccagcaccaattccttggatcttatgtggaccaggtttccctccagaaagcactg

SEQ ID NO: 12164 - DNA, 461 bp, Gossypium hirsutum
  Clone ID: LIB3829-003-Q6-N6-D1
agcttaattaaatattaatattacttggacatgccgcaaaaacgcatgttttttacctttactactaaaatgatcactacatacataaatgcatacatacatgcgtgcatgaatgtcgaagtgcatgaatgttaaggaccttttgaagcccaatcgtatggcaggatccaaagagtgacagcaaggctgaagagaatgggatgctggctgctcgtgaagaaaggcacagcatgacttggatcattgatgccgggggctgttcccgacggactaagagaggtggggccaccaccaaacaccgttggagcacccggtggctgggcgggaggttgtccccgtggagggtgtcgaggaaggaacccggagctagaccctgctgtcggggtccccgttgtgtggtgtgggaagagtccctgaggatggtgtcgcggtatgagtccctgtggtaggtgttgaaggag

SEQ ID NO: 12165 - DNA, 307 bp, Gossypium hirsutum
  Clone ID: LIB3829-003-Q6-N6-D10
gggaaagagaaatatctttatttcataatctcatcaacattagaattattgattttttaactttcaaacacccttgttttgattgcaattgttaattacaagttacaaaggtgaaatctaccaccacataaatcaaccaaagagaatactactacttgccctctcctacaatacagtacaatacatttccataaaacactacataagatttagaatcctatgctaaaacatctaggagactgattattgtctcctgattgcattaaacatgttggagatgcttaattgctgtgcacccacgcgtccg

SEQ ID NO: 12166 - DNA, 313 bp, Gossypium hirsutum
  Clone ID: LIB3829-003-Q6-N6-D11
gggaaccaagggaaggcaccgggcgcgggggggaacccgggaaggagggggggggggggaccggcaaaacaaggaaccaaaaaaggagacgagaaaaaaacaggcgaaaaaaagggcaaaagagaaaccaggggaaaaagggaaaggggggaaaagggagcaaaaaaaaaaaacaagaaagaaaaaaaggaaaaaaaggggggaggaaaaaagggaggaaaaagaaaacaaaaggagggaacgaaacgaacaagaaaaaaacggaaaacgggaggggaaaaaggaagaaaaaaaacagggaaagacaggaaaa

SEQ ID NO: 12167 - DNA, 478 bp, Gossypium hirsutum
  Clone ID: LIB3829-003-Q6-N6-D12
aaggaaatagaacatggttataacatggggaaaatacccaaatccggggcgaatacaataattgccaagtctagcaaattttctaatagacggggggggttttcatattcatggggcaataactcaatcgccataccatgaaatctttccgaccgaccttgggagaaatattggataactaggtatccccgggtctcaaaacccggaaaaggggaatgaacaaattcagggggtccaaataaagaggggggggggccaaaatggaatcatcatatgtgaagcgtttgatcagggtgtcggggtcatatactatgtccccacagaaaataaacgcactaattccaccatatacagcagtaaatgttgggcccagcgggaaaaacatttggattagaccagttaaaatgaggataataaggccggggaacaaaatcggccccagatagctgaaagaccttgccctttttcgatgcccaaa

SEQ ID NO: 12168 - DNA, 583 bp, Gossypium hirsutum
  Clone ID: LIB3829-003-Q6-N6-D2
aataaaaaaaccaaatcagctctcattattcaaataaaacaggtaaagaggagccaaggagtggagacagacgccacaaccaagggtttaaccccccaacgaaatatagcattcatcagagtacagaaagaaataggttatcgcgacaaataaaaatactagtttcagttggacagattatcctgggtcttcctgaacagcttatgctcgatatgctgagcaaaggtacgaggagggaacagtggaggttcggtctcagagacagtctccgggagtggcttaaggatgatcttatccttcggtggctcacagaaaactgcccatgagatcctaaccttctccttattaaccagacccctgtggagaatgctcttgaactttccattgctgaggatctcgatggtgtctccaatgtgcatgatgatggagttgggaacacatttagcggtcacccacttgccttggtaaaagagttggaggccaggaaccatgttgtggagaatgaaagtgagtgcacttatatcggtgtgagcttcgacaccgagagcgagttctggttgtggacacttggggtagtaattga

SEQ ID NO: 12169 - DNA, 563 bp, Gossypium hirsutum
  Clone ID: LIB3829-003-Q6-N6-D3
ccaaaaaaaccttcattttaatataacagctctgaggtttccaaaattctgtaatgtatgactcaaaattttaacatgaatgaaaactgagttttgcacacaaactgccacgggaaaaaaataaaagggattaagacatgaagtttactgattttcgctatttcattcacttcttcgccttcactgtcttaaccatctcggcctgttggtttgcagctgcaggtgcggtcttctcaacgggtccctgtgcaaggcgttcctctcttctggccatctttctttccctgcttgccttgttcttagcacgcttggcctcaaactggtcggatagagtcttttctctcgctttttcggccttggacttgtgaatactttccatcaaaacacgcttgttcttaaacacgttgcccttaactttcatgtacatgtcatggtacatgtgcttgtcgatcttcttggattctctatacttacaaagcaatcgcctcagtacacgcattctcctcatccaaaggatctttgtcggcaaccttgcctctcttgtacccttcctcttaccgtat

SEQ ID NO: 12170 - DNA, 346 bp, Gossypium hirsutum
  Clone ID: LIB3829-003-Q6-N6-D4
aaaactccaacccaaactagcatcaattttaaaaaaaaaaaagggctaaggctctttcctcggaagaggaattcgaaacacaaatgggggtggctacaatttcagaattcgggggaagaaaaaagataggcaaacaggggtcatacaactaagttagaaagggcccatcgggggcataaactaaacattttttttcaggctcagaagggtttcaacatttttttttctagggggccaattcacacttttgaataacagaaaggcaacctaacaacgggcaactggttcactggttcattgggcaggcattcattctcaggggggtaagggccggggggatctgaac

SEQ ID NO: 12171 - DNA, 566 bp, Gossypium hirsutum
  Clone ID: LIB3829-003-Q6-N6-D5
attaataataaaaagatttgccttcacattagatccagaccttgaaaatacaaaggctccccatttaaaaaaagaaaaaaatctaccctaaaagaaactaaaaacaatactaaaaagtgggaaaaaaatagaaaaagaaaaactagaattacacacttggactggtttttaatttaccctcatttttttcattcactcgtacattctgcaactcagttaaaatatagaccccacttattcttttcaacaggttttttactttttctcaactcagctcctgagttaactcactacctgactcagtaccagcgagtcgccaagccgaggtggcgataagtggccttgtatgccacccaagcattaaacacccattattctcctccactctatacccatcgccgctggcgaagagggccaacaacatactagcttgtttataagcattggaacccaaatgaacagggctaaacccggccgtttccatccgagttctccactgagtcagcggctcgtgtcgctcaactcggtccatcccttcacaagcaaccacgttacaaatctgtctt

SEQ ID NO: 12172 - DNA, 565 bp, Gossypium hirsutum
  Clone ID: LIB3829-003-Q6-N6-D6
cccatcaaaaacaaatttatttcaataaaaataaaatacaacaaaaacaaacatgaaaactaaaacccattgttccatccatcacaagagacagtcacaagtaaaaacataaaacaggtccagattattatattcacaagtcatagcccacataaacaggattcaaagcagatcaactctcagaaaccaacggctccatttcagtcgtctgctcaccaaacaccttagcgatcttctctgtaggaaccaaaggcaaataggaggcaaccttgtaccctttctctgcactgctagccactgtctcgttatacttatcgctgcaataagcagctgttgggacaacgaccgaggcaacttgagggaagagcgggagcatgttgagtttacgccaagctgaaaccgcacattgttcagctttgggttcatacttcgcataaagctcttttgctgtgggttcatacttggtgtacactgattttgctaatcctgaggcggtgttcaccactccagcacggtggacttcggaagccacgccacgagcaacctcgggagccttttgggctgc

SEQ ID NO: 12173 - DNA, 521 bp, Gossypium hirsutum
  Clone ID: LIB3829-003-Q6-N6-D7
aaaacaacctaaaatcaaatatatattagtattatttggttgaaacagatggtgctacagaggaagagaatcgggtcaggtcgccccaggtttacaaattcttcaaagcttacaccattatgaacttaaagcacaagttcaataaaattatttaaacgatagagatactcaagcttgtcgggaaaaacaggcttccaacttcaaggtgtcttagacttgggcggtgacggaagtaactgataacaggagatgagagatgaaacaaatccaaaggctcccgttactcgaggggtgactttcttcggtgccaattgaagaagcccaactgctactactatatccattcccgctttaacaagggccaaagtcctctcatttgaattttggagcttcgcacgatactcctcattcttgtacttgtcactatccttaagtctcttttccaactttttcattgatgcagatagccttccaagctccccaagctcaaccaatgtggtacatattgatgatcccatcca

SEQ ID NO: 12174 - DNA, 531 bp, Gossypium hirsutum
  Clone ID: LIB3829-003-Q6-N6-D8
cacaggttaaagtctctaatccatatattcatcaatgcacacaaataaatccccatttaaacaatgaatacaacaaaaccagagatataacatttccatgaataaaatcaaagaaatacctctatctatctctctacaccatcagtgcaagcttcattttttgattaaaaaaaacaattcttctaaatttctaatgcattgaagcagttatatatcagttaataaaaaataacatctaaaatcactaatgagtaattagaaggaaaattcaatgatatcagtttctccactagcaaattacccaacttttctgcttgcctggagcaataattttacccaagctgttccattgctttggtgctgttgacatatgttgcacttttatcgaaaccctcgagtaagagaatccggacagcctccattccattgtgaaacgtaaactccagctcttcacgttctttcttgttgaaagcacgaagaacaaaattaatagtatccatcctcccttgaggtcgtccaatgccaattctt

SEQ ID NO: 12175 - DNA, 487 bp, Gossypium hirsutum
  Clone ID: LIB3829-003-Q6-N6-D9
ctgatctaatcagtttaatccgattcaaacaacaatgctcctgctgggggagactaaaataaaattctcagaatttgaaaattaaagtcgcaaattttggtgtctcatccaggtctagggatgaaagattaaccattgcctttgttgcacgggctcaaaacaacagtctccattccaaggaacaggaaattttggaaagatccaacaaaaatccaacaatctccatgcattatttttcttggaaatttgaatgatcacaaattatcatcatgcatgatggggaacaccatttccgccatcctttttttttcggggggcagctcttatttttcgttgctcttccttgaaaatccgatttcttcgctgaaactctttggaatgggggaggcactcgaaatagtcttcacgaaggagaaagcaatccttgggctctttgcaacgggacatgcactccctgaagtcaacccaaaaatcgtagcaccttcct

SEQ ID NO: 12176 - DNA, 457 bp, Gossypium hirsutum
  Clone ID: LIB3829-003-Q6-N6-E1
aacacaaaatatttttgcgattggtttggtcaaaatttaataactagacattttgcactctactttacacacacggtttgatctttcaaccccactactgaaattgaaggaggaagatgtaattagcatcaccaaagattaaattaaactagttaaatatgtcaaaagcttggtttgggtccaataatacaaaacatcaagacccaccaaaatgacattctaaccaccatatcttctagaccctaaagactaaaactccacacatgatttcttttgcgttgacaggaatgcccttgttcatgggttgtaattacgatcgaggacggagagcatccaacggtctatgagcggcggatggagcccaagggttgatgtggaaagctctctgatgggtttgggctagttgatgatgggaccgtggatcaacggtggtggatgatggtgggttgtgttggga

SEQ ID NO: 12177 - DNA, 518 bp, Gossypium hirsutum
  Clone ID: LIB3829-003-Q6-N6-E10
caacttaatactactattttctaatgaagttctattttccaaaaacaagtaccttttcataattcaactgagttataaacctacaggaatcacaaaggattcattattactgtgcgaactagcaaaggggcaccgaaggttcattaaacaaaatgtaatcttcaatgcaatcggggaaaaaggctgttctgaggtaacactaacctttcacgatgactaaaaccatctccgaatgatttcaggtactacgaatacaaaaactgtttgctggtcgccccgatccccagaaccctctttatcattgcataggatcatatgcccaatcgacatttgaaatttctcgggcctactgggcccggttttaatagggcatgcttcccaatctttaaccagatcggtgccgtttgcacctccctttttttatgctgaacaagctctgataatatgacgtgcactggtgctaaaatgaccggcacacaaagcccaaaaaaccctgcggcggacttcttagagtgaaa

SEQ ID NO: 12178 - DNA, 495 bp, Gossypium hirsutum
  Clone ID: LIB3829-003-Q6-N6-E11
agctgatctggacattgaaaaattctttacgcatacaaacagaaaatagagcctgaaatatcaaaggttcagttcatgtacgatgaactcatcatcctacataatctccaccaaattaattgcagatagggggggggagaaacctccaaacaacttatctgcaattggttcattcattcagttatttgatcctaattcttaagttgaaatctttctttctaccaaatttatacacaataatacaggtttagcttatcttcctcctttctaatggacaagcatatggtttcaatccatcatccaaaagaatttgacaatggcatgcatgttgccttcgtaagcctttaggtcttttgcacgaatctccacatgtgtgaggctcttttttttttgtctcatctaaaaaaaaaaaggtagggactgtatattggtcttcttcatcatttggtacaatagatgctgggttctgctggctttcttcaataatattcttga

SEQ ID NO: 12179 - DNA, 472 bp, Gossypium hirsutum
  Clone ID: LIB3829-003-Q6-N6-E12
cggagaaatccattgatttactaagttcaacaagtaataaaaccttcagattctgcaacttttcttttcctttcctcattatcgggagacaagtaaaaggaaactttcaaatgaagcaacttccgggcactgtcatgtttcctcaagcaagttctcaaaatggtaatatgtttctcacattgatcccctagagcttgatcttgttccgaagcttcttttttgttactgcaaaacccatgagcatggcactctttttcacccgtggattcggtttttgatggagaatctgtgtctgacatctgtataaactctttgtaagtgctctggtgcttggttatcatatcagcaagggactctaactttgaaggtccattgattctctcaccacaagcttgctcctggagccttgactcttccaagccagtggcttgaaattgttgccaatttgattggcaataatcttcgtgctttg

SEQ ID NO: 12180 - DNA, 320 bp, Gossypium hirsutum
  Clone ID: LIB3829-003-Q6-N6-E2
aaaaatactgtaatattctatcttttatttctatttctattttctcagttcgatgatttgaattacaaactgacaatgaaatgaattacggaccatgtgtcatccaatcattgacctaaatgccaatggctccatgatttgtaagctcgcaaagaatcaccgttgagtgcgaaaacttacataaaacctgagtcaattagaacatgttctttctttttccccccctgtgcttcgtcattcgctattttcccctttccttcttcttttacatagtaatggtcggactggcgaccgcaaatccgattctgccagcttgggag

SEQ ID NO: 12181 - DNA, 580 bp, Gossypium hirsutum
  Clone ID: LIB3829-003-Q6-N6-E3
aattcaaactgtccatgtctgattttttttttcacatttaaaagtgtcacaaatgtttgatttatgggtaatacattaaactagcagtggtactatgcccaccctttctataccagaacttcaaacaacttagtgcaaaatagaaagaacaccatagttgccacatcagcaaactcgagaacagttcaacgatggccagccgcgattttggaactcgtttacgggtgaatcaacaaatgaaaccctacaaaacttcagacatttattcatgttcatttagataggagatatacatccaatgctaagtgtgccggaaaaaaaagctgaaaattatcacggtagttgcgatttaggccttttagacatcaagtagcagcctccgagggtcttcgacaacatccttgatacgtcgtaaaaagaagactgcttctcttccatcaatcagcctatggtcataagtgagtgcaatgtacatcattggtcttggcactacattacctccaacaaccattggtcgggacacgattgagtgcatacccaagatcgccgactgaggagggttgatgatgggggtactcaa

SEQ ID NO: 12182 - DNA, 554 bp, Gossypium hirsutum
  Clone ID: LIB3829-003-Q6-N6-E4
gcaccaaaaaattgcgttgagagttacccaaaaccaatccagttaggccatatccacgaaacagaggaaactacaaggaatcgacttcaaacatggagtacggagtggagcctgtatatagcccttagagttaaaagcaaaacccaacttctgtttcctgctatgtaacaataaagcaatccaccaagtacaactaaacttgtcgaacaatataatttcaactacctctcctacagacctttttaagttttttatatgatgctccaaatttccccattccaacattgttttcactctctaatttcgttttataatccacgattttgggtatggaggcagtgaacgagagagataagagggtggttaaacagtccccttcaccattcatccaactacaacgtctgtctcctgtttcccagcaaaagcgctacctgatgtccacactcccacaaactaatagggtctgtaccttctactgcggttgccttcaacgcctccactatttccacttcgccctgctcctcctcccgggccattgccccgatcaactcttc

SEQ ID NO: 12183 - DNA, 432 bp, Gossypium hirsutum
  Clone ID: LIB3829-003-Q6-N6-E5
ggaaccacaattcccaagttttcaatgttgcaaagccaaggttggattccatcccaaccaacttttggcacaaaattttagtctatcaccaaatccctacctatgccggaaaactaatggggaacagaaattgaattcatgaaacccgggtctcccattttctaaaattaaaaaaaattccgcccaggtaaatctcctgggcgggcctttcaaccaaaaacaggggaaacaggggctgttttcgagggggaacttcgggccagctaaatctacttgggtggcctttcaacccaaaacaggaaaaacaggggctgctttcgaggggcaaccacgggagggaaattcccttccatttacaaaaacggctttcgagggcaggcctaaaaaaaagctaaaaagaattttttaaagagggtaaagcccacccctccc

SEQ ID NO: 12184 - DNA, 527 bp, Gossypium hirsutum
  Clone ID: LIB3829-003-Q6-N6-E6
ccagagacattgcttaataaataataccgcagcttcccttaaatcataaacaaactcttaagcctccttggaaaaccaagggggcaccttttgacaatggcctgtatacagccgtgaattaaacaaaacctgggaccgcttgaaaccacccattgatatgccaccgtgtggcaagcacccaatactgcgaacagttcccagacaacagtggcaacccactttaacatgcaaaaccaagccaaagaccaactatttcataaatgataaagtctatcaaactattattatgataataaaatcactccatctgcggaaacttcattagatttaaccagcacgggtcacttcttcttaccagcagacttggtgaccttggcaccggatgggtccttcttctcaacattttttataacaccaactgccacggtctgacccatgtccctcacagcaaaacggcccaagggtgggtactcaaaaaaggtctccacaaccatgggcttggtgggaatcatcttaatcataccagc

SEQ ID NO: 12185 - DNA, 523 bp, Gossypium hirsutum
  Clone ID: LIB3829-003-Q6-N6-E7
aaataaaccaaagtccattaattaatgtcttattacaagcccaaagacccaaacagcccactagtcaattaaaaccctagcctagttatccaaagtcacgaggcccaaatggcccaaaagacttcagcaaccctagtaccgcagcctccaggcgccgtacaacccccagccttgcttcgtacgacgcctccagcaaccacgccaagcctccataagccagcatggctcccgtacacacgccagcgcgcacccgtgcctgcaagaagacaaacaaaaacaacaacaagtgcaaacaaaaggaatttattgtatttttatttattttcgttaatttttcctctttctttttcggctataaagccagatttgaatcttgtaatcgggtacacacgtttaggaatgaatacacaatatgcaatacacgcatactaaacagatactggaaaaaaattcaaaaagcaattgcaagaaggtgatccgattcaaaatttctgagatttttccttttcttcttggcttagtt

SEQ ID NO: 12186 - DNA, 450 bp, Gossypium hirsutum
  Clone ID: LIB3829-003-Q6-N6-E8
gaaataaccccgggcgggtcttattccttttttttattgcatacagggcaaaacaatagctgaaaatgtttttgggttttgaaatgaaagggcctgaactggttaccgggttaagttgcaaagagcccgggcgttttcaatttactttgaagggtcaagcaggagcttgtcaaaatttcgttttcctttaggggcgtttgagtcccatgaaaacaagttgtctttttaaaaaacccaaaaaacaaagggggggaaaattgactcacaaaatacaaagacgggggatattcggacagtcttggctgggtcataaaaaggggcgattgaaaaacgggctttgcttgcatttgttatggctcggggcccacaggttttgtatttcccattagttataaactcagtttggccagccacaaaaacaagggtggcatttggaaggggatcccccaa

SEQ ID NO: 12187 - DNA, 506 bp, Gossypium hirsutum
  Clone ID: LIB3829-003-Q6-N6-E9
cagctatcgggttaataccacaaaggaaacaagcaatttatcaattattgttaaactataagtaacaaatggcaatgtttgcaagaaacaaatgaccacgaacaaccaaaaacacttgaacgggataaacatccggaactctaaaaggggccagcattggtgagactgacaactcaatgatgccatctatgccttgtttgcaatgttgttcgaaagccagtccagtccctcatacaagccttcaccagaagtggcacatgtgctctggatgtaccagtgccgttggcggaaagaatgaaggccaagcttgtcagtaatctcagcagcattcatagcatttggaagatcttgcttgtttgcaaatactagcaggacagcatccctcaactcatcctcattcaacatcctgtgcaactcatctctagcttcaaccacacgatcacgatcgttgctatcaaccacaaaaataagtccttgtgtgttttggaagtaatgtctccacaatg

SEQ ID NO: 12188 - DNA, 103 bp, Gossypium hirsutum
  Clone ID: LIB3829-003-Q6-N6-F1
agaagggaaacaattttcatttctaaatagaaagttactagaagtatcataacaaaagtaagatagtttatatatctgtatatatacgagatatatgaataag

SEQ ID NO: 12189 - DNA, 509 bp, Gossypium hirsutum
  Clone ID: LIB3829-003-Q6-N6-F10
agataaaccaaagcctattgtcaatgttcgccactataataagattatatgtgctcacatatatatatggttctataatttagataaaccattagatagagaatgattaatgagttccctcctcaagatcttccctgccggagttttcggtattgaatttataaaagcaactcgtcggatcttcttgtacggtgcaacttgttttgcaatgaaatccatgacttgtgcctgtgtaatgttacttccagggttcctgactacatatgccatgggaatctgccctgcttcttcatccgggtacggaatcaccgcagcatcaacaatttctggatgggaatgaagtaaatgttccaattcagctggagggacctgataggctttgtatttgatcaattctttcaacctatcaacaacgtagagaaacccttcagaatcaaaataacaaatgtcaccagtttttaaccacccttctgagtccaaggtttctgctgttgccttctcatcaccta

SEQ ID NO: 12190 - DNA, 527 bp, Gossypium hirsutum
  Clone ID: LIB3829-003-Q6-N6-F11
catcaagttgaaacaacatcaattacccaaaaaaatacttccgagaagaagccatagcttaggtttatataattggtaatagaatttgtaagaaaaaaagttatagaagtcctctaaacgtagaaataacggagcaattcacataacaaatagcagacaacatcatatttcatatgcaaataaatccaaaccaacacactagacatcctcctcatcctcctgatacatcttcatcatctcagcacagcctgcttcaggctcgtcaaccatgaagcccatggcattggcataacgggtggtggatgaaatgccattgaagttggtcaagataacacgggcacgttcacgaccgggggacattgtggcacaaccaagctgggagctcttcacaagaactgcatcacagatctgatccaagtgatcctcggatacacgaatctggtattttccggttttgtcggtgtatccctcctttttgaagacaacttggccgctcttcctgtcggagcataccaacctaaccatgg

SEQ ID NO: 12191 - DNA, 551 bp, Gossypium hirsutum
  Clone ID: LIB3829-003-Q6-N6-F2
gaaatgcaaaacaaaacttttcaatgtctcaaaaattcatgatttccaacatcaaataacataatttttgaaacattctcaataaaaaaaatgatttcactccatgcataactcaaaagacctgtttgaaggtcccatggtactcttcaagtaaaggcacctcacattttgccagtttttcttcaacaatgaaacaaggaaattgacgctcatttgcacgttttggaagatctgcttctcctccattgctacattcccaacggcgactcccatgcaaagaactttcttcaattggaacttcaccattgcctttgtctcattcactttggactccaaagattcctggtgagtaacaagggttgggaatttccctgctttgttgagaccaggacccaagagacgggggatctgcttgatgacagattcagaggccaaaaatgcatgatatttcttagcaagcttcttgaccaacttcttgttcttgtttagcttcttcaatgcttcaacatccatataatccaaaccaatcttttcagcctcttcaacatgtt

SEQ ID NO: 12192 - DNA, 522 bp, Gossypium hirsutum
  Clone ID: LIB3829-003-Q6-N6-F3
aaataaataaaatattaatattacgggtaatgcccaaaaagcatcttttttacctctactgctaaaaggatcactagatgcataaatacatacatacatgcatgcatcgaatgtcgaagtgcatgaatgttaaaaccttttcaagcccaatagtctgccagaatccaaagtgtgacagcaaggctgaagagaatgttgttgctggtgctcgtcgaagagaggcacagcatgacttggatcattgatgccggtggttgttcccgacggactaagtgaggtggtgccaccaccaaacaccgttggagacccggtggttgtgccggtggttgtccccgtggtgggtgtcgtggaaggaatcccggtgcttgtccctgttgtcggtgtccccgttgttggtgtggtaggagtccctgtggttggtgttgtggtaggagtccctgtggtaggtgttgttggagtccctgtagtaagagttgtcggagtccctgtactcggagttgtcggagtccctgtggatggggt

SEQ ID NO: 12193 - DNA, 567 bp, Gossypium hirsutum
  Clone ID: LIB3829-003-Q6-N6-F4
agaaataggaataaattaaattatacaaagcaagctcttacaaggagaacaaattttctatatcacctcatgtaaaactccatataaagaactctctttatgatctttacagcgagagagtggtctgtgggcactatagagaaccgggaacggcagctgaaggtggcgcatacctatagcacatactatgacaacacattatgagctccatccctggatgggcaaatgtacgctaacacactctgttaagcatccaaaggaatgatgcatctcaaacctataccctggagcatgtagaccaatgccttgtttatatcggcaaaaggcacagagtgtgtgatgaactcgtccatatccagccccagctccttgttcaaatatttgccgacaaccataggaatatcagtgcgtggtttatagctgccataaaaagcacccttaagggtcctctcacttagtagattcattggatgagttttgaatgcatcgtctttctttggcacacccacgcagcacacaaacaccccaaccatcatggcacgcattcaaaagccgaaatcatggctt

SEQ ID NO: 12194 - DNA, 476 bp, Gossypium hirsutum
  Clone ID: LIB3829-003-Q6-N6-F5
aaaaaggaataacggtcgaacatgtctaaaagtctacaactatctttgcaaagggattaaaaacggagtataaaaggggaacagtcaacaatgggaccaacctcctttaaaacgcacactcatgcctggaaagggaaattaccttcaaccctaacccaaggaaaacatatcctgggggaattaagagtgatgttacctaaactcaaaatgtccctaagttggggcatgggaatagagcatcacttctcctagctgcactttaggttgaacagccttgatgtcaaaaggcgctggtcaagaataaaagtattcttggccctggttcagttccaggattgggcaaaatcaggatgagtactcgaatcggtgaagggggtgaggttcataataaacggccatggctgatgaactctgttggcctgaaactgttggagacccacctgccagggatgccctggatgtgggtgcatctttta

SEQ ID NO: 12195 - DNA, 571 bp, Gossypium hirsutum
  Clone ID: LIB3829-003-Q6-N6-F6
cacaaataaaaacaacaggtaaaaaaaagttaacgccacacacatagtttacaaacttataacctaagcttttaggtttcctttccctaaatcctaataataacactttcttttaccccacttcagattttccgggaaaataaaggaaaattgaaggcgggaaaccaagaacaaaaaagtttgatttcaaacggcttgtcttgtgtttttttttttttcaaatacggaaattcttgccggtgaaggtttggccgaactgccaattaggtggtgccacattccatgaagtggaagtgcgtttgtcactgccggtgactctaaaagagagtgcctgaccgatcagcacggcgtttgattgccagttttggccccagttacggctcatgctcatccaaccggttttggttcctttgatactaaccttcacgaggtctcctgcaccggctacgttggtgattaaaaccaagttgaagtaacggaatccgttgaccgtgaatcttattcccccgtgctttcggcacggcactctacgaaaggagactgggacaataccagcacggtactcagcgat

SEQ ID NO: 12196 - DNA, 528 bp, Gossypium hirsutum
  Clone ID: LIB3829-003-Q6-N6-F7
gaaataatagctgttaaagcttttctgtgatttccggcattgtcaagtacacgtacatttacatttatatcagaggccactatcttacatgatatacaaaatgtataagtagcctcaaccattgatgctagttttctttcacttcaaatttacatcatgtaatatatatgcgccgaaccagagtaacataatcatgaagtttgcaagaacaacacaggattccaaaaccaaaaccagcagatttacttatcaaactgttgcagctcaattttccaggcagatgccaattgtaatagaagttgatcaggtactgcgccttcccaattctctggtggatccatcgtggaagctgcctcatgtaaattcaacagaagctctttcttcaactccatcggtatacccaatgcatcaggtccgttttctatcaccactttgaccagctgttgaatccaggatagacaaatatcaaacaaatcttgctccataagaaattgcacaatagagtgcaaggcttcatttgctatctct

SEQ ID NO: 12197 - DNA, 522 bp, Gossypium hirsutum
  unsure (1)..(522): unsure at all n locations; Clone ID: LIB3829-003-Q6-N6-F8
gngaatgtcataatatgcataactcaaacaatgtagaactacatatagtccaaaatttagaagtcgagtgaatcatctcccttctctctatgatttacatgcaacacatttttaatcagttcttgaataagggggaaaatgatatttatggaaacataatctggaagtgaaaggtaatatatctgcataattttctagatcctcctttcaaaatcacctatttgttttagtatacctatcaaacagtgacgcttgaaaccaattcgctcctctcaagactattttcggcaggcaaaggagtacgaggagctctatctgcagccatatttaatcgtagaggtcgaccttcaacctccactccattcatggcagttagagcagactcaacggtctctgctgactcgaaggaaatgaatccaaaaccacgagaccttcccgtgtccttttcatagatgactttagcactcaacaagcctggctggctagcaaatgcgtctctgagaccttctgaagtgacacgcc

SEQ ID NO: 12198 - DNA, 491 bp, Gossypium hirsutum
  Clone ID: LIB3829-003-Q6-N6-F9
gctccaaaactttactggatgaaaccagtttaattgaggggcaaaaattgcttatagaaatgggcaaaggaaacaatcagttgtagtgacactgatcataagttccaagaaaactgtctcaatgacaagcgaaacaaatggaagggtaaaaatctagccaccttgactttaacaactaaaacattgatactaattcgaaacactcattgacagtcgaccagggccgacttataccatagagactgcctaagtggtaagctccataatagcactcacaatgtcaccattgttactcttgagagccttgacagccttggccctcaaaaccccagcctgtgtcatgaccaagtcaatgtccctaggctttacaccagtctcatcaacttcttcctcttcctcatcagccggggcaacagctgcagataaaagtgtctggcttaacttccaaagaaccaatttctggcatcctgaaatggttggcaacttgtgtt

SEQ ID NO: 12199 - DNA, 574 bp, Gossypium hirsutum
  unsure (1)..(574): unsure at all n locations; Clone ID: LIB3829-003-Q6-N6-G1
catcccgtactttctggaactgtaaacacttataatgctttaacatttaaccagttccataaacagctaacaagtactgatagtctaaggatctaacgatctaccggaaaaaaaggtttccttttacataaactgaaaaaggttaaaaccctattatgagtctgataagtcatatttacaatctgtggctattcataacaagattcataatatactgtctccagccatcccagtaacctcttcatggattagacaaaaaggcacaagaacaagatacatttgttaccctttcatgtatacaagctcaatctacaactgcaaaaaaagtgtttagcagtcactcttatccccaccctccagaagcactggttttagcagcactcccatctaaccctttaaaggaggctcggggactctgtagctatcaggcgttatggaagataaccacaatccaggaaacacgcaatcaagttgttttctgaacatttttggctcgcttttttggccttttagaaacctttgaaccggtcatagcaaagatatcctnatcaattttttccctagtaagccaaat

SEQ ID NO: 12200 - DNA, 511 bp, Gossypium hirsutum
  Clone ID: LIB3829-003-Q6-N6-G10
ccaaataacgtaagtccatatcatatctacttccaaatccgaataacataaaagtcgaattgagttgcaaccaagaaaaaacagtagcaaactgtgcatcaaaacaggggaaaaagtgacatagctttacaccacctaacctttcatcaaaacagggaaaagtatgggtgaaggggctctctccaatttcccatcacaaaaatgaagctttttcatcttcttttcacaccaaaacaactcctctttacttatccttcccatccgaagaacccttgatattattttaaggtcaataagcccaaacaacaacggaacatcctcgtgcgatattggccacgtattctttttccatcctttccgttttttacacagctccttcagctttgcacctttcttctctaataaagattgaacttgttgaaaaggggtagccattgggttctggtttccaaacaagttacgaaaactaccatgttttttattggccatttttaaaaaaagtcggaatacc

SEQ ID NO: 12201 - DNA, 98 bp, Gossypium hirsutum
  Clone ID: LIB3829-003-Q6-N6-G12
ttttttttctaaattgttatccttatttttagataacggttaacaacatagaaagccctaactatcagaggaaatgacaaaggggctttaactgcgag

SEQ ID NO: 12202 - DNA, 217 bp, Gossypium hirsutum
  Clone ID: LIB3829-003-Q6-N6-G2
acatcaagaaataatgatgcaccagacgcaaaaaaaaaacacgacatagatatatatatgatcaggtgccgccgggttcgggtggcgtggcacacggggctagtatattcggagggaagttaactacgccccctctaacggatagattagggccctttgctgagctagccctgctaatgaggtttgagttgagaaacaccacgattaccggggatat

SEQ ID NO: 12203 - DNA, 456 bp, Gossypium hirsutum
  Clone ID: LIB3829-003-Q6-N6-G3
aaaaaaaagggaacccccccgggggaaaaaacgggaaaaatcccgggggggggggaatttaaaagggaagggttaaaaagggggaaatataccccttcaaaaaaaaaaacccgggtttcaaaaaatttttttttttttaaaggttaaacccaaaggttggggggtttaaaaaaggcccaaagggtaaaaaaggggttttttttagggggggggagggaaaagttaaaaggggggggggggtaacaaagaaaaccggggcccgggaaaaagaaatttttggggggggaaaaaaaaaaaaaccctttttttgggaaagcccgaaattaaaggaaacccccaaccggaattgggggttaatgtggaaaagggggggggtaaattaaaagggggggaaaaaaacccgggggggaaaggattaaccttgggggggggccccccccaaaaacttatttttgg

SEQ ID NO: 12204 - DNA, 556 bp, Gossypium hirsutum
  Clone ID: LIB3829-003-Q6-N6-G4
cgaaaataaaatttcaatcgaccaaacattacaaacaaatcaacgaataaccaatctgacaagcatatatgaatattatcatttttaaacttggattggccatggccacttcttcaaatcttcatcttgaaccttctcatttctctgatatgctgcttggctgccattgccaaccccatgaccttccacaaaggcatagtatctcaacacaaaagcaagccccaacaccatccattccaagcagaaaacagccacacatagcccaccagccaacttcaatatcaccgccccatcatcttccctcacgtaggacttcaagtaccccaagaagtcagaagttcgggtcaatataagcaccgaaaccgagccctggaatatcgatgtcaacaccatcactaccatgtgagctgcgtagaacttgttggacccggaagtggcgacggagcaacccgagacggcggcggctatggtgacgacgtggaggaggataaggaagaatccacacaaggacgggaacaagcgtagggagaggatgaggaagatacaggcggaagca

SEQ ID NO: 12205 - DNA, 336 bp, Gossypium hirsutum
  Clone ID: LIB3829-003-Q6-N6-G7
aacttaatatgttctcatgtaaaaacagaaaagagagaagttttttacatttaaatagaacttggctaaaagaacccaacccaacccagcggaggtgacacaaatagaagagtgatgtggtggctgcgttaatttttctagagcctttgaggagccacccaccgacccaacaaacactaatgccttctttaattgcagctggaatatgctgtcctctattgggtgcttaataacaaacctcacaagccttattggctaacataaccctattcgggggatactatcttgggcttggcgctccacaactgggttgcaccaagggtccagcaagaaaac

SEQ ID NO: 12206 - DNA, 306 bp, Gossypium hirsutum
  Clone ID: LIB3829-003-Q6-N6-G9
ttcatagtaaataggaaatttatttcattaacaaagcaagcttttacaagataatttattctctcatcacataatataaaactccatataaagaactctcttttttttttttagagagagagagttctatatgggcactcttgataacgcgggaaaggtagcttaagtgggcacataaatataacacatagtaggacaaaacattagagttttgatccttggttgggcaaatatacagcagcaacactctcttaagcatccaaatgaatcatgcatctcagacctataccctggagcatgtactcg

SEQ ID NO: 12207 - DNA, 562 bp, Gossypium hirsutum
  Clone ID: LIB3829-003-Q6-N6-H1
atattaaaatacagtatccataaatttatttgtaatcccctcttttttttcccccttttcaatgctcatgttgttacaaggaaacaaattatgtacattgcaaactgggcctgttcatcctttttgcttttaagatatctcatagtttggctaaaattatcagagaaatcaactaaataaaacatcttggttcaggaatttacaacatttttttgttcatatggaaagaggttacaagctcatgtccttcggtaagcttagttcgagaaagtataggcttgcagacatgaaagccatcccgaagaacacagccttgacagcttgcttctgcccggcatagtcaaatgccaatggcagcatttcatgtaatgttaggaaggccatcaccccaccaactgatcctaacaagccctcgagaatttcgggacttaagctgctcgggaacagataagcaacaattacaacgccgagaggctctgcaaaaccagaaagagttgccaacttgaatgcctgccacttgctctgtgtagcaaaataaacaggcagtgcaacagcaacaccc

SEQ ID NO: 12208 - DNA, 543 bp, Gossypium hirsutum
  unsure (1)..(543): unsure at all n locations; Clone ID: LIB3829-003-Q6-N6-H10
ttttaaaaaattttttttttttttttttttttttttttttttttttttttttttttttttttttcttttttttttttttttttaaaaaaaaaaaaataaaatttttttttttttttttttaaaaaaacttttggagggggggggggggngttttttaaaaaataannaaaaaaannnaaaattaaatttaaaaaaaaaaaattttaaaaaaattaattaataaataattntaaaattttttattttaaccttaaaattaaatttttttttaaaaacccnaaaatttttttaaaaaaaaggaaaaaaaaatttttttaaaaaaaaaatttttttatttttaaaaaattttttaatttataaattttaaaaaannatttttattttaaaatantttaaaaataaattatttttaaaaaaaaaaaaaaattttattttttttttgatttataaaaaaaaataaaataattaatttttttataaaaaataattatttaatatttaaaattataaataatattatccccctccccccccccccccccc

SEQ ID NO: 12209 - DNA, 515 bp, Gossypium hirsutum
  Clone ID: LIB3829-003-Q6-N6-H11
gctgggggggggtttttgcaaagtaacttattattgccataaatttaatataagttgatacatgaactgaataggcgttaagcttcccgcccacaccatcaaaggcttctagtctttaacaataaacacacaaattcataggattctaaagggggggggaggaggaagataaaactgcaagccaagtggagcacgaccaattacttaaaaggcgtgtttgtttaactttaagcagcaacactatggagcacaacagtctcaacagtgaggccaggtccaaacccaaagagcactccccactccaatccttctcctgtgggctgaagcccatcttcccttgatttcttcctcatctcatccaaaataaatagaacacaagcacttgacatgttaccatactctgaaagaacgtgccttgtgggtcgtagcttctctggcttcagtgctaatttggcttctacttgatctaatattgctggaccaccaggatgagcaatccaaaaaagggagttcca

SEQ ID NO: 12210 - DNA, 509 bp, Gossypium hirsutum
  Clone ID: LIB3829-003-Q6-N6-H2
aggcatgagaaattcactttctattgctacaatataatccattggagctgtaatagccaattttagcctggcccatttatgaaataaaaaaacaaaaataaataaagtccaaatatttttacagaccaccaaataacccaaacacaggcccaaatcaaaatcccatcagcccattacctaaactaaccctaatagcccaactacccaaaacactttagcaaccctagcctccttcagcctcagccgccgcatgcctcctctgccacgtgcgccaccaccgctcggggcaccaaccaccagcctctgacaccacctgcaaaatgaaggtccacacgcaagcaaacaccaacagcagagaaacgaacaaagagaaaaacgacaagcaaaaaaaaaaacgaaaggaagcaaacaaaatgaaaaaaaaacaaagaacaaatcagtgtaactcggctataaaaagccgaaatcaatccctttatttttttacgcacaccattaatcaaaaagaa

SEQ ID NO: 12211 - DNA, 563 bp, Gossypium hirsutum
  Clone ID: LIB3829-003-Q6-N6-H3
agaagttggaacattttatcttatttcacattgctcacaactcataaaactacacagaggaaactgattctcctttaagttcttgacaacattactaacacccattagctgctataactatgtatttatatcatactatctcctgacttttcactctcaaaaatagcaccactgacttcacgtatggcagatcagtttgttttccgccggtcaagccaatagctatcgagagtagacaggtacttggacttggttgtctaagaaaacaggttactaagctttatccatagttgccttctgattatgctcagggtgtggcaacattttccctggcaagaggagcaatctcctctccttcaatgccaggttcactgccagccaccccgaggctcaacaacatcttctcccacaaccttgatggtcccttccatgaaaaatcttgtgccatacaattctggatcatttctttcagtgcttgagtcccatatgttgcaagagctctcttgacagtttttaccaccttaatcacatcacttggatccacttcatcacattcaacattg

SEQ ID NO: 12212 - DNA, 562 bp, Gossypium hirsutum
  Clone ID: LIB3829-003-Q6-N6-H4
gtgaaaaaaccatgtttactgttccaatagcagtgtcagtgtgcatctaacaattcaaatcatattcatttgcaaagaatagaatctgaatcagtcacacatacaacaacaaacacaacctttgcattgaggatgcaaatcagtcacatatcaacatttgctaacagatacgataattactggattcgataaccatttgttatcagtctaagaagttggactgccttcttcaatcttctatctgtgttctcttttaggacaacagtacgaggattccttttttcagtgttcaatttccttgtaagctcttcaacaagagtgtgtagtctcttcaaaagagcaggaaacttgtgtacagctttcacacctttcggatttgaacatatcttcttcaagatctcggaagcaataaagtaaccttcttccttgttcctgagcatctcccataagattatctcaactgatggaggagtgtcgattaacacttcggccaaatggggatatcgggctaagtttctgagggttgagagtgcatgctttagaacctgctgatcagggatgc

SEQ ID NO: 12213 - DNA, 556 bp, Gossypium hirsutum
  Clone ID: LIB3829-003-Q6-N6-H5
aagtgaacagtacgttcatttattcagctattcctcatcatgctttttaaatggaaccttgttttgctgttcttcagtcatcaagttttatatttatatatatgagaacattacattcttcagttatggcttagattcatcggtcttccattctactatagcaagcgtatggcggcctccgcatgcaacaagtttagagatccaatatccttcagcaccacttccgctaacactttttggagctggcagattgatcgggacttccatgggttgacctgttgttgccttccgcccataacctagtcgtccatggtcacctcgtccaaacgaaaacatgcgcccatcacgtgtcaatgcaaccgaatgtgttccaccacaagatacctgaacaatatcttccccagctaaaagttgaaccctttgcggcaccattttactgctcttatcgttatctccaaacccgagcctcccatgttctcctcttccccaaccatacacctctccatcatcagtcaatgcagtggaatgccatccaccagcagcaatatcaaccaaa

SEQ ID NO: 12214 - DNA, 371 bp, Gossypium hirsutum
  Clone ID: LIB3829-003-Q6-N6-H6
acataaaatcaaactcgctgagaacatcccaaattcatgttgtggagtcgatataaagggttttttgcatattaaatccccggccaaataaaactttgaatggtcccctatcggcacaactctgttgggagaaatggtagtgaaatatgcttaaaattgcttatgaatttggaacttaaggtacttgaccaacccatttggaacctggccccctttatttttccattgaaggccagggccaacacattattttgcttcacaaaccataggtcctttccctttgcctaaaatccccggattccattgtttagttaaaagactagcttatggaaaagtttgattgggtttgaagtactttcagtgttcataaa

SEQ ID NO: 12215 - DNA, 506 bp, Gossypium hirsutum
  Clone ID: LIB3829-003-Q6-N6-H7
gaaaactgaatttatcaaaatttataaaaatatataatcttttaaacactattagtgtaaatgtccaaattcatggcatgttttatctggtaaaaaaggaatgaaaataagaacacccacaagcaaattatatttaatttaagctaactaagaagctaaaccatcaagcttgtcctaataaaagctaggcttaagactttgtagagcctttcaggcaatggcaccatttgaaatttcttattcaaactaagatgtgccatgagaagtgcaacgtgggtctgcaattcctcgccttgcttgagttgcctcgcatgctctttccacgaacaatattgagccggcataacccagcatgtccagccacagtttccctattatcaatttttatttatcttcgtgatcccatatgaaatccgatgccaaagtcaattgctcagggatttggcacccttcaaagaatgtcgacttcctcaaacttcccatgtcgataaagaatgatcgggatc

SEQ ID NO: 12216 - DNA, 455 bp, Gossypium hirsutum
  Clone ID: LIB3829-003-Q6-N6-H8
aaacaaatgcactatgatttattattattacttgtaaaagacaacatgcaaactgcctcttctaataaaaacatacaagcagaaacactaaatttaagcgacctgcttgggagttgggacccaggaaccacccattacagagaacagattgaccataaaaaagtgcccccccccccaattcctgcttgaaccttatataaactatctacctgccatatgccaattgcgtgtgagtaaagccaataggcgagctatcattggtgggttatatacatgcccaagacccaagcctgatacacctaaatgctatcacgtgcttattgaactagaattgaaactaatggattggaacatgcagacttaactgacagggagtgcactacacaagctaacattgactatcccatgttacaagcttatttaggactggggggggggggttatgagggttgggg

SEQ ID NO: 12217 - DNA, 360 bp, Gossypium hirsutum
  Clone ID: LIB3829-003-Q6-N6-H9
aattaaaaaaaactcaccctgttaaaaaaggaatagaaaaaaaaatttttttcatttaccttggtaaaaatacagggggggggaattacaaaacaagaagcaaatttaactagctttaccttgattttaaaataatgattcctttcggggtttttcctgggaattggttttcttccaaatgtaaaatattctaaaattaaaaacaattaatgggttgccataccctatgggctttacaccctgaccattatcgggcattcattcttgcagggaaaccaccacctattttccttcccaattaattttttatttaactaccatataaacaaatgcccttgttttttgaacctaaactcaaaa

SEQ ID NO: 12218 - DNA, 640 bp, Gossypium hirsutum
  Clone ID: LIB3829-004-Q6-K6-A1
gattttgttgttttgctctcgatctctccgcccaaacttgtagacgccaagcagataaattttgtgattactcttttctttctcagatcccttcgaaagcgattcttcttcttctttttattctttttaaattgaattgaagttgctgattcgaaatgagtacggccgaccttctcagcatcgagcctttagagctcaagtttccttttgaactgaggaagcagatctcgtgtgctcttcaattgtcgaataaaactgataattatgtagctttcaaggtgaaaacgacaaatccaaagaagtactgcgttcgtcccaatacgggggtcgttttgcctcgatccacatgcgatgttgttgttaccatgcaagcgcaaaaagaggctcctcctgatatgcaatgcagggacaaattcctccttcaaagtgtaaaggtaaatgatggtgcatccgcaaaggatataactgcagaaatgttcaacaaggaagctgggcatgtggttgaggagtgcaaattgaaagtggtttatgtttctccacctcaaccaccttcacctgtacgtgaaggttcagaagaagggtctccaccaagagtttctgcttctgaccatgggcatgcaaatgctgctgagtttgctgc

SEQ ID NO: 12219 - DNA, 580 bp, Gossypium hirsutum
  unsure (1)..(580): unsure at all n locations; Clone ID: LIB3829-004-Q6-K6-A10
canacttgggtggtggngaagagatctgcctatgaccctgatgagattgaggaagagcaacgcgagcgtgaccgaaagaataaaattaacacggacttccagaactttgtgaatcgggttaatgatttgtggggacagcctcaatttaaagcatttgaccttgaatttgatcagcctatgagagagcttggcttccatggggttccccataaagcctctgctttcattgtgccaacatcaaactgcctggttgagctaatagagactccttttgtggtgatcaccctaagtgagattgagatagttaacctcgaaagagttggtctggggcagaagaattttgatatgactattgtattcaaggacttcaagcgagatgtccttcggattgactcgattccctctacatcactagatggcatcaaagagtggcttaataccactgatctcaagtactatgagagcagactaaatttgaattggcgtcctatactgaaaactatcactgatgatccagaaaagttcattgaagatggtggatgggaatttttgaacatggaagtcagtgattccgagtctg

SEQ ID NO: 12220 - DNA, 589 bp, Gossypium hirsutum
  unsure (1)..(589): unsure at all n locations; Clone ID: LIB3829-004-Q6-K6-A11
gcgttcgcgcangacgaatggcggagacttccaanaatctatcgcatcagctaatcacgctccaaagatggatcaggttcaacacccatctgtcatgcagaaggtagcaggccagctccttcgttctagccattctcaagattttcaaggttataatgggtctttcaggagtcctgctctataccaaaggcgtgctgcatatggcaattactccaatgctgcactgcagtatcctgtccgggcttgtggagacctgtctatggttccatcaacagcttcagctatttgcgttcaagcccctgctgagaaaggatttgccagctttgccattgatttcctcatgggtggagtttctgctgctgtatcaaaaacagctgctgcaccaattgagcgtgttaagcttttgattcagaaccaagatgaaatgatcaaaagtggaaggctctctgaaccttacaagggtattggtgattgtttcaagcgaacaatcaaggatgaaggatttggttctttgtggagaggaaacactgccaatgttattcgttatttccccactcaggccttgaactttgccttcaagnattacttc

SEQ ID NO: 12221 - DNA, 569 bp, Gossypium hirsutum
  Clone ID: LIB3829-004-Q6-K6-A12
cttctcacgctcgattaccttacaaaaagagaaaatgaccaagtgttacccaactgtgagcgaggaataccagaagtcagttgtaaaaggccaagaggaagctcagaggtctcatcgctgagaagaactgtgctccactcatgctccgtttagcgtggcactcagctggaacttttgatgttaagaccaagaccggaggtccattcggaaccatgaagcatcctgctgagctcgcacatgctgctaacaacggcctagatatcgccgtcagacttctcgagccgatcaaggagcagttccctaacctcacctacgctgacttctatcagcttgctggtgtcgttgccgttgagattactggtggacctgaaattcccttccatcccggaagagaggacaagcctcacccccctcctgagggccgtcttcctgatgctaccaaggttctgatcacttgaggcaggtgtttagtgctcaaatgggtctcagtgaccagcacattgttgctctttctggtggccacactctgggaaggtgccacaaggagaggtccgggtttgagggaccat

SEQ ID NO: 12222 - DNA, 619 bp, Gossypium hirsutum
  Clone ID: LIB3829-004-Q6-K6-A2
cgccatctccactctcacgcgccgccctttaggtgtttctctccactaccaccgtcttcatcatcatcgttcccctacttttgctactttaagctcctcttcttctcaaccaccctcatcaacagcagtaactcctcctcttcctacttcagccggcgaaaatactttgtcgtctcaaactcatcaacacccaaacccaggcagctttaactatgcgttagccaatcctaaaggcgactcattacttggtattgctcgctccaccgagtccaacatcgaaaagataatctttgacttccgtttcttagcactttttgccgttggaggttcgttggccggttcactgttatgctttctaaatggttgtgtttacatttttgaagcttacaaggtctattggacaagctgtgttaaagggattcacacagggaatatggttttacgattggttgaagccattgatgtttatcttgctggaacagtgatgttaatatttggtatgggattgtatggattattcatcagtaacttgaacccggaattgcctgccgatgtcgatcgtgcccttaaaggctcgtcattgttcggaatgtttgctatgaaggtaacaaacacgctc

SEQ ID NO: 12223 - DNA, 629 bp, Gossypium hirsutum
  unsure (1)..(629): unsure at all n locations; Clone ID: LIB3829-004-Q6-K6-A3
ccggaatctgaaagaagnacacagagaaaaagaagagaganaagagagtcgggaggaatagcgcgtggtcgactcgccgaggaacgtaaggcatggaggaagaaccatccccatggttttgttgcgaaaccagagacgttgcctgatggaacggtcaatttgatggtgtggcattgcacgatccctggtaaagcaggaactgattgggagggtggctacttcccgctcacgctccatttcagtgaagattatcccagcaagcctccaaagtgtaaatttccccagggctttttccacccaaatgtttatccatctggtactgtttgcctttcaatcctaaatgaggatagtggttggagaccagccataactgtgaagcagattcttattggaatccaagatcttctggatgctccaaaccctgctgatcctgctcaaactgaagggtatcacctcttcatccaggatgctaatgaatataagagaagggttcgccagcaagccaagcagtacccacctctggtctagtctgttgttattaaaaaatagtaactaagactttccatgaaattgctggtaaaatgccggctgggttggctgctcgcctcatgtataatgctagacttggc

SEQ ID NO: 12224 - DNA, 606 bp, Gossypium hirsutum
  Clone ID: LIB3829-004-Q6-K6-A4
cccagcgtccgtttaaaattaagaaaaaaatcatacgcaatgagcactgctggtcaggttattcgttgcaaagctgcggtggcatgggaggcggggaagccactatcgatagaagaagtggaagtggcaccaccccaaaagcatgaagtccgtattaagattctcttcactgctttatgtcacactgatgtatactactgggagtgtaagggttacactcctctgtttcctcgtatacttggtcatgaagcctcagggatcgtggagagtgtgggtgagggtgtgaatgatttgaaacctggagatcatgtgctccctatcttcaccggagaatgcaaagaatgtcgccactgtctgtcagaagaaagcaataacatgtgcgaactgcttaggatcaactgcgaccgaggtgttatgcttgctgatgggaaaaccagattttccatcaacggcaagcctatctaccactttgttggaacctcgacctttagccaatatactgtcgtccatgttggccaggttgccaagatcagtccaaccgcccctcttgataaagtctgtcccattagctgtgggatatgtacaggttttggggccactgtgaat

SEQ ID NO: 12225 - DNA, 586 bp, Gossypium hirsutum
  unsure (1)..(586): unsure at all n locations; Clone ID: LIB3829-004-Q6-K6-A5
agnattaagaggtggaagtgaccaaggtggaaacgcaacctagtccaaccatcatctccattcttttccttcaaactcaaccaaaatcatttttcattttctctcttttaagccctgctacctcctaccttctcctgtttctcaactaaagaaatagtgtaaatgatgtgatctgggagaggttggtgagtgagatattgcagagaacggtatgagttgcggttgttttggtggatcagttgttaagcggagacagagcaccgctcgggccaccggcggtatagacgagcaattaattcggacggtcaaccatttctcatacgatcaattaaaattagccacagatgattttcattcaagcaataaaataggtcgtggaggttttggaaccgtttacaagggaattctaaaagatggaactgaagttgctgtgaagacacttgcagcacaatcgaagcagggagctcgtgaatttttgacggagatcaacactatatcaaatgtcaagcatccgaaccttgttgagctgatcgggtgttgcattcaaggagcgaatcgtatattggtctatgaatacgttgaaaat

SEQ ID NO: 12226 - DNA, 588 bp, Gossypium hirsutum
  unsure (1)..(588): unsure at all n locations; Clone ID: LIB3829-004-Q6-K6-A6
cgagngtgaaaagtagcagnacaagcagctcctcgtcccgtgaaagattgggaatcctcctgttgatcagagagctggaagaaatctgagagaaaccatggtgtttacaatgaaagagttgatacgcagaggaggaaccggcctaatgaaaactggcggaatgacaaggaaattgagaggcagcagcggcaggagaggcagccatcacctgagacctggcgtaagcctgcggagcagcctaaaccagtctctcctgaagctgctggtgttcgctatggaaaagcagcatcagctttggagcttgctcaagccttttccaaatcattctcagatcagaaaacagatgatcgatatgcggggcaaaggggtcttcctggccgtcctcaaatgcccttttctcggctgatgggttcaactccaaggcctcagataaatggttactaaattttgggaggctattttcttaccggtgactggattgtgttaccggtaattccctaattggttttaggatgtcagtgattatagttgtgctgtatgacctcatcatttcatacaantgatctgtctttggttttttcatttaaa

SEQ ID NO: 12227 - DNA, 357 bp, Gossypium hirsutum
  Clone ID: LIB3829-004-Q6-K6-A7
cggccgcgtgggcgattttaatgtacaactacttaaaaagcaaaataaataatggctgagccaaaccaatgcacctacaaaatccacacatattctggtgcatctttcctatgcccgactaatgttcgatacagatacatcttgtctaccttctgcttgtcgtcaaggttaaattccatttgttcactctcatctatgatctccacatttaggctcggcatcttctcagcaactgacttgcagcctccgagggtaacttcacaggaggacatccaaagggatcgcattgtttcatactttcccacgtcctctagaagtgctgcgtcaccaaaggggcagtccctgatctctagcttg

SEQ ID NO: 12228 - DNA, 581 bp, Gossypium hirsutum
  unsure (1)..(581): unsure at all n locations; Clone ID: LIB3829-004-Q6-K6-A8
agcccctctaccgatccaaacatgggacgcgtccgtacgaagaccgtngaagaaatcgtctcgtcaggtaatcgagcggtactactctcgcatgacccttgatttccacaccaacaaaaggttatagaagaagtagctattatcccatccaagaggctccggaacaagattgctgggttctcaacccatttgatgaaacggatccagaagggtccggttcgtggcatttctctgaagcttcaggaagaagagcgtgagcgtcgtatggatttcgtccccgatgtatcggctattgctgttgattcaatagaagttgataaggaaaccattgatatgctttcacttcttggaatggccgatcttcccgggattgttaaggttgatccggttgctgttcaggttcctcaagtcgggttcggacgtggtggaggacccggaaggaggttttaagtggtgggttttccatggatatgatgggttcttaattttaagtttgatatgttttcttttgggattttgtgtttttgttgcaaccattttagttatgtctaatgctactgaaaattattaagtttgataag

SEQ ID NO: 12229 - DNA, 597 bp, Gossypium hirsutum
  unsure (1)..(597): unsure at all n locations; Clone ID: LIB3829-004-Q6-K6-A9
gcagnacggnacctaagtggnaaaagctaacacgcatggnaanaaaccctcaanaagactttgcaagagaaagaatccctattatatttgcttgaaggtgcaggagatgtggatcatggagctagtgcaaactctgaaattgtgcaagttgaacctgtgataaaccagtgggctgtaccagggaactccacggcttcccaagttcgtagtttgcgtaaagtcaataatgatcaagttgctattcatatagattcagatgatgttagtaatagtaggttagaagatgaagatgaagataaagttcatggtttcaaatcacttaccacatcaagaattgttccaaggtttacaagaccagtatctgacatgatagatggcttatgggtttcttgtgatcgggcactcatgcgacaacctgccttacggcttgccattatgatctattgggctatattgcattcactgttagcagcttttgtattttgacgagccaaacctggtagcggccatttctctgatggttatctactcgtttgtgtcgaaaggagtggcaaccatgactgcgtacttggtccatagtcattttattattatcat

SEQ ID NO: 12230 - DNA, 635 bp, Gossypium hirsutum
  Clone ID: LIB3829-004-Q6-K6-B1
gaacaacggtgtgcatacgcaaggcgaccatggacgacctactggctatgcaagcttgcaacttgctttgccttcccgagaattaccagatgaaatactatttctaccacatcctctcttggcctcagcttctttacgtcgccgaggactacaacggccgcatcgtcggttacgtcctcgctaagatggaggacgaaagcaacgagtgccacggccacattacctctctcgccgtcctccgcactcaccgcaagcttggcctcgccactaagctcatgaacgccgcccaagccgccatggagcaggtgtttggagcagagtatgtgtcgctgcatgtgaggaagagtaacagggcagcgtttaatttgtatacccagacgttgggatataagattcatgatgtggaggccaagtattatgcagatggggaggatgcatatgacatgaggaagcagttgaaaggaaagacgaaccatcatcatggtcatcatcatcaccaccaccaccaccaccatcatggtggtgggatgttgttcaggtgatgcaagaagtggagaagcagctcatacacgaggagactcgaaatcagagtcaaaagctagcacaaaatctgattccaaaactggatgattact

SEQ ID NO: 12231 - DNA, 605 bp, Gossypium hirsutum
  Clone ID: LIB3829-004-Q6-K6-B10
cccagcgtccggcagtagccgcggctttacacttcccttctctcacctcttccagccagaagtcagtttagtagcaatggcgtatgctgcgatgaagcctaccaagccgggtttggaggagccccaagagcagattcacaagatccggatcactctctcctctaagaatgtgaaaaacctagaaaagtttgtgctgatttggttcgcggggcaaaggataagagactgagggttaagggaccagtaagaatgcccaccaaggttcttcacatcactaccaggaagtctccctgtggtgaaggaacaaacacatgggatcggtttgagctccgtgttcacaagcgagttattgacctattcagctcccctgacgtggtgaagcagatcacatctatcaccattgaacccggtgttgaggtagaagtcaccattgcagattcttaaatgtgccttacttttgctttttggcctcacatggtttttagtttatttgaaagagacttttgattgatgtgaccttctttgcttggatcaatctcaagcttggatgaatgttgtaaggtttctatagttggtgttttttccataatggaattaaaattcta

SEQ ID NO: 12232 - DNA, 451 bp, Gossypium hirsutum
  Clone ID: LIB3829-004-Q6-K6-B11
gtcaaattcccaaaaaaaaaaactttccagcaaaagtcaggaagaggaaaaggaggtaaaggtctcggaaaagaggagccaagaggcatcgtaaggtcctaagggataacatccaaggtatcactaagccggccatccgtcgtttggctcgtcgtggaggagttaagagaatcagtggcttgatctatgaagaaaccagaggagtgttgaagattttcttggagaacgtcattcgcgatgcagtgacttacactgagcacgctagaaggaagaccgtgacggccatggatgttgtttatgctttgaaaaggcaaggccgtactctctatggatttggtggttaagttttcggtttcttgttcgtgttatattgtactatgtaatctttgattatcatcaatggatttcgttaagaaaaatctattctcgcttattttgagcttttttattt

SEQ ID NO: 12233 - DNA, 576 bp, Gossypium hirsutum
  unsure (1)..(576): unsure at all n locations; Clone ID: LIB3829-004-Q6-K6-B2
gnaaacanaaaaaaaaagagattgagattagctttgttttttatgatattataatgaaaggagagtatttaagttcttcttctttngaaaacccatggctcagcagattcaaatctcatcaccattgatactccaaaagctgtattgtgaaaaagaagaagaaagctttgaagacgacaatggaagtgaaatttgtgttgaaacagtgaaaaaagagacatttttaccttcattcttcattgaaaatgattgtttctttgaacaagacgatgagttgtttgttttaatgtctaaagagaaacagacccaccatgggtacattgatgttaacttaaacaagccactggttttagctagaaagcaagctttggggttgtttttcaaggtcaaagaacactatgggttcaatgctttaaccatggttcttgctgtgaattacttcgataggttcatttcaagcttgaaacttcaacaagacaacccatggatgagtcaattagctgctgttgcttgtttatctttagctgctaaagttgaagaagctcaagtaccactccttttagaccttcaagtgga

SEQ ID NO: 12234 - DNA, 621 bp, Gossypium hirsutum
  unsure (1)..(621): unsure at all n locations; Clone ID: LIB3829-004-Q6-K6-B3
gnaaaatatctcaaatctcctcctcctcctcgggaaatcttagtatcatcaccatggcctcaaatcccaggtcttctttgacatgactatcggtggtcagcccgctggtcggattgtgatggagcttttcgcagattgcactcctcgcactgctgagaacttccgtgccctctgtaccggcgagaaaggcgtcggccgcagcggtaagcccctccactacaaaggctcctctttccatcgtgtgatccctaactttatgtgccaaggaggtgacttcaccgccggaaacggtaccggaggtgaatccatctacggatccaagttcgctgacgagaacttcatcaagaagcacactggtcccggtattctctcaatggctaacgctggtcccggaactaacggatctcagttcttcatttgcacggctaagactgagtggctcgacggaaagcacgttgtgtttggacaagttgttgaaggcatggatgtggtgaaagccattgagaaagttgggtctagcagtggaagaacttccaagcccgttgttgttgctgactgcggacagctctcttagagaaagaaaagagactatgtgttaagttgggatgttgtctaatgtct

SEQ ID NO: 12235 - DNA, 617 bp, Gossypium hirsutum
  unsure (1)..(617): unsure at all n locations; Clone ID: LIB3829-004-Q6-K6-B5
gnaattttggggttagtttgttgtggttcagttttgtggtgaaatggataattcgaagaatcggcttaatgatcatcttggcgtgaacaaaatcgggaagaatataaagaagagcccgttgcatcaacctaatttcgctaataatgcgactaggcaacagcctcagcctcaagtttacaatattagcaagaatgatttcaggaacattgttcaacaactcactggttcaccgtcacataatgatcctttgccaaggcctccacagaatccaccaaaaccccaaagtatgaggttgcagagaattaggcctccaccattgacaccaatcaatcggcctcatattcctcccctggctcctgtccctgcccctgttcctgctcatgcaccggctccggttccacctcctggtccatataataaccctggcttagttaggcctggaccacctggtcaatatggacaaccaccatctacaatgatgcaacctatggttcctggtgatgctccatgggcaaacacagctgactctcctatatctgcttatatgcgatatcttcaaacttctcttatagatccaagtncagttggaaatcaagttcaacctcaactacatccgc

SEQ ID NO: 12236 - DNA, 611 bp, Gossypium hirsutum
  unsure (1)..(611): unsure at all n locations; Clone ID: LIB3829-004-Q6-K6-B6
gcgagttggctcatccccttgacgccaaanaatatcttgacaatattattggacaagnaaagcaggaaaagttgttanccgaaaagtacttgcggcggaggggtcacttagttctctgcaccggcaatgcagccatccctgcttcgaaacttcaagcctatgtcaaaccaccttcgggtgaaatctctgtcagtggaacgaagaaaccatttaagactccaaaagaggctgcgggctctagttatcgggctgaaccaaaaaagaatgtcatttctggtaatcaggaaaacagaatcccgaatgatgctagtgattcaagaaacatgcgtaaagggaaccaaggtaattctaaaaagaagaaagctggtaaagttgtttcacttgcagaggcagccaaagggtcgattgtcttccaccaggggaaaccgtgctcgtgtcaagctcgccaacacagactggtcagtaattgtctttcatgtggtaagatagtctgcgagcaggaaggagaggggccgtgcaatttctgtggtgctctagtgcttagagaaggagcacgtatgctggtcttgaaggaagcttcactcctgtatcagatgctgaagcagcagctg

SEQ ID NO: 12237 - DNA, 605 bp, Gossypium hirsutum
  unsure (1)..(605): unsure at all n locations; Clone ID: LIB3829-004-Q6-K6-B7
ctctagtggggttgagaganacatcttctcatcttaactaaagattgatcgtttactcaaatagttgtgtactttcggttttccagtttataggggaaaagaaaagagtgttttgcttttgcttttaatcttgcttctgtattttcttcccgtttatggtaagttgtctagggttagggtaagtgtttgtttaaagtggtcaggttttagtgaataaatatggctattaggaagaagaaaaagaagaaaatcagcccaagtatttagatgtaatccaaagtaagaaggtggggggttaggaatggagctccttgaagtccaatagagtttcttgctgggtatattgagctgcttggctatggatcccacagtcctatcccatgttgggagggataggcttgcggcttccatatctcaggagcttcattacctttaaagttagatccttgtttggattgaagggagctctacatctttctcctttctcacttcatcgtctagccaaagattgatgtgatcttataatgctacacttttatcttcttttgttgctgntgactctttttctctttcatggatctgngaagtttaaggtttgattgtaa

SEQ ID NO: 12238 - DNA, 554 bp, Gossypium hirsutum
  unsure (1)..(554): unsure at all n locations; Clone ID: LIB3829-004-Q6-K6-B8
attccanaagctttagtgaaatcggnaaaactcaccggnaaattcaccatgtgtacgttgngagaaacgcggcaacctctttattttaacgtttaccggcgaagaccagcaccggtttaatcccaatgtcatcggctcccttctcagccttctctctcaggtcaaggctgaagccactcgtggctcagctcttattacccaagcccaaggtaagttcttctccaacggcttcgatctcgactgggctcaagccgccggatctgaacaaggagccgcggaacggttacaccacatggtggatttgtttaggcccgtcatcgcggctcttctgtccctcccgatgcccaccgtcgccgccatcaccggtcacgccgctgccggtggatttgccctcgcgttgtctcacgattacctcattatgaggaaagaccgaggggttctttacatgtccgaggtggacatagcgctgacaatccccgattacttcaacgcgttgtttagggaaaagatcggcgacgcgtcggtccgccgcgattttttgctgcgagggctga

SEQ ID NO: 12239 - DNA, 587 bp, Gossypium hirsutum
  Clone ID: LIB3829-004-Q6-K6-B9
aatcaaagccttcttcacagcagcagcaaacgcctggtggttcagcagctccaactgataatagtggttaccattacagtcagccaccagcttctggctacatgcaaccaggacaaggttatgctcaggatggctatggtggataccatgcacctccacaatcaggttatggacaaccagcatcatatgaacaagaaggttatggctcggcacaaagctatggcagtgcaacgaaccctactcaagagggtcacactccctcctatggtggtcaaggagatgctggtcaagcacctacttctacccaaccttctgcggtgggtcagcaagggtacaatacaagtcaggtgcctagcccaaatcctggcagttatccacctcaaggaagtactcaacctagttacagtcagagtggctatgggagtcaaccaccagctcagtcgggctatggacctgggtatggaccaccacaagggcagaaaccactggtcaatcaccctgcctatgggcagacacagcagtctcctaccaccccaggaagctatggccaggcaggatatcaatcacagcctccatcttctggctat

SEQ ID NO: 12240 - DNA, 573 bp, Gossypium hirsutum
  unsure (1)..(573): unsure at all n locations; Clone ID: LIB3829-004-Q6-K6-C1
cgccgcttcacgcgcagctgttttttttctcggaacgttctaaaaaaaggaaaaatgaagaaggaaaccgagccaaagtccagctcaacgcaatctatggctcaagaaccgaatgccaaagcggacccgaaaaatcggatcccgaaatggacgcggagggctttgttattgtgccaacaacagagccagagaaagagaaagagaaagagagtcagattcaaaacgagcaatcaccgaaccaagcacaatcgggattgaggaactcggttcatccattggatagtggatcgcctgctgcggatcgcgacgctaacatgtccgctcctaacagatacaatcgtaaccttgctcaggctcccgctatggattcttcttcggcttctttcaaagagaagatggatatagtgagggatgccttttggagatggaagaggataatgggagaagcgacgaagaaagccgaggatcttgccggaaacacgtggcaacacttaaaaacaagcccaagtcttgctgaggctgccatgggaagaattgctcanggaacaaaggttttggctgaaggtggctatg

SEQ ID NO: 12241 - DNA, 569 bp, Gossypium hirsutum
  Clone ID: LIB3829-004-Q6-K6-C10
ctggcctagcttgtgttatgaaaagatgagagggaaggaggatgttcaatctagcatggtggcggcttttggttctggggccatgttttctctagtgagtggcatgggcggcccgaatcaggctgcaaatgcagtcacttctggactttttttcgcactcattcaaggcgtgcttttccagttcggacaaaagttatcacaaccagctgtcgaggacatgtactattcccgaacaagatccatgttaaatagtctcgggctccagaactacgagaagaatttcaagaaaggcttgttaactgataacacattgcctttgctcacggatagtgcacttagagatgtgaaaataccacccggaccgaggctccttattctcgatcatgttcaaagttttagctccaccttctaagaagggtaattatgactgtcgaacttgatctcactttcatcaggtttgtcgtctctagagacccaaaattgagagagaagtgaggaagccgtgggtgaagtttgatcatcaaagtcagttcatcataaggggcgttttcatatatctcggaaactac

SEQ ID NO: 12242 - DNA, 565 bp, Gossypium hirsutum
  unsure (1)..(565): unsure at all n locations; Clone ID: LIB3829-004-Q6-K6-C11
ctggnacctgtgtttgtcaaaggtaaaatcgttgtgtgtgatagagggattaattccagagctgctaaggggaagtcgtcaaaaagccggcggaattggaatgattttagctaatggtgttttcgacggtgaagggttagtcgccgattgccatgtcttgccagcgaccgccgttggtgcatcaaatggggatgagattagggggtacattgattccgcctctaaatccaagtcaccagccaccgccaccatcctctttaaagggactcgattaggtgtccgaccagctcccgtcgtggcttcattttctgctcgagggcctaaccctgaaactcccgaaattctgaaacctgatgtcattgctccaggattgaacatcctcgccgcctggcccgacaaagttggtccatctggtgtttcatcagacagtcgaaacactgagttcaacattctttcgggcacatcaatggcttgtccccatgtttccgggttggccgcattgttgaaggcggctcaccccgaatggagccccgcggccataaaatccgctttgatgacctctgct

SEQ ID NO: 12243 - DNA, 572 bp, Gossypium hirsutum
  unsure (1)..(572): unsure at all n locations; Clone ID: LIB3829-004-Q6-K6-C12
cggccgcgtgggngaaacttgnaggggaanaatcttgctatcccttgcttttctctcgcaaaaaatctcaaacttgtttttaacgttcgctgaatactatcgctcatttcttccctcagaaccctaatcgataactgaagccatttaatcatgtttgggcgtgttccaaaaaaatctgataacactaagttttacgaagtacttggggttcccaaaagtgcaagtcaggatgaattaaagaaggcttataagaaagctgcaattaagaatcatccggataaaggtggagaccccgagaagtttaaggaactggctcatgcttatgaagtacttagtgacccagagaagagagaaatatatgatcaatatggtgaagatgctcttaaagagggaatgggaggaggcggttcttctcacaacccatttgacatatttgagtcatttttcggtgggggagccttcggaggcggtggtagctcgagaggaagaaggcagaagcgaggtgaagatgtagtgcatgctcttaaagtttctctggaagaattgtacaatgggacgacaaaaaagctctc

SEQ ID NO: 12244 - DNA, 591 bp, Gossypium hirsutum
  Clone ID: LIB3829-004-Q6-K6-C2
tggacaccatcccgcctttcccagagcaggatatttccaagttcaagtgcagccgaatcacacgattacggtttccatgaacactcctcttctccaaccccatcttgcttcccccggacagaacatactcggtcatactataaacccgcaccttttaccggagttccaatcatggctgcacctgtatctgttgttcctccatcaagtcctatcatcggtactaccgatcttaggaatgctgccaaatcttctagggcaccagctcaattgactatcttttatgctggatctgtatgtgtgtacgatgatgtatctcccgacaaggcccaagctattatgttacttgctggaaacgtttcttctacgactcaaagtaaaacggcacctgtgactcaaccgcagacacatattccacgaccttgtaccttgtcccctttctcgggtcttccaaatcacctttctgtaacctcccatgtcagtttacagcctgttgcaggatctagtggcaccaatgaactaacagctgcaacaaggataggagctttagcatctactaataaccaaccagatcctccaaaattggttaatcct

SEQ ID NO: 12245 - DNA, 582 bp, Gossypium hirsutum
  Clone ID: LIB3829-004-Q6-K6-C3
gttcagatgccacgtggaatcaaatttgccagtgcgatatcagagtcgggtgagattaaggtcgaaggacaggtgaaggatgggattccccatctgacaaaggtagggtcattcgaagtggatgtaagcttggagggtagcattatcctttgcagacaggttgatcagcctggcttgattggtaaggtgggaagtattttggggcaggagaatgtgaatgtgagtttcatgagcgttgggaggattgcgccgaggaagcaagcagtgatggccataggggtcgatgatcagcccagcaaaggatctttacagaggatcggcgaggttcctgccattgaagagtttgttttcctcaagttgtagggtgactgtaccatttaccatatccttttcttgggttacaaccctgtagtactaaaattttttgaaaatctgtcattgagtgtgttctgtctcggataagaaagaataatttcgttgaacttgagtgattcagattgtgattaatatatattttcggatgaacttaagtgattcagattgtgatcaaatatgtatttttgatgaacttttaagtgactc

SEQ ID NO: 12246 - DNA, 626 bp, Gossypium hirsutum
  unsure (1)..(626): unsure at all n locations; Clone ID: LIB3829-004-Q6-K6-C4
tacctcttaaaaagcagnaaggggtatttctcgaatggnaaaaacatcccggcctatatcaagcatggcagaaggactattaggcctattgctccactttacaaggagccttgatcaagagaccattagtgtggtcaaggagcatcaaatcatgagcattttctgtgagcagctgagttttcctgcaaaacctagagtgaggcagcttgctgctgttggattgaagaacttgtctgaagctggaaggtcagttgcagctgcagactcggaaccaccacctccccaaggtttctgtgctcccttggtattcatgtgtgtaagggcatctccaaaaccttcgacttgtcccatacacaatgctccatgtgaaaacaataatcaactgtgcttactaaaatccaattgcatcagacccttggttgaccaccttcgcgatgaagatacctttgttcaaatagctgcaattgaggcactttcaactcttatgttagatacgggtaatggttacaaaagatccgtggatgagctagaaaagcaagatgtaatcatggctgtcatcgaactttcaccgaaattcgtcctggagtgcttcaagagaggcactttggatgatagagaaggcattg

SEQ ID NO: 12247 - DNA, 580 bp, Gossypium hirsutum
  unsure (1)..(580): unsure at all n locations; Clone ID: LIB3829-004-Q6-K6-C5
naaaaaaatggnatttttagactttcctcattgttttggcccttatcttcctccgtctttggtggcgctactggtcaaccaccggtggtggacctaagaacctccctccagggccacctggttggccacttgtcggaaacctaattcaaatcatcctccaacgtcaacacttcatatttatagtacgtggtttacgtaaaaggtatggtcccattttcagcatgcaaatggggcaacgcactatggtgattgtgaccgactcaaggcttatccatgaagccctagttcaaagaggacccacttttgcttcccgaccgccggattcgccgatccggcttgtgtttagtgtcggaaaacgggctatcaactcggctgagtacggacctttatggagaaccctaaggaagaacttcgtcaccgaggtaataacccctacgagagtgaaacaatgcggttggatccgtaaatgggcgattgaaaaccacatgaagcgaattgaaagcgatgcaatggagactggtgtcgttgaggtaatgagcaactgccgacttactatatgcagtatattaatctgtttatg

SEQ ID NO: 12248 - DNA, 585 bp, Gossypium hirsutum
  unsure (1)..(585): unsure at all n locations; Clone ID: LIB3829-004-Q6-K6-C6
cgtttttcgncgggnaaagcttattgttgttctaagtgtgcacaaagagggtagatgcaagggttgtgggaaattaggaaggattctaccaagggatgagcctgtgaatccttaccattctgcatttctgtgttcccctgttgtttctgtttgggattgcattgtccgtaagatgagatattcttgcagacctgagtttgtgtagccttgattttatataatttatattaggaataagtagccgtcaaagtgtttttttaaagaaaaaaaaagtgaaagaggaaaacagataggtttatagggaaatgtatacgatttagaggaactcttttacagaaaaaagaaagaatctgagtaaacagaagtgtgggtttaaaagctgtttaagttttaatggataacaagggatgcaataaagtgcaaccagtagcgagaaaagcaaaaaagaaacaggtgaaggatgagttggatcgtattaaacaggccgagaagaaaaaaaggcgtttggagaaagctcttgctacttctgcagccatccgttccgaactagagaagaagaaacagaaaaagaaggaagaacagcaa

SEQ ID NO: 12249 - DNA, 606 bp, Gossypium hirsutum
  Clone ID: LIB3829-004-Q6-K6-C7
aacgctgtcgtcaacaaaggctgtctcctcgtgttcctttcctcctagggttttcaatgcttattcttcattcgagtgccgttccgatcccgacttctccggtacgccgaccggggagaagcctcgcatcgggtctaaccgacgagtaacggcatcgttgttttgtacaggcggtgggggtttgtcgtctttgatctttcgtttccccccgaacttcgtccgccagctcagcgtcaaggctcgccgcaactgtagcaacatcggtgtcgcgcaagttgtcgcggcttcgtggtcgaacggtcccacttccggttacccctcatcggcggcggctgctgcttctcaggcagccgcagcctccgtccccgtctctgatggcgtggcagttgtagaaggttgtattgacaacgatagtgtacagattggggattcatatgattccaagacatcgtttttgagctccgatgggagcatcactgttcatgctggtgaaagattaggtcgcggtatagttactgatgcaattactactccagtggttaatacttctgcatatttctttaagaaaactcaggagcttattgacttcaaggaaaaacgccatac

SEQ ID NO: 12250 - DNA, 570 bp, Gossypium hirsutum
  Clone ID: LIB3829-004-Q6-K6-C8
aaaaacaaaacagcaagctatcacatggcttccaacaatggcggcaccagaagaagagttgaggaagaggaaccaggagttagagaaggaattgaaggagagtagggaaagagaggagcagatgagaaaggaattacgaaagagtgggaaaggctgagggtggcggaagaggcggaggaaaggctctgttctcagctgggcgagctggaagcagagtccgttaatcaggcccgtgcttacaactcccacatacttaccctcatggaccagctctccaagggtaacaaccttctcatcaacaaccacccatcccctgcacccatctccatcctctgattctgcttttggctgatgttctttttatctatctaaccaaaggcatggggattctaaattcgttaattttgggtatggtatggatctatatatgtaatagttgttaacacttggtggtgtttgttgatgttaattggtaaaggtagtgctgatatgtttcactggctgtttcatattgtgaaactcaattaagttgatttaattctgatatataaaaaaatttgtgcttttttc

SEQ ID NO: 12251 - DNA, 569 bp, Gossypium hirsutum
  unsure (1)..(569): unsure at all n locations; Clone ID: LIB3829-004-Q6-K6-C9
ggcttcgaacggtcttgaagagctcaagatctccanaaagatcctcctacctcttgcagcgcaggccctgttgcntgaaaacatgtttcattggcaagcaactattatgggtcctcctgacagtccatatgctggtggagtgtttctagtcaccattcatttccctccggactatccatttaaaccaccaaaggttgcattcaggacaaaggtctttcacccaaatattaacagcaacggtagcatttgccttgatattttgaaggagcagtggagccctgccctcaccatatccaaggtattgctatctatctgctcactcttgacggatccgaatcctgatgacccattggtgccggagattgcccacatgtacaagactgacaagagcaagtatgagacaacggctcgaagctggacccagaagtatgcgatgggttaacgtgctactacgcatgtaaaaaggagggctgcattccaaataactttggtctttaaattaaaatgtgtaagaatcaaatatgcgtgaactgtcacctctatatttagtggaccaagccctgcttgtt

SEQ ID NO: 12252 - DNA, 637 bp, Gossypium hirsutum
  Clone ID: LIB3829-004-Q6-K6-D1
gttagttttagctaccatttttgtgttatgcagctttggtaaagctactcatcctggtctcattttaacagtcgttaacaactgccctttcaccatttatcctgctatccaacccaacgctggccaccctgtcctcgaacgaggcggcttcgctcttcataccctcacccaccgttccttccctgcccccaccgtccactggtctggccgtatctgggctcgaactggctgcacctactctaacggacatttctcctgtgccacgggagattgtggccaccgcattgaatgcaacggtctcggtggagccactcctatcacaattgctcagttcagcctccaccacggtggccataaagatctctcttcctacgaagtcagccttgtggacggttttaacatccccatgactgttaccccgcacgaaggcaaaggcctttgccccgtcgttgggtgcagggctaatattctggccacgtgtcccggcaagttacagtataggtcacctcctcatggtccagttgtgggttgtaagagtggttgtgctgccttcggaaccgacgagctttgctgcaggaaccattacaatagccctcagacctgtagggcttcgagctattcagagtttttcaaacat

SEQ ID NO: 12253 - DNA, 602 bp, Gossypium hirsutum
  unsure (1)..(602): unsure at all n locations; Clone ID: LIB3829-004-Q6-K6-D10
aaaactctatttcaanaattaaattaaattttaaaaaggaacaagaattccttcatactcatcagctcaaacaaggtttaggatttcttttggagtaaggtaaaagctcacacaaagatgccgcagccaccgcaaatgattcctgtgatgccttcatatccacctactaatatcactactgaacagattcagaagtaccttgatgagaataagaagttgattttggcaattttggacaatcagaatcttggaaaactcgctgaatgcgcccagtatcaagctcagctgcaaaagaatttgatgtatttagctgcaattgcggatgctcaacctcaatcaacgccagcaatgtcgcctcagatggcaccgcatccagcaatgcaacccggaggatattttatgcaacatcctcaagctgctgcaatgtcacagcaacctggcatgtaccctcaaaaggtgccattgcaattcaatagtccgcatcaaatgcaggaccctcagcacctcctatatcagcagcatcaacaagcaatgcaaggtcaaatgggaatcaggcctgngggacccaataatagcatgcatcccatgcattcagaggctag

SEQ ID NO: 12254 - DNA, 588 bp, Gossypium hirsutum
  unsure (1)..(588): unsure at all n locations; Clone ID: LIB3829-004-Q6-K6-D11
cccaaaaaaccctctgncaagcccctccgtctcccacttcaggatgtctacaagattggtggtattggaactgtcccagtgggtcgtgttgaaactggaatcctcaagcctggaatggttgttacattcggaccttctggattgaccactgaagttaagtctgttgagatgcatcatgaagctcttcaagaggctcttcctggtgacaatgttgggttcaatgtgaagaatgttgctgtcaaggatctcaagcgtggatttgttgcctccaactccaaggatgatcctgccaaggaggcagccaacttcacctcccaagttatcatcatgaaccacccaggacagattggaaatggctatgcaccggtcctcgattgccacacctcccatattgctgtcaagtttgcagagctcttgaccaagattgacaggcgatctggtaaggagcttgagaaggagcctaagttcttgaagaatggtgatgctggtatgattaagatggttccgaccaagcccatggttgtggaaactttctccgagtaccctccacttggacgttttgccgttagggacatgagacagactgtt

SEQ ID NO: 12255 - DNA, 621 bp, Gossypium hirsutum
  unsure (1)..(621): unsure at all n locations; Clone ID: LIB3829-004-Q6-K6-D2
ngaaaactctatttcaanaattaaattaaattttaaaaaggaacaagaattccttcatactcatcagctcaaacaaggtttaggatttcttttggagtaaggtaaaagctcacacaaagatgccgcagccaccgcaaatgattcctgtgatgccttcatatccacctactaatatcactactgaacagattcagaagtaccttgatgagaataagaagttgattttggcaattttggacaatcagaatcttggaaaactcgctgaatgcgcccagtatcaagctcagctgcaaaagaatttgatgtatttagctgcaattgcggatgctcaacctcaatcaacgccagcaatgtcgcctcagatggcaccgcatccagcaatgcaacccggaggatattttatgcaacatcctcaagctgctgcaatgtcacagcaacctggcatgtaccctcaaaaggtgccattgcaattcaatagtccgcatcaaatgcaggaccctcagcacctcctatatcagcagcatcaacaagcaatgcaaggtcaaatgggaatcaggcctgngggacccaataatagcatgcatcccatgcattcagaggctagccttggaggcggcagca

SEQ ID NO: 12256 - DNA, 608 bp, Gossypium hirsutum
  Clone ID: LIB3829-004-Q6-K6-D3
cggccgcgtgggcggctaccaggtcaaccatcatcgtcccttcttccggcatctcctggttcctcgatcttttcaattactacgtcaactccgacgaccacgacctcttcagcaaggaattgcagcttgacactaaagtcttttactttgacattggcgagaaccggaggggtcgtttcttgaaggtgtctgaagcatctgtgagcagaaaccgcagtaccattattgtaccagcaggaagtaccagggatgaagggtgggcagccttcaggaacatattggcagagatcaatgaggcatcaaggcttttcttattgccgaatcagcaaagttctgaactttcagaacgtcttgttgggctttcagatgatgtaggggcgggcttcatatctggacacaatcagcctagctcaacttctgaattgaatgtagatagatcaattgaattgccaccacaggatgaaactggtaacatgggggtttcaaaggtgatcagagctgaccagaagagattcttctttgatcttgggagcaacaacagaggacatttcttgaggatatctgaagttgcaggttctgatcggtcttccatcattctcccactgtca

SEQ ID NO: 12257 - DNA, 474 bp, Gossypium hirsutum
  Clone ID: LIB3829-004-Q6-K6-D4
ctgacgccagggcgcgtgcgcgtgccaaccaatggctccactataccacataacgatttaaatagtcttttatcttcccatatataactgaccgagagctcgcagcacctggtgaatgggaaggtgcgcaagcaattatatgagaaatcctgagtccatcaaaaagctagagggcgctctctttaacagagccaagcttacatgcgcgatcgtgccacgacctacttttaatataacgggacctagcatcaatgcactggccagcggaccacaacggctggacggtgaaaaccatctcaatacccagacttaactctctgactgcacatgacccttctgacagaaggggaaggctcaagaaggcccgagcccctagccctaacactcacaaggtcaatgctgaatcagcgactggtacacgccctggctcgaggcatgaatcactgcggctgcagtgcatacactcaaaaagac

SEQ ID NO: 12258 - DNA, 545 bp, Gossypium hirsutum
  Clone ID: LIB3829-004-Q6-K6-D5
gaactaaaccgctacccggtccctctcaatctaggctaactgacaccatcagacctgatgccttgccgagcaacaataatcgttgcattacatcaagaccgatgtctgcaaatgttcctcatggcagactgtaggaacgaacactagccgggtgggagtgattaagaacagggagaagcacaaaggatagctatgagacaatccactttcaggatgctgctgggacatgagtatacacactcgccttggccatgtgttcacacattggaaaatgacacgaatccatcgatatcccttcccaatggcaaagggcttaagtaggccatcatcgatgaaactctgactaggcttgctgcccaaaatgctactccaaccttaacacatgatatctatatactgccttgctgctgtattttattctaccactactagatttcttgctttcggttatgaacaaaatccgaatatgttaatgaacttacaacgctatattctaaatcaatgcttgcaacttgtaagctttcgtgaataccaaaagctactac

SEQ ID NO: 12259 - DNA, 587 bp, Gossypium hirsutum
  unsure (1)..(587): unsure at all n locations; Clone ID: LIB3829-004-Q6-K6-D6
ngatggccaggcttttgatccagnaaatccagatcatatgaagtgggtctatgatgaggctgtcaagagagctgagcttttcggcattccaggagtaacttattctcttactcagggtgttgtaaaaaacatcataccagcgattgcttccaccaatgcaattatatcagccgcatgtactttggaaaccttgaagattgcatcaggatgcagtaaaactctatcaaactatcttacgtataatggtgttgaaggtcttcatacaaaagtgaccgaatttgtgaaggacaaggactgtctcgtctgtggtccgggtgtcctcattgagctggacactacagttaccctaaaaaagttcattgatatgctagaggaggatcctagggtgctgatgacaaaggcgtcgatcacatatcacggaaagaatctatacatgcaggctcctcctgttttggaagagatgacccgatcgaatctagagttacccctatatgatctcatggataaaatccccaaagacgtcctccatgcaactggtacgatcaacaaggatgacaaaaagtcatctggtttaagaaaatacgagt

SEQ ID NO: 12260 - DNA, 413 bp, Gossypium hirsutum
  unsure (1)..(413): unsure at all n locations; Clone ID: LIB3829-004-Q6-K6-D7
cttaccagnattcccctagtaacggcgagcgaaccgggnaaaagcccagcttgagaatcggtcgccatcggcgtccgaattgtagtctggagaagcgtcctcagcgacggaccgggcccaagtcccctggaaggggcgccggagagggtgagagccccgtcgtgcccggaccctgtcgcaccaagaggcgctgtctacgagtcgggttgtttgggaatgcagccctaatcgggcggtaaattccgtccaaggctaaatacgggcgagagaccgatagcgaacaagtaccgcaagggaaaggaaagatagggaacgagagaaggaaaaggagagggaaagagctagggagaaggaaagggaaagggaaaagcgtgaaagggaaagggaaagggaaagagaaagggagaagaggg

SEQ ID NO: 12261 - DNA, 589 bp, Gossypium hirsutum
  Clone ID: LIB3829-004-Q6-K6-D8
gtttctctccggccttctcttgcagctagtgccggtgttatttccaagttcttccatagctgtcccgataatgcttttcaggttgctctacacgggacttcatattcacttctgcagagattaggtgctgtaatgcgtaacggggcaaaactgtttgcagtaggcaccacttcttccttggttggcacagctgccacaaatgccttgattaatgcaaaaaaggccgtcgataagtcttctgttgatgaaatcgaaaacgttcccatattatccaccagtgttgcatacggtgtatatatggccatttctagcaacctcaggtaccaagtgctagccggtgtaatcgaacaacggatgttagaacctctgctacaccagcacaagtttttgttgagcacgatatgctttgccattcgaacaggcaacacatacttgggttcccttttgtgggtcgattatgctcgtttggttggtattcaaaaaccgcaggaagaggagaaccctgtattggtctcgtaattcaggaatcggaagctttgctcgtgcagcatgtactaaaggattcatcgtagacaaatccatgtccgaa

SEQ ID NO: 12262 - DNA, 569 bp, Gossypium hirsutum
  unsure (1)..(569): unsure at all n locations; Clone ID: LIB3829-004-Q6-K6-D9
tccgnaaaacccggagagaaaagatggtagaaaggacgacggcaacaccaccgaggcggagcgatggctaactatagcggcgaagctactcgcttccggcgactttcacgggaccaggactttcgcgatccgagctcgagaatcggcacctgtcctcgccgaccaaatcttagctgtcaccgacactctcttaaccgctcaatctaaccctcgtgactggtacggtatcctccaactcgttcctttaactcaatccatggaagttgtggagagtcagtataggaaactcgcgattctcttgaaccctgtgaagaacacgttgtcttttgcggatcaagcgtttcggttcgtttctgaagcttggaatgtgctgtcgaatccttctaataagctcatttacgataatgagttgaggtttcttcagtttggtcatgtgagtcaactcggtcagcaacattatcaacaagaacagccacaagttcagcaaccgcaaccgctgacgcagacgctgtttatgcagcaaccaccaccgccgaaagaaacccaaacgctatttatgcaaacgccgt

SEQ ID NO: 12263 - DNA, 623 bp, Gossypium hirsutum
  Clone ID: LIB3829-004-Q6-K6-E1
gttttccaatcttttttgagaaacggtagcgaaaaagtcgtcgtcggggaggaagatcacccttaagagctcagacggcgaatcattcgaggttgatgaagcggtggcgttggagtcgcagacgattaagcatatgatcgaggacgattgcgctgataacgggataccgttgcctaatgttacgagcaagatcttagcgaaggtgatcgagtactgcaagaaacacgtcgaggctcctaagacagacgatcgatccgccgatgacgagctcaagagttgggacgctgactttgtcaaggtcgatcaagctactctctttgatctcattctggcagcgaactatttgaacatcaagggcttgctggatctcacttgccaaactgttgctgagatgatcaagggaaagaccccagaagagatcaggaagactttcaatatcaagaatgacttcaccccggaagaggaagaagaggttcgtcgggagaaccagtgggcattcgaatgaagggtcaatttcgagtgccggttcaattgtatcaaactcatctatatataaaaatgtagttttgttgctctgacttttcatttgtactcttggatattctgtgagctcttttgaaact

SEQ ID NO: 12264 - DNA, 617 bp, Gossypium hirsutum
  unsure (1)..(617): unsure at all n locations; Clone ID: LIB3829-004-Q6-K6-E10
ctctttcagatctcaaantgtatacatcaaggaagagatcccaaataaaggatgctgaaccaacagaatttgaggagtctgttgcgcaggcattctttgatttggagaataccaatcaagatctgaaaagtgaccttaaagatctctatattaattcagcagtccaaattgatgtttctgggagccggaaagctgttgttgtccatgtcccatatagattgaggaaagctttccgcaaggttcatgttaagcttgtgagggaacttgaaaagaagttcagtggcaaggatgtgattcttattgccacccggaggatattaaggcctccaaagaaaggttctgcagttcagaggccacgcagccgcacattgactgctgtacatgaggcaatgctagaagatgttgtcttacctgctgagattgttgggaagcgcactagatatagaattgatggatcaaagataatgaaggtgtatttggaccccaaggaacgaaataacacagagtacaagcttgagacgttttctgcagtttaccgggaagcttgctgggaaagatgtcgtgtttgagttcccagtgatggaggcatagatagtcctttttgaaatgttgtgaaa

SEQ ID NO: 12265 - DNA, 484 bp, Gossypium hirsutum
  Clone ID: LIB3829-004-Q6-K6-E11
ggttgtttcaggtcgcttttgggaagactggttcttgccttggttggtgatcaacttgattacggagataatgtttgtggtgtagtgctgagcattcgcttcaatgaggatatattgagcgtatggaatcgtaatgcgtcggatcatcaggctgttatggctctaagagattcaatcaaacggcacttaaagcttccccacagctatgtgatggagtacaagccccacgatgcttctttgcgtgacaactcatcatatcgaaacacgtggttgagaggttagaagttgagaaaacgagaacacttaaaaagactgtttaacgtctctgcatctttggatgttatgacatggaaaaccatagttgattataatcgttatgttggactatgagacaggtaggtgtcaccaatgttggttttatggaaatgttatgctcctccatccattggtatccatatattattaatatgaagttggtttcgct

SEQ ID NO: 12266 - DNA, 485 bp, Gossypium hirsutum
  Clone ID: LIB3829-004-Q6-K6-E12
acagttagaaccgaaccgtccagttgcaacacacactgttagatctgcaaaagcggttgcaaacgggggctctttccttgctacccctactggtgctaagggcttccacgaagcaatggcaagccaaagccctgggccatatatgatatagggaaccgaaccgctacccacatggtcagggatgagcccttctcgcgctagactgctctatgggaggggtggtataccggcttgggtccctggcgcggaaacaattgtgttaaagggagcttggggcgtctactctatgagaaaactctctgaaatcaaccaataagcactaggcgctgatggcaatccttgggaggctgaaaggattgtacaggctgaccctacaccatctataactttacacactctgctggatcgaactaggaatccaaaaccaatgcactagactcgcagaatattagtaaaacaccaaacacaatctaggaggcctgaaa

SEQ ID NO: 12267 - DNA, 614 bp, Gossypium hirsutum
  Clone ID: LIB3829-004-Q6-K6-E3
ctcggcattataaacgctttgatgtgtttgttgaagctgaggcaaataaagctgcaggcaaatatgataatgcctcgattgatcatcaagttgaattttataaaagagagggcttgacaccatattccgaggctaaacatcctattacgagcgatgttcctgaaggatgtgtgattataagggagcatattccgattagcaacctctttacttgtctttggttcaacgaagttgaccgttttacttcccgagaccaaattagtttttcaaccgtaagggataagattgcggcaaagacgaattggactgtcaatatgttcttggactgcgaaaggcgcaactttgtcattcagaaataccataaggatgttttagccctattggctcaaagggctcctccggtcatttattcttcacaaaggaaggtcccaccaagacgtagaagagataggaagtcaggcgctagacatcatcgtaaagttagtaaggaaatagtttaatgttataaccagttgtctaaaaatcaaaatttaccattctttttccttccccacttttttggaacattcatggcggggcttggaatatcattcaagagtgttgtaatttttgct

SEQ ID NO: 12268 - DNA, 625 bp, Gossypium hirsutum
  Clone ID: LIB3829-004-Q6-K6-E4
gtggttcctataaattcaaatcatgacactttgggagttatttatgaacgaggcttaattggtacctaccaggactggtgtgaggcattctcaacatatccaagaacatatgatctcatccatgctagtggcttgtttactttataccagaacaggtgtgacatcacttacatcttgctggagatggatcggattctgaggccggaagggaccgttatatttagggacacagtggagctgcttgtgaagatccagagtataacggatggaatgagatggaagagtcagataatggaccatgaaagcggacctttcaatccagagaaaattcttgttgctgtcaaaacatactggactggtgaagcaactcaaaaacagctctaactgggatttcaatcatctctcttttctgcacttcatttgtcacaatttttcatcctgggaacagtcaaaatcactgaagggtaaaagggtgggtttgattaaaattattgatggtataatttcattgatgcactgtaatactaagcagattctgtttgtactacaaatctagcggatactgtcattgtcttaaactcttggtgatatagtatgattagctaaatagatatgtacactgtct

SEQ ID NO: 12269 - DNA, 571 bp, Gossypium hirsutum
  unsure (1)..(571): unsure at all n locations; Clone ID: LIB3829-004-Q6-K6-E5
ctcaacccanaagctcaaagnaaaaaagnaggctttggagatctgtgtcaaggctgctgttggtgcccctaatgttcttggagactgtccattctcccagagagctcttcttactttggaggaaaagaagatttcctacaaaatgcaccttatcaatatcagtgacaaacctcaatggtttttggagataagtccagaagggaaagtaccagtggtgaagtttgatgacaaatgggtggctgattctgatgtaattgttggaatccttgaagaaaaataccctcagccttgtctcaaaacccctcctcaatttgcctctgttggatcaaacatatttggaacttttgtcacatttttgaagagcaaagatgctaatgatggatctgagcaggctttgcttaatgaactcaaggcattggatgaacatcttaaggcacatggcccattcattgctggggaaaaaataagtgcagttgatttagctttgggacccaaactttaccatcttgaggttgctctgggccatttcaagaaatggactgttccggaaagcttgactaatgtccgcaat

SEQ ID NO: 12270 - DNA, 585 bp, Gossypium hirsutum
  unsure (1)..(585): unsure at all n locations; Clone ID: LIB3829-004-Q6-K6-E6
acttttngagcttcggtttagtgctatggtagatttgaggcttgggcttatactagctgcttttcacattgttgaccttttctcctttttgagaaatatgcttttctttgtttctgtcatttcctcgtttaaattttgtagaacctttcacttaagccaaaagaaaaaaggtataaccttccatttcatatttgttcgttctcagaccatgaaattcgttaatgatctgttttcttctcttcatttctttgtagtcacattgctgtcgagtgcaactcaaccactatgtgttggaactgtaaggagccagggcatcttgctggacaattcccctatgagcctgtttgcaatatgtgtggtaagatgggtcacttagctcgagattgcctaaatcccagacttccggctcatgatgcaagactctgcaacaactgctacaaggcaggtcactttgccgccgactgtacgaatgagaaggcttgcaataactgtcataaaattggtcaccttggtcatgactgccataacaagccagtttgcaatatctgcaatatatcaggtcatgtagccagacaatgtgccaag

SEQ ID NO: 12271 - DNA, 603 bp, Gossypium hirsutum
  Clone ID: LIB3829-004-Q6-K6-E7
acctgtagacatggtggaagcgatgggctacatgcatatgttcattcccttgatcatgctgttactgatatgaaaatattccttgaaaagttttagctgaaaatcctgggcttccatgcttttgctttggtcattcaactggtggtgcaattgtccttaaagcagtacttgatccaaagattgaagcccaagtatcaggcattatactgacttctccagctgtaggcgtacagccatctcatccgatttttgtggtacttgccccagttgtatcatttctattgccaagataccaagtcagtatcaccaataagaagaacatgccagtttgtagggacccagaggcgctggtggccaagtattcggatccactggtgtatacaggacctctccgagtgagaactggttatgaaattcttagaactacatcctacttgcagcagaatatgaacagattgagggttcctttgcttgttctccatggcaccgatgacactgtaactgatcctcaagcttctcagaaactgtatgaagcagctgcctcaacagacaaaacgatcaaattgtttgaaggcctgttacatgatctcctttttgaactgg

SEQ ID NO: 12272 - DNA, 559 bp, Gossypium hirsutum
  unsure (1)..(559): unsure at all n locations; Clone ID: LIB3829-004-Q6-K6-E8
gttngaagaatgtatacaggatcatttatgacctctctcgatatgaaaggattttcaatctctataatgaaggtagatcaaactctgttgcaacacctggatgcttccactaaggctccacattggcctgttggttctgctggtttgtgaatgtgtaatcgtccaccggccaagattccagttccattgccatcatctcgttcaatgaagagtgatgagttattaagtcggccactgcagcttactgaacagggccatattcttgaagtggctattgaggcagctgcaaatgccataatcaatatgagagatattttgaatgattgggatagcacagttggtgacggtgactgtgggtcaacagattaatttgcttttgcagatgtataaaggggcaacagcaatccttgatgatatgaaaaaatactatcctttgaataatgccgcagaaacagtgaatgaaattggatcatctgtgagaagagctatgggaggaactagtggggtcttatacactatcttttgcaaggcagcatatgcacagttgaaagcaaactca

SEQ ID NO: 12273 - DNA, 573 bp, Gossypium hirsutum
  unsure (1)..(573): unsure at all n locations; Clone ID: LIB3829-004-Q6-K6-F1
aaaaaaacatttccgaatcttttacagctcgtaaactcgttgaattgactcatggcttccgccgttgcttccgttgctaagaagaaaaccgctggctccaagaagcctaaatcagctccttcacaccctccatttcttgagatgatttcagatgcaatcgtttcgttgaaagagaggacaggatcgagccaatatgcgattgcgaaattcattgaagagaagcataagcaattaccggcgaatttccgcaaagtcttacttgttcagacgaggaagtttgttgcttccggaaagctcgtaaaagtgaaagcctcttttaagctgccttcggcttatgccgcagctaagaaaccagccgccgtagctaagaaacctgccgccgcgaagcctaaatctgcaactaccactaccgccgcaaagtccaagccgaaggcgactaaaaccgcgtcgaaagcgaaagcgaaagctaaagttgcaacgcctgtgaaggcaaaggctaaagttgcggcgaaaccgaagctactacaagtaaggccaaagctaaaccagcggctaagccagctanagtagcga

SEQ ID NO: 12274 - DNA, 588 bp, Gossypium hirsutum
  unsure (1)..(588): unsure at all n locations; Clone ID: LIB3829-004-Q6-K6-F10
agcctaccttgtaanaaatctttaattgttagttgatcctaatggcatctgtttttttaccttttacatctgttcatctgcaatgtcaggttattgtccggccgattagagcctcagtgtcggggaaaccatccgtatcagagccgcccgtgacgacgctttccgaaaagcttccgctgaagaaaatcccagggaattatgggattccttttgttggtccaatcaaagaccgacttgactatttctacaaccaaggtcgagatgaatttttcaagtcaaaaatccagaaataccagtcaacggtgtttcggactaacatgccaccgggtcctttcatctctcccgacccaaaggtaatcgccttactcgacggtaagagtttccctgttcttttcgatgtgtccaagattgaaaaaaaagacgttttcaccggtacttacatgccctcaaccgacctcaccggcggctaccggatcctgtcttatctcgacccttccgagccaaaacacgccaagctcaaacaacttatcttttttctcctcaagtctagcgcaaaacgagtgatacctgagtttgaagcttgttaca

SEQ ID NO: 12275 - DNA, 591 bp, Gossypium hirsutum
  unsure (1)..(591): unsure at all n locations; Clone ID: LIB3829-004-Q6-K6-F11
aattaanaaaaaatcatacgcaatgagcactgctggtcaggttattcgttgcaaagctgcggtggcatgggaggcggggaagccactatcgatagaagaagtggaagtggcaccaccccaaaagcatgaagtccgtattaagattctcttcactgctttatgtcacactgatgtatactactgggagtgtaagggttacactcctctgtttcctcgtatacttggtcatgaagcctcagggatcgtggagagtgtgggtgagggtgtgaatgatttgaaacctggagatcatgtgctccctatcttcaccggagaatgcaaagaatgtcgccactgtctgtcagaagaaagcaataacatgtgcgaactgcttaggatcaactgcgaccgaggtgttatgcttgctgatgggaaaaccagattttccatcaacggcaagcctatctaccactttgttggaacctcgacctttagccaatatactgtcgtccatgttggccaggttgccaagatcagtccaaccgcccctcttgataaagtctgtcccattagctgtgggatatgtacaggttttggggccactgtgaatgt

SEQ ID NO: 12276 - DNA, 563 bp, Gossypium hirsutum
  Clone ID: LIB3829-004-Q6-K6-F12
gaaaatttcttatgtgccttaattattaggtttgcaaagcgaaatgaagataaccggtggctacttgagcacaaggatgtcactgattttgaatccagaaggcatttggccatgatgatgtttcctgaggtaaaagaagattacgaggaattacatgagatgctcattgacaggtctcagttattgtcagaatcatttgagtacattgctcatgctgaccctgaatcactgcatgctggtctattcatggaatttaaaaatgaagaagctactggccctggtgtattgagggagtggtttttcttggtatgccaagctatattcaatccagagaatgcccttttcgtgccttgctcaaatgatcgtagaagattttttcctaatcctgcatctagagtggatcctttgcaccttgaatatttcagatttgctggccgtgtgattgcattagcattgatgcataaagtgcaagtgggtgttgtgtttgatcgtgtttttttccaacaattggcgggaatgcatatctctttggaagatatacgagagacagatccatgcttgta

SEQ ID NO: 12277 - DNA, 635 bp, Gossypium hirsutum
  Clone ID: LIB3829-004-Q6-K6-F2
ctgaattcaatgaactggtttaccaaataggtggcgtgaagcactagatcgtcttctagagacaaataacttcccagagttcactggccgagtgtgccctgcaccatgtgaagggtcttgtgtgcttggtattattgagaatcctgtgtccatcaaaagcattgaatgtgctatcatagacaagggatttgaggaagggtggatggtgccacgacctcctctcaagagaacagggaaaagcattgctgttattggaagtggaccatctgggttggctgctgctgatcaactaaatagaatgggtcactctgtgactgtgtatgagcgtgctgatagaattggagggcttatgatgtatggagtccctaacatgaagactgacaaggtagatgtagttcagcgacgtgttaaccttatggctgaggaaggagttaaatttgtcgtcaatgcaaatattggaaaagacccgtcctactcccttgaccggcttcgagaggaaaatgatgccattgttttggcaattggagccacaaaacccagggaccttcctgtacctggacgagatttatctggtgttcattttgcaatggaattcctacatgcaaatactaaaagcttgcttgatagtgatctcc

SEQ ID NO: 12278 - DNA, 601 bp, Gossypium hirsutum
  unsure (1)..(601): unsure at all n locations; Clone ID: LIB3829-004-Q6-K6-F3
cttgcctttactgggttgngaggtaatggtggtggtagcagtggtggtgctaatgggcggtactatttagggatgttcttgggtggggcttaccaggaatccctcggtggagttcacaacctctttggtggcccaagtgttgttagcgtgtcgcagagtgatggtccatatagctttgcggttacacgggcggcgcctggtccgtcatgtggggatgtcctccgagtgatgcagcacgagcccgagctcatgtttgagaccctcaagcaccgtgcggaagaattttgtggacaggaccatggcaatgaaggcacccatgctgctttagttagcaccattgctcgttctttccacaacatgccttatcttgtagcggcatctccttgttcgttgactgccatgaataacaatggcttctactattgcaatgaggaagattacaatgctgctgtcgattctggggctagtgaggacgagcagtggtcctattgctacgcctgaggcagttttctactatttgctttattgcatggttttgccagtccttgaatgtctagttatttttaattttgtcccctttttaatgttcttcttttactgt

SEQ ID NO: 12279 - DNA, 532 bp, Gossypium hirsutum
  unsure (1)..(532): unsure at all n locations; Clone ID: LIB3829-004-Q6-K6-F4
ngagctctcgtctctggatgtaagacaccgttttcgatcttatcgcgcttcctggaggcatgcctggtgctagcaactttaaagattgtggagttcttgaagtcttgtgaaaaacaggctgcagatgggcggctttatgctgccgtgtgtgcttaacctgctgttgcgcttggttcatggggtctattgaagggactgaaagctacctgttacccatcatttatggagcaactgcaatcatgtgcaacagctgttgaatcaagagttcagcatgatggcaaagttgtgacaagtcgtggacctggcactaccatggagtttgctgtaacactggttgagcaattgtatggaaaagagaaagctgatgaagtttctgggccattggtgatgcgtcctaaccatggtgatgagtatacaataacagagctgaatcctctggaatggaaatgcaataatgttccgcaggttcttgtaccaattactgatggctcagaagaaatggaagcagctatgatcattgacattctgcgtc

SEQ ID NO: 12280 - DNA, 613 bp, Gossypium hirsutum
  unsure (1)..(613): unsure at all n locations; Clone ID: LIB3829-004-Q6-K6-F5
gtttncttganagagaaaatttaccacacgttaagatcttatcatgacaaaatggcacaaatgttcacagacatgagaaggttgtgggatgaatgtagtgtgagcactggtgttgaagaaagactttatatgtggagaacaaggaggagttgcagggattccaatttgcttgaccttaatgccgtaccaagtgatgggtatctgttaaatgaggatgctaacttagattcagtcatgtgccatttgccaaagagaatgaagacttgggaaactgttagtacaaaaaacattgttgccagtccatctgccgatggaatgactatgattgctccaaactacagcacaaagagtgttctgaaggttaagacttctggcagtaatgcaattcacaaccacaatcagaaattggttgtaggtgacaaatcggaacaatgtctatcagtgccaaaggttctgttgaaagcagtaaccaaagttccttctgttcttccaccgctatcaaaagtgtgctcaagaaggtcacaaacagcattgcttgttggtgcccaagttttacgggaccccaaacccgaacgtacaatcttgggaaatgcgggttgttttagcgggtcat

SEQ ID NO: 12281 - DNA, 584 bp, Gossypium hirsutum
  unsure (1)..(584): unsure at all n locations; Clone ID: LIB3829-004-Q6-K6-F6
cagntagctgcctacggnaaaagtttcgttagggcatcacaagatacttgggcactttttgagagggaagaaatggaacccatcgtagattctgacatgatgagcgcgatttgcttccttacaggcgtttgcagtggctcgatttgtgttattgtggtggccgcttggactgctaaagtccaccaaccattcactgccaccatctccctccttgcattcttcattggatacctcatgacgaggatcgcaatggcattgccccatgcatgtgtgagctgttactacgtttgctatgctgaaaatcccgagaaccgattgtttgataaaacaataaaagaacgtctggagttgattaaggctggtcgggatgtggtggtgccgacacctcgtgttccccgtcgatttacgagatagccactgccggtgagaggtaaaaagagacaaaagtctacgattttcctacacatgtatatacagaaattatgtaggaaaatgggggccatacttccaaaatttagcaggcaatggtcagtttcaatgggggtggcatggagactcaaataaggcctactctctgaggtaaa

SEQ ID NO: 12282 - DNA, 601 bp, Gossypium hirsutum
  unsure (1)..(601): unsure at all n locations; Clone ID: LIB3829-004-Q6-K6-F7
agnagacgagttcatcagcaaccttaagcttctcttcattttcttcaacctcagccctatctttatctaaattcagattcaaatttccctccttttcacgaacctcctctctctcatctcgcgccaagccattcaccgcttcttcttccaccaccacccacaacatctcaggagaaattcgccattgcagtttgagtaggaggagagggctggcttttactgcaacgctaccgtttcttcttcctctgcatgaatttgtagactctgttgccgctaaggcagttgagtcaggttcaggtcaaagcgagtatatgcgtataaaggaagagataattaaagtagtaacaaagggaaaggctgctggtgttcttcgtttggtatttcatgatgctggaacctatgaaatggatgaaaattcaggtggtatgaatggttccatagtttatgaactcgaaagacctgaaaatgcgggcctcaagaagtctctgaaggttctagagaaagccaagaaagaaatcgaagctatacaatcagtatcatgggcagacatgattgctgttggtggagctgaagctgtttccgtttgcngaggtccgaaaat

SEQ ID NO: 12283 - DNA, 432 bp, Gossypium hirsutum
  Clone ID: LIB3829-004-Q6-K6-F8
ggtgtttagctgctgcaaaaaaagaatttggaagcgaagcaaagaggaaaaaaatgtattttaagcttctcttttacacttgatatggatgttggggagttcattgttcctgttccatacgtaaagcaagtaaaggaattggagagaagaagagaagatcatgaagaattgctcttggcagaaaggtatgagagaatatgggtgattaagtcaaatggagaaagggacatcatttccttgttgtgtgcaagtgttttctccctgagacatgcaaggaacctgacatcaagaatggttcaacttaaagatgcttccttatactcattctcatcctgtttatattttccaatgctttcttcaagtaggatactaagaatttcctgtactattctttctgattgcttataaaatagtttgctcattagaaccttc

SEQ ID NO: 12284 - DNA, 568 bp, Gossypium hirsutum
  unsure (1)..(568): unsure at all n locations; Clone ID: LIB3829-004-Q6-K6-F9
gccacctgntggacccgaggatggccaaanaataacagcaagcgacagtggttggtcttttacagggttaatcaaatgtctcttcaagtggtggtgccattgacggtagaggtcaaaatggtgggatctcccttgcaagccccacaagggaataaatgcaacaactttgcccggaccatgtgatagccccgtcgctataaggtttttcatgagctccaatttgacagtccaaggacttaaagttaaggatagtccccaattccatttcagattcgatggttgccaaaatgtgcatgttgaatcacttcatattacagctccagcccttagtcccaacactgatggcatccacattgccaacacaaatggtgttcaaatatataattcagttatctctaatggcgatgattgtgtatcgattggatcgggatgttacgatgtcgatattcggaaccttacttgtggaccaggtcatggaatcagtatcggaagtttaggtaaccacaactctaaagcttgtgtacacaatgtcacggttcgagactcggtgattaaagtatcggataat

SEQ ID NO: 12285 - DNA, 596 bp, Gossypium hirsutum
  unsure (1)..(596): unsure at all n locations; Clone ID: LIB3829-004-Q6-K6-G10
gctccaattaaatctaaanaagaactcatattccacgttggtttccgtcagtttgttgctagaccgatcttttcgactgacaatattaattcagacaagcacaagatggaaaggtttcttcatgccggacgtttttcaatagcatcaatatatgctcccatttcttttacacctctccccttgattgctctgaagggtgcagcaggagccggcacacctgcagttgctgctgttggttccttgagaagtattgaccccgatagaataattttaaagaagattattttaactggttatcctcaacgagtatccaagttaaaagccacagtgcgatatatgttccataatccagaggatgtgagatggtttaagcctgttgaagtgtggacgaagtgcggtcgtcgtggtcgagttaaggaacccgttggtacccatggtgcaatgaaatgcatatttaatgggggccttcaacaacacgatactgtttgcatgagcttgtacaagcgggcatatccaaagtggccggaacaccggttccctgctaatgtttgatcaggagctcctgtttcataaatgcaggagatgcgcttgcttgt

SEQ ID NO: 12286 - DNA, 579 bp, Gossypium hirsutum
  unsure (1)..(579): unsure at all n locations; Clone ID: LIB3829-004-Q6-K6-G11
cgctagccgactacaacattcagnaagnaatccacccttcacttggttcttcgacttcgtggcggcatgcaaatctttgtcaagactctcnactggaaagacaattaccttggaggttgaaagctctgacacaatagataatgtaaaggcaaagatccaagacaaggaagggatcccaccagatcagcagaggcttatctttgctggaaagcagcttgaagatggtcgcaccttagctgattacaatatccaaaaagagtccaccctccacctagtacttcgtcttcgaggtggcatgcaaatctttgtcaaaactctcactggaaagacaattaccttggaggtggagagttcggataccattgataatgtgaaagccaagattcaggacaaagaaggaatcccaccagaccaacaaagattgatttttgctggaaaacaacttgaagatggaaggactcttgccgattataatatccagaaggagtctactctccatttggttctccgccttcgtggtggtatgcagatctttgtaaagactcttaccggaaagaccatcactttggaggttgaaag

SEQ ID NO: 12287 - DNA, 563 bp, Gossypium hirsutum
  Clone ID: LIB3829-004-Q6-K6-G12
cggccgcgtgggcggccgcgtgggcggacgcgtgggggcggcttagaaacttctgttattgttccatggctaagggagaattatggttgtgaggttgtttgcttcactgccgatgttggccaaggcataaaagaattggatggtttggaagcaaaggccaaggcaagcggggcttgccagttagtagttaaggacttaaaggaggaatttgtgaaagactatatatttccatgcttgcgagctggtgccatttacgagaggaaatacttgttgggaacctcaatggccaggcctgttattgcaaaggccatggtggatattgctagagaggttggggctgatgccgtttctcatggatgcacagggaaaggaaatgatcaggttcggtttgagctcaccttctttgctctaaatccggaattaaacgttgtggctccttggagagaatgggatattacagggagagaagatgctattgaatatgctaagaagcataatgtgcctgttccagtgacaaagaaatcaatatacagcagagacaggaacttatggcacttgagcca

SEQ ID NO: 12288 - DNA, 503 bp, Gossypium hirsutum
  Clone ID: LIB3829-004-Q6-K6-G2
ctgagaaaaaagagaaccaaaggagaagagagttaaaaagatcgattaaatctatatactcattgtttgcttcttccctttgatcttcctaccttgattttctcatctaccacattggttgaggacttttaatcgtctttctaagaaatggttctggacggaattgtatcatctccccttcgaaggtcagcatcaacgaggaggcaatcctcgagagatgaattcggtagctggtcaacacttgttgagaggcataggttcctcttaacagcattgggattgttggcattcctctgtactatctacctttattttgctgttactttaggagccacggatacatgttctgggttgaaaggaacagagaaagcaacatgtaatctgcagcatgtaagctccactctctcccatgggaaactcaaattcctgtgacattcttcatgctatgtatgttacaagttgcttttattaattaaacttataatctgagcatcttaatatat

SEQ ID NO: 12289 - DNA, 599 bp, Gossypium hirsutum
  unsure (1)..(599): unsure at all n locations; Clone ID: LIB3829-004-Q6-K6-G3
aaaaaaaaaaaccattttcagacacaaacacacacagnaggncacaacaatcaaaactgacatgcctcaaaaacccttcctttccctgtctttagttttatagttcttcgtgcccaattttaatacagccaaaaaaaaaaaaaaaaacaggcccagagttgaaaaactttggatttatcgaaaaaaaactatggaaaatggaacaggggttgttgctggttcaaggaagtcgtctacggagaggccgtacaaagggataaggatgaggaaatggggaaaatgggtggcggagataagggaacccaacaagcggtcgaggatttggttagggtcttattcaacacctgttgcggcggctagggcttacgacacggcggttttttacttgcgtgggccgtctgctaggttgaatttccctgaccttttgacgggagagaaaatcggatgcggcggcggcggcgatttgtctgcggcttctataaggaagaaagctattgaagttggtgctagagttgatgctcttgaagcagcagcagcccatcatcatcatcatcatcatggtcatagctataatggtggtgactatggcgatgagttaa

SEQ ID NO: 12290 - DNA, 615 bp, Gossypium hirsutum
  Clone ID: LIB3829-004-Q6-K6-G4
gaaaaataaaattgcaatcaatttcgagtttggtagtcgggatcagggtgtctttagaaattaaagagagtttgatttggttttgagggtggaggcttaaggaggatccttccttttacttttatcgtttggcttttgtcagccactcttttcttgttcttgttcgtcaacgcctccaacacattacttaatcaatattttcttcatctgattttgatcggagcatcagtctgattagaagggatctcatggccaccactggaaacaagaacatcaatgctaaattagttctacttggggatgttggagctggaaagtctagtcttgttttgcgcttcgttaaagggcaatttgttgaatttcaggaatcaaccataggtgcagcttttttctcccaaacattggctgtgaatgatgcaactgtgaagtttgagatttgggatacagctggtcaagagaggtaccatagcttggcaccaatgtattacagaggagctgcggctgctatcattgtgtatgatattacaaatcaagcatcatttgagagagccaaaaaatgggtccaagaacttcaagcacaaggcaatcctggtatgggtaatggcacttgctggg

SEQ ID NO: 12291 - DNA, 580 bp, Gossypium hirsutum
  unsure (1)..(580): unsure at all n locations; Clone ID: LIB3829-004-Q6-K6-G5
ccaacttccaccaccaccgcaggnaacccgcgnaaacaaatcaacaagaatcaagccagggtggataagagcgagaacttgaccctcgaggcagtgaggtactcgttaattcgacaagaggacagcattatatttagccttctagagagagctcaatattgttataataaggatacatatgaccctgatgccttttcaatggatgggttccatggctccttagttgaatatatgcttagagaaagcgaaaagcttcatgccaaggttggcaggtacaggagcccggatgagcatcctttcttccctgatgaattacctgagcccttgttgccacctttgcaatatccacaggtactacatcccgctgctgattcaataaacataaatccaaaagtgtggcaaatgtacttcagaaatcttattcccagattagtaaaggcaggagatgatgggaattgtggatctactgccgtttgtgacactgtatgtttgcaggctctttcgaagagaatgcattatggaaaatttgtggcagaatgtaaataccaggcatctccggatgcttatcgagctgcaatta

SEQ ID NO: 12292 - DNA, 590 bp, Gossypium hirsutum
  unsure (1)..(590): unsure at all n locations; Clone ID: LIB3829-004-Q6-K6-G6
gngctaccggnggnagnagaacgaggaattggtgggaaacatgtgttggatccgattagatctggaaccagtttcaatgaatcagtggatgaaattttatgttggagagattatgtgaagatatttcagcaccctgagtttcactcacccaacaagcctccttccttcagagaaattgcattggaatacagcaaaagagtccggctagtagccagagaaataataagaggaatatctgaaagtctggggctagaaaaggactacattgatgaaactctaaaccttgagaatggcctgcaactgattgcagcaaacttgtatccgccatgtccacagccggagctggcaatggggttgcctccacattcggaccatggtcttttgaccctcttaatccaaaaccaaatagggggacttcaagtacaacacaaaggcaaatgggtgaatatagaccctatccccaattcatttctagccaacattggcgaccatattgagattttgagcaacggaaagtacaaaagtgtcctccatcgagctgtggtcaacaacagggatgtaaggatatccatagcggtgccccacggacc

SEQ ID NO: 12293 - DNA, 593 bp, Gossypium hirsutum
  Clone ID: LIB3829-004-Q6-K6-G7
cttataacgttcgatcgtttaacgcaaacccatttttaagtgagggaaaggtttcagttcagagtcataagcaacatcaatggctccttcaactctgacggctcttgcggaagagaaaaccttgcaggcaagcttcgttcgtgatgaagatgagcgtcctaaggttgcttacaaccaattcagtaatgatatccctgtcatctctcttgctggtatcgatgatgttgatggcaagaggggtgagatatgcaagaagattgttgaggcttgtgaggattggggtgtcttccaggttgtggatcatggtgttgatactaaactcgtgtccgaaatgacccgtcttgcgagagagttttttgctttgcctgctgaagagaagcttcggttcgatatgtctggtggcaagaaaggtggtttcatcgtctccagccaccttcagggagaagcagtgcaagattggcgagagattgtgacatacttttcatacccattgaggagcagggactattcaaggtggcctgataagccagagggttgggttgaagttacaaaggagtacagcgagaagttgatgggcctagcttgcaagcttc

SEQ ID NO: 12294 - DNA, 577 bp, Gossypium hirsutum
  Clone ID: LIB3829-004-Q6-K6-G8
gccactttctactacgttgagctgcttgggattagcgtcggtgggacacgtgtccgagggatcacgccttctttattcaaaatggatccagctggtaacggaggggtcattattgactcaggcacgtctgtcacccgcttgacccgacccgcttacatcgcaatgagggatgcgttccgtatcagggcctcgaatctgaagcgggcgcctgacttctcattgttcgatacatgcttcgacctgtccggcaagacttccgttaaggtaccgacggttgttctacattttagaggggcggacgtgtcattgccggcgacgaattatttgattccagtagacagcagcggaaccttttgctttgctttcgcgggtaccatgagtggtttgtccataattggaaacattcagcagcaaagtttccgggtggcttttgattcagcgggttctcggatcgggtttgctccccgtggatgcgcttaaacatgggtatggttcttttatctatttttactaaggtaagggataaatctctttccctgcctctattttagggtaagaagggaagaacaaaaacgat

SEQ ID NO: 12295 - DNA, 436 bp, Gossypium hirsutum
  unsure (1)..(436): unsure at all n locations; Clone ID: LIB3829-004-Q6-K6-G9
gnatgnaattagncagcgccattttcttggagctgatgaatgcgtgagaatagacaccgttttccctggaacgggtggcctggagttgccattgaccgatcaagtggagaggttccaacaggaaagctgtgggcgtagatttttgcttttgctacatatcgtggcagttcattaacttcacagctttttgggggcccgtaggttctttttaatcccagcagcagtttactcggttcgtaaaaacgatgttttgatcctgccagtaagcggtgcatggaatttaggctgctgatatctgtacagatttttttttcttttgggtccgtgatctcttattttgttcgtttattcccccttagccttgatattgtcatatcacagtagctggttagctcaaataccgtttggaatcaaattgaggtttcctgtgtgattg

SEQ ID NO: 12296 - DNA, 563 bp, Gossypium hirsutum
  unsure (1)..(563): unsure at all n locations; Clone ID: LIB3829-004-Q6-K6-H1
ggaaataatggagttgaacttggctttgagtttggtttatgtaccgaaaactatatctgagtttctgaaagaagtttcgaagacaaaatgggtttcaaaggttatccaagattacggattatcttcaaagattggaagatgagatgaagaaaatcgatgcctttaaacgcgaacttcctctttgcatgcttcttctcaaagatgggattgagagattaaaggaggaagaaatacagtgtaaggaaatgaatgatggatcagtgaccgaggaaaatggaagggaaactatggataacgatggcggtgataagaaaaactggatgagttcagttcagctatggaactctaattttaacaacgttgatccccacaacaaacccaacacagttccagaactgaaactgacaagtgaagaaggagaagatgggtctgagagtgagaacccaattgaaatttgtaataagcaaagaaagggaggggcttnttgttccatttaaggaacaagctgataagaaagtttcagggctttcccttatgaccccaagttctgaattggcttcatg

SEQ ID NO: 12297 - DNA, 601 bp, Gossypium hirsutum
  unsure (1)..(601): unsure at all n locations; Clone ID: LIB3829-004-Q6-K6-H10
gnatgcacttggnaatctagccttcgcattcagaggccataatttagttttagagatccaggcaacaatgccatcaacattcaaaaatccagctcatgtgcccatgtggagaggagccaaggttgcttatttcttcattgccatgtgccttttccctgttgccattggaggcttttgggcttacggaaaccttatgccttcaggagggattctgaatgcactttatgcatttcacagtcacagcattccaaggggactccttgccctcacttttcttcttgtggtattcaactgtctcagcagtttccaaatatattcaatgccggctttcgacagctttgaggctggatatactagccgtacgaatcgcccttgctcgatctgggttcgttctggttttcgtgttttctacggatttgtgtccttcttcataggggtggcactcccattcctttcaagccttgctggactgttaggaggactcacccttccagttacatttgcttatccttgtttcatgtgggttctaataaaaaagcctncgaaatacagcttcaactggtacttcaattggatcctgggttgggttgggtgttgcctt

SEQ ID NO: 12298 - DNA, 587 bp, Gossypium hirsutum
  unsure (1)..(587): unsure at all n locations; Clone ID: LIB3829-004-Q6-K6-H11
cggcagccgacgagaatgtcgaactcaacgnagcaaaccctagacggcgaacctcgaccgtccgatcggagccctaaaaatcagctccgagaagatcaacagcaagcccaagaatgggagaccctggctcgagcctgggtaggtgcttttccagaagcaaaagccgtgacggagagccaagtcaaagtctggatcgattccaacttcggctcgttaccagccgatctccaatcgatgccacgatctgagctcatcgaaagactcctctcaatccaaaattacctgagatttccctcccagacccaggatagagaaccaagtcagcatgatcttccaccggctcggtttcagcgcaccgatcagtggataccggtgtattcatggttagaatctttggataccgatgaagtggtcaaatcgaaagatattttggattggttgaacgataacccacaagtcaggaccaattgtgctctaggcattcgcggtatcatttgatgcactacataaaaaagtgccatttaaagatattaaagaggagggaaaagaaggttggatcgcagcccttgaataaagaaagtgttttg

SEQ ID NO: 12299 - DNA, 514 bp, Gossypium hirsutum
  unsure (1)..(514): unsure at all n locations; Clone ID: LIB3829-004-Q6-K6-H12
gtttttgtcatcccttacgggngnaactgatagtaagcagccatgttcatcgtcatctgcgtttcaaattactaatttttctcaggtttcctcggctgggaagcctcctttgtcgtcttcttcttctttcaagaggaagtgtagctccgacaacttgggttctggcaagtgtactagtgggtcttccggtcgctgccattgctctaagaaaagaaaactgagatcgaaagggtggtgagggttccagcaataagcctgaagatggccgatattccgccagatgattactcatggagaaagtacggtcaaaaaccgatcaagggatccccacacccaaggggttactataagtgcagcagtgtaagaggatgtccagcccgtaaacatgttgaaagagccttagatgatccatcgatgctagtagttacctatgaaggcgagcacaaccattccctatctgttgctgagaccactaatctcatcctggaatcttctaaggctttctcaacatgtt

SEQ ID NO: 12300 - DNA, 624 bp, Gossypium hirsutum
  Clone ID: LIB3829-004-Q6-K6-H2
cttcactcctcctaaacatgctatgcttctgctgcaatggggatgagacactgttgtgaacaatcgttttgagtaccagtaattcccccctcagatcccgagccaccagacctgttgctgatctgttgtttctgctgtcaaacgctgcatcaaagaagatcgtgactctcggtatgtcctcctggaatttgtgatttcttctcattgtactggtattcgtcattgctcgtactccttcatattctgccatgtgcccctgtatattttgtgctaaaattcttcctgttgtcttttccctttcatgcacaaacttatttctggagaaccatattaaccataaggcgtaacaaaaaagtcggctttgatcatcagttcctcccttgaatacccaggacaatctcggaagatatggagactattttctgtccaagaacagcatcggggacatctatcatttgttgcaactcttctatacctaagattagctagattaggaatgaaatcccaggaaattcgccagatagtgattgcaatttttggggatagttttaggctccataattttctgtaaaattccttagtttcagaccccagattagcatcttgtaatagtttataggcgct

SEQ ID NO: 12301 - DNA, 624 bp, Gossypium hirsutum
  Clone ID: LIB3829-004-Q6-K6-H3
ctttaatggaaaaaaaaggtcaagtgaattgtaattctaaaagcagtgatcagtctccttgttcaaactatgatgtttgttcaggagatgatacttttagaaacgtcacaccgttggaaggaaccgacttcactgcaaaagaaagttctccttatactggtatagatgattctaatattgggggtcaaatagagagttctcagaatttagtcctagattcttgccaaagtaataactttcctgaaaaggtagacaatgatagaacttgcaacttagcagtaaagaactctgatgctatgcttgttggtgagtcttctgttatgactcaaggtgctaatgtttcccctagaaatgaaggagctgaggctaatgattcatcagttatggttacatctgaaaagtactatccagaacaaaatgcagaaccagataaggtttgtgataaaaaaaattgtttttctaatcgagactctacatgtgttgcctcttgcttggaagctgatgtaaatgttgatggcacaaacaagatgcactccagagaagacaaaacttgttccaacagcgaggaaggagtgattgctgaagtccaggctgtacaaaacaataaggtcttatcctgtccca

SEQ ID NO: 12302 - DNA, 570 bp, Gossypium hirsutum
  Clone ID: LIB3829-004-Q6-K6-H4
gcttcactgagctctctctctctctctctctctctctctctctctctccctttccctcctggccgtctcttttaaaatgtgcgcgagtttcggtctatttgtgggtcttatgatgctgggtctggtaagctcagctaagttcgatgagcttttccaacctggttgggctatggatcatttcatctatgaaggagagctccttaagctcaaactcgacaactattcgggtgctggctttgcatcaaaaagcaagtatctatttggaaaagtgaccatgcagattaagcttgtagaaggcgactctgctgggactgtaactgcttattatatgtcatcggacggtccaaatcacaacgagttcgatttcgagtttctaggcaataccacaggtgaaccttacctcgttcagaccaatgtgtacgtcaatggtgtaggcaacagagagcaaaggatgaacctttggtttgaccctaccaaagactttcactcttattccatcctctggaaccagcgccaagttgtatttttagtggatgagacccccataagagtgcacaccaacatggaaca

SEQ ID NO: 12303 - DNA, 375 bp, Gossypium hirsutum
  Clone ID: LIB3829-004-Q6-K6-H5
gacttaatcatcataataacaaacatgttgtggccctaggagacatgaaccttgtaccttatcattagcactcctttttgaaccaagctcctatgtaccagacagctttggagatgtcggtgagaggtggtcgcatggggagtcgctctagagaggctcgacctttgaacaagtgcggggggagccggtgctcaccgcgaagacggatgccacgggattccagtacattctagggaggcctctaggggggggaccggccctaatgggaaacagaggtggttctacttattaaggcgttggtcgagggtgacctattggaggaaggtttatcttgggcgggtcccataggagtataggagggaggaatacgagctg

SEQ ID NO: 12304 - DNA, 605 bp, Gossypium hirsutum
  Clone ID: LIB3829-004-Q6-K6-H6
ctccttcatcatcgtctatttctcttcttcttcttcttctttttgggtaaaacagccattgaattgaagctcagtggactctttttatccatacccttcttataaacttaggaatttgttggattttcggctctttctttagagatcaatagtgttgcagtcagagcagatccatggcctttgagcaatattatgctcaggaatggaagacgatccccagtgattcaacatccgagaacttcaatggtagcttcgactgcaatatctgtttggactttgcgcatgaaccaatcgtcactctctgcgggcacctctactgctggccctgcatctataagtggctgcacgtgcagagtgcctcacttgccccagatgagcacccacagtgcccagtttgcaaagctgatatatcccacaccaccatggttcccctttacggtcgaggccaatccgaatctgagctccaaggcaagcagacactttatagaggcatggtgattccccctagacctccagcttgtggcaacaaagctcttttatcaactacatcccccagcagtcagcaacttcattatcgaaatccttaccagaacgaaagctacaac

SEQ ID NO: 12305 - DNA, 540 bp, Gossypium hirsutum
  unsure (1)..(540): unsure at all n locations; Clone ID: LIB3829-004-Q6-K6-H7
cctttactggnatcctcatctcttttatgtccaagnaagacatgatcaacttgagaacatttcaccgcctcatgtttttgttggcaggtcttgaagcataaaaaatcctttgaggaagttaatggagttggcaaccccaacaataatcaaagcgcatacctggaggaatcatcactgctttcctatcaacctgcattagtttcagaaatactggccatgctttctattattcccgagctgccgcctgaattgcaacagcagcttcttcgcttaccagctgatctggctagaaggctgatttcccgtgcttctgctcggactatccagagaatctttttatgattcttagttgcagcttttcatgattgtcttaactggatggaaacttcaagcaaccgcataagggagggttttgatcgaagcaacattgacttgcaaattaagatgtcaacaaaaaagttgttcaagacgagagctttcagttggaatgacatgtatgtgtcttgtaatttagtttcttttcccaatcatctctaaata

SEQ ID NO: 12306 - DNA, 587 bp, Gossypium hirsutum
  unsure (1)..(587): unsure at all n locations; Clone ID: LIB3829-004-Q6-K6-H8
acctccttgtaanaaatctttaattgttagttgatcctaatggcatctgtttttttaccttttacatctgttcatctgcaatgtcaggttattgtccggccgattagagcctcagtgtcggggaaaccatccgtatcagagccgcccgtgacgacgctttccgaaagcttccgctgaagaaaatcccaggaattatgggattccttttgttggtccaatcaaagaccgacttgactatttctacaaccaaggtcgagatgaatttttcaagtcaaaaatccagaaataccagtcaacggtgtttcggactaacatgccaccgggtcctttcatctctcccgacccaaaggtaatcgccttactcgacggtaagagtttccctgttcttttcgatgtgtccaagattgaaaaaaaagacgttttcaccggtacttacatgccctcaaccgacctcaccggcggctaccggatcctgtcttatctcgacccttccgagccaaaacacgccaagctcaaacaacttatcttttttctcctcaagtctagcgcaaaacgagtgatacctgagtttgaagcttgttacaccg

SEQ ID NO: 12307 - DNA, 575 bp, Gossypium hirsutum
  Clone ID: LIB3829-004-Q6-K6-H9
cggccgcgtgggcgataagactcaaactttcctcgatcgttggattgggtttcaaacaatggttcgtaaacggtatcaagaagccaaaacaggtttccaattgttaaaatcaatagacgcagacaagtattctaaaaaagataggattaggcaaagaagatcattacttttggaagcaagtcgggaaggcattgctatgcacctacacgctctttggcgttgcatggctttacaacgaaacgtcgccgctagggtggtggacgttgaagcctagaccaaaagaagaaagggaattagcccatttatatgagcggcgagagtttccgtaccccggtgatgctgaggctatggaagagttcgttgctaagggaggcatgattggaactacgattgggccgaaagggataatagaaaccgataaagattcggttaattatcagaaagagatgcagaacaagaagttcgaacaggaagcgatgaagctttggcttaggatgaggaatgaagttatttcagagcttcaagagaaagggtatgatgttgagtgagtgattttttcagctatggtgattcta

SEQ ID NO: 12308 - DNA, 563 bp, Gossypium hirsutum
  Clone ID: LIB3829-004-Q6-N6-A1
gatgataaattcactggtttaagttatagaaagaatgcatgttaatgaaaagtgcgactaacaaatccacacccaccttttaacaagtttttgctaacgtcacaaaactaacaactaataaaatgcaccagcccaagaccatttttccccccttcccttttccttcaccatacttgttcagacgaaggaaagaagagggaatatatgcagtaagattgtaggagatagttgcttctgactattttttcatgatatatcccataattataccgatcaagccgatgaggatgacaaccatgaatgacacgccaccgccacttttgctgctttgacgcttcaagagttccagttcttggcgaagcttgttattttgttgaattgcactatttttttctgcagtcagctttgttataagagctcttgcctcaaaagatttatcttgagcttcaagcccctcagagaattgttttgcagctgcagcaaactcagcagcatttgcatgcccattgtcagaagcagaaactcttggtggagacccttcttctgaaccttcacgtacaggt

SEQ ID NO: 12309 - DNA, 512 bp, Gossypium hirsutum
  Clone ID: LIB3829-004-Q6-N6-A10
acaggtaaaacctccatgatatttcgtcttagctaatttactggtaaaagtttataacaagttgattgacacacaaaaaagcgatggaaagcaacaaaaaaaaaaaccttgattaaacatatactactgaaagcaactagtattatttagtacgactaccatattttactaggtggctggtactacatttgttttcaaaaagcatgtcacctcaatttggacctcttcggaaggttactgctgggtctcttatcaggtacacgacctttaccgaaagccttcatctttcttctcttcctttcttcctcgctatcggaatcatctcctttctctctatctgcataggtcggttccctctccaactcttcccaagtctttccttcatcttcctccgaatcttcatctgagtcttcttcgtcatcatcttcagattcaaccaacgattcactatcatcatcctcatcctctgatcctgattcagactgcacatctgaaggcacatacccttggtc

SEQ ID NO: 12310 - DNA, 448 bp, Gossypium hirsutum
  unsure (1)..(448): unsure at all n locations; Clone ID: LIB3829-004-Q6-N6-A11
ggggggtgggttttttttttttttttttttttaaataaaagttcattatttgattttttaaaaccaaaccaaaaatccgagatggggaaattaaaatttcacatcccaaatgtaaaaatggtttagggggtaacttncccccctaaatgtggggggggggaggggtttttttttggcgaaataaatttttaaatgggtggagctttttattggcatttttagaacctaaaacataacaaaagaggggggatagtaccaccctatatttaaggaccagcgggatccggacttttttgcgaaaacaatgaggtggaatttggggtatccagggaggataccagtaccgggaatgggacgaagggatgttaggttcaggacctttgaatagaggattgccaccttggtttttgaagatttgagagaagggattaagggaggttttgtgttt

SEQ ID NO: 12311 - DNA, 552 bp, Gossypium hirsutum
  Clone ID: LIB3829-004-Q6-N6-A2
aaggactcaaattctcttattaatatcaaccaagtagtgcatgtgttactctctacaaatcccacaaagtaacagttcgacgtgtagaaaatagtgtctacatgtatatagaaagtgagaggagagggagtgatggaactattcaggcttgtgaagatgatgaaggatgtacaaagaagcagaagagaggaaaatacagatagcataactaaggagatccatgccagtgtttatggccaccattttgcttctttcaaacatcttcaccaatagaatcatcactataacatgtcccacttttgtcttcagttcatccagtgaacttattttcatccattttggcctctcctgcaatggttattgacttttcagactttttttcaagaccaatgattaatgactttgagcgtgtttgttaccttcatagcaaacattccgaacaatgacgagcctttaagggcacgatcgacatcggcaggcaattccgggttcaagttactgatgaataatccatacaatcccataccaaatattaacatcactgttccagca

SEQ ID NO: 12312 - DNA, 563 bp, Gossypium hirsutum
  unsure (1)..(563): unsure at all n locations; Clone ID: LIB3829-004-Q6-N6-A3
gagagttgaaataccaatgctggttcatacagtttatatagattaccaaatacccaaggaagcatattttcttttagcaaaagccaagtctagcattatacatgaggcgagcagccaacccagccggcattttaccagcaatttcatggaaagtcttagttactattttttaataacaacagactagaccagaggtgggtactgcttggcttgctggcgaacccttctcttatattcattagcatcctggatgaagaggtgatacccttcagtttgagcaggatcagcagggtttggagcatccaaaagatcttggattccaataagaatctgcttcacagttatggctggtctccaaccactatcctcatttaggattgaaaggcaaacagtaccagatggataaacatttgggtggaaaaagccctggggaaatttacactttggaggcttgctgggataatcttcactgaaatggagcgtgagcgggaagtagccaccctcccaatcagttcctgctttaccagggnatcgtgcaatgccacaccatcaaattgaccgtt

SEQ ID NO: 12313 - DNA, 570 bp, Gossypium hirsutum
  unsure (1)..(570): unsure at all n locations; Clone ID: LIB3829-004-Q6-N6-A4
tcgcgtaaagaattgttgctgagtaagaattcaactattttcagagatgccatccaaacacacctgatcttaatggtgatattnaaaaacacaccaggcagggcattctatgggaagaaatcagctgtggacaaacgaaggaaaaaagcatctttcaacacaactttcgttattaatatcagtaacaaagattcaccagaagttggggaaggtttagcctttgtgctaagtgcagattctaatgttccacaggagagcttcggccaatggctcggcatagtcaatgcaaccaccaatggaacctctcgagctaggatcgtcggcgtggagttcgacactaggaagagttatgaagaagaacctgacggtaaccatgttggcttggatattaatagctgttattcaattgaacagcaatcattgagtggctatggggttaacctttccatgggggtcgatgtacgggctgttgttcaatacgatggcaaaaacatgactgttttcgtttctaatggaagcgagacccaaagtagtaatccagtattatcagtgccagtggatctctcctcg

SEQ ID NO: 12314 - DNA, 550 bp, Gossypium hirsutum
  Clone ID: LIB3829-004-Q6-N6-A5
cgttaaaactaatgggatatattgcgccaacatcaggcccttcaacgtcatttttcaatgtcaaaaagggggaagaaacagagtaaactttatgctctcttgttatgctctcaagccttcataaccagaaaataacaattaaaaatagcacttgaatctttcacctgggaatcacctcagtaatagtgactggaacagaactcatctgatagctggtcgcggcagatgattcaagcgactttttactcgaagatgcctctccatcttgaaagaatcctggtgccatgagttctttctcattcagccgaacgtttcttcccagcatttcaataacctgactcattaaaggccttcgattggctgctgcttgcgtgcagaaaaggctattttcatgtacctaaggacttcttcctccgggaattctccgagctcaggatccacgatttctatgagcttgccttcttcatggagctgccatgcccattccaaaagtaacttcatcgtgcctccccagtttgtctttgagctacttcgtccactaattatttcg

SEQ ID NO: 12315 - DNA, 565 bp, Gossypium hirsutum
  Clone ID: LIB3829-004-Q6-N6-A6
gaagggacactagcaaaatctgggaatcatttgaggcgaataaagatgacatagcaattgatttggtgtgccaattgttctgaaaatttgttttaaatgaaaaaacaaagacagatcaactgtatgaaatgatgaggtcatacagcacaactataatcactgacatcctaaaaccaattagggaattaccggtaacacaatccagtcaccggtaagaaaatagcctcccaaaatttagtaaccatttatctgaggccttggagttgaacccatcagccgagaaagggcatttgaggacggccaggaagacccctttgccccgcatatcgatcatctgttttctgatctgagaatgatttggaaaaggcttgagcaagctccaaagctgatgctgcttttccatagcgaacaccagcagcttcaggagagactggtttaggctgctccgcaggcttacgccaggtctcaggtgatggctgcctctcctgccgctgctgcctctcaatttccttgtcattccgccagttttcattaggccggttcctcctctgcgtatcaactcttt

SEQ ID NO: 12316 - DNA, 430 bp, Gossypium hirsutum
  Clone ID: LIB3829-004-Q6-N6-A7
gattctgaaaaaacttaaaacagaccatttataaataacaggggttacaaaatagcaaatctcttgtacattaaacaacaatagcataaaggctagatcaccacaagctaataatacattaaaatcggttctcctaacaacgtacaactacttaaataagcaaagataaataatgggtgagccaaaccaatgcacctacaaaatccacacatattctggggcatctttcctatgcccgactaatgttcgatacagatacatcttgtctaccttctgcttgtcgtcaaggttaaattccatttgttcactctcatctatgatctccacatttaggctcgggattttcgcaagctagagattagggactgcccctttggtgacgcaggacttttagaggacgtgggaaagtatgaaaaaatgggatcccttt

SEQ ID NO: 12317 - DNA, 524 bp, Gossypium hirsutum
  Clone ID: LIB3829-004-Q6-N6-A8
cttatcaaacttaataaattttcagtagcattagacataactaaaatggttgcaacaaaaacacaaaatcccaaaagaaaactatcaaacttaaaattaagaacccatcatatccatgggaaaacccaccacttaaaaacctccttccgggtcctccaccacgtccgaacccgacttgaggaacctgaacagcaaccggatcaaccttaacaatcccgggaagatcggccattccaagaagtgaaagcatatcaatggtttccttatcaacttctattgaatcaacagcaatagccgatacatcggggacgaaatccatacgacgctcacgctcttcttcctgaagcttcagagaaatgccacgaaccggacccttctggatccgtttcatcaaatgggttgagaacccagcaatcttgttccggagcctcttggatgggataatagctacttcttctataacctttttgttggtgtggaaatcaagggtcatgcgagagtagtaccgctcgattacctgacga

SEQ ID NO: 12318 - DNA, 540 bp, Gossypium hirsutum
  Clone ID: LIB3829-004-Q6-N6-A9
aacaaaaagattctcttattcaacgacataaccgagcaacctgagatgcatacaaataaaaagggcaaatcaaagttgcctggtttatctaaataatcaattaatggaccatgttttacaaaggaaaaataaaagaataatgataataataaaatgactatggaccaagtacgcagtcatggttgccactcctttcgacacaaacgagtagataaccatcagagaaatggccgctaccaggtttggctcgtcaaaatacaaaagctgctaacagtgaatgcaatatagcccaatagatcataatggcaagccgtaaggcaggttgtcgcatgagtgcccgatcacaagaaacccataagccatctatcatgtcagatactggtcttgtaaaccttggaacaattcttgatgtggtaagtgatttgaaaccatgaactttatcttcatcttcatcttctaacctactattactaacatcatctgaatctatatgaatagcaacttgatcattattgactttacgcaaactacgaacttggg

SEQ ID NO: 12319 - DNA, 565 bp, Gossypium hirsutum
  Clone ID: LIB3829-004-Q6-N6-B1
aagtgaaatgcaaagagctatttctattgtttaaaacgcaaggtggaacaagaaacatctgaccagaatccggacaaaaaagcttgtaaaacacagacagtacagacaccattgcatcagcagtgttcatactaaatcccatgtagcaagccaaatagttttgaaatctccagtcagattattacttcaataaacaaactaaaaataccatgagccacaaataccacgcatagttctccatatacttgtgtttacctccagtaatcatccagttttggaatcagattttgtgctagcttttgactctgatttcgagtctcctcgtgtatgagctgcttctccacttcttgcatcacctgaacaacatccaccaccatgatggtggtggtggtggtggtgatgatgatgaccatgatgatggttcgtctttcctttcaactgcttcctcatgtcatatgcatcctccccatctgcataatacttggcctccacatcatgaatcttatatcccaacgtctgggtatacaaattaaacgctgccctgttactcttcctcacatgcagc

SEQ ID NO: 12320 - DNA, 514 bp, Gossypium hirsutum
  Clone ID: LIB3829-004-Q6-N6-B10
gaacataaagcaactcatttcattccttaatgccaaataatgcataaaatcaaaatatcgcaacataatctttaggttacaaaaaggaaagaaactataaagccacccaacagtattagaattttaattccattatggggaaaaacaccaactatgagaaaccctacaacattcatccaagcttgagattgatccaagcaaagaaggtcacatcaatcaaaagtctctttcaaataaactaaaaaccatgtgaggccaaaaagcaaaagtaaggcacatttaagaatctgcaatggtgacttctacctcaacaccgggttcaatggggatagatgtgatctgcttcaccacgtcaggggagctgaataggtcaataactcgcttgtgaacacggagctcaaaccgatcccatgtgtttgttccttcaccacaggggagacttcctggtagtgatgtgaagaaccttggtgggcattcttactggtcccttaaccctcagactcttatcctttgc

SEQ ID NO: 12321 - DNA, 451 bp, Gossypium hirsutum
  Clone ID: LIB3829-004-Q6-N6-B11
aaataaaaaactcaaaatagcgagaatagatttttcttaacgaaatccattgatgataatcaaaggttacatagtacaatataacacgaacaagaaccgaaacttaaccaccaaaccatagagagtcgggcgtgcgttttcaaagcataaacaacatccatgggccgtcacggtcttccttctagcgtgctcagtgtaagtcactgcatcgcgaatgacgttctccaagaaaatcttcaacactcctctggtttcttcatagatcaagccactgattctcttaactcctccacgacgagccaaacgacggatggccggcttagtgataccttggatgttatcccttaggaccttacgatgcctcttggctcctccttttccgagacctttacctccttttcctcttcctgacattttgctggaaagttttttattttctgggaaatttgac

SEQ ID NO: 12322 - DNA, 456 bp, Gossypium hirsutum
  Clone ID: LIB3829-004-Q6-N6-B12
gggggggttttttttttttttttttttttttttttttttttttttttttttttttttttttttttttttttttttttttttttttttttttttttttttttttttttttttttttttttcggccccgggggcccccccaaaaatttgggggggggggggggggccttcccccctttccctatagggggtcgtttaaaagcttggcgaaaaaaggggaaaagcttttccctggggaaaaattttttcccttcaaaatcccacaaaaaaaacgagccggaaccaaaaaaggaaaacccggggggccctaagggggggcctaaccaaaaaaaattggggtgcccaaaccccccgttttcaaaggggaaaacctttcggcccccctcattaaaaaaaaccgccaaccgccggggaaggagggggttttttttttgcccccccggggtttttttttttttt

SEQ ID NO: 12323 - DNA, 568 bp, Gossypium hirsutum
  Clone ID: LIB3829-004-Q6-N6-B2
gcagagaatgtcattgatgcatgttttgttcaacaatcatacattggaggaatcataaaagacatgcatttcgttccatcggaaaacagagaaacctactacgacggtccaacgaacgatatcgatcaatttccggcccatgttatagccaatttttggaaaggcaataaataactaaacacatacagatcatacattaagaacaataaccaacaatataagcaaaaggaatcctacaaatgacatgtctaatagtactacttattactattaacggggactactaaccggatcgacaaacatacggtttactgacggcagccgcatttgctggtccggtgctctactccttttgaattgtggatacgacgatgacgaaaccgaagacgttgtcacagcccacgaatcaaccaagttatcactgctgaaagatgcatcaatgacaccattaggactactcgggctcggaaccaatctacgcttacgtttgtggcctcggctttccagtaactccgagatgagctcgtagcacgaatttacttcatcctcacatatcttgagtacacca

SEQ ID NO: 12324 - DNA, 565 bp, Gossypium hirsutum
  Clone ID: LIB3829-004-Q6-N6-B3
atgatgacgaaaaaaatatcttatttaatggtagttaatcgtaaaactacataaagcaagttcctgaaaaccaccaaacccagtgacgataaaaacagcaccataaaagagtctaaatgacagacattaaatattctagacattagacaacatcccaacttaacacatagttctctttttcttctctaagagagctgtccgcagtcagcaacaacaacgggcttggaagttcttccactgctagacccaactttctcaatggctttcaccacatccatgccttcaacaacttgtccaaacacaacgtgctttccgtcgagccactcagtcttagccgtgcaaatgaagaactgagatccgttagttccgggaccagcgttagccattgagagaataccgggaccagtgtgcttcttgatgaagttctcgtcagcgaacttggatccgtagatggattcacctccggtaccgtttccggcggtgaagtcacctccttggcacataaagttagggatcacacgatggaaagaggagcctttgtagtggaggggcttaccgctgcggc

SEQ ID NO: 12325 - DNA, 552 bp, Gossypium hirsutum
  Clone ID: LIB3829-004-Q6-N6-B4
caataaaaatcaaaatcaaaataaattcagaacttaatataccaaaacggaaaagtttaaaacagcttcctatgaaaacccaattttcaaacgactaaatctcaggaacatgaaaaacataaagttaaaatttcttagatagcaaccgcaatccttccagctacttggtccagatcccgttggccgtttgatgtgattctcctaccacctttaggatcaatatcaatgatgttgacatcctgcaattgctgaagtatgtgacgagcaacagatccactgctcttgcagaaatggcgtgggcgacttccatttctcttagctcctccgtagatcctcctaaaggcaccaacaccaagaactcccctcaagtatattttcctagccatggaagcagctctgacatagtaccaatcagggtcatagggtggaagctccttcagtttaccggtcttgacaatatcagtccatggaggaagctcaatcttgccggagcgcttgagatgggcggcataagccttgacgaactcgtgtggggaaacgtctttaacggtt

SEQ ID NO: 12326 - DNA, 553 bp, Gossypium hirsutum
  unsure (1)..(553): unsure at all n locations; Clone ID: LIB3829-004-Q6-N6-B5
aatgaagagtgcttggatattttattgccacaagctcattcaaatgaacaagaattcaactaaaactaactaggattcgatacacaacaatacaataacataagaacttttcaactaaattacctacctatgaattttccttttttcacctgagatcctaagagtacgaccctcctttcatgtttacagatcctgtcaggatgttcaaactcaaaagttatccaatatcttcactatattcctatgtaaaacttgtcccgaggatacaaagagcattgcagcagttataaaagccgaagtgcaaacttgcgaaatcaatatggacaacacaaaagacagaaagaaaataaagaaaacacttacatgagcagtatacattgtacttgaaaacgatcgagcatgaaaaaggtaccaatttcctcaacgagtatggaactaggattattgatccctccatcttggacttgggaaaggaaaaaaaccagaaggtgacaatggngaaaaaaccaggagatggtggaggttgaggccctggacctaaaacccctggttg

SEQ ID NO: 12327 - DNA, 578 bp, Gossypium hirsutum
  Clone ID: LIB3829-004-Q6-N6-B6
tcgcctcgtattgagaaaaaattttatataatctctcttcaaattagcatttatgcgttgtgtgctcaaaagcatggatcttttatcttatctggctgttacttagtgagataaactacgtatgcttctactcttcagcttctagtatgtctccgcatgttaatgcgtaaatgtgtttgtgagaacatcagcaaagatgatattcaaaagctgtttcctagtgaggttcttcctgaattagtaagactgttgacacttttgctgcaaaagtttcaaagagaatggcgtgcagatgtacacatggataaggtttctttgccacgcttaaagacaatggcttggaatttgccatggatgcctttatgttacagattggagattttcacatgtatggaattggctccaaaatgatatgcagtgtccacaagagtcggatttgtcattccaattagccaaagaaacactggatacaatgctgaagtctgtgtacattataagagatcagttgtcgaatatgggtgagacataaaatggacttttctgcctggaaatcaatgcaatgtaatttaccgtttgta

SEQ ID NO: 12328 - DNA, 516 bp, Gossypium hirsutum
  Clone ID: LIB3829-004-Q6-N6-B7
caataattcatgtcttttattttattattacattaaaaatgaattttgaaagcagcgcagcagcagcagcagaatctaagaaaagaccacaagatttactttctgacatctcgttttggctttcacttgctttatcctgtgtaaacatctgcagtctcagcaacgctctgccaaaattaataatggaaaccaaaagaggtaacaagaaattcaagatccatccaaccattcacaacagtatgcaactattaattcacaataaaccccacaaggcaaaataatttacaatcaaaccctaaacttcacagatccatgaaagagaaaaagagtcaacagcaacaaaagaagataaaagtgtagcattataagatcacatcaatctttggctagacgatgaagtgagaaaggagaaagatgtagagctcccttcaatccaaacaaggatctaactttaaaggtaatgaagctcctgagatatggaagccgcaagcctatccctcccaacatgggatagga

SEQ ID NO: 12329 - DNA, 509 bp, Gossypium hirsutum
  Clone ID: LIB3829-004-Q6-N6-B8
cattcaaatactttgttgtgtattgatatttaattaattgtattacaccacaagaacaacacaaatattcaaatgttcttcaaatacatccaaaacaacaacaatagcattggattattcaaattaaaaaccaaattaaacagtaatgagtaaactcataccttaagattcatggtttaaatcaaagcctggcaatggtgtatgctttgtgggttaatcccagtatagcagagagctgagggtataatcctttccttatctcggcataaacctccccgtgccacttccttttccccaaattctccgccaaacgtacgctcgcttgtttcacttccgcttcgccgccgtacgccgtttccacaacccctcttttctccgcctcatctcccttcatcttcagccctcgcagcaaaaaatcgcggcggaccgacgcgtcgccgatcttttccctaaacaacgcgttgaagtaatcggggattgtcagcgctatgtccacctcggccatgtaa

SEQ ID NO: 12330 - DNA, 525 bp, Gossypium hirsutum
  Clone ID: LIB3829-004-Q6-N6-B9
aaaccatccaaaaccatttgcagcatcaaaatatcgaagtaaacactagcattactttaaatcacattgcaaaaactatagctagatctacctggagtacaataaaaccatttgcatcaagtaccaaaatatttaatcgtcttaaaacaaacttatccctaatcaagttcgcggtgatgcatttccagctccaccttgctgcccggtttgagcagctggcgctgcctcataagtcccacgagtgcccccacttgcattgctgtcagaaggatatgctggaggctgtgaataactgctataagaggcgttatattgtgctgcatagggtggggcaccatatcccggctgcgcagctgcagcaccaccataagcagatgattgaggccgttgcaaacctgattctgcttgtccatagccagaagatggaggctgtgattgatatcctgcctggccatagcttcctggggtggtaggagactgctgtgtctgcccataggcagggtgattgaccagtggtttctgccc

SEQ ID NO: 12331 - DNA, 570 bp, Gossypium hirsutum
  Clone ID: LIB3829-004-Q6-N6-C1
agttcatgaattatagcaagtaaagtttacaaccaacataagctccaacataagctttaatggagaacaactctacaatttaactaatgttgatttccatagaattatattgaatagcttcccaaagagcatgtaaatcatcaaacggttccgggcagcggagtaaatataaatgcttttttatgacaaaacatcatgcgaccaaagtgaaatgcttatatcagatagaacagggtattcagacggattgcaaactattgagttgcaaaacttcctgtaggcattgaacagcaccctcgtagtttaagaatcccatgaaccaaaattcatgggcatcaacagaggtaacttggatgtacttttcagaagcattcactttgcttgttgatggattaattgcttttagttgatgtaatgggattattaccttataatagctccattcagtctgggtaccatttttatatgaaagaggactgtcactgcaatatgcaagcttttctgtagatacatatagaactcccatgacaggaccagctgatgtagataagtaacatgcaaaacaatcct

SEQ ID NO: 12332 - DNA, 492 bp, Gossypium hirsutum
  Clone ID: LIB3829-004-Q6-N6-C10
gggatataagtatttatccctatatgcaaatatcaaaattgttgcattcaagctcttgaatatatcatcctatgtttagcatggaagaatatcaaaacaatgacaaaaacaatttcatttcaatgaaaacaaaacaaaaaaccacaccttctctgtagtttccgagatatatgaaaacgccccttatgatgaactgactttgatgatcaaacttcacccacgggttcctcacttctctctcaattttggggctctagagacgacaaacctgatgaaagtgagatcaagttcgacaggcataattacccttcttagaagggggagctaaaactttgaacatgatcgagaataaggagcctcggtccgggtgggattttcacatttttaagtgcactatccgtgagcaaaggcaatgtgttatcagttaacaagcctttcttgaaattcttctcgtagttctggagcccgagactatttaacatggatcttgtt

SEQ ID NO: 12333 - DNA, 525 bp, Gossypium hirsutum
  Clone ID: LIB3829-004-Q6-N6-C11
acaaaacattctttgcttcataattgcattacaagccaactccaccagcttttctgatgatagaaaaacgccagcataatttcgttacacaggaaaattcttaataaagccctatataaaaaacaaggtgaccgaaaatcctaaatctcaaaaacactaacaatttaacatacagacagagttatataggttgctgcatggtcacaggtaagggactagtaacttcatgcttcccatcactccaaactattgaaccagcttgcatgctagtgccaccaggggagagcttcactgccatggtttgaacccttacaaggaagttgagtttttggccaactcttctaaatacaagctgttccggttcaaccgtaaccaccgtgccgctcggtggtcgaattgtaactttatagatcgaattcggttcaccgacattagtgactcgtctgatgaaatgtgtagacatgttacgcctgccatactgttggaaaacggcggagagtgatgggtaattcaggttcccaacat

SEQ ID NO: 12334 - DNA, 584 bp, Gossypium hirsutum
  Clone ID: LIB3829-004-Q6-N6-C2
atcaaaatccggcaacatatagttagcacagatgaatacaaaattatgctttctacaatcaacgtgtagaacatacaacaataagagttacatgatgttctaaaaagtcatcccaaaagaaactgatacaaaaaaaatccgaatctaagcatttcggaacaagaaaaccaaaaacatatgaccaccatatatatatatatatgtatgtatataactcgacctaaaattgacatcaaaataatcgaattcatttgattatcaacaaaaacaaatgtctgcaatgagctcttacattatctattagacccacggtccaaaaaagtctcgaggctcgatccttaattgatggcttgtaaaggactagatccagcagaagtcacggaaaaacttatgccatcagatgcaagagggccagattcagatcttttgcagatgttgtacggtgaggtgtttgataccctttctttacgcttctctaaaaatcgagccaaggatgctttacgagcctgaggcacagcacctgagagattaaccaattttgggaggatctggttggttattagtagatgcgtaaactcctatcc

SEQ ID NO: 12335 - DNA, 503 bp, Gossypium hirsutum
  Clone ID: LIB3829-004-Q6-N6-C3
gggtcacttaaaagttcatcaaaaatcatttttgatcacaatctgaatcacttaagttcatcccaaaattatattaatcacaatctgaatcactcaagttcaacgaaatttttctttcttatccgagacagaacacactcaatgacagattttcaaaaaattttagtactacagggttgtaacccaagaaaggatttggtaaatggtacagtcaccctacaacttggggaaaacaaactcttcaatggcaggaacctcgccgatcctctgtaaagatcctttgctgggctgatcatcgacccctatggccatcactggttgcttcctcggcgcaatcctcccaacgctcatgaaactcacattcacattctcctgccccaaaatacttcccaccttaccaatcaagccaggctgatcaacctgtctgcaaaggataatgctaccctccaagcttacatccacttcgaatgaccctacctttgtcagatggggaatcccatcct

SEQ ID NO: 12336 - DNA, 560 bp, Gossypium hirsutum
  Clone ID: LIB3829-004-Q6-N6-C4
gaaagaggatgatggattattcattaatgatgaataatatacaggaatgaatacaaaatttggtggctgtgatgtgaatgctgtacaaatttgaagcattatactgtgtctacatagaaaacgagggataatgagtattttgtgttgctacttacctccgcggccgagagtgactagaggcttttccgcttacacctgatatctgttttaggttggtaagagcatcctgagcatgtctctttgcattagcatttccatgcttaaaagcttccaccaaagccctaaccagtgcctgattgagggagtacttatgggcagggccgtccactctcaatgccttctctatcatccaaagtgccttctcttgaagcactccaggacgaatttcggtgaaaagttcgatgacagccatgattacatcctgcttttctagctcatccacggatcttttgtaaccattacccgtatctaacataagagttgaaagtgcctcaattgcagctatttgaacaaaggtatcttcatcgcgaaggtggtcaaccaagggtctgatgcaattg

SEQ ID NO: 12337 - DNA, 559 bp, Gossypium hirsutum
  Clone ID: LIB3829-004-Q6-N6-C5
ataagtaatcatgggcaacatttgattaagggcttaattaagagatgttgcactttttagcatgacatacatgattaagcatccaagacagaaagtcttactaatgaacctaactatatgtaaactaaagcttcaagcatttttatttctctttcccctttgaatttcttaccgaggcaagatgacagccttgagagggttcttcatcacaacagtgaaagcataagtctccgtcatgtcgggcggagaatccggcaccggctgccatttaaaagcttgtaccatctttgcaagcgacaactttatgtgcaaaacacctaggttccaagcggggcaaattcgtcgcccggccccaaacggcaacatcttcaccgaacgagtccccgtcacatcgacaccaaccccgtcacctcgcaaaaacctatcgggccgaaactcccccggatctgaccatatatccggatcctcggtaatccatgcagtgtagaactcaacatgaaccccttccggaattgtatagccaccaagctcagtgtcctttatagctgcatgagataaa

SEQ ID NO: 12338 - DNA, 566 bp, Gossypium hirsutum
  Clone ID: LIB3829-004-Q6-N6-C6
gacagtatggtgcaacaaagtttaatatttaaagaagcaacaagaaccagatgcgtgacaaagtcatcacatatatatacagatccattattcagatttatgaataaaagataaaaagacagcaagcaacatggaaagtggcaaatacaacagcaaaatgctaggctagcctctcaacattctgtcaagcacgatggtgtctactacttctgcgtcctctgtgatttgcagcgctgaaacagcctgtgctgctataagaccagctgaaagttcttcatttccccagcctctatcctcaaaccatggtgcatgtagatcccttctgcaagctccatacgtgaaggaccagtcactgcttccaaactcagcccactcgcatccaccactatatgcattagcgacccacccttgagaggttgtgtgagcctgatggggaagcctagctctccttccccaatcccaacggttgaacccctcatccttgtttaccataatctcacatgaatcccccgagtcttcaccaatcaggacatgcaaagcaacagcctcagcaattgcagcaccat

SEQ ID NO: 12339 - DNA, 522 bp, Gossypium hirsutum
  Clone ID: LIB3829-004-Q6-N6-C7
ccaataaaaggacttatttattttaaccaataaatcactttccacttgataagttattttcataaaataagattaagaaaatacaaaaaacattttcggtagatcaattttctaaaaacaagcaccccaaagttccaaattattcaaaatcatgacttcattcaaccaatgtggatctaccaaaatcaaacacaacagaaaatacttttggagatcaacatgccccatttaaactaggaaaaatactaaacacatcaaaacgctatttaagctatgctctccagggcctgcagtatatcggccttcaaatcttcgaagtcttcaaccccgaagctgaatcgaatcaagttatccaaaatcccgtacttgctcctctcagcttggctaagatcccagtaggacattatagctggcggatcaacaatgctttcacagccaccaaatgatggagcaatgtatggtatcttcaatgcatcaacaaacttgatggtggtcgtcagatctccatccacctcaaaactg

SEQ ID NO: 12340 - DNA, 529 bp, Gossypium hirsutum
  Clone ID: LIB3829-004-Q6-N6-C8
gaagaagaaaaagcacaaatttttttatatatcagaattaaatcaacttaattgagtttcacaatatgaaacagcctgtgaaacatatcagcactacctttaccaattaacatcaacaaacaccaccaagtgttaacaactattacatatatagatccataccatacccaaaattaacgaatttagaatccccatgcctttggttagatagataaaaagaacatcagccaaaagcagaatcagaggatggagatgggtgcaggggatgggtggttgttgatgagaaggttgttacccttggagagctggtccatgagggtaagtatgtgggagttgtaagcacgggcctgattaacggactctgcttccagctcgcccagctgagaacagagcctttcctccgcctcttccgccaccctcagcctttcccacatctttcgtaattcctttctcatctgctcctctctttccctactctccttcaattccttctctaactcctggttcctcttcctcaactcttcttctg

SEQ ID NO: 12341 - DNA, 531 bp, Gossypium hirsutum
  Clone ID: LIB3829-004-Q6-N6-C9
ggtaacgtcttctacaaacaggatgtttattcgtcattttaagcatcaaaagatccagtttcaacacgcacaccaaaggaaaggtctttaaagctttcagtaataatggcaagaacaccagggcttcggtagactggaaacgagagggtattagaagagttgggggggctctttttttagtttcaaacataattttccatacaaacaagcagggcttggtccactaaatatagaggtgacagttcacgcatatttgattcttacacattttaatttaaagaccaaagttatttggaatgcagccctcctttttacatgcgtagtagcacgttaacccatcgcatacttctgggtccagcttcgagccgttgtctcatacttgctcttgtcagtcttgtacatgtgggcaatctccggcaccaatgggtcatcaggattcggatccgtcaagagtgagcagatagatagcaataccttggatatggtgagggcagggctccactgctccttcaaaattcaaggcaaatgcta

SEQ ID NO: 12342 - DNA, 557 bp, Gossypium hirsutum
  Clone ID: LIB3829-004-Q6-N6-D1
gaagatgaaaaacaccttcattaattttgtctaaacataaacaattacacacttcaacttcttcaaacaccattaatgcttcaatcccaacaatcaaacattcaccatatctctaacatagcactacagattattcaacaaactcaaactcattatcgtcttcctctagtgacagaaaataacttttagctcacgtggggaagaacagtcgtgcatgagcgaagggctatcatgggcgtaagtaaatgtggccggacaagcatgtttgaaaaactctgaatagctcgaagccctacaggtctgagggctattgtaatggttcctgcagcaaagctcgtcggttccgaaggcagcacaaccactcttacaacccacaactggaccatgaggaggtgacctatactgtaacttgccgggacacgtggccagaatattagccctgcacccaacgacggggcaaaggcctttgccttcgtgcggggtaacagtcatggggatgttaaaaccgtccacaaggctgacttcgtaggaagagagatctttatggccaccgtggc

SEQ ID NO: 12343 - DNA, 504 bp, Gossypium hirsutum
  Clone ID: LIB3829-004-Q6-N6-D10
ggtagtaaccacatgcttttgtacctcctcttacaacaaaactatccttgtcttaacagcctgtttctttaattcattagcatgccaacaacctcttaaaagggttaaaactacctaaactgctacattaaaaagcaataagaagaattttcattttacaacagtctatgagaagatcaccaggggaatacaaatcctattgtaagagaaacctactatcaacagccacatggtatccaaacaaaatgactgattaggacagtcactttgcctcatccgctccatcaccgccaccatgcccaccagttgtgctgccctgcccattaccaccagcttcggagccctcttgcttgtttccagcacgtccatcacttgggcctgaaggttgagggggaccaccactgctgccgcctccaaggctagcctctgaatgcatgggatgcatgctattattgggtcccccaggcctgattcccatttgaccttgcattgcttgttgatgct

SEQ ID NO: 12344 - DNA, 512 bp, Gossypium hirsutum
  Clone ID: LIB3829-004-Q6-N6-D11
aaaacagaaacagttttagagttgtataatataaaacgtttagatagaacattgagtgaaggaacggagcccaggaacagacctaaagctccaggaccactttggtggaaaaatgggaacaaaaaattcaagaagtttatagctcgataaggcataataacattaatgatgacacactatgaactccaaagataaacctcaccaccgcctatcaagaacccagttctgggaccaatatccaagagatgacggtgaaccattaaaacatgtaactaaacgtccagtgatggacctactaacatgaaccaaagttttattgtagtaaccatgataaactgttgttgaatcaacaaaatcccctgaggttcacttgcccttcttggcagcagacttcgtcaccttggctccagttgggtccttcttctccacactcttgatcacaccaacagcaacagtctgtctcatgtccctaacggcaaaacgtccaagtggagggtactcggagaaagttt

SEQ ID NO: 12345 - DNA, 570 bp, Gossypium hirsutum
  Clone ID: LIB3829-004-Q6-N6-D2
ggtagtaaccacatgcttttgtacctcctcttacaacaaaactatccttgtcttaacagcctgtttctttaattcattagcatgccaacaacctcttaaaagagttaaaactacctaaactgctacattaaaaagcaataagaagaattttcattttacaacagtctatgagaagatcaccaggggaatacaaatcctattgtaagagaaacctactatcaacagccacatggtatccaaacaaaatgactgattaggacagtcactttgcctcatccgctccatcaccgccaccatgcccaccagttgtgctgccctgcccattaccaccagcttcggagccctcttgcttgtttccagcacgtccatcacttgggcctgaaggttgagggggaccaccactgctgccgcctccaaggctagcctctgaatgcatgggatgcatgctattattgggtcccccaggcctgattcccatttgaccttgcattgcttgttgatgctgctgatataggaggtgctgagggtcctgcatttgatgcggactattgaattgcaatggcacctttt

SEQ ID NO: 12346 - DNA, 579 bp, Gossypium hirsutum
  Clone ID: LIB3829-004-Q6-N6-D3
aattaattaattaattaattaatattagtacattcaagcagtgtttgatactaaacagaagtagacattattgagaggccacaccatcaaactcacaaattacaaccaatttgtccattatttcccttcacaacttatctccaatatttctctgttaatcaaacagaaaaatcggattatttccaagccttgaatgacaacacaattgcatctctactattagaggctttaaaccaaacttgacaattatttattttaccatcttccactgccagccattcacctttgtggcggatccaccgttcgaacatttgcactcatcattccttcaatgcgatcctttgttatctccacaaaatgacccactatttcgtggaactgctttaatcctgacagtgggagaatgatggaagaccgatcagaacctgcaacttcagatatcctcaagaaatgtcctctgttgttgctcccaagatcaaagaagaatctcttctggtcagctctgatcacctttgaaacccccatgttaccagtttcatcctgtggtggcaattcaattgatctatctacattcaattc

SEQ ID NO: 12347 - DNA, 152 bp, Gossypium hirsutum
  Clone ID: LIB3829-004-Q6-N6-D4
aatcatactctacataattgatcccgaacttcaaactaaactgcaaattcctgctcgacaatccttatttagaacaaatataaaagaaaaccaaacttggatgaggacaagtggaccatatgggcccaaacgtccgcccacccctacgaagg

SEQ ID NO: 12348 - DNA, 482 bp, Gossypium hirsutum
  Clone ID: LIB3829-004-Q6-N6-D5
atccactaaagctcccattccataccttcatataaaacattgtcttgttagttcattaacatagtcaaaatttgctggatccccgactgcattacatgtagaaccttcataataaactacagcatcctgaattggttagactgttgggttaatgttcaacctacttgttgggctgtaagccttttcctagctttctcactgagggtcaactggctacccttgcccttgggaagggatacctatggcttcggtccttttccaattgggaacacatctaccaagacgggtggcgaactcatgcccagaagcttcctgaacgtgggttgtttaaatgctgcccttgggcttttacctgttgttaatcactcccgcacggcctatgaggcttcctccagtacccatgacaacattgccgccatcaaacttgatgaaacaagacaatactgtgtgctctaaaggtccagcttgatggatgcattatc

SEQ ID NO: 12349 - DNA, 563 bp, Gossypium hirsutum
  Clone ID: LIB3829-004-Q6-N6-D6
aaagttcaaaatgtaatagtaactggatcccaacatatattcttccataaatactgcagagatgattgaaaattttgtctaacaatatcagtatgattttatattgcgaggatcatgcaccaccagccatatccatatctgcaaccccatctattcccttgaaaacaactcgtaattttcttaaaccagatgactttttgtcatccttgttgatcgtaccagttgcatggaggacgtctttggggattttatccatgagatcatataggggtaactctagattcgatcgggtcatctcttccaaaacaggaggagcctgcatgtatagattctttccgtgatatgtgatcgacgcctttgtcatcagcaccctaggatcctcctctagcatatcaatgaacttttttagggtaactgtagtgtccagctcaatgaggacacccggaccacagacgagacagtccttgtccttcacaaattcggtcacttttgtatgaagaccttcaacaccattatacgtaagatagtttgatagagttttactgcatcctgatgcaatcttc

SEQ ID NO: 12350 - DNA, 413 bp, Gossypium hirsutum
  Clone ID: LIB3829-004-Q6-N6-D7
ccctcttctccctttctctttccctttccctttccctttcacgcttttccctttccctttccttctccctagctctttccctctccttttccttctctcgttccctatctttcctttcccttgcggtacttgttcgctatcggtctctcgcccgtatttagccttggacggaatttaccgcccgattagggctgcattcccaaacaacccgactcgtagacagcgcctcttggtgcgacagggtccgggcacgacggggctctcaccctctccggcgcccctttccaggggacttgggcccggtccgtcgctgaggacgcttctccagactacaattcggacgccgatggcgaccgattctcaagctgggcttttcccggttcgctcgccgttactaggggaatcctggtaag

SEQ ID NO: 12351 - DNA, 521 bp, Gossypium hirsutum
  unsure (1)..(521): unsure at all n locations; Clone ID: LIB3829-004-Q6-N6-D8
agggaccaaacgagaaaggtattactattttgtcttaaatgaaacagacccttttggtctcaattcacacaaaaatggaatgtagcaaaaatgaaaatctaaatactactngaaacttagggaagaaaattcaatttaacccattggttaggggtattcggaatcccggaccggcacgaaaacaacggcaaaatgaaaaaaaaaaaacctggatatgcatataatgtcaaactatagaactgtaagttccgggatgattcggacatggatttgtctacgatgaatcctttagtacatgctgcacgagcaaagcttccgattcctgaattacgagaccaatacagggttctcctcttcctgcggtttttgaataccaaccaaacgagcataatcgacccacaaaagggaacccaagtatgtgttgcctgttcgaatggcaaagcatatcgtgctcaacaaaaacttgtgctggtgtagcagaggttctaacatccgttgttcgattacaccggctagcactt

SEQ ID NO: 12352 - DNA, 530 bp, Gossypium hirsutum
  Clone ID: LIB3829-004-Q6-N6-D9
atgaaatgagatccttagtaccttccatataattacaatacaataagcatacaattaaagccactacaaccgtgcggggataaaacgatcttacttcactcagaagccttaactttatcatccccgacaactgagagtataggcaaactactgaaaaattcatctagaccctcgaaaaaaccgttcccttcattgttatcctcttcctcgtttccggcatcattccccttactcctccctgccactggctcttctgcctcgttccgaaactctacgttcaaatccaacttccccaaaaccttcgttcctcgtttcatctgcttccttctgcttgattcagcagtcgacacactgtccggcaccatggatgcaccactcgaatttccaccatgatccgcattaacttggtcatcacccccctgcttcattctctcactctgtggtttctttgcatatctccccctagatcctttccctttagaattgttcacctttttctccctcttttcatttcgccaatcatcgtcatc

SEQ ID NO: 12353 - DNA, 577 bp, Gossypium hirsutum
  Clone ID: LIB3829-004-Q6-N6-E1
ggcaagcataatttagacaaccattctcattcatatcacagaccacgattaaaggacattacttggatacaacagactggtttttagtgaagacaggcaaagaacatagaagaagacactttgaagagtttcaaaagagctcacagaatatccaagagtacaaatgaaaagtcagagcaacaaactacatttttatatatagatgagtttgatacaattgaaccggcactcgaaattgacccttcattcgaatgcccactggttctcccgacgaacctcttcttcctcttccggggtgaagtcattcttgatattgaaagtcttcctgatctcttctggggtctttcccttgatcatctcagcaacagtttggcaagtgagatccagcaagcccttgatgttcaaatagttcgctgccagaatgagatcaaagagagtagcttgatcgaccttgacaaagtcagcgtcccaactcttgagctcgtcatcggcggatcgatcgtctgtcttaggagcctcgacgtgtttcttgcagtactcgatcaccttcgctaaaatcttgctcgtaacattaggc

SEQ ID NO: 12354 - DNA, 467 bp, Gossypium hirsutum
  Clone ID: LIB3829-004-Q6-N6-E10
ggggaataaaatttgccaaacaataatacccattttaagctcaatcctacaccatcccaaggcgtaccccaaactaaatgctaacagggggaatataatccatatggctttgcttaccaacctttaaaaagggcaattttacccggaaagaagggggcacaacccttgaaaagagggctttctatgcccccatcacggggaaccaaaacccgacatcctttccagcaagcttccggtaaactgcaaaaaacggctaaagcgtggcctctggggaatttcctcccttgggggccaaaaaccccttcattatctttgagccatcaattctatatctagggggcttcccaacaattttaggggggaagacaacattttttaacattgcctcatgtacaggaggcaatgggcgggtggggggcccttgaactgcaaaacctttttttgggggccttaatatcccccggggg

SEQ ID NO: 12355 - DNA, 485 bp, Gossypium hirsutum
  Clone ID: LIB3829-004-Q6-N6-E11
agcgaaaccaacttcatattaataatatatggataccaatggatggaggagcataacatttccataaaaccaacattggtgacacctacctgtctcatagtccaacataacgattataatcaactatggttttccatgtcataacatccaaagatgcagagacgttaaacagtctttttaagtgttctcgttttctcaacttctaacctctcaaccacgtgtttcgatatgatgagttgtcacgcaaagaagcatcgtggggcttgtactccatcacatagctgtggggaagctttaagtgccgtttgattgaatctcttagagccataacagcctgatgatccgacgcattacgattccatacgctcaatatatcctcattgaagcgaatgctcagcactacaccacaaacattatctccgtaatcaagttgatcaccaaccaaggcaagaaccagatcttcccaaaagcgacctgaaacaacc

SEQ ID NO: 12356 - DNA, 404 bp, Gossypium hirsutum
  Clone ID: LIB3829-004-Q6-N6-E12
gaacaaaaaatgcttgtccgtactttactagagatcgagattgtatagatactacaatacagcatatctgggaaaaaagaccttgaatttaaaagccctggaacttacaccctgggggagtctaaacaagctgaacgaggcgagcaaaaggagggggaatgaagctccttaaccttgaaccagacacctgatccgcttacgctgctcctgcgtatcttacactggagagggggggaacagagctgaccaaccaccggcgggcgggctgcccagaagaagatgccctgcctgagacaaggacgacttaccggtcaactccctcccaacgggtcagagattcaccagagtactgcttggtgctcggcgaacctgcttatgcataagaggactgccaaaaaatacct

SEQ ID NO: 12357 - DNA, 610 bp, Gossypium hirsutum
  Clone ID: LIB3829-004-Q6-N6-E3
gagcaaaattacaacactcttgaatgatattccaagccccgccatgaatgttccaaaaaatggggaaggaaaaagatggtaaattttgatttttagacaactggttataacattaaactatttccttactaactttacgatgatgtctagcgcctgacttcctatctcttctacgtcttggtgggaccttcctttgtgaagaataaatgaccggaggagccctttgagccaatagggctaaaacatccttatggtatttctgaatgacaaagttgcgcctttcgcagtccaagaacatattgacagtccaattcgtctttgccgcaatcttatcccttacggttgaaaaactaatttggtctcgggaagtaaaacggtcaacttcgttgaaccaaagacaagtaaagaggttgctaatcggaatatgctcccttataatcacacatccttcaggaacatcgctcgtaataggatgtttagcctcggaatatggtgtcaagccctctcttttataaaattcaacttgatgatcaatcgaggcattatcatatttgcctgcagctttatttgcctcagcttcaacaaacacatcaaagcgtttataatgccg

SEQ ID NO: 12358 - DNA, 563 bp, Gossypium hirsutum
  Clone ID: LIB3829-004-Q6-N6-E4
caaaactgtaggggcaggctacagagagcttacttttcaattactgcagacagtgtacatatctatttagctaatcatactatatcaccaagagttaagacaatgacagtatccgctagatttgtagtacaaacagaatctgcttagtattacagtgcatcaatgaaattataccatcaataattttaatcaaacccacccttttacccttcagtgattttgactgttcccaggatgaaaaattgtgacaaatgaagtgcagaaaagagagatgattgaaatcccagttagagctgtttttgagttgcttcaccagtccagtatgttttgacagcaacaagaattttctctggattgaaaggtccgctttcatggtccattatctgactcttccatctcattccatccgttatactctggatcttcacaagcagctccactgtgtccctaaatataacggtcccttccggcctcagaatccgatccatctccagcaagatgtaagtgatgtcacacctgttctggtataaagtaaacaagccactagcatggatgagatcata

SEQ ID NO: 12359 - DNA, 538 bp, Gossypium hirsutum
  Clone ID: LIB3829-004-Q6-N6-E5
acttaccaacttagtagcattgacactcatacattcaaacattttattacatcaccatccctcacattttattacataactcatacgcttcaaacacctcattggttccaggttggtcatgcattcaccttaggggcccacccggggatcacgtattccttagcagcccgcgttttcacgaacgattcacgagggaatatcgacttcatgtaattgcggacattagtcaagctttccggaacagtccatttcttgaaatggcccagagcaacctcaagatggtaaagtttgggtcccaaagctaaatcaactgcacttatcttttccccagcaatgaatgggccatgtgccttaagatgttcatccaatgccttgagttcattaagcaaagcctgctcagatccatcattagcatctttgctcttcaaaaatgtgacaaaagttccaaatatgtttggacccaacagaggcaaattgaggaggggttttgagacaaggctgagggtatttttcttcaagggttccaacaattacatca

SEQ ID NO: 12360 - DNA, 586 bp, Gossypium hirsutum
  Clone ID: LIB3829-004-Q6-N6-E6
atcagttcaagaataaatcaattggaaaatcaaattataaagatgagttaaacaaagggatgctaatgaatgaatcatataaaagttggtcagttaagtagttaatacctacgtacgccactgcggtcatacatccttgctgaagggcactcgtaataaaggtgaccccttccaccacagttactgcatatgacgatggaaacgcagtcctgactaatatggcctagctggccacagttgcggcaaacaatgtcccggaagtggcctcctatgtctgatgatagtttcgacttggcacattgtctggctacatgacctgatatattgcagatattgcaaactggcttgttatggcagtcatgaccaaggtgaccaattttatgacagttattgcaagccttctcattcgtacagtcggcggcaaagtgacctgccttgtagcagttgttgcagagtcttgcatcatgagccggaagtctgggatttaggcaatctcgagctaagtgacccatcttaccacacatattgcaaacaggctcataggggaattgtccagcaagatgccctggctccttacagttccaac

SEQ ID NO: 12361 - DNA, 497 bp, Gossypium hirsutum
  Clone ID: LIB3829-004-Q6-N6-E7
gaagcaaaaaaaatcttgttggcttatgaagcacagacagaaacacgccccacggggataaaatcatttatgaaaaataagacaaatccaataagtcactatccgccaagggtgagtttgcagtgaactcatcaccagcagagcagaaccgctctagctacaaatcggggggtaaaatgctccacaccagcaagttaaccctcaaggaaaattaaaatctaaagagcccgttaaaattctgaacattatatcaatgggaaaaccacattgaaaagctgaatcttatttggcaatgggatttgctattatcttacttcgcttgaaaccttctagcagcaatcttttggactgctcactaaagagttcctgtttctgtttagcccttctatttctatactctacaatttaaccactggattatgtcatccattatggtttctcgttccagttcaaagaggagatcatgtaacaggccttcaaacaatttgatcgttttg

SEQ ID NO: 12362 - DNA, 530 bp, Gossypium hirsutum
  unsure (1)..(530): unsure at all n locations; Clone ID: LIB3829-004-Q6-N6-E8
acttaattaataattttaatatttttattataatttaagtctaaatacatattttctattttacaacacttttngaaaagcaaggctaaaaccacaaaagcaacgctttggtagattcgattaaagaaagactacaaatgaatattatgattctgatttattgatagacgagttaaaagaaggatggaatttatccttcacagccaaagctgcagctctgtaccacgcagctgctgccatcgctccaggatccggaactgttgcaagtatagctgctgacacatagcttgaccgcccagcctgggcctgcatgtctttagttgatccagctcctgccactgctgcttcagatgagagaacaaaagaagtacaagaatcttcaccactagttaacctctccttaagaactgctaatgcaggcataagagcatccaataacgtgcgatatccagtactagccccaccatatttactgactgcagcgatggcagcttcaagtgcttcagcccattgctttgctgtgacagttg

SEQ ID NO: 12363 - DNA, 546 bp, Gossypium hirsutum
  unsure (1)..(546): unsure at all n locations; Clone ID: LIB3829-004-Q6-N6-F1
ggcgccgctttcttagccgngaatttaacactcttcggcttcttgacagcgactgtcttctttgctggagcctttactttcttccctggcgaactcttcttcgccgtcttcgctaccttagctggcttagccgctggtttagctttggccttacttgtagtagccttcggtttcgccgcaactttagcctttgccttcacaggcgttgcaactttagctttcgctttcgctttcgacgcggttttagtcgccttcggcttggactttgcggcggtagtggtagttgcagatttaggcttcgcggcggcaggtttcttagctacggcggctggtttcttagctgcggcataagccgaaggcagcttaaaagaggctttcacttttacgagctttccggaagcaacaaacttcctcgtctgaacaagtaagactttgcggaaattcgccggtaattgcttatgcttctcttcaatgaatttcgcaatcgcatattggctcgatcctgtcctctctttcaacgaaacgattgcatctgaaatcatctca

SEQ ID NO: 12364 - DNA, 507 bp, Gossypium hirsutum
  Clone ID: LIB3829-004-Q6-N6-F10
attcaaatctccacgtatattaaatccacttctcttgcaatatatccaaaaattgcgcataaacggattctttttttggggccaaatttacccttaacaaatccagaaatttaatttaaccctaaaagcttgccctcttcaatgaggttactgtaactgcagctcccaatggcgacttaccaacttcgatctcgaacgaatcgtaacgtctgaacagttccactacgaaaagccgagacaccagcaccacgaaatccttgccggcacactgtttgttcgccgtcgttggatcttcagtctcgggtccattcgaccaaagcacgtgctttaacagcctccctccatcgtcacccatgaacctgtctgggacaaattcctccggattctcgaatattttcgggtcttttgttgcaaaaggttggtagccgtacaacatctcccctgctttcaccaggtaaacggcgtcgtggctctcgatcaagagatctttctttgctctcccgtact

SEQ ID NO: 12365 - DNA, 534 bp, Gossypium hirsutum
  Clone ID: LIB3829-004-Q6-N6-F11
aatagaaaattatttcattaacaaagcaagcttttacaagataatttattctctcagcatataatataaaactccatataaagaactcttttctcttttttttttttttgagagagagagagttctatataggcgctgggggggggccgggaaaggtagcttaagtaggcacataatataacacatagtaggacaaaacattagagttttgatccttggatgggcaaatatacagcagcaacatttccttaagcatccaaatgaatcatgcatctcagacctataccctggagcatgtagtcgaatgccttgttaatatcggcaaaaggcacagagtgtgtgatgaacttgtccatatccagccccagctccttgttcaaatatttggcgacaaccatgggaatatcagtgcgtggtttatagttgccataaaaagcacccttaagggtcctctcacttagtagattcattggatgagttttgaatgcatcgtctttctttggcacacccaccagcacacaaacaccccaacca

SEQ ID NO: 12366 - DNA, 530 bp, Gossypium hirsutum
  Clone ID: LIB3829-004-Q6-N6-F12
ctgtgagtctagagtcattgcccaactgtgtaattacatgaatgctgatgccaaagaagtccaggggaagagagcaattcttccatcttgccccctgccttattcatgctatgctagacctatacaaacagttgttccactggagagagaacccaaaaattaaacaaattgggaagaagcaatgacacctcatcaaggaaaacacaaattaactacttcaccttcttacatatgtctaaatgattaggcagatgatattatcctataacctatacaagctgagtgccaatttttctgtgtcaaaaaccctttctttttacccccaaatgcaaatgtgattcatgttttactaccaggtaccaaagctgcagccaacatgttcctgagtaacgacattaagccgtttttgcatttcggccctggaggtatatggtgggaagcacagccggtaaaagcaggtatgagaagaaggaagacgctcatgggggctccgagggacttataaatataaagctgaggaggccaaacct

SEQ ID NO: 12367 - DNA, 565 bp, Gossypium hirsutum
  Clone ID: LIB3829-004-Q6-N6-F2
aagaaacaaactatacattattgtgcctttcaagaaaccatgagagctgaaccttacaaacaaagctgaataaaaacaataaataaagataaccagacatgagtaaaagacaaaatatccctaaatctactaaatatcagctcagccccatgaatgtttattgattttggcttataggttctttaatgggagattaaagcatatatcccccttgctggtttaaccacaaaagattcatgctttaattcccactctggtcatccatgtaaataccaatttccttcggaatggattggattcgggttccatttcagcccaatgtcgcaaacaataacaatctgatggatcatctatttcatgacagtttgctgcttttggggaaggtcttggtgccgcttgacggaatcttggttctcaccctctacacttgtgtccttatcttccttagtcaggtatttggcgacttgtgcagcaacttgccttccttctgagattgcccacacgactaacgactgaccgcgtcgacaatctgcagctgcaaagactccatccacattggtcgtga

SEQ ID NO: 12368 - DNA, 502 bp, Gossypium hirsutum
  Clone ID: LIB3829-004-Q6-N6-F3
ggaaaaaaaactaaaaaagggggcttaaaaaaaacaggggggggggctaaaaccccgggtttacagaaaagggggggttcgggtctaatcccttttacccgacaggggggaaaacacctggggggccggccaacaatcactggttacaaggggggggaattaaccggaaaagaagaaccttaaaaggggggcaaaattaaaaataacttgaccttcaagggcggggaaaaccctgccataaagcaaatagtaaaaaactgcctcagggggagaaataggaccactggtcgtcctcactagccccaaaatcgacaggggcattggaatcttccccattggaatagtagaagccattgtttttcaggggagtcaacgaacaaggggatgcccctccaaaaaaagggatgttggggaaaaaaccaacaatggggctaaccaaagcagcaggggggccttcattgcccagggcccggccacaaaaatttccccacggggcttgggg

SEQ ID NO: 12369 - DNA, 561 bp, Gossypium hirsutum
  Clone ID: LIB3829-004-Q6-N6-F4
gaagaattaaaaccactattatttgaaaaaggagccatcacagatgaaccaaaggtgttcatgttgctcagcttgttccaacactcatttatttatcaacagggaacaaacttatcgtgcataaaaaaccgcagagtgaatgcttactcaccttttatattctcatatatcgtctcatagcaggctatagggtaacatgggcaggaccaaacactcatactagttcatttactggcgtccaacaagcagtccttttgctagctctaaggctttcgggcacccgaaaaacttctccacagattcctagtgcaaactccatggcagttccaggtcccctgcttgtaatgaggttgccatccaccactactctgttgtcaatatgactttgatctgatagcttgcctcacattgcagggtaagctgtggcctttttgcccttgagtaaaccatgaggctccagcaccaaagctggagatgcacatatagctccatagggtttgattgattccgcttgcttctttaacaagttcaccagcttatcagctttagcaaatgcttggg

SEQ ID NO: 12370 - DNA, 552 bp, Gossypium hirsutum
  Clone ID: LIB3829-004-Q6-N6-F5
agaaccataagagaaggattttattataccaaggaggtaattacatttttgttcctcgacatgctatttaagcttccctgttcataggacccaagaatttaaacttgaatgcatttacactgttccccaaaggttggtttgattcttttgaactactagttcttatatcgatacctgttctgagtgaattggtgaggtccgatgtgtttttggcttgagactttcttcgcttgtaagtcaatggaaggggaagatcatacttaagcctctttgaaacactaggtttatttgtcttctctgaattttcaacattaaaatcacttggggtctttatttggttgggaaaagccataaacttttcctgcatgcgatctccatttccttttgtgtgtctttcccacgtcaaagttcttccacaaattctcaccacccaatttgtgtctctttgaatctgcaaagtcaacttccttgcttctgaaagtacaatcctggtgatttaacatacatccagatcgctcaggattcattttgctaccaacaatgttctgccat

SEQ ID NO: 12371 - DNA, 556 bp, Gossypium hirsutum
  Clone ID: LIB3829-004-Q6-N6-F6
gatagaatagtagtaaaattcaattaaataatggtgggtgggaaagtaataaattaattggagcatttttaacgtggtatcctaaacgtatatgcagaaaaaaaattattattattatcattataaatacaaccaagaaaatgacgaaaataaaaaagttgcattgtcattgtagcgttgcaggttggaatctcagtgggctctccatactccaatgatggttaaactttttacattcaaaattcgcctttcgtcaccagccagccaccagggccaccctggattgatttttacctcagagagtaggccttatttgagtctccatgccacccccattgaaactgaccattgcctgctaaattttggaagtatggcccccattttcctacataatttctgtatatacatgtgtaggaaaatcgtagacttttgtctctttttacctctcaccggcagtggctatctcgtaaatcgacggggaacacgaggtgtcggcaccaccacatcccgaccagccttaatcaactccagacgttcttttattgttttatcaaac

SEQ ID NO: 12372 - DNA, 522 bp, Gossypium hirsutum
  Clone ID: LIB3829-004-Q6-N6-F7
aatgtatacataaatcctcctttaattcatctgttacacaacagtttcctgctgagtcttgaccaatcaaggagacaagacaagaagagaatgtttactcttccaaaattaattacatgctcttccactttgcaccacaattgactagtttcatatatgcattcttaaaatcttcaaagaacatattctgatcgtctgcgtattttgtgatccaccttaagcatttgtcatcctctacaatggcacggtctgaaggaagtccgatcatgctcgtcataccagcagaagaattccatggcttctccagaagaattttgaagtacgagttatcgaaagcaaccggacttccgaaacctttactgccaagagtatgcgccccagacagagcaactagttcttgtgttgagaagccctttcgtcgaaaacactgcttcaagccagaagcatccagagactcttcaggcatcttaccttcagggtctggctccccagaatctagtcggcctaatgtaactgggattt

SEQ ID NO: 12373 - DNA, 444 bp, Gossypium hirsutum
  Clone ID: LIB3829-004-Q6-N6-F8
gaaggttctaatgagcaaactattttataagcaatcagaaaggatagtacaggaaattcttagtatcctacttgaagaaagcattggaaaatataaacaggatgagaatgagtataaggaagcatctttaagttgaaccattcttgatgtcaggttccttgcatgtctcagggagaaaacacttgcacacaacaaggaaatgatgtccctttctccatttgacttaatcacccatattctctcataccctttctgccaagagcaattcttcatgatcttctcttcttctctccaattcctttacttgctttacgtatggaacaggaacaatgaactccccaacatccatatcaagtgtaaaagagaagcttaaaatacaatttttttccatctttgctttctgcttccaatatttcttattttttgcagcagcctaaacatccc

SEQ ID NO: 12374 - DNA, 530 bp, Gossypium hirsutum
  Clone ID: LIB3829-004-Q6-N6-F9
gaccgataatccatatagtaatatcatataattattaattagaaacacaatccatgacatctcttataattatattaacatatatataatatatgtatgtaatgaagctaatatacattaaaatgaagggtttctaaatcatcagcaatgatccatatccttattatccaatatagatcgaggaacaccctctcgcaagcaatatacaggtggtatcgttagtgtttccaactccccataagcattccaacaaaatgggtccaatactatatctccttgagccggaagtagctcgatatccgacaacgtaatgttcgtacaaggaaccgaatcactgcacccaaaatgcatcggtgggcttcgggtatcgtacgtccctttgatcccttcatagagtatgtccgacacataaacggcagatgtctggttcaagcaatctttagtaaggcaatagaattgatcgattataatcggattcctaacacttatcatatgaatgttgccaaacattatacccgaaaccgccccgg

SEQ ID NO: 12375 - DNA, 571 bp, Gossypium hirsutum
  unsure (1)..(571): unsure at all n locations; Clone ID: LIB3829-004-Q6-N6-G1
aacaggnaaataatgatataataaaaaagcttccatgaaataagtatgacaaggttaaaggggtttacttatcagaatcagaaagagcaaactccttgtaaacatcaagcaaaggaaaagttttggtcaaacgtttgaatgaatcttcagaaatagctttcattctgaagagagcattggccaactccatagcttgagaacgccatccggcaaaaccaatcccttcggtcaacaatacgtaagttgtttcgtttggctgacatcccttctctaccattgccgccaacacttcaatggcatcgtcgattcgatgtactttgcataaaccgagaagaacgatattgtaactgataaccgttggttgaatcttacttcttcccatgtctatcagcaattcaatagcttcatctacgatcccatctctgcacaaacatgagatgagtgaattgtaagtaatctcatcaggacctattcttttatttagcatctccaatatcatttccaaggccttgaatttatcccctgtgctccacagtgcagtgaacattgtgttgtaagaactcacatttgg

SEQ ID NO: 12376 - DNA, 521 bp, Gossypium hirsutum
  Clone ID: LIB3829-004-Q6-N6-G10
gaaacgcaagcttctctttagctgtatagataatggtatttgctttctttttcttttttctgtataaatatcatattagttctcaaatgccccatatcacaaaatggacaaagaaaacccaaatagagaagaaatcaaagagagtaagaatatagtatggtaaattggggtccagatttctgaaccggtgcttcattcccaatacaagcaagcgcatctcctgcatttatgaaacaggagctcctgatcaaacattagcagggaaccggtgttccggccactttggatatgcccgcttgtacaagctcatgcaaacagtatcgtgttgttgaaggcccccattaaatatgcatttcattgcaccatgggtaccaacgggttccttaactcgaccacgacgaccgcacttcgtccacacttcaacaggcttaaaccatctcacatcctctggattatggaacatatatcgcactgtggcttttaacttggatactcgttgaggataaccagttaaaataatc

SEQ ID NO: 12377 - DNA, 523 bp, Gossypium hirsutum
  Clone ID: LIB3829-004-Q6-N6-G11
gaacatcgaagttgacgattcataatagcgtccaaagacaaacttaaaatattaaaacaaagatctaatagcagtaacccatgaaagttcgaaaaccacatagctaataataatcccaaataagcttccacacacattgtttaaagccaaaaaaggccaccaacaacggcaaacaatccttacttagaaaccaccgcgaaggcgaaggacaagatgcagagtagactccttttggatattataatcagccaatgtcctgccatcttcaagttgcttgccagcaaatatgagcctttgctggtctggtgggatcccttccttgtcttgaatctttgccttaacattgtcaatggtgtctgaactttcaacctctagagtgatagtctttccagtaagagtcttaacaaagatctgcatcccaccacgcagccgcaacaccaagtgaagggtagactccttttggatattgtagtcggccaatgtcctaccatcttcgagctgcttgccagcaaagatgagcctt

SEQ ID NO: 12378 - DNA, 514 bp, Gossypium hirsutum
  unsure (1)..(514): unsure at all n locations; Clone ID: LIB3829-004-Q6-N6-G12
gtgggggggggggggggaaaaaaataaatcttggggggacctcaaanatatataatgaaaactactccattgacaagatataaattattaagccttgaaatttgaaggaacctcaaaatatataatgtaaaactactccattgacaatatatgggggggggggggggggatccanacattgatacacaaaatagaaagcacttagatacctttgttaagcattgccctaaccctcattggaagaccatagagccgaataaatccggcagcatcggcttgattatatatgtctccactctcaaaggaggagatatcctctctgtacaagctataagcactggtccggccagttacggaaactgatcctttgtatagcttcaaagtcacgggaaccaggggtggtttcagttatcttctccataaatgcatccatggattcacgaagtggggtcaaacccaccttcccgcataaactaactgcccatacttggagggcgaagtgtaacttttaaac

SEQ ID NO: 12379 - DNA, 533 bp, Gossypium hirsutum
  Clone ID: LIB3829-004-Q6-N6-G2
ttatatatgttctttatttcttgtaaccacaattaggcatgttaaaagcctctgcaaacatcaaaaacttgaatgccaacagaccaaaaaaatgcactctgggcaatacggataagcatgctgaacccacatcatggacctaagattcacctccaaatcgttgcaacgccaggccaggagtgcgagaaggaggagaaatctgagaaattgaaggtgaaaaaggcgatcgagaaaggttacatggacggtgctcggatctacgccgagaacgccattcgttagcgcactgagcagatgaactacctgcgtctcgctttccgacttgatgctgtagttgccaggctcgatacccaggctaagatgaccaccatcaacaagtgctgggaaatatcggcaagtctgcttgaatcttgcttggccaccggcaatttgcagaaaatgttagaaacaatggataaattcgagaagcacgttgtgaatatggaggtccaggcagagtttatggagagtgctatgggtgggtctacttcatt

SEQ ID NO: 12380 - DNA, 589 bp, Gossypium hirsutum
  unsure (1)..(589): unsure at all n locations; Clone ID: LIB3829-004-Q6-N6-G3
cttcagccgtcccttgtatagaacttaccttacctccactacggcgcacgttagctacatcccacggtgcatgttagcaactaccacctccacttttttttccctcccttttttatcagctcccagccgccactagcgacggaccccccccacaaaaaaattatattttaatcataacaatttggagggccatgattgaatcaaatcaccttaaccattcaccatccgaatcttccgggtcgggcatcttgttcaaatcaacccgatttaaaaacccaccattactgggctttaactcatcgccatagtcaccaccattatagctatgaccatgatgatgatgatgatgatgggctgctgctgcttcaagagcatcaactctagcaccaacttcaatagctttcttccttatagaagccgcagacaaatcgccgccgccgccgcatccgattttctctcccgtcaaaaggtcagggaaattcaacctagcagacggcccacgcaagtaaaaaaccgccgtgtcgtaagccctagccgccgcaacaggtgtntgaataagaccctaaccaaatcctcgaccgcttgttgg

SEQ ID NO: 12381 - DNA, 561 bp, Gossypium hirsutum
  Clone ID: LIB3829-004-Q6-N6-G4
gaaacataataccattatcgaactttaatatacaagaataatcaatcattaacacaattgactggtagatatcatcaggtctagataacaagcatccatgtacaacccataatgaatagcacataaacatggcaaagtatggaagataaaacttcgaccgcagaagtattgcgtaagctacttagaagatacaggaaggaaaccgtccaatgcctaagagcaacaagtggcactagcactccgttctgcaggtctatccatgagaaccattccagcaggattttgtgctggctgcactcgaggtaatcttttggctatttcgtagaaaatctcattgacattggatgctgtctttgcagatgtttccttgaagaaaagaccattctcctgagcataagtttgtgcttcctctgctgccaccttccttgcatctagtaaatcaactttgttcccagcaagtgccattaccataccaggattgccttgtgcttgaagttcttggacccattttttggctctctcaaatgatgcttgatttgtaatatcatacacaatgatagc

SEQ ID NO: 12382 - DNA, 542 bp, Gossypium hirsutum
  Clone ID: LIB3829-004-Q6-N6-G5
ccgaatcaagggctaaataataacatggtaaatgttaatttgtttcgacaactcacatttaataggagaataatattgaggagaaaaaactgatcagcatccttcatgttcatattatccggcactacttgtccgtaagttctggctttcatttctactcttttcttgatcgcttcttccacagacggatatgtgagcaacttcatcagccaatcccttcctgttctctaattgcagctcgataagcatccggagatgcctggtatttacattctgccacaaattttccataatgcattctcttcgaaagagcctgcaaacatacagtgtcacaaacggcagtagatccacaattcccatcatctcctgcctttactaatctgggaataagatttctgaagtacatttgccacacttttggatttatgtttattgaatcagcagcgggatgtagtacctgtggatattgcaaaggtggcaacaagggctcaggtaattcatcagggaagaaaggatgctcatccgggctcctgtacctgcca

SEQ ID NO: 12383 - DNA, 564 bp, Gossypium hirsutum
  Clone ID: LIB3829-004-Q6-N6-G6
ggttgaaaaggagaaacttggtgaagattaaacgttatagtagctcatcttcctatggctattggagtttagaagtggtgaaatgaaatacagttgttgtgattggttcctcataaaatgaagtcagccacttaacttaaatcaactcaaactccgtttcgtatgcgttccaagctagatttcccattgagcatgctaccttgttgaagctccaaatattccttatatttcatagctccatatgctggtggattccccacaatttccaccaactttggagctgggctaacaatggcatccaatgctggtccgtggggcaccgctatggatatccttacatccctgttgttgaccacagctcgatggaggacacttttgtactttccgttgctcaaaatctcaatatggtcgccaatgttggctagaaatgaattggggatagggtctatattcacccatttgcctttgtgttgtacttgaagtccccctatttggttttggattaagagggtcaaaagaccatggtccgaatgtggaggcaaccccattgccagctccggctgt

SEQ ID NO: 12384 - DNA, 492 bp, Gossypium hirsutum
  Clone ID: LIB3829-004-Q6-N6-G7
aggaagaaatgaagtgggaaattttattttcatctattactgatacccgagtatataatagaccacaagcatcaaatgtgggaaacatgacatacattactcgctagaaaataaatagaaacgggtttcaccacaaaaaaaaagtggaaatgaaataaaattaacacaacatagtggaagacgaaacagtgctaacacaataaccagcagtagggtaaaagttttaggcaaggatttcctccaatggcttggcttcaagcttgggcttttcattctcagcctttttctccttcaactggtgctgctctttggccagctttttcagcctggcaagctcaagaaccttgctcatcttcctcctatacatctcaacaaatgtgatgggctcctcaaggattggtttatctccctctctgatcttcaatggatacactggggcatcgggtgctggattttggaacgtggctattgacaatctgctgcagtctgagt

SEQ ID NO: 12385 - DNA, 515 bp, Gossypium hirsutum
  Clone ID: LIB3829-004-Q6-N6-G8
atggattctatgctgtttatattctagaaactgaagttaaattcaacttataattaattaaacaggtaataaactatattccccgtgtcttaaaagtagcgcgtaaatcgaccttcatatttgaaaaatacaattgataacacctgaaaaaccgcaaaacaacgttgattcgctatttctaacaaactacccgccttttatcatctccctctcctcctgtcttacattcaaatccatggaagatcgtttttgttcttcccttcttaccctaaaatagaggcagggaaagagatttatcccttaccttagtaaaaatagataaaagaaccatacccatgtttaagcgcatccacggggagcaaacccgatccgagaacccgctgaatcaaaagccacccggaaactttgctgctgaatgtttccaattatggacaaaccactcatggtacccgcgaaagcaaagcaaaaggttccgctgctgtctactggaatcaaataattcgtcgccggcaatg

SEQ ID NO: 12386 - DNA, 438 bp, Gossypium hirsutum
  Clone ID: LIB3829-004-Q6-N6-G9
caatcacacaggaaaacctcaatttgattccaaacggtatttgagctaaccagctactgtgatatgacaatatcaaggctaagggggaataaacgaacaaaataagagatcacggccccaaaaaaaaaaaaaatctgtacagatatcagcagcctaaattccatgcaccgcttactggcaggatcaaaacatcgtttttacgaaccgagtaaactgctgctgggattaaaaagaacctacgggcccccaaaaagctgtgaagttaatgaactgccacgatatgtagcaaaagcaaaaatctacgcccacagctttcctgttggaacctctccacttgatcggtcaatggcaactccaggccacccgtttccagggaaaacggtgtctattctcacgcattcatcagctccaaaaaaatggcgctgtctaatttcattc

SEQ ID NO: 12387 - DNA, 439 bp, Gossypium hirsutum
  Clone ID: LIB3829-004-Q6-N6-H1
aaaagtcctttagggggtttactaaatgtttcccaggagggcaatttggttttctccccagggttttgcaaaattaaggggggaaaaggggtttccgactttacaaaaacccccccggggttttaaatcccacttttccaactttgcccataagatttttaattttggggggccatggtggcgcccccgggcctcgacatatttttaggggaacccctaccaagggggggaccttggggggaaccaaacggggacagggttggtttaattttcacattgccctggttttgggctgaacacagtttattcccttgccccgaaaaaaaaactggaaatttccgggtataaaatctgtatttctgaaaaggggttttcacttaataatgggggggaaccaaaactggacaaagatctttaatcgggttaggaggggcccctt

SEQ ID NO: 12388 - DNA, 364 bp, Gossypium hirsutum
  unsure (1)..(364): unsure at all n locations; Clone ID: LIB3829-004-Q6-N6-H10
gggggggggggtaaaaaaaagaataggggggagaatatatatnattngatttgaactttgnattacaatagtacatatatagattttatatatataaggagagtgtgtttttttttttttttttaattggnggttgaaaaaattgagagggggggggggggggaactatnctncaaatgccactaatagagaaggggaggttgaagggaatatttaatcaacccaggatccaattgaagtactagttggaaggtgtgattttggaggggtttttattagaatttatatgaaacaaggataaggaaatgtaagtggaagggtgaggtgttttaacagtacagaaagggttgaaaggaatgggagt

SEQ ID NO: 12389 - DNA, 487 bp, Gossypium hirsutum
  unsure (1)..(487): unsure at all n locations; Clone ID: LIB3829-004-Q6-N6-H11
ggggggggggtttttttttttttttttttggggacaaaaacattgcataagattcctaagcagtaatatttgtgcatgaatgagtatcaccatgttttaatcacatgcaaaatcaattctctatgctgaaaaaaaaaaaaaaaaaagggggggggggtgctgcatggagtanttgtatccatgtcaatttcagatccattcattttttcattgagaaaacgggtgaaagcttcttctccaactccaataagatctcgtatttgcgcaaagcctcgttccgtttagctatgtagaggtcgctatctttaggtatattgttcaaaggattgtttggcactggtgctggtttttttgccactacatccttccgaactttcaaaacactttctttattcaagggctgcgatccaaccttcttttccctcctctttaatatctttaaatggcacttttttatgtattgcatcaaatgataccccgaatgcct

SEQ ID NO: 12390 - DNA, 589 bp, Gossypium hirsutum
  Clone ID: LIB3829-004-Q6-N6-H2
gggagggggaattatccggtaaatattcagtatgcagcgcctataaactattacaagatgctaatctggggtctgaaactaaggaattttacagaaaattatggagcctaaaactatccccaaaaattgcaatcactatctggcgaatttcctgggatttcattcctaatctagctaatcttaggtatagaagagttgcaacaaatgatagatgtccccgatgctgttcttggacagaaaatagtctccatatcttccgagattgtcctgggtattcaagggaggaactgatgatcaaagccgacttttttgttacgccttatggttaatatggttctccagaaataagtttgtgcatgaaagggaaaagacaacaggaagaattttagcacaaaatatacaggggcacatggcagaatatgaaggagtacgagcaatgacgaataccagtacaatgagaagaaatcacaaattccaggaggacataccgagagtcacgatcttctttgatgcagcgtttgacagcagaaacaacagatcagcaacaggtctggtggctcgggatctgaggggggaattactggtactc

SEQ ID NO: 12391 - DNA, 543 bp, Gossypium hirsutum
  Clone ID: LIB3829-004-Q6-N6-H3
aaaactcattcattcaatttcagctgtctcggcaataatttggctgcaaactggagtactatttcacaaagcccaccaatggatacaacaatatatttctatgtttcacatggtagaaaccaagatatgtgtgctttccttattcgcatacagaatgagcgagttcaatcttccatctctttcatgatgcataccacgataatgcttgtaggtacaaatactactttagcttcattctcgagtgattttagttcttttggccgtaggggacatgaaaagctttctaactgaggcaatgggatcatcaaccttaatcatggagacggttgaagtagaatacacaggtgaagaatgaggaaaatctttcccataaagcaaagcagataatgtttgttgccatccaggtgccccaccactcattggtgcaatccatggacaaaaatgcctgtgctgcctgatcggatcaaactctgatattttatccatatgtagtcgctttagatcctttcctttgggacaggataagaccttattgttttgtac

SEQ ID NO: 12392 - DNA, 554 bp, Gossypium hirsutum
  unsure (1)..(554): unsure at all n locations; Clone ID: LIB3829-004-Q6-N6-H4
cgcaacacaaaacaanagctttatataccaattatatcatacaaagtggaaacaaagccagaaccaaaacatgcgagtacatgttatatatgactacaattcatcatcatcatcaaccccccaacatattttacaatgtaccccaacaaaccctcgtaggccgccaccactagtggtggtgatgctcacactccacaggcatgacagggaacctagcaatgtcggtacaatagtcatacaccaagtggttggccctcacccacaccagctggtggctctggtgcacgcttagctccgacattgtcggttcatcccaccagaacctcttctcgccgctgctcctacatttatcggcaatttcattggcggctaccgaaaccgggcactcgcacgcgtcgatttcaaaccctttgtaggaggcaatgaatggtgcatggctccaatcggtcttcactaggccaccctgtgtggcccagtcatcggcattccatattgaactatatacgcccatggcttggtctttgggaaaaggaatccctttgtgttccatgttg

SEQ ID NO: 12393 - DNA, 415 bp, Gossypium hirsutum
  Clone ID: LIB3829-004-Q6-N6-H5
cgcaaggcatcatcgttgaaatgcggaaacacgatctcaacattttttgccgaataaagtacgaatccaacataccaaatgcatttttccaaacataccacaaagaggcgagggaatctttacattattggatgtagagcaggggccaaattaaccatttgagagattattatgatggttaagtccttaataacaaacatggtggggcatgaagggcttgacgttcttcctgtctgtgagctcttattactaccacctatccctttgtggtgccactccttgatgaactgtggttgcgtatggtatcatgatacaatactttgataactagaagccgcctcctttgctgccttaggtgtggccttgccgcaaaataactccctagaagggtagaagcattatttgggcatccctg

SEQ ID NO: 12394 - DNA, 458 bp, Gossypium hirsutum
  Clone ID: LIB3829-004-Q6-N6-H6
ggggggtatgaatggcaaatcaatttcggataaaatctaatatgggtatatatgagggctcattctcacccacccacaaggctttttagcatagggtttacatcccgggtatgggtttttttttacaagaatcccgagaaaaacccaaaatcccataaggcccaaaagggaaccaccaaattggaaaatggggattctttttagggacctggcagcctgcatttcatgccttctcaacctggggctactacttcccgtcagggaataccagtttgggtaagtgtataaactttctgaattcccgaatacccttgcatataccatttccccaaacaaccccactaccggatgatggaatcccgtcaccccggggccccccaggttaaacaatggggggacccatgaaccctcttccttgtaagcatggcggttgtagctttccttctgggaaggatttc

SEQ ID NO: 12395 - DNA, 324 bp, Gossypium hirsutum
  Clone ID: LIB3829-004-Q6-N6-H7
gttggatgcactttatattgaaggcatacaaaaataaaatgaaaataatacttaaaggctacaaccttaagaactgctaccccatttaaaataatgaataggaggggaagtaggagaggagaacaagttcatcttcaaccttatactattaaaaatactcgagaaactaagtaaaaaaaccaacatcagagctctgagaggcaaagaaagagcaaaaattgggaagaccttaaaacctcttatcagtcgactattggaaacaacatagagtcactgctacatgaactgggcctaaaactggagctgaaatgatagcctcctcaa

SEQ ID NO: 12396 - DNA, 462 bp, Gossypium hirsutum
  Clone ID: LIB3829-004-Q6-N6-H8
ggggggttttttttttttatcaaactcccgtatattaaatccacttctcttgcaatatatccaaaaattgcgcataaacggattctttttttggggccaaatttacccttaacaaatccagaaatttaatttaaccctaaaaggttgcgctcgttcaatgaggtgtctgtaactgcggctcccaatggcgacttaccaacttggatctcggacgaatcgtaacgtctgaacagttccactacgaaaagccgagacaccagcaccacgaaatccttgccggcacactgtttgttcgccgtcgttggatcttgagtctgggggccattccaccaaggcacgtgctttaacaggctaccttcatggtcacccatgaacctgtttgggacaaattccttcggattctacaatattttcggggtcttttgttgcaaaagggtggtaggcgtacaacatgtgccctgc

SEQ ID NO: 12397 - DNA, 537 bp, Gossypium hirsutum
  Clone ID: LIB3829-004-Q6-N6-H9
ggggggggggtttatgaaaataataatatatatgatatcaaatttagctcaagcttcaaacacgaaagcttgagccaagctttgagtctcgaatttcaagtctaactcgagcttttgagcttggttcaattgcatcatacatgaagggggggggggggcactaaaggataattaacacataaaaacaaagactaactgaaaagtacaaaaattaaatccacaatccacaacttattcataataaggactaataacgaaatttgacccttaacaatagaatcaccatagctgaaaaaatcactcactcaacatcataccctttctcttgaagctctgaaataacttcattcctcatcctaagccaaagcttcatcgcttcctgttcgaacttcttgttctgcatctctttctgataattaaccgaatctttatcgggttctattatccctttcggcccaatcgtagttccaatcatgcctcccttagcaacgaactcttccatagcctcagcatcaccggggtacggaaactctcgcc

SEQ ID NO: 12398 - DNA, 470 bp, Gossypium hirsutum
  unsure (1)..(470): unsure at all n locations; Clone ID: LIB3829-005-Q6-K6-A1
ccgtccgctaaaagtccaaatctggcaagatttctgttgtttgtccattgctgtatgctttgattcctaaaacttgcttttatataaaatcaaaacaattatggactaagtgatttttctccattcaccgttctttccttgttatgggttggcgggaaagaaaatggtnnattgaagttagttctatcttatctataaatttgcatcattgatgatgtgacttatataactttccaggttttccatggccaacctatgcaagcaactgtttctgcagcaccacatccaccgacaatgcgtccaagggtgcgcgctagacgaggacaggccacggatcctcacagcattgctgaacgggtatccttaatttattataaataaccatgccaaacatgggaataagtttaatttattgaatgtcagtaatccagatttgtgtttctggtctagagtcaaaatgcatgagtaag

SEQ ID NO: 12399 - DNA, 552 bp, Gossypium hirsutum
  unsure (1)..(552): unsure at all n locations; Clone ID: LIB3829-005-Q6-K6-A10
cggacgcgtgggttttttttttttttatttttctgaaaggaaagacatatattgatgaatggtttacacactagatatgctttcactgatatccagtccatcaatgtgtttaaccagttgtagaatataaatgtcagagtaggatacacatcagatggaaaatgtttaaaactgccatctacaatgtcattgcttcttttatttcagtgttaaaacagagtatcttccttgcttcttttatttcagtgttaaaatagagtatcttccttatttgtgttgcatacttactgtggcattcgaacatctcagtttggtgaagttcttgacaccgtcatcagggctccaaggatactggcaccattatcctattgatatggaatttcgaccacaacacatcttcaccaggttcgtgtatgctgaactcgggctcaacaagcctgtcacaaaaacggcaacgcagagaatctgaaacggcagcagatgaagaatcgatcttgggaggtggaaaagacaaatcctcagggaagaaaagnttgcaattgttacaatgca

SEQ ID NO: 12400 - DNA, 583 bp, Gossypium hirsutum
  Clone ID: LIB3829-005-Q6-K6-A11
cgcgctctctctctctctgtctaatttaacactcttccaccaaacgcttcgataaccaaccctctctgaatttcatttcccttttccccattttgccccttcccttcattgtcgattccccctctctctctctctcttctcttccaatggagtcctgcgctgctctccgctcctttcactattctgtaagtgctgtttcacaagcttgttgcacgcttgaaaggcccagtacatttcatatgtcttctagttgctggccaaattcaagaaaatcatgtgttccaggcttgatgtttggagggaagaacaattcttctacaagacgaactgtagttttagcatcctctgcaaagacgcctgaagctatggcaacagcaaagtcaaatgttggaccggagagcaccaagaaaggctcattggagaagaaaacttcacggaatgcaacttttccaaatggatttgaggcattgattctggaggtgtgtgatgaaactgaggttgcggagccgaaaatgaagattggggacttcgaaatgcatctgaagcggaatgttggtgccataaaagctcccatgtctaacat

SEQ ID NO: 12401 - DNA, 567 bp, Gossypium hirsutum
  unsure (1)..(567): unsure at all n locations; Clone ID: LIB3829-005-Q6-K6-A12
cggccgcgtgggcggacgcgtgggtttgaatctagggatttgcgggtgngagaagacgagagctcatctctctgcttcaaagctcctgtccgggtagaattctcttcttcctttgcgttgtgttctttgttgttcaatcgccatggcttcaaagcggattttgaaggaactcaaggatttgcagaaagatccacccacttcttgtagtgctggtccagtagctgaagacatgtttcattggcaagcaacaatcatgggaccctcagatagcccttatgctggaggtgtgtttttagttactatccatttccctccagattatcctttcaagcctcctaaggttgcgtttaggaccaaggtcttccatcccaacatcaacagcaatggaagcatttgtcttgatatcctcaaagaacaatggagccctgcactaaccatttccaaggttctgctctcaatctgctcgttgctgaccgatccaaaccctgatgaccctcttgttccggagattgctcacatgtataagaccgatcgggccaagtatgaagccactgctcgtagctggac

SEQ ID NO: 12402 - DNA, 541 bp, Gossypium hirsutum
  unsure (1)..(541): unsure at all n locations; Clone ID: LIB3829-005-Q6-K6-A2
cccacgccgtccgaagaagtcatggacaaggcctccaattcagatggaatttcaggttccaatgtttacagcctccggtttacgtgtccggtttcttaaggtctggngaaaagagtgggtataacacagttgaatgggttcgctatattacaaaggctggttcatatgagatcaggtgctagaaaacatgggatcgctactccgagattgtatgagagaatgagaatattaacaagcacgagtttggatttccttccttaaggatgcagctaccgttatactttcatgaattattaggcattttgttttccccttcatagtggagtttttgttaatatgattacgtgagtatttggtgggttattttctattgtaaaggctagcccttttttcacaaagctgtattatttgtttgcaaattgcatattgtcgcacgttttgttgtaacggttacatggtcggttttaaaacaagtatgaatgggacagctgaaatctggaagtttgcattttggaatgaattgggttgatctgattctgat

SEQ ID NO: 12403 - DNA, 611 bp, Gossypium hirsutum
  unsure (1)..(611): unsure at all n locations; Clone ID: LIB3829-005-Q6-K6-A3
cngacatggtgacaatccctttctttgtcctaaacatcctccttttcctctccagctccgcggctacaccaaagagcggtgcagatcacgacctggtccgttcatcatgtgtccacgccagctatccaagcctctgttttcgcaccctttcttcctactccggcccagccaacaccccacgtgagttagcccaagccgccgtaaaagtcagcctgtcccgtgcccgtaaagtgtcgaactacttgtcgacgagtgtgacggggtacaacaagagggaacgagtcgcactgagtgactgcgtggagcaaatagatgagtcgatggaggagttgagcaagacattaggggagttgaagcacttgagaggggagacgttcgagtttcagatgagtaatgcgcggacatgggtgagtgcggcgctgacgaatgaggacacgtgtcttgatgggttcgaaggagttgacggcaaggttaaatctaatgtgaagaggaagatcacgaatgtggctaaagttaccagtaatgctctgtacatgatcaataggctcaatgaaagtcgtggtaggcaccgttgaatctttgatgatgatgatgatgaataatggatggtt

SEQ ID NO: 12404 - DNA, 571 bp, Gossypium hirsutum
  unsure (1)..(571): unsure at all n locations; Clone ID: LIB3829-005-Q6-K6-A4
tcgnaaatccaagtcctccctcttctttaaaagaacatatatccttccatgcacactagtgaatgcccttcttgcccctgtgttttgccaccaaaattttggtattaatccttccgattcgatacatagggattttggaagtaaaaagcaagtcattgaataagttggaatggattgcaaaatggctttaataaaaacctctttcctccttaagaaatatattttatgctccaattctctattcgtactcgtactcgtactctatctttcaaattatggaaagactatttctttctccttcccaccaaattaggcaagcctaaatatcgttctggatctgttgaactccgaactccaatcattttggtgatcattcttttttccctctcttgcgtgttagcgctaaagaaatggtagacttcgagtaattcacactttgccccgaacagatttcatattgaagaatctgcttaactgaacttgcacccctttctgtagcctttacaaacagaatacaatcatccacgaataataaatgaaagacctgtggaccactcctacttttcttaac

SEQ ID NO: 12405 - DNA, 581 bp, Gossypium hirsutum
  Clone ID: LIB3829-005-Q6-K6-A5
ggaaagggtcaagaatggactggtcctggagccagaagctcacacgccataaccattgtgggacaaaaggcgtatgtctttggaggtgagttcaccccaagagtcccggttgacaacaagctctacgtatttgatctcaataacttaacatggtctgttgccgatgtaactggcgatgtgccgcctccacgtgttggtgtcacaatggccactgttagtgaaaccatctatgtatttggtggtagggattctgcacacaaggagcttgatgagttatattcttttgatacttgtacaaacaagtgggtcttactttctaacggtgacagtggcccggctcatcggagctaccactccatgacagctgatgaccgacatgtttatttctttggagggtgtggtgtttctggccggcttaacgatctatgggcttacgatgttgcttgccaaaaatggatcaaatatccaaccccgggagacggttgcaagggaagaggtggccccggactggctgtcgtccaagggaaaatatgggtggtttatggcttctctggagtggaaatggatgatgtgcattgctt

SEQ ID NO: 12406 - DNA, 509 bp, Gossypium hirsutum
  unsure (1)..(509): unsure at all n locations; Clone ID: LIB3829-005-Q6-K6-A6
aaaaatttccaagnatgccttaagcttattccacacgataagttttcttttgcaaagtctggcttcttactgcacagtttgaaatagacactcaatctcaaggtgcgcggcaaattttgggaattactattggaaaggcacctaaagatctttaagaagtatattgaaattgagctgcaacttggtaatattgactgttgccaaaaactgtatgagaagtatctagagtgggcacctgagaattgcaatgcatggagcaaatatgctgagtttgaaagatcattagctaaaacagagtaggcaaaagctattttttagtttgccatcttagatatttgttttcttattgtaagaatatttttaacattgtaacttttaatattattgtaagaatattttgaattatacttcagttatcaatttatattatatatctttcgttgaaaaaaaaaaaaaaaaaaaaaaaaaaaaaaaaaaaaaaaaaaaaaaaaaaaaaaaaaaaaanaaaa

SEQ ID NO: 12407 - DNA, 625 bp, Gossypium hirsutum
  unsure (1)..(625): unsure at all n locations; Clone ID: LIB3829-005-Q6-K6-A7
taatactgcaaagctgtcctttctttggaatccttatacaaatgggctttgagtggcactccactgcagaatcgtgttggagaactgtactctttggttcgcttcttgcaaatagttccatactcctattacttgtgcaaagattgtgactgcaaaactcttgattatagttcatcaacacaatgcccaaactgcccccataattctgtgaggcatttttgttggtggaataagtatgtggctacgccaatacaacattatggaaatggtgagatcgggaaaagagctatgatattgctaaaacacaaaattttgaagaacattgtcctaaggcgtaccaagaaaggcagggctgctgatcttgctcttcctcctagaattatttccttgagacgggacaccatggacattaaagaaaccgactattatgaatctttgtacagtgaaagtcaggcacaatttaacacatatgttcaagcaggaactgtaatgaacaattatgctcacatttttgacctcctcacacgcttgcggcaggctgttgatcacccttaccttgtagtatattcgagtactgctgcacanagagctgggaacatagtcaatggtgatagggatgatgatg

SEQ ID NO: 12408 - DNA, 568 bp, Gossypium hirsutum
  unsure (1)..(568): unsure at all n locations; Clone ID: LIB3829-005-Q6-K6-A8
ccgcacccaaggggaaccganagccgaatcagatgcatcatgttgttagaaatactatggcaatgcaaggaggggcgaaattgccacaaaagcctagtaataaccatgttaggagtaatagtcagggcaatgtcatcgccaagcaagctcaccagctcagttatcagtatcaccagaatggtctgattacaggggcgagtacgaagggaagggaatcggaagatcctgcaaccaagtcttctatgaaagcaatggcagctagagccttatggcatcttgcaaaggagaattcgcttatctgcaagagtataactgagtccagagcattgctatgttttgctgttttgcttgaaaaaggaactgaagaagtgcggtttaattcagctatggcattgatggagattacagctgtggcagagcaggatcctgatttgagaaggtctgctttcaagcccaactctcatgcttgtaagctcatcgtggaccagctgttgaagatcactgagcaggccgattcagagctgctgattccttgtatcaaggctatcggaaattttgctaggacgtt

SEQ ID NO: 12409 - DNA, 569 bp, Gossypium hirsutum
  unsure (1)..(569): unsure at all n locations; Clone ID: LIB3829-005-Q6-K6-A9
gcactggaaattganagaagtttcgtttgccaaacacctgcgagaaattgctgcacttcacctcggcaagctcggagctaagctcactaagctcactaaagatcaagctgattacattagtgtgcctgttgaaggtccttacaagcctcctcattacaggtactgagagaagagttgatgagtttttatcaagaaagaaaaaacatccggatggtttgattgtttcttgttttactgaaatttcatgatggttaggtttttgttttatttttagagttttttttgtgtttgggtgatgggaaagtgcctgggggtgggaaaatgatgtgggatttggtatcttcttgtatgaagatgaccaaatgggtttgaaataaaaatgttagggatgtgtggaagattatatagtatttgccattaatgcagtcttgttttgctgcnnaaaaaaaaaaaaaaaaaaaaaaatataaaaaacaaacaaaaaacaaaaaacaaaaaaaaaatataaaaaaatatatactaaaattaaataaaaaaaaaaaaaaaaacaaaaaggggccgcccttttt

SEQ ID NO: 12410 - DNA, 582 bp, Gossypium hirsutum
  Clone ID: LIB3829-005-Q6-K6-B1
gcgggcgcccgcgatctagaacaaccttcagcacacgacattttcgtgggtaactgggaaaccaaccaagaatgacacagaggaaaacggggtcctacttttggctccaccatgaacgttctctacggagattacacttgcgggcaaggcgatatcgatcccatgaacatcatcatctcccattaccttcattaccttgacttactaggtgttgggcgagaggaagcagggccacacgaggagctaagctgtgccgagcagaaagcattcaacccaaccccagctccacctgctgccagtgcttcctgatctttgggtcagccaatttcattgttaaaatgcagttgtcaatgaagggtaatttaataagagagctgggcaattaggttgttgtaaaatcatggtctatgtcggtgtgagaaaagggcccatcaatttcatgatattatatataggtgtatacgtttgattcgctgctgttaggtggtctttataatgtgcttttctgtgtgtgtgtagattttgatatatttgatgcttgctgtgctgcccacgacattcatataaaattgtatgtattga

SEQ ID NO: 12411 - DNA, 609 bp, Gossypium hirsutum
  Clone ID: LIB3829-005-Q6-K6-B10
cggccgcgtgggggggtgcttaattacttgcaagcatttgtggagaagtcaaatattattcagatattggagcaggagaaggagggtcttgagcaatttactgctactgatggatatgattacagtggtggaagcaatgtgttgaaggtgttggggtacttcagtatggtgggtttgttgcgagttcattgtcttttgggtgattaccaaaccgggttgaagtgcttgcttcctattgacatcagtcaacaaggtgtttacaccagtgttataggaagtcatattgcaaccatatatcattatggttttgccaatcttatgttgcggaggtatgtggaggctatttgtgaattcaataagatgctcctgtatatttacaagacaaagcaatatcatcagaaatctccacagtatgaacaaatattgaaaaagaatgaacagatgtatgccttgctggcgatttgtctttcactttgtccccaagtgaaacttgttgatgagactgtgaactctcagctgcgagagaaatatggtgaaaagatggctaggatgcaaagatatgatgatgaagcttttatcatctatgatgagctcttctcatatgcatgt

SEQ ID NO: 12412 - DNA, 581 bp, Gossypium hirsutum
  unsure (1)..(581): unsure at all n locations; Clone ID: LIB3829-005-Q6-K6-B11
gactcaggggtaatcaatggggagaggaggttnatatcaggatggaaagaaatctagccaatacagcaacaggcaaatgtggaattgcaattgaggcctcttatcctatcaaaaaggtcaaaatccccctaatcctggcccctctcctccatctccaataaagcctcctactgtttgcgataattattacagctgtcccgaaagcaatacctgctgctgtgtctacgagtactatggctactgctttgcttgggggtgctgcccacttgaggctgccacttgctgtgacgaccactacagctgctgtcctcatgactatcctatctgcaacttaaatgaaggcacctgcttgatgagcaagggtaacccaatggcagtgaaggcactgaggcgcactcctgctacgcctttctgggcccatggaagtgttggcgtaaagaacaatgcttaaggagaagcctgggattttatgcagaaaatgatactacagggagaagggaacagtgcttgaccgatctcctctgttttgtcatactgcaatcctttctttcattctcatttcagcagatggatggtttata

SEQ ID NO: 12413 - DNA, 572 bp, Gossypium hirsutum
  unsure (1)..(572): unsure at all n locations; Clone ID: LIB3829-005-Q6-K6-B12
cctcgccagtaatacctgcgacgcgtctccttctatcaaatagccacaccgtttggagagatagcttttcaaagattttctagatatcagctatcataacttcttatttcctcatttcaaaaacaaaatcaatctggttctcctctccatctaccttccggatctgtctcgctggnacgccgggtgttccctcttcaactacgaatgaggaggagatattttcatggagagtcgtctttgaagcttgaaacaccctcatccggtcccgcaccactattccggaaggccgatcgaaaatttctcccgtcaaaggctgtatcaaatagttacgttgatctcgatgtctcttctgtttggctatgggtgttttcaggaatagaggcaagtttttttatctctaatcccctctagttcagctagataacttctgattttctcaactagatcccatactgaaatggatttcctttcatgaacaaactggttcattgagttccatatgagccacaatgcgcaacaaaagatcctacactgttcattggtacctcttacaaaaaaccaggacactgtct

SEQ ID NO: 12414 - DNA, 614 bp, Gossypium hirsutum
  unsure (1)..(614): unsure at all n locations; Clone ID: LIB3829-005-Q6-K6-B2
ttttggnattttggccgtgaggaggtcattgaatttgggattgaatatttcttgcaagcgttcagttaggtcaattagaatggagaatggtaataattgtaacctgatgggtgcaagcaatgaatctagaggtgccttggtagtttttgaaggattggatcgtagtggtaaaacttcacaatgtgggaagctgctttcgtatttagagggtatggggcattcagtcgagttatggcgattccccgacagaactacaagcgttgggcagatgatatcggcatatctgactaataaatcccagttggatgaccacacaatccatctacttttcagtgcaaatcggtgggagaagagatcaatgatggaagcaaaactgaaagctggaaccacccttatagtagaccgttactcttattctggagtcgctttctcatctgctaaaggacttgatttcgaatggtgtaaggcaccagagaatgggctaatagctccagatctggtagtgtaccttgatataccgcccgagaaagctgcagaaagaggaggctacggaggtgagagatacgagcagctcgagtttcagaagaaagttgcacaacactataagcttcttg

SEQ ID NO: 12415 - DNA, 634 bp, Gossypium hirsutum
  unsure (1)..(634): unsure at all n locations; Clone ID: LIB3829-005-Q6-K6-B3
gnaacttttaatccttttggcaacctcactcttgatttactcgctcatagttttactcaaagtcctgtatgactactggtgggtgcctctccgtatacaacacttcttgaattcacaaggacttaaagggcctccttacaagttcatccatggatgcaacaaacaaattaacaaaatgagaagtgaagcattaagcaaacctatggggctgacacatgacatacttcccagagttttccctcattattactcctggatcaacttatacggaaagaactatctttcttgggacggtgttcaagctcaggtggtgactactgacccagaactaataaaagaggttcttaaaaatagtgaacaaacttttcggaaaagggaacccccgatctatgttggcaggctattgggggatgggcttgttacaactgaaggagaaaaatgggcgaagaagaggaagttggccaactatgctttccattggggagagtttaaagaacatgactccagcagtaattgccagcgttgaaacaatgctagacaagtggaaagacaaagaaggaaaagagatcgaagcattccaagaatttagaatcttgacttcagaagtcatatcaagaacagctttntgtagcag

SEQ ID NO: 12416 - DNA, 595 bp, Gossypium hirsutum
  unsure (1)..(595): unsure at all n locations; Clone ID: LIB3829-005-Q6-K6-B4
ccccgcgtccgctattatttaaatttatttctttagtcttttaaaaaaaaaataagtgaatttctgcaaacaatccttctcccttattttgtaacactagaattcatagtgaaatatacctgaattttgttactagatgatggatcaaaatgagagcctccagcttggcgagctcgttgcctggacaagcatgaacaccgttgccaaacggcatgaaggtatttggttttggagctacctgcttaaatccatttccaggaaagcaaaaataaggcagcccatgagtccaaggcagaaagagctatgtgttcaatatcaggaattagcttcctgatggtatcaggtgctagtgagtattgaaccaacttccttagccgagtgtggtattcaccctggtgaaagaagagcgcccaagggccaatcatcatctccttgcttttggggtaagttggtttgaacaagtgagcatgagtcaccagcacgaacctcgcggcttcagggctagccaacatgacacaaggacaaccgagtattttgcgtttttgaatatttctccgtatctgaacatcacanagagaaacaaacaatggcagca

SEQ ID NO: 12417 - DNA, 597 bp, Gossypium hirsutum
  Clone ID: LIB3829-005-Q6-K6-B5
gttgaagtagtaatatctatagaagacggagatggagaggcaaagaagcaagcaggttcgtttgttgatgtgggttttggttgctgccttgttctcccacaacatggtcattgcagtgacctccactggccttggagagcagaaaattactatccagttcctgaccctcatgctggaactcccccttcaggttcacatggcacaccaccatcttcaggaggtggaacacctccctctcatggaaccccatcacatggaggtggttaccacccttcaccaacaccatcaacgccttcgggtggaaattgtggaactccaccacatgacccttcaactccatcaacaccatcacacactccttcgcatggtactccaccatcatctggaggtggtagtcccccatcgtatggaggaggcagtcccccatcgtatggaggaggcagtcccccatcatacggaggtggcagtcccccatcatacggaggtggcagtcccccatcatatggaggtggcagtccaactactcctattgatccaggaactccaagcattccctcacctccattctttcctgctccaactccaccaattggtggt

SEQ ID NO: 12418 - DNA, 567 bp, Gossypium hirsutum
  unsure (1)..(567): unsure at all n locations; Clone ID: LIB3829-005-Q6-K6-B6
ggacgtaattataaatatatatataatggcagtcatagctgtttttcattttttgttgcattgaacaaggttgttaaccatggggtttcagagaagtattgaatgacacaatgaatgtggtggaggagttctttaagatgccaatggaggaaaaggcaagcctctactcggaggatccaaataaagtctgcaggctttacacaagcaatattaactatggtactngaaaagtatcacttttggcgtgacattctgaagcaccattgtcatcctttagacgactgcattaaactttggcctcaaaagccaactcgatacagggatgttataaggacattctcagttgaaggaaaaaaactgggtttaacaatcctggagttgcttactgagggcttagggcttgaatctgggtacttcaagaaggatctaagtgaagctatgctattggtggctaaccattacccaccatgtccagatccaagcttgaccttgnggttacctaagcattgtgaccctaatctcattaccatcctacttcaaggacatacctttggacttcaagtcttc

SEQ ID NO: 12419 - DNA, 575 bp, Gossypium hirsutum
  Clone ID: LIB3829-005-Q6-K6-B7
aaaaacgaagcttagcacataacaatggatcaaatccagcacaacttcatcactgtacgaggtctaaaatttcacgttgcagatctcggtgaaggttctaacgtggtactcttcttacatggattccctgagatatggtattcatggcgataccaaatggtagctttagccaatgctgggttccgtacccttgcacccgattacagaggttacggactatccgacataccacccgaacccgaaaagacaacctttgccgacctcgttgccgaccttgttgctatcttagatcacctgggaattaataaggttttcgttgttgcaaaggattttggggtcagacctgcttatctgttaactctgcttcatccccatcgagtgtcgtgtgttgtaacattgggtgtcccacatgttcctttggaacctcggaagtatcgagagtctctcacggagggcttctacatttcaagatggaatgaaccaggacgagcggaggctgatttcggacgattcgatgctaaaaccgttgtgaggaacatctacatactgttctcgagaagtgaaataccaatcgc

SEQ ID NO: 12420 - DNA, 584 bp, Gossypium hirsutum
  unsure (1)..(584): unsure at all n locations; Clone ID: LIB3829-005-Q6-K6-B8
gtaacactggngctaaaggccattacactgaagtgctgagttaatcgactctgtcttagatgttgttcgaaaagagccgaaactgtgattgccttcaagggtttcaggtttgtcattctttgggaggaggaactggatctggaatgggaacacttttgatatcgaagataagggaagaatacccagataggatgatgttgaccttctctgttttcccatctcctaaggtctctgataccgtcgtggagccttacaatgctactttgtcagttcatcagttggttgaaaacgctgatgagtgcatggttctcgataatgaggccttgtatgatatttgtttcaggacacttaagctcaccactcccagctttggtgatctgaatcacctgatatctgcaacaatgtctggggttacatgctgcttacgattccctggtcagctcaactctgatctaaggaaacttgctgtgaatctcatcccatttcctcggcttcatttcttcatggtgggttttgctccactcacttcaagaggctcccaacagtacagagccctgacagttcctgagctaacccagcaaatg

SEQ ID NO: 12421 - DNA, 588 bp, Gossypium hirsutum
  unsure (1)..(588): unsure at all n locations; Clone ID: LIB3829-005-Q6-K6-B9
ggnaaatccattccatcctggnagaagagacaagcctcacccaccacctgagggtcgtcttcccaatgctactgagggagctgatcacttgaggcaggtgtttagtaatcaaatgggtcttagcgaccaggacattgttgctctttctggtggccataccctgggaaggtgccacaaggagaggtctggatttgagggaccatggactaccaaccctcttatcttcgacaactcttacttcaaggagctcttgactggagagaaggctggcctgttacagttgccaactgacaaagttctcctttccgaccctgttttccgtccattggttgacaaatatgcagctgatgaggatgctttctttgctgattacactgaagctcacctgaagctctctgagctaggatttgctgatgcataagctgatgatgattgcaaaaataggaagaagccaacgacacagatgttttaggttttgttttctctctaaagttggcttaaggaatgaatttggggaggtttccgagacaagcttttttcgataattttattctaaactcacattccccatcttcttgttcgtagctg

SEQ ID NO: 12422 - DNA, 574 bp, Gossypium hirsutum
  Clone ID: LIB3829-005-Q6-K6-C10
gttcttcactttctaagttcgaggattccccagtctttaactacatcaacagcctttcccccatcaaaccagtcaaatccatacatgttacgcagacgttcaacccgcttagcttcgcatcgcttccatctattttcacttcaccccatgtcagctctcacaaggagtctagattcctgaaaagctatacagatccattgaaacccgagtcgtcttctgcggatgggactaaagttagtacaaatgaggaggcgggtgcggatgcacaggagaattttgatcaaggagtttccctgggtgagacttcttttgagatgcctaatgaaccttcaaggattgcaattgggctgccacaaactttaaagtatgattgcggtagccccgactgtgatgcaacaccttgtgttttcaagacaacttgtgtctcagacacatctctcgcaattgttccattttttcaagaggcctctgaaaaagcttatctgatggagtggaaatacgggacactttccaggttgagcaaaaagggatactataggatctgagtgggagagtttgatttctgatacatctg

SEQ ID NO: 12423 - DNA, 557 bp, Gossypium hirsutum
  Clone ID: LIB3829-005-Q6-K6-C11
tccgccccgcgtccgccccgcgtccggcggaaccctatctctgctccttacatctcttacttctactctctacttcaatttatatttctctagctctttttgttttgttttgtttttttttttgtgaatttctaactaaagacgaacaaaaaatgtcaagtgcattagagatgtcgctagacgacctgatcaagcgtaaccgtaagtccggatccggaaatccccgcggtcgaggccgtggatccggaccgggacccgcccgccgctttcctaaccgcggtgcaaaccgctcggcaccgtatacttctgctacggcgccggagacgacgtggcagcacgatatgtattcggataagggagcggcgttccaaggtcaagccggtcgggccgctgcaatagaaaccggaacgaagctctacgtctctaatttagattatggagtatctaacgacgacataaaggagttattttctgaggttggtgacctgaaacgatatgcaattcattatgattggactggtagatcgaagggaaccgctgaagttgtcttttcacgg

SEQ ID NO: 12424 - DNA, 566 bp, Gossypium hirsutum
  unsure (1)..(566): unsure at all n locations; Clone ID: LIB3829-005-Q6-K6-C12
ctttgttgtttctcagttgaacgctgtcaaaagatgacttggcatccagattgactttgacagtagatactgcaacagttgaacctcttctactttcggattcatttattactatnatggatacaaacgactactctgtaattcctcaacaactcaaagatcagctgagtgagaggtatccaggtgcaaggcgagcttatcntgaaaacaggaggtgatttcccatttctttcccgtccagatgaagtcaacctacatcttcagctacacctgagacaagttggagttgaagctcggccagatttggttcagagcatcccaaaaggtggcaccggtgggagccctagcaaagaaagtgagaaaaagaaggatccagatgaccaaccaaaagataatggaggcaaccctgaaagtacatctgaagaaagccagttacctcctagttcagaaattcacagccttgatgatcagctccttagcgatgcaagaatatgttccatgggtcatgaagatgcaattattttgatgcagtctcaatacactgtagtcaatagaatccttcaata

SEQ ID NO: 12425 - DNA, 596 bp, Gossypium hirsutum
  unsure (1)..(596): unsure at all n locations; Clone ID: LIB3829-005-Q6-K6-C2
anatactggcttctagnaactggnaaagtgctctgagatcaaanaatgcaacatattccaattatgatgagaatttgaaatcgggttactgcaataggagcacttataaacgcctaaggtctggaaggaacttccccttcaaaaaaagaaagtttttgcactatacctcagagtcaaactcagatggaggaaccatcggtgagggcatttctgatttacctgagaagaacatcaatggaaaagcttccattctatattcaaagatgcatggagtcactggagaatcatcttcactagcagaccaacgcaaatcattcaactctagggatcctcatgtgaagctcaggatcaaatctttcagggtacctgaattatttattgaaattccagaatctgcaactgttggttctttgaagaggactgttaaggaggcagtaacagcgatacttggaggtggattgtgtgttggtgtactgcttcaaggaaagaaggttagggacgataataaaactctgctgcagacgggaatttctcgtgataaccagatggattctctgggttttagcctggagcctaacccatcacatacttcccct

SEQ ID NO: 12426 - DNA, 593 bp, Gossypium hirsutum
  Clone ID: LIB3829-005-Q6-K6-C3
cggccgcgtgggggcgaaccttattcctcaaatattcaaggaaaattctgcagaatcataatggagaattatctctttctgttctcgcttgttcttctctttggtcttttacccttttcctctcaaaccccaaaccctaaaaaccccaatcccaaacctccgctcacccaggcacacaccgagcttataaactatggttttccgatcggtcttcttccggcctcggtgacgaagtacactcttaaccaaacatccggtaacttcgccattgatctcggtggcacgtgcaagatcacgctcccgcctgacaactacctggctacttactcgaagcgggtaacggggaagattgaaaacggaaagatagcggaactcgatgggatcagggtacgggctttgttcaaatggtggtccataaccgggattcgatccagcggggataatttggtctttgaagttgggatggttacggctaaatatcctgctaagaactttgatgaaagccctctctgtgaaggccgtcattcgtcttcttaaaaagctaaaaccaaagtgaaaaataaagggcttctcagtttgctgcaaggattaag

SEQ ID NO: 12427 - DNA, 363 bp, Gossypium hirsutum
  unsure (1)..(363): unsure at all n locations; Clone ID: LIB3829-005-Q6-K6-C4
tgaaaaccttatttgtcttcctaacggcttttataaatcgaaatctctttggggacttgatatttgtggtcgttcaaatcttgttgtaaaaaacttgttttctgccattggaggcagaccagtgaagctgaaagatctccacgggttatcctcnattgtnaccaaattagatttatctgaaaccaatcttgagagcttacctacaaccatcaaacaatttccttggctgcaagagttaatcttgtggaattgcaagagattgaaatcattaccaagagcttcccccccaagccctaggacatttggatgcagatagctgcacttcactagagggaagtgtccagcctttaaaaaagctttttt

SEQ ID NO: 12428 - DNA, 564 bp, Gossypium hirsutum
  Clone ID: LIB3829-005-Q6-K6-C5
ctcgactgcccacctagacctgattcactgtcaatgtctgggagacctgattccggttaccttaaatatcgatggcagcctctcaattgtcagctcccaaggttcgatgggcttgtttttttgtcgaaaatgagagggaaaacagtgatgttcgttggtgattcactgggaaggaatcaatttgagtctttgatttgtatgattttagctgccaacccccaaacccagactcagatgaacagagcaatgcctctctctactttcaagttcctggaatatggtgtatccatatcatattttcgagctccatttttggtggacgtagatgtgatgcaagggaagaggattgtaaagttagacgacatagctggaaatggaaacgcctggcgaatggccgacgtgctggtgtttaacacaggccattggtggggtcatgaaggatctcttcgagggtgggatttgattcaatcaggaggtaaatattaccaggacatggatcgtatggttgctatggagaaagggctaagaacatgggccaattgggttgactccaatgtcgacata

SEQ ID NO: 12429 - DNA, 568 bp, Gossypium hirsutum
  unsure (1)..(568): unsure at all n locations; Clone ID: LIB3829-005-Q6-K6-C6
tgcctttgnaaacgtgggagagcaaaaaggaccagctgctgaacctgatgctgctgcaggacaagaggctgcagctgagcagggtggttctactgacgaaggcgtggccccaatggatatttaaggataccggcattggggcccatctcatgtttagataaggttttctagcgtgtttttgcggatttgagttagtcactggtagacattattgtgttggatatttcctttcttttgcaaactatgtttttacaattgctgcaagcatgcacatgctagcctgacccaaaacttaaaactaaatttacagttatacccaagatacagtcattcaagttgtcaacttattttgggtgttagtacaaatttgatgcaggcatcagggtttgtgactgacccaaactttgcatcagtggcagaaaaaaaaaaaaaaaaaaaaaaaaaaaaaaaaaaaaaaaaaaaaaaaaaaaaaaaaaaaaaaaaaaaaaaaaaaaaaaaaaaaaaaaaaaaaaaaaaaaaaaaaaaggggggggccgttttaaaggatccaattttacttccccttcct

SEQ ID NO: 12430 - DNA, 583 bp, Gossypium hirsutum
  Clone ID: LIB3829-005-Q6-K6-C7
gcttccattgccacaagtaccaaaactgggctctcagaaccgaaggcagaagttgcaatgtaaaggcaaggtggtatatcaagtattcaaggctgcagcatcgattaatgaaaatgttttgcttgaaatacctcttccatccattattagggatgctcttcccaagtctgggaaggcaagccttggtgacgacctgtacaaggttttgactctggagtccagctcggttgatgaaatgttcatttcgctaaatttaaagtctgaaaacaatgctctcgaggtcattaataggttggaagctgctgtatttgcatggaaagggagacttacagaacaagctagtggtaaatcgccagtgcgaaaatcatggtcttttattaatcctatatctgaaatggataagatggagctcctagtggaccgtgctgaagcacttttacgtcagataaagagtgcatacccaaaccttcctcaaacatttcttgatgcttcaaaaattcaatatggcaaggatgttggacattccattctggaagcatattcacgagtcctaaagaacttggctttcagcataatgtgcagg

SEQ ID NO: 12431 - DNA, 561 bp, Gossypium hirsutum
  unsure (1)..(561): unsure at all n locations; Clone ID: LIB3829-005-Q6-K6-C8
tccgatgaacatgccttcttcgcatgtatctcagaagtgggatctaattagatattagtagtaaatttaaacatatatctgtttgcatatcaattcttcatcctccaggtgatgatccaaatgattacgagcttgcaagttagcgctggatgccagtccatacagttgaaagtattgtattgagtatcatatcaatgctttcaagccctaatgatgaatctcctgcgaatgttgaagctgttaatgatgatttggtggaaaacctcttgggagatttcgagtatgaagttcaggataaatatctactataccgcaatgcttctcaggaaataaatggtatttggttctatgatgcacatgaactcgaggagaagggcattcgatagaatcagattctgttaagtcagaagctgaagcaaaccaagtggatgttctcaacactcttgatactggatcatctgctttggatgagattttatcagttgaagctgaaaaagtagataatggcagggatgagggtggtcagcaacaaaagnaggtgttgatggtggatttgacaac

SEQ ID NO: 12432 - DNA, 563 bp, Gossypium hirsutum
  unsure (1)..(563): unsure at all n locations; Clone ID: LIB3829-005-Q6-K6-C9
gcanaccaaggtgataggagagtagaccccaccaaacatttcaagaagcagccaggcagaccttccttggagcatgctgcttcagaatttgcctcagatgccacccctgctactggtcaagagaataccctatggtccaatcatgatatgaggagaggacctcttgcttctgacaagtctaattttgcagattcttctggaaaattttatagttctcacaatgatgtttattcaggctcattcactgaaaacaaatctgacagaaatgatgaaggttctgttttagtaggttatatgatgaagcatggaaaaaagcattttgtgctggatgagaatagacgtaacacttataatccatcatctgctgcacgagaggcatccgttctgaatacttttaatggagagaggaagcagctactgactgtgggggtatactacgagcatggttacacacgaagtctagctcgatttgctgcaaaccttggtccagttgcctggaaaattgcttctaaaagatagaaaagtgtttgccagctggagtaaattttggtcctggatgggtt

SEQ ID NO: 12433 - DNA, 583 bp, Gossypium hirsutum
  Clone ID: LIB3829-005-Q6-K6-D1
atttcctttttgctcagactcctctctctcccatttttttctttcttctaatacccaatggccgtcactttctcaaatctccacaccgagtctggtcttaaagctcttaatgacttcctctctggaaaatcttacatctctgggaataagctgaccaaggatgacataaaagtttatgctgctgttctgaagaaccctggtgattctttccccaatgttagccagtggtataattctgtttcttctcaacttgcggccagcttccctggcaaagctgttggcgttgggtttggtggcaaagctgctccagctgagtctgctaaagctgaggctgcagatgatgacgacgacttggatctattcggtgatgagacagaggaggataagaaggctgcagaggagagggaagctgcaaagaagtcagctaagaagaaagaaagtggaaagtcctctgttctcatggatgttaaaccatgggatgatgagactgatatgaagaagttggaaagagctgttcgatccgttgagatgcctggacttttgtggggagcatcaaagctggttgctgttgggtatggcatca

SEQ ID NO: 12434 - DNA, 584 bp, Gossypium hirsutum
  unsure (1)..(584): unsure at all n locations; Clone ID: LIB3829-005-Q6-K6-D10
gatagcttgcaccacttctgaagcctcttaattttctttctgaatttcttttgccttccttttcaaatatactgcttaattattcctttggtgaaaatcttttaacctagcaactacctttgagacacggattcaattgagatacattatctgaaactccttgtagctatcattttcctcccctcagtatatgtatacttctttccttaaattcttctagcctctgtgctttcttcagagttgccttgcaagcctgtttaaatagattcatatgatgccaaagcctaaggcacttaccgctgctcagccaatggaatctaaaggaccaagtgagcccgaacagcttgttgagtctgatgagagggttgatcttgatgaagacagcgatcctgaggagaccatggaagaagaggtggagtatgaagaagtggaggtagaagaagaaggagaggaagaaatagaagaagaagaggaagaagaagaagacctggatgtcgaaaacgccanatggggctgatgtttttgagactaaagttggagatggagatganaaagagaagcatgctgagcttcttgctcgtcct

SEQ ID NO: 12435 - DNA, 579 bp, Gossypium hirsutum
  unsure (1)..(579): unsure at all n locations; Clone ID: LIB3829-005-Q6-K6-D11
ctggntcataacagggcactaggtcaaatctcagnanaaactaaatgtccaagtttctgatgttaagaatgtgattatttggggtaatcattcatcatctcaatatcctgatgtcaaccatgcaactgttatgactccatctggagaaaagccggttcgcgagcttgttaaggatgatgcatggttgaatggagaattcataaccactgtccaacaacgtggtgctgcaatcatcaaagctaggaaactctcaagtgcactatctgctgctagtgctgcttgtgatcacattcgtgattgggtccttggaactcccgagggtacatgggtttccatgggggtttactctgatggttcatacaatgcaccagctggggtcatctattctttccctgtaacttgtaagaatggagaatggacaattgtccaaggactggcaattgatgaattctcgaggaagaagttggacttgaccggacaggagctgaccgaggagaaggaattggcttactcatgcctctcatgaatgcattcatcatttccataatctgtttggaagaggagtggtttgccttaata

SEQ ID NO: 12436 - DNA, 128 bp, Gossypium hirsutum
  unsure (1)..(128): unsure at all n locations; Clone ID: LIB3829-005-Q6-K6-D12
ctcggcatcggttgcacactcatanctcaacactactaagatcacacttcgaagctttgctgaacttgaagtcatcgtgctgtaacacttatctgaatggaagaactgaaaacatttccatgggcttg

SEQ ID NO: 12437 - DNA, 617 bp, Gossypium hirsutum
  Clone ID: LIB3829-005-Q6-K6-D2
ccaacaagctcctactcccccatataaaccccctactcccgcaccggcacctccagtcaaggcccctacacccccatataagcccccacacctgctccagcacccccaaccaaagcaccaactccagcaccagcaccaccaactaaagcaccaactcccccatataagcccccagttcctacacctccagttaagccaccaacaactccagcaccgccttacaagccaccaagtccaccattgccgcctgttaggacaaaaaaggattgcatcccattatgtggacaaaggtgcaaattacactcaaggactaacctatgcttgagagcttgcatgacatgctgtgacagatgcaaatgtgtcccaccagggacatatggcaacagagaaatgtgtggcaaatgttacactgatatgagaacccaccgcaacaagcacaaatgtccttgaaaaacccaaccaaagcccccaaaaaacgacacttcttgagtatgtgtttttcatattgtaatagctgaaaagcttgcagtaataagttctgtgagaagagaggaaatggatggatttcttgtagtgtcttcgtttgtaatcctagaagctatgaacttgtcaaatag

SEQ ID NO: 12438 - DNA, 591 bp, Gossypium hirsutum
  unsure (1)..(591): unsure at all n locations; Clone ID: LIB3829-005-Q6-K6-D3
atcgctcctggntcgggcccagctcctcctcgtaggattacctctcttcctcttcgccaccgatctcttcagcctcttcactcctccgcccccaaagccgccgtcccatcaccatcaccaccatcatccccacctacccaaacctccactcaatcctgaaaccctagatatttctttacagaaacccagcgctattggaggaatcggctatggcagcacggttaatatcaatttctgcgcttcatgctcttacaggggaactgctgtgacaatgaagaagatgttagaagcccagtttcctggaattgatgtaatccttgataactatccaccatcattgccgaaacgtttgctttcgaaagtggttccagttttccaatttggagttatagggattatgatggcaggtgaacagatttttcctatgattgggattacgacaccacctccgtggtattattccttgcgtgcaaacaggttcgggtccattgcaactgcttggcttcttgggaatgtaatgcagtcttttctgcaaagctccggtgctttcgaggtttactgcaatgatgaattggttttctctaagcttaa

SEQ ID NO: 12439 - DNA, 596 bp, Gossypium hirsutum
  unsure (1)..(596): unsure at all n locations; Clone ID: LIB3829-005-Q6-K6-D4
cngatatgatgcaacaaccaccagcaggaggtgtagctccgccgccgtccatggcagccgatccgtctcaaacccagcagtaccagaaacaacagcagtcgcagccgtggatgatgatgtctcaacaacagcaggcgggtcagccagttcctccacctgcaggttggaatccgcaacccgtccctccgccctctcagatgcagcagtactccgctggttccgcgaccgtcggatccggcgaaattcggtctctctggatcggtgatcttcaaccgtggatggatgagaattacctcattagtatcttcgctcaaactggagaggtggtttcagctaaggtgattagaaataagcaaacggcactgccagagggatatgggtttatcgagtttgtatcacgtgctgcagccgagagggttttgcagttgtataatggggtgccaatgccaaattctgagcagaattttaggttgaattgggcggctcttggatatggagaaaagagggcagaagagggtcccggattacacaatttttgttggggatttagctgcagatgtttctgattacatgttacaaggagacttttaaagctg

SEQ ID NO: 12440 - DNA, 597 bp, Gossypium hirsutum
  unsure (1)..(597): unsure at all n locations; Clone ID: LIB3829-005-Q6-K6-D5
caaagtattgatcttgccaaggatggnaatccatgcagttcttgttgttttctcagttaggacccgcttttcacaagaagaggaagctgcattgcgtagtttgcagactttatttggtagcaaaattgttaactacatgattgtagtgtttactggtggggatgaactggaagaaaacgaggaaacattggaagattatttgggccgcgagtgcccacagccattaaaggacattctaggtctttgtggaaaccgacttgtactttttgacaacaagactaaggatgaaaccaagagagtgacacaagttcaggatcttctcacacttgtgaacatggtcatagaacagaatggtgggcaaccatatactgatgagttgtttgcggaactgaagaaaggggcaactaaacttcgtgatcaacaagaagtggttgctgctctaaagggctactccaagcgagaaatatccgaatttaaggagcagattgaaagatcatatgaagagcagcttatgcgaattactgaaatggttgagtcaaagctgaaggagacaactgtcaggttggagcagcagttagcagaggagcaggcagcacg

SEQ ID NO: 12441 - DNA, 578 bp, Gossypium hirsutum
  unsure (1)..(578): unsure at all n locations; Clone ID: LIB3829-005-Q6-K6-D6
gnttttctcanaacttcaaaatttaactaaactgaaagaagagcagcagcaaaggctaaagcagcaacatgctctgatgcaaccggctttgtaccacaatcccagtctcatgagtggtcctcagatagaacctatcttgagtgggaatcttcctcctggctttgatgcagctacttgccgcagcgtacgtgggaaatattcacccccaggtcacggaaccccttctgcaagaagtctttctgagtactggtcccattgaaggatgcaaacttattaaaaaagataagtcatcgtatggttttgtggactactttgatcgcagatcagctgcccttgctattgttactctaaacggaaggcatctatttgggcaacctattaaagttaattgggcatatgctagcagtcagagggaggatacatcaggtcatcacaacatttttgttggtgatctcagccctgaagttacagatgctactttgtttgcatgcttttctgtgtactctagttgttcggatgcttagggttatgtgggatcaaaaaactggccgctcgaagagttttggnttntgtttctt

SEQ ID NO: 12442 - DNA, 563 bp, Gossypium hirsutum
  unsure (1)..(563): unsure at all n locations; Clone ID: LIB3829-005-Q6-K6-D7
cgtcgcctatcgatgttgggaaagtgggaaatagagatgctatgtccttgtctatgaagtaccgaaaatgacatctgtcccctggaatgccgtaatatcttgtcacggaattcatgggcatgctgagaaagctctaaaactatttagagaaatgcgagaagagagagtgaagccggaccatgtaacttttgtgtcactgctctcagcttgtagccattcgggtttagttgaagcgggtcagtggtgctttaatgtgatgcgggaagaatacgggattgagcctattttgaagcattatggttgcatggtagatatgttcggtcgagctgggcatctagagaaggcatataattttataaaagacatgcctgtaaaacccgatgcatctgtttggggtgcccttcttggtgcttgtagaatacatggaaacattgatttgggcgcttttgcatctgaacgtttgtttgaagtggattccgagaatgtcgggtactatgttctgatgtctaacatttatgcgaatattgngnaatgggaaggagtagataaagtaagaacactag

SEQ ID NO: 12443 - DNA, 586 bp, Gossypium hirsutum
  Clone ID: LIB3829-005-Q6-K6-D8
gaaaattttgctctttggagtcatcctctgcaaaggcagttataatgcctacaactctacatcacttgtcggtttctcaccaaatggaagcccaacgtcacagcaagattctcagtcgtatccatccgacttgcatcactctcctgacaataatggtggctctcctattagtggttcctgcgtaaccgatgatgtaagtgatttgagggataagctgaaagagctggaaactgtgatgttgggccctgattctgatgttattgacagtaagacctcaccagagatgggcacatggagacttgtaacagatgcaatctccagaggggacttaaaacaggtccttgtcttttgtgcaaaagccatgtcagataatgatctcttgatggcacagtggttaatggatgaattacgccgaatggtgtcggtttctggggagccaatccagaggttgggagcctacatgttggaagggctagtggcacgactagcctcatcagggagctcaatctataaggctttgcgatgcaaagaaccaaagagtgctgacctattatcttacatgcacattctttatgaggtttgcccc

SEQ ID NO: 12444 - DNA, 562 bp, Gossypium hirsutum
  unsure (1)..(562): unsure at all n locations; Clone ID: LIB3829-005-Q6-K6-D9
ttttcatgacaggacaaactgctgcccnatttgagggtggtgcaaagaaggtaatcatctctgctcccagtaaggatgctcccatgtttgttgtgggtgtcaatgagaaggaatacaagcctgaccttcacattgtatccaatgctagctgcactaccaactgccttgctccattggctaaggtcatccatgacaaatttggcattgttgagggtcttatgaccactgtccattcgattactgctactcaaaagactgttgatggtccatcaatgaaggactggagaggtggtagagctgcttcgttcaatatcattcctagcagcactggagctgccaaggctgttggcaaagtgttgccatcattgaatggcaagctgactggaatggcattccgtgttcccacagttgatgtctctgtggttgacctcacggttaggcttgagaagaaggcttcttatgaagatatcaagggcgctatcaaggcggaatctgaaactaatttgaaaggaattcttggctacgtagatgaagacttggtatcgactgactttgttgggga

SEQ ID NO: 12445 - DNA, 589 bp, Gossypium hirsutum
  Clone ID: LIB3829-005-Q6-K6-E1
cttgattcgtcttatactaagtctgttaaacaggtaccgtataatatttctatactggagatcagtgcgccgattattgctcccggtgttttatcatgctcctgcaccgtcggcttccggtgttaacattaccggcttacttgagaaagctggttgtaagacgtttgctaatttgcttaccagtagtggtgtgttgaagacttatgaagcggcgcttgataaagggttgactatttttgccccgtccgatgaagcttttaaagccgacggtgtacctgatctgagtaagttgaccaatgccgatcaagtttcgctgttagaataccatgcctcgccggattataaaccaaaggggactttaaagacgacgaaagatccgattactacattggctactagaggtgccgggcaagttcgatttgacggtcaccgtcgccggtgattccgtcacgcttcatactggaatcagtccatctagagtcgctgaagcagtttttgactccccaccggtcgtgatattcaccgtctacaatgttttgataccctgcgagttgctcgggaagtcaccgtcgccagcacctgctgctga

SEQ ID NO: 12446 - DNA, 571 bp, Gossypium hirsutum
  unsure (1)..(571): unsure at all n locations; Clone ID: LIB3829-005-Q6-K6-E10
cggacgcgtgggaaaaaaaacgaatcttaacacataacagtggatcaaatccatcacaacttcatcactgtaagaggtctaaaatttcacgttgcacagctcggcgaagtgttctaacgtggtgctcttcttacatggattcccttaacaatggcattcatggcgacaccaaatggtagctttagcgaatgctggattccgtactcttgcacccgattacagaggttaccgactctccgacataccacccgaaccctaaaagacaacctttgccgacctcgcagccgaccttgtagctatcttagatcacctgagaaattaataatgttatggctgttgcaaagattttggggtcaagcctgcttatctgttaactctgcttcatccccatcgagtgtcgtgtgtcgtaacattgggtgtaccacatgttactttagaacctcgtaagtatcaagagtctctcccggaaggcttctacatttcaagatggaatgaacctgtaccagcgngagctgattttggacgattcgatgctaacaccgttgtgaggaacatgtacatactgatctca

SEQ ID NO: 12447 - DNA, 603 bp, Gossypium hirsutum
  Clone ID: LIB3829-005-Q6-K6-E11
tccgctttctcgcaatccaaacacccttattttctcatcacattgtttaacaaatggctcgtactaagcaaactgcgaggaaatcaaccggcggcaaggccccacgtaagcaactagccacgaaggctgctcggaagtcagctccggcgaccggaggagtgaagaagcctcaccgtttcaggccaggaactgtggctctcagggaaatcaggaagtaccagaagagcaccgagctcttgatcagaaagcttccattccagaggcttgtgagagaaatcgctcaagatttcaagaccgatttaaggtttcaaagcagcgctgtcgccgctcttcaagaagctgccgaggcttatctcgtcgggctgtttgaagatactaatctatgtgctattcatgctaagagggttaccatcatgcctaaagatatccagcttgccaggaggatcagaggcgagagagcttaggttagtttgttttagttgactaatgcctagaataagagatatatgcttgtgttcgtttggttgtattatctttctctgcaagtgttagatttaaatcgatcgaattttaatggatgctgtatagtttcttgatgttttc

SEQ ID NO: 12448 - DNA, 566 bp, Gossypium hirsutum
  unsure (1)..(566): unsure at all n locations; Clone ID: LIB3829-005-Q6-K6-E12
cttgnttacgccttgnttttcactggnctaccatccacanaccaaagtgtcgtccgccagcgccggatctgtacctttgtccatcgtcacagataagtcttccttctccccttgtatgctccgatctaccaaaaaagaagaacaagaatttttagtatggccatattgccacaataaaagcataccgtgggaagagcttcaaattccactctttggatccggctgttgatcgagacttgtgaggtaagtggcttttccagatctaccgacatcgccatcctagcaaattggcctcttgctccactatccgtcttgaggtctaatttcatcacttttccgaccaagcttcctatctcctctaaaatccttttcttatataggaagcccgacaatcctaggaatcggatccaggccataatcatgctaggaaagggtttcagcggatcaaactggatcgtccatggctgaacgggtaaatagtgtccaaacattatctaggggccttgagtcaaagctcgactctgctttggaaacggacaaggaaatatccgttctcgatgtccatt

SEQ ID NO: 12449 - DNA, 628 bp, Gossypium hirsutum
  Clone ID: LIB3829-005-Q6-K6-E2
gttaacttcacagccgaatagctcgttcgttggagcctcatctctcaactacaaaggagaaaggcagttctcattcttacaaagtgctaattcatcacacccaggagtttctgtttgtcaaccgcttgtcaatgctaatccttcatcaagcaatggtggcatcagccagaaaatgttgttgaatgggttaaatcgaaccgtcgagtctaatcgtgctctctctcttctgtcatcacaaccggctgagactcgggagattagtttgagccctatgatgcagtctggctcaacctcatccttgatcccaaacttgcaatataaaggtctaggaatggagggggagcaagtaggaaccattttggccactgatcaaagtgccaatactgatctccatggaaatggagtgtttcgaatcggacatcccggatcatctgcaagtggtactcaccatagactcaccttctcatgggagtaaatatatgccatttccaactatatgttcaaatcataacgtttttcctttaattatgtagcacttgttttagtaagttcccaaggatgtatgaaccttttgatatggacttgtttatgagccatttccatgtaccttcaaattattatttaatgc

SEQ ID NO: 12450 - DNA, 580 bp, Gossypium hirsutum
  unsure (1)..(580): unsure at all n locations; Clone ID: LIB3829-005-Q6-K6-E3
cgttaagggtcggnnaatcccgaagggnaaaatcttcattattaacccaaaggtgaggttgccgtgaaccgtcgtgttgacacaaaatcttatacatctcttcacgcccttgttcatggcatgtttccaccgacaacctgctccgagcaggaagatttcaattcgtggaatttctggaaactgccacctcctgtattcgacatatgaagttgtcggctaaagtatgttgctttagcatttggatgccaagatagatggatgatgatttcttcgatcattccagagctgtccaggttataaataatcatgactgcttgaagaactttcaccctgctcttgaaggtgcagattcggtcaactctcggttgtcgccgaaaataatttatttgaaattttttatagaatctctgaagctttatattggcttcattgtagtttggtttataatttgtatagtgaattattgtgatcccacgaacatttccagtatgtatacattcatgggagaaaagggtagttctaattattgtttatatatatatttgttgcttatacaaaataaatctttcattattagttc

SEQ ID NO: 12451 - DNA, 579 bp, Gossypium hirsutum
  unsure (1)..(579): unsure at all n locations; Clone ID: LIB3829-005-Q6-K6-E5
ttcctctgattcaagtgcantgaaacttgggaatgtggtcttcaattccaaaagctgttggatttagggtttcaatttaagtacagcttggaagacatgtttgtaggagctgtgagacatgtcaagaaaaaggttaattgcacctccaacaaagattgagaatgcaataaatggtgataccattgcttctattgagacaccaaacagtgttaaatgttagaacaatatctatctataccatggatgtatcaccattgtcatgttaagggctttggtgttaagggcttaatggtttcttggttatacgtggttttgtgttgattgttgcattcttgtctttttgagggtagattttcgcgaggagggttgggagtcttagtggtttgatattaagatgttctcattttaagatttggtattattgttttgggtgtgggactattttgtgggagatgttgcatcttgttaattgtaacattcttcgcttttgcttattgtgtattaattaagcaaaaaaaaaagataatttgtaccattttagtcgttatcaaagaataaaaattatatgttctttggnat

SEQ ID NO: 12452 - DNA, 575 bp, Gossypium hirsutum
  Clone ID: LIB3829-005-Q6-K6-E6
gtgccgccggtttattaggtctcggtcgtggaagatatcgtttcctacccaaaccggacgccgactcaaccggaagttctcttactgtttagccgaccggtccgcttcttcaaaaccgtcgtccctgcttttcggcgacacggcgattcctcgaaccgccgtgtttactccattgttaacgaacccaaagctcgacactttttactacgtccaactgttgggtatcagtgttggtgggacacgtgtccccaaaatcagaccgtcgttgttcaaaatggaccgggacggtgacggtggtgtcatcatcgattcgggaacttccgtcacccgtctgacccgacccgcttacatcgcattaaggaatgctttccgtctcgggtcatcgaacctgaaacgggcacccgctttctcactattcgacacatgttacgacttttccggtaagacttcagttaaagtaccgacagtggtgttacatttcagaggagctgacgtgtcattaccggcgacgaactatttgattccggtcgatagcagtgggacattttgctttgctttcgccggtaccatgagtg

SEQ ID NO: 12453 - DNA, 590 bp, Gossypium hirsutum
  Clone ID: LIB3829-005-Q6-K6-E7
cttttcaaaccctagcctgtatctgggagccctttccatggcttcgcgtcgactcctctcttctctcctccgctccacttctcgccgatctctctccaaatctcccagccctacccctcgcctcccttccccttcccccacgcgccgcccttttccttgcccttactttctctcacgcgatgctgagtactctacatctgcggctgctgccgcttctgctccatcgcagcctcctcccgctaagaagggcggaaaaggtaagatcactgatgagttcactggtgctggagccatcggtcaggtttgtcaagtgatcggtgccgtcgtcgatgttagattcgatgaaggtttgcctccgattttgacggcgcttgaagtgatggaccactcgatccggcttgtgctggaagtggctcagcacttgggtgaaaacatggttaggaccattgctatggatggaacggagggactggtccgagggcagccggttctcaacactggatctcctatcactgtgcctgttggtagagctactcttggtcgtatcataaatgtcattggagagcctattgacgagaaaggcgaactca

SEQ ID NO: 12454 - DNA, 542 bp, Gossypium hirsutum
  unsure (1)..(542): unsure at all n locations; Clone ID: LIB3829-005-Q6-K6-E8
gcagagtaaagcggnaagcagnagnaaactgaaggtgaagatgaaggtgcagatagagaagaaaccgaggaggaaaagaggatgagagtgagaaagagctcgaaaggtggctaaggaacaggcagagaggagagctacggcacaattgatgttcgaattgggccaaaaggcttacggaaaaggcatgtacggacgtgccattgaatttcttgaaggtgctctcacgatcattcccaggccaacattatttggcggtgagattcaaatatggctggctatggcttatgaggcgaataaccgccatgcggactgcattgctctgtaccagcaattagagaagaagcaccctagtgtgagcattcgacggcaagctgctgaactccgctacattttgcaagcacccaaactcaagatatcccaggaagagatggttacaataccgctgattggttctagttacgacagctatgcagcgacatggactgacaagtacaaggacaaagatcagaagacaagcggatcaacaaccaatcagcttcgct

SEQ ID NO: 12455 - DNA, 572 bp, Gossypium hirsutum
  unsure (1)..(572): unsure at all n locations; Clone ID: LIB3829-005-Q6-K6-E9
gcaactcatcaacacggctgttgtgtgttgcaacgatgcatcagtcattccaccggggaatatcgagnaaatttggttgaagaaatatcctccaatggacttctacttgcnacaggacgcatatggaaattatgttgttcagttcatcttggagttaaaaattccatctgccacttcaactttgatctctcaattcgaagggaactacgtgcacctctcgtctcagaagttcagcagtcacgtggntcgaaaaatgtctcatggtgttaaatgatgagagccgatcgaaactcattcatgaattgctgtctacagatcactttgaacggttgcttcaagatccgcatgcaaactacgttgtgcaaaccgctctccgtgtatccgagggatctctgcacaattcactcgttgaagcaatcgagtcccataaagcaatatcacgcaacagcccgtattcgaagaggattctctctcagaagctactcaaaaagtgaatgtacattctccccctttactttttgttgttttgtgtcaactaaaactatcatctatatatatatgtgngaaaaacc

SEQ ID NO: 12456 - DNA, 595 bp, Gossypium hirsutum
  unsure (1)..(595): unsure at all n locations; Clone ID: LIB3829-005-Q6-K6-F1
ngatggggnaatcttatatatgtattcaatgaagagtatcaccaaaagtacccatcatgtctttgcgaaatcagtgctgaaaatgggaaatgcagttggaggagagtgcctcggttgccattacctgttaacaaattccataaagtcattagcttttgttccnnaccgtttctctaactcattctttcccccaacaataagatgatgggggtggcacaagctatgtattaccttgcttgctctaaggcaagtccaacaacagattatcaagaaccccacaaatnntgtggttgcaaaacagaaatcatgctttcatgctgagatgagcttgaagatgcctgctactgtaccagttctttcattcttgccaaacttttttgctatttaaaaaggctttttgaaaaaacttgttggcttttattttgcaagtttaccaggaaaaaaggcccagaggtttggggaggccttaaatttttttttttgggaggaaaaacccccaaaaaaaaccccccttttaaaaaaaatatttttgggggggcttttttttaaaaaaaatgtttttcaaaaaaaaaaaaagggcttttttttttttttt

SEQ ID NO: 12457 - DNA, 583 bp, Gossypium hirsutum
  Clone ID: LIB3829-005-Q6-K6-F10
gctcgtgccatttcgtggtttaagggatttttttcatttttcttctcacgctcgattaccttacaaaaagagaaaatgaccaagtgttacccaactgtgagcgaggaataccagaagtcagttgaaaaggccaagaggaagctcagaggtctcatcgctgagaagaactgtgctccactcatgctccgtttagcgtggcactcagctggaacttttgatgttaagaccaagaccggaggtccattcggaaccatgaagcatcctgctgagctcgcacatgctgctaacaacggcctagatatcgccgtcagacttctcgagccgatcaaggagcagttccctaacctcacctacgctgacttctatcagcttgctggtgtcgttgccgttgagattactggtggacctgaaattcccttccatcccggaagagaggacaagcctcacccccctcctgagggccgtcttcctgatgctaccaagggttctgatcacttgaggcaggtgtttagtgctcaaatgggtctcagtgaccagcacattgttgctctttctggtggccacactctgggaaggtgccaca

SEQ ID NO: 12458 - DNA, 581 bp, Gossypium hirsutum
  Clone ID: LIB3829-005-Q6-K6-F11
ggcagctcccgtctcacgcgcctccattaccattccacgcgccaccttttttcgttttcattttccttctctttcattttccttctatcttaaatgaaatgaaaaagatctgaaggagattggaagttggtgattaagatttgaggtttctgaggagggtgacttattttggtaattttaatgaaggatgaacaacgtttggtggtaagaagaagatgggaggagtaacgtcttcgattgccgcgaaatttgcgttcttcccgccaaatccgccgtcatacagagtgctagaggacgagttatgcgctggtcagctttacataccagaggtaccgaggagggacggtgtcaacgtcttgaagctacgcacgcgccgcgggaacgacatcgtcgccgtccatataaaacaccccaaggcttccgctactctcttgtattctcatggaaatgccgctgatttaggacaaatgtttgagcttttcgtcgagttgtgtaatcgcttgcgggttaatcttatggggtatgattattctggctatggacaatcaactggaaagccaacagagtgtaatacatatgca

SEQ ID NO: 12459 - DNA, 543 bp, Gossypium hirsutum
  unsure (1)..(543): unsure at all n locations; Clone ID: LIB3829-005-Q6-K6-F12
ggctgcagnattctcctgctttgcagactagctctcacttctccanaagtatactagattgagggacaaggttcattgctccatgtgtcttgacaccaggtgacccttacatgccattgccaaagatgaaatcataaagagagtagcgaaccaggttttggctttattcgggtcagcccggggtttagaaattacttggtcatctgttgtcaaaatcgggcaatctctatatcgcgaaggaccctggaaaagatccattcagacctgatcagaagacaccaataaagaacttctttcttgctggatcttatacaaagcaggattatatagatagtatggaaggagcaactttgtctggcaggcaagcatcagcctacatatgtgatgctggggaagggttactggccctgcaaaagaagcttgctgcaattgaatctcatcaacagttggaaacttcaagttcttctgatgaattaagccttgtgtaaatagttcatttatatacacactcgtatacatttattgtaacatttatgtaaccaa

SEQ ID NO: 12460 - DNA, 621 bp, Gossypium hirsutum
  Clone ID: LIB3829-005-Q6-K6-F2
agccggggcagaagacaaagaagggggaggatgtaatccatcccctcaggtatcattggaagactctacatggaacatcgaaaaactttctctttcacgaaacgtaatctgctccaagtgcaagggtaaagggtctaaatctggtgcatcaatgaaatgttccggttgtcaaggttcaggaatgaaagtctccatccggcacctcggtccttccatgatccaacaaatgcagcatccttgcaatgagtgcaagggtactggtgaaaccatcaacgataaggatcgttgcccacaatgcaaaggtgataaggttgtgcaagagaagaaagtcttggaggttattgttgagaagggtatgcagaatggacaaaggattactttcccaggagaagctgatgaagcgcccgatacggttactggggacattgtattcgtcctgcaacagaaagatcatcctaaatttaaacgaaagggtgatgacttatttgtagagcatacattggcacttactgaggccctttgtggctttcagttcatactgactcacttagatggcagacaacttctcattaaaacccacctggggaaagtcgttaagcctgatcaattcaaagcaataaa

SEQ ID NO: 12461 - DNA, 603 bp, Gossypium hirsutum
  Clone ID: LIB3829-005-Q6-K6-F3
ccccgcgtccggctctggggtttttccccagttgcaacaggtaaaatacgattgcaacaagtgtggatcaattttgggaccgttcttccaaaattcatattcagaggtcaaggttggttcctgccctgaatgccaatcaaaaggccatttactgtcaatgttgaacagacagtatacaggaactaccagaagctcacactccaagaaagcccaggaactgtgcctgcaggaaggcttccaagatacaaggaagttatattgctcaatgatctgatcgattgtgctcgtcctggtgaagaaattgaggtcactggcatttatacaaataattttgatatgtcattgaacacaaagaatggatttcctgtctttgccactgtggtcgaggcaaactatgttactaagaagcaggatctcttttctgcctacaaactcactcaggaagataaagaagagattgagaagttggccaaggatacacaaataggagaacggattatcaagtccattgccccgtcaatttatggtcatgaagacataaaaactgcaatagctcttgctatgtttggaggccaagagaaaaagtagaagggaaacatcgtc

SEQ ID NO: 12462 - DNA, 610 bp, Gossypium hirsutum
  Clone ID: LIB3829-005-Q6-K6-F4
caaaattcccattcgttgaagccccgaaccctaacttttttgcaatgattagaagaatactcccttcaatatcctcagtttcttctcatttcctcaagaccaaacccatctgcagcccatcaccactccaccatttccattccctgcaatctctccaatgttccaaccccattagcaaaaatgggtcattatggtttcagggtattaggtcttatagtcttttgagcttgaatgatctgagagacaatgttcccagaaaacagaagacgaggaaagggagagggattgggtctggtaaaggaaaaacggctgggagaggacataaaggacagaaagctagaggtaatggcaagttgggatttgaaggagggcagacccctatgcggcggcgtttgcctaaacgcggctttaagaaccctttcagcctcacttttcagccggtaggattgggaaaaattgccaagcttataaatgctgggaagatagattctcatgaattgatcacgatgaagacactcaaggatgctggggccatcgggaaacagatagaggatggagtaaggttgatggggtcgtggtgctgaaccagatcaaatggccaattcatctc

SEQ ID NO: 12463 - DNA, 595 bp, Gossypium hirsutum
  unsure (1)..(595): unsure at all n locations; Clone ID: LIB3829-005-Q6-K6-F5
gtactcctgnttctgacgattcttctcctcanaactctgttgatggaaaaaagaatctcttatcagagaggagtttgaaattaccggagctccatggttgatccagagaaaaattgactgtccgagatggtacatctcgagtagccattttcagagacagagagaaggatcgtactgacccggattatgataggaattatcaaaggtacgtcagaagcattccatgtaaccagagcgtcggtgtggctccttacaatatgcagaagattcaacttccattcatgcagtatgattctgcttttcctcagttgggtcagattgcaaatacacaagctcccctcggttatggtgttccttcgaggccagctgtgagtccgttttgtgagctgggattgaatccaacttctagggatggtgcttacatgcagtggccaagtgctaatatgatgttttcccattcatatgatcagtttatgcatgctgtatttcaggctccgtttgtccaccaaccacctctgagctacgattattcgatgaacggttaaaaaacggtaagatttgtatttctgcaaaaaatatcaaaatctgttagggc

SEQ ID NO: 12464 - DNA, 573 bp, Gossypium hirsutum
  Clone ID: LIB3829-005-Q6-K6-F6
tcctctaattctaaagctaagagttttaagttaacgaagctttgggtcgtttcgaatatggaaacttagaaagtaaagaaggagccggaggaaggaaagtggtggcccgaagaagaagcccgtttcaaggtctgtcaaagctggtctccagttccctgttggtaggatcggccgttatttgaagaaaggaaggtattcgcagcgggtcggaaccggagccccggtttacttggctgctgttcttgagtacttggccgctgaggttctggaattggctgggaacgctgcacgtgacaaccaagaaaaacaggatcatcccaaggcacgttctactcgccgtgaggaacgacgaagaattagggaagcttctcgccggcgtaaccatcgctacggtggtgtgttgccgaacatcaacccagttcttttgccgaagaagactgaaaaggccgccggcaaagaacccaaatctccatcaaaggccaccaagtctcctaagaaagcttaatttgttttaacaaaactagattcacagggctttatttttcttagttgtatgtccttttgggtgattgt

SEQ ID NO: 12465 - DNA, 580 bp, Gossypium hirsutum
  unsure (1)..(580): unsure at all n locations; Clone ID: LIB3829-005-Q6-K6-F7
ggcaagcagtaacttgcgaagacttctttgctgccnatgaaaaatgcaaatggtgcggattttgctaacttcttgctatggtattcacaagctgggactcctgtagtaaaagttacttcatcctataatgctgaggcccatactttttctttgaagtttagtcaagaggttcccccaactcctgggcaacctgttaaagaaccgatgttcattccagtagctgttggtctactggactcaagtggaaaggacatgcctctatcttccgtgtatcacgatgggacattgcagtctgttgcaagcaacaatcaaccagtcctcagcactgttcttcgagtaactaagaaagaagaagaatttgtgttttgtgatatattcgagcggccaattccatctctactgcgaggttatagtgctcctatccgtcttgaatctgatctctccgacagtgacctatttttccttctcgctcatgattcggatgagtttaatcgctgggagtccggacaggtgctggcaaggaagctcatgctcagcttagttgctgatttccaacaaagcanaccattgaccttgaatc

SEQ ID NO: 12466 - DNA, 590 bp, Gossypium hirsutum
  unsure (1)..(590): unsure at all n locations; Clone ID: LIB3829-005-Q6-K6-F8
cggncgcgtgggnanaaatcagaggaagacgaacaagtccacgaagaagaaagactgttggatgccctgatggatgttaaagatgagaaaggtgaaacactagatgatgaggaaatcattgatatcatgttgatgtacctgaatgcaggccatgaatcttctggccatactacgatgtgggcaactattttcctgcaacaacaccctgaatttctagaaaaagcaaaggcagagcaagagaggattgtgaagaaaagaccacccacccaaaaggtttaacccttaaggatattcgagaaatggaatacctttccaaggtgattgatgaaacacttcggttgataacattctcactgatggtcttccgtgaggcaaaaacagacgtcaaaataagcggttatactattccaaaggatggaaagtgttagcttggttcagaagcattcacttggatcctgagatttatccaaatccaaaagaatttgatccttctcgatgggatgactataacgccaaagcaggaactttccttcccttcggagcaggaagcaggttgtgccctggaaatgatcttgccaagcttgaaattt

SEQ ID NO: 12467 - DNA, 579 bp, Gossypium hirsutum
  Clone ID: LIB3829-005-Q6-K6-F9
ccgggtcgaccaccgtcggaacctctcccttttcatacaataccttccatgccagaccaagtaaaccaaaaaacaataatgacacatggaaggaaaacccaatacaccaaatcacagccaaggaggcacaggccggtcctgtggcttatgcctttttattttcctcctcttggcaggagcatcagcagttgctgtgtgcctcatctaccgtccccgcaagcctcgtttcgctgtattaggtgcagctatttaccaactcaacgccacctcacaacccatcattttcacttccatgcatttcaccatcgtgacaagaaaccccaacaggagagtctctatcttttacgacaagttgcaagcttttgtttcgtacataaaccagcatattactcccgcaatggacttgccaccactgtaccaataggtcaaagagcacggtggcactgacccctctgctgggtagcgggactgtgccagcatctgcggaagtggtgaatggactgatgatggatgaggcgtactgagtggtggcgctgagggtggtgttgctggggaagttgagatggaaagctggtgcta

SEQ ID NO: 12468 - DNA, 436 bp, Gossypium hirsutum
  unsure (1)..(436): unsure at all n locations; Clone ID: LIB3829-005-Q6-K6-G1
ggttgaatnnctctggctaagaaaattcaggnatcagggatgnnggctctgaaaatcgcaggggcatcctttttgatcttgactatggcactgaatatgcatcataggcaagttatgcagtcttaaggtatcaatacttgtgcttgggactacatgatgcttgaaattatcaagagcgacaattggggttaaccaggttccgatgaagtaatcaacccatttgttattagatttttgtcaattctgagcctttggaggataaatatcgtgttcttagcttgtgatttcccccctctaatatctcaattctctttttttcaccctttatatgctttctgaggaataggaacagaaaaaagttaggaaaaggtattcgcatgttgacaaataaatgtcttttcttttttgcaccttttaatcaaataatttcgcaatc

SEQ ID NO: 12469 - DNA, 395 bp, Gossypium hirsutum
  Clone ID: LIB3829-005-Q6-K6-G10
ttaaaaaaaaaaaaaaaaaaaaaaaaaaaaaaaaaaaaaaaaaaaaaaaaaaaaaaaaaacaaaaaaaaaaaaaaagggggggccggctttatttggaagcgatccattacttaccgtccgccttgcttgcaaacgttctttttcttcttttttggcggccaccttaaattcaattcgcctggccgtttgttttccagcgggcggggggtggaaccactccctgtcgctcccctaattagtcttgcttgcagtacctccttttttcgcctgctggcttaataaaaaggcaggcccgcaccggtcgttcttccaaacagttgcgcctcctggatggatggatgggccccttccttgtggcgctttctttaaccgcggtggttgtggttgcttcccc

SEQ ID NO: 12470 - DNA, 575 bp, Gossypium hirsutum
  unsure (1)..(575): unsure at all n locations; Clone ID: LIB3829-005-Q6-K6-G11
ggnattacatgctgcttgcggttccctggtcagctcaactccgatctcaggaaacttgccgtgaatctcatcccctttcctcgtcttcactttttcatggtgggttttgctccactcacttctaggggatctcaacagtaccgagctctaacagtacctgagctcacccagcaaatgtgggacgcaaagaacatgatgtgtgctgctgatcctcgtcacggtcgatacttgactgcatctgctatgttccgtggtaaaatgagcaccaaggaagtggatgagcagatgttgaatgtccagaacaagaactcctcatactttgttgagtggatcccgaacaatgtgaaatcgaccgtttgtgacatcccacccactgggctgaagatggcatcaacatttattggcaattcaacatccatacaggagatgttcaggcgtgtgagtgagcagttcacagctatgtttaggaggaaggccttcttgcattggtacacaggggaaggcatggatgagatggagttcactgaagctgagagcaacatgaatgatctggtctccgagtatcagcagtacca

SEQ ID NO: 12471 - DNA, 616 bp, Gossypium hirsutum
  unsure (1)..(616): unsure at all n locations; Clone ID: LIB3829-005-Q6-K6-G2
gnaaatttcactgcngaaattcatatcggattttcaagtcttttcctccaatttgcacttgaagtgatggataccggatcaaagtgaagaaaggagccggaggaaggaaggcggcggtccaaagaagaaaccagtttctcgttcagtgaaagccggattacagtttcccgtcggtcgaattggccggtacttgaagaaagggcgatactctcaacgtgtgggaacgggtgctccggtttaccttgctgcagttcttgaatacctagctgctgaggttcttgagttagctggtaatgctgcaagagacaacaagaagaataggatcattccaaggcatgttctattggcagtgaggaacgatgaagaacttgggaagcttttagctggtgtgaccattgctcatggtggtgttttacccaatattaacccagttcttttaccaaagaaaaacgaaaaggtggcgaccaaggagcctaaatcgccatccaaggctaccaagaagtctcctaagaaggcttagtttcatttatttaattatgtatgtaatttcctttgtgtaggaaaagttaatgttggtaatgtaggattttagggccattgtatttctaaagtctaa

SEQ ID NO: 12472 - DNA, 606 bp, Gossypium hirsutum
  unsure (1)..(606): unsure at all n locations; Clone ID: LIB3829-005-Q6-K6-G3
gagagagcaaaacagacctanatggtgggtggtaaggtaaggttagcaatgggtttgcaaaaacaccaaaacatggaactccacctaaacctccattgccgtctcctagctcagctaacaaaaccaattcttcccaaaaactgttttttcacgttcctttggtgtttatttcccacgatcctcagctcaagtccagcctcgtccacctgatgttaccgaactccttcgactcgttgaagagttaagagaacgagagtccaggctcaaaaccgagctcctagaacacaagcttttaaaagaatcggtttccattgttccccttcttgaaaatgacattgctgttaaaaatgcagagctggaacgagctttgaaagagatggagaatttgaggaacgaaaatgaaaagttgagaacagaggtagaagaaatgaagggaaaggttgaagaagaaaggaaagagaaagagaggaaagtgagaggaatggagagcgagataagtgagttgaagaaaatggtgacgtcgcaccctgtttgtaacggtaaagctgaggtttttggtgaaaacgaggacttgctttcgtcttcgcagaggtttaatgggttact

SEQ ID NO: 12473 - DNA, 607 bp, Gossypium hirsutum
  Clone ID: LIB3829-005-Q6-K6-G4
gcctgtgaaagcttttctgtttcttgtacggtaactagagaaccagtcccagcagctccggtttccatggattcggacccgaacggatggaaacgacccgactcgtttggtcggtttggcaaatttggcggaaaatacgttcccgagaccctaatgtctgccctctctgagctggatacggcttttcattccctctccaaagatgaaaaattccaggaagaattagctgggattttgaaagactatgttggtagggaaagtccactttattttgcagagcggctgtctgaacattacaagcgtcccaatggtgaagggccagatatataccttaagagggaggatcttaaccatactggtgctcataagatcaataatgctgttgctcaggcattgcttgctaaacgtttgggcaagaaacggattattgctgaaactggagctggtcagcatggagtggcaacagctaccgtgtgtgcacggtttggtttgcagtgcattatttacatgggtgctcaagatatggaaagacaggcgctttatgttttcagaatgcggctccttggtgcagaggttagagcagttcacttcgggtactgcaacacta

SEQ ID NO: 12474 - DNA, 580 bp, Gossypium hirsutum
  unsure (1)..(580): unsure at all n locations; Clone ID: LIB3829-005-Q6-K6-G5
cggnaaacatccccaactgnaataaatttacgcaaaacaaaaaanaaagaaagggtgtaagattcatttccttttttcttctcatctctgacaggtaatcggaaagcaacagttcgaataaatagaaaaggcgttgaatttggcgcatcagattggttctctagccgggacacaaattgcagctgaagtcaccnaccggagaacaatcatcctcagcgacggctgatgtgtcgggatttcggaaagttccattggcgaatctccgatgcaacgccccaggagaagctctgtcccctccaatgttaactccaccgttgacgccgcgaagcgcggcaaacaggtcggctatgatgagtctgtcgctgcgtccggatctgtccgccgctttccaggctttcgggacgttatcaccgctggagacggctgaggagtcatcggcgtcggtggcgtggaaggagggagggaagaaagaggagaagaaaggggttccggtttacgtgatgatgccgttggatagcgtgacgaacgggaatacggtgaatagaaagaaggcgatgaatgcgagtctccacgcgctgaa

SEQ ID NO: 12475 - DNA, 583 bp, Gossypium hirsutum
  unsure (1)..(583): unsure at all n locations; Clone ID: LIB3829-005-Q6-K6-G6
ggggnaaaaagtgaggatcaagcatagatggaaaactgggagttctaggcaaggtggtggattaccttctattgttatcattcttcagcatcacattaacagctcagttggacatccccgagtccatcctcccccacgcctacaatcccttctatcaagtttataccacgttaacccaagattatttggtgcttgagcagcctgcttttttcaaggcacttatgacgttggaacttgtttaccaactccctctcgctttgcttaacatctatgggttgttatactctaagccctggttcaacaccacctgcctcctctttggtgcctctatcgttgcctctacgacagctatggtgggagacattctcaattcccagaaggcatcagccaatttgatggccatgtattatccaccgtttcttccattaggggttctggctatagtgcgaggggtggttggacaatcgagcaaggctgctccatccattggcaatggaccttcgtcggctgtgaaaaagaggcttaaagttgatccccgatcagtttcaaacgtcttctttaagagaccatgctaatacaataa

SEQ ID NO: 12476 - DNA, 565 bp, Gossypium hirsutum
  unsure (1)..(565): unsure at all n locations; Clone ID: LIB3829-005-Q6-K6-G7
cccagcgtccgtcgatgatgatgatgatgatgaaggggaatttggtcatggtcatggatatggacatggacatggccattgccatgggcaccaaatgcaaaacaagatggtacctnatgatgggaaaaggccatggatcatatggacccaatggcatggttaatggtcctcccatgaatggtaaaaagggtgggggcaatggggctaaaaagggtggcggcagaaacggtggtgggagccatgagatgaacaaagttaaaaatggtgggtttcatgacattgatgttattaatcatggtaaaaaaggaggtgggggaggtggtgctggtgctggtgctggtgctggtggcagtaagaatatggggcagatgggccaaatgggtcgtcagatgggtcaaatgggtggtcagatgggttacaatatggatcaaatgggccgaatggggaactatccaataagccagatgggaaatttccctgcagttcaaggactaccagcagcagcagcagcagcagctacagcaatgaatggtgttgggtggaggatactaccaaaggatgggag

SEQ ID NO: 12477 - DNA, 533 bp, Gossypium hirsutum
  Clone ID: LIB3829-005-Q6-K6-G8
cggccgcgtgggttttagggttccctcaaccctttgagcaccgccgctcccctttgcgccaaggctccgattgcgacggagatggccatgactcggcgggttcggcgtatgggtgttcgtggagagaaacgcgtgcgtggaggagagatcagcccgagacgtgcggcgcttggacgcttgctgaaggcgttgggggctgttgctggtggcttgctgcttagagctaggtttttttgctttttgtttttttttcgctgtattgggcttgtttaatgctttgggcccgggcatatttgggtttgtacatatccgattctgtatgtgagtatatgtcaaatctataactgaaaacgtgtccattatttatgtatatctgtttgtgggtcgggtcacacgcaggggcttctagctcacttgtttgtttaaaaaaaaaaaaacaaaaaaaaaaaaaaaaaaaaaaaaaaaaaaaaaaaaaaaaaaaaataaaaaaaaaaaaaaaaaaatacaaaaaaataaggggggggccgttttaa

SEQ ID NO: 12478 - DNA, 568 bp, Gossypium hirsutum
  unsure (1)..(568): unsure at all n locations; Clone ID: LIB3829-005-Q6-K6-G9
gcttctctanagtctggtctactcacactttctcctccctcttagcaaccaaanactcagatccgctcggatttctttgtcccagaactagaatggagacctttctattcacatcagagtctgtaaacgagggacaccccgacaagctttgcgaccaggtctctgatgctgtgctcgatgcctgccttgcccaggaccctgacagcaaggttgcctgtgaaacatgcaccaagactaacatggtcatggtctttggagagattaccaccaaagccaacgtagactatgagaagattgttcgtgatacatgccgctccattggatttgtttctgatgatgttggtcttgatgctgacaattgcaaggtcttggttaacattgagcagcagagccctgatattgcccaaggtgtccacggacactttacaaagcgtccggaagagattggagccggtgaccagggtcatatgtttggttatgccactgatgaaacccctgaattcatgcctcttagccatgtccttgcaactaagctcggtgcacgtcttactgatgttaggaagaatgg

SEQ ID NO: 12479 - DNA, 634 bp, Gossypium hirsutum
  Clone ID: LIB3829-005-Q6-K6-H1
ctcgcattggtcatggaattggtccctggaagggcttcagtcaagggaacaaaaccttctttgctcacacacaggtttcatctgacacaaatgaagctttggatgccttgaaacttgctcaagagtcccttaaatctgaaggtgttacagtttcaaatgccagctcttctaatcctggaattcctccatcatccttgatggcatttctgagaaagaactcttcaacttctgggattgtgttagaggattttgataccgtttttgccaacaagttctaccatagtcatcttgatgattcagcaaatataaactcttcagcgatagttgcggctgcttctcttgttgctcggactctctatgttcttgcgagtgataaaaaggattccaccagttcagccctaagttcaattaatgtgaatgcctctctagtagaagaactaattagttgcttgttggactgtgatcctggtctgtcatgtgagttggttagcagctatattataagtgttgatacatgcccaagccattatgttggtgttgttcttggagaaccttcctcaacaccttctcccaatcaggtggatgacatttccaggttcgtgtggaactttctggcagatagaacatcaactcc

SEQ ID NO: 12480 - DNA, 602 bp, Gossypium hirsutum
  unsure (1)..(602): unsure at all n locations; Clone ID: LIB3829-005-Q6-K6-H11
ctgcattctacaaagcagcttcgttgcttaccaanacactctctacgtccattcccttaggcaattctatcgggaatgtgacatatacgggacagtggactttatattcggaaacgcagctgttgttttccagggctgcaatttatatgctcgtaaacccaatccaaaccagaagaacattttcaccgctcaaggaagagaagaccctaaccagaacactgggatttcaattctgaactgcaagatcgctgcagctgcggatttagtccccgtaaaatcatctttcaagacgtttttggggcgtccttggaaagagtattccaggacagttattatgcgttcgtacattgatgattcagtggatcctgccggatggttagaatggaatgggacgtttgctttgagtaccctctattatggggagtacctgaaccgagggccagggtccaatacgagtgcaagagtaacttggcctggttatagggtcatcaacagttccactgaggcaactcagtttactattgagccatttatacaaggaaatgagtggctaaattctagcaatattccattcgctctcggcttgaattgagagctaaatg

SEQ ID NO: 12481 - DNA, 562 bp, Gossypium hirsutum
  unsure (1)..(562): unsure at all n locations; Clone ID: LIB3829-005-Q6-K6-H12
cggccgcgtgggaatataaatttaaaggaaaatanaagccatttattatcattattattttcttcgagttttgccttcagattcttcctctttgtaagttcaaatctaaaaagccatggcaaatgcagcttctggaatggccgtgcatgatgactgcaagctgaagtttctagagctaaaggctaaaaggacataccgcttcatagtattcaagatcgaggagaaacaaaagcaggttgtcgtggaaaagcttggtgagccaagtcaaagctatgacgatttcactgctagcctccctgccgatgagtgtcgatatgctgtatacgattttgactttgtgactgctgagaattgccagaaaagcaggattttcttcattgcatggtctccggacacatcaagggtgagaagcaagatgatttacgcaagctcaaaggacaggttcaagagagagttagacggtattcaagtagagctgcaggcaaccgatcccaccgagatgggactcgatgtcataagaagccgtgccaactaaatcggagtctccaagaggcatgggtat

SEQ ID NO: 12482 - DNA, 613 bp, Gossypium hirsutum
  Clone ID: LIB3829-005-Q6-K6-H2
gttgcttcttgctatcccacccacttgaaatggctggcagtctatcccttgctgtaaaatctgttaggtatactcgtgggagttttatattccctggtgctcagccatttcctcaccgaaacttctctgaagaggttgctgttcttgataactatttcgggaagcttggcgctggtagcaaggcttgtgtaatgggtgggctggataaacagaaatggcatgtgtactctgcatctgcagaacctgtgaccgccactggcccggtttacactctagaaatgtgcttgactggtttggacagggataaggcgtcggttttctacaaagaccaatcaggctccgcagctgtgatgaccattaattctggcataaggaagatccttccagagtctgagatatgtgattttgagtttggaccctgtggttactcgatgaatgcgattgaaggtgctgcaatttctactattcatgttaccccagaagatggatttagctatgcaagctttgaagctgtgggatataatctgaaagataagaatctgaagcagttggtcgggagggtgttgaaatgcttcaaaccgagtgacttttctgtagcagttcacgttgatgt

SEQ ID NO: 12483 - DNA, 325 bp, Gossypium hirsutum
  unsure (1)..(325): unsure at all n locations; Clone ID: LIB3829-005-Q6-K6-H4
atcataatctagcacataattacggtaatcaactgatttcaatcagctagtagtagaaggagccatggctttcgtcacagaaactggttgttaaacctgatatgttgttcggtaagcgtgggaagagtggtttggttggcttaaatctggattttgctcaagttattgctttcgtgaaagagcgccttggcaaagaggtggaaatgagtggatgcaagggacctgttacaactttcattgttgaacctttcatccctcacaatgaagagttctaccttaacattgtctctgaacgacttgttgcaagcaatttagctnactagga

SEQ ID NO: 12484 - DNA, 611 bp, Gossypium hirsutum
  unsure (1)..(611): unsure at all n locations; Clone ID: LIB3829-005-Q6-K6-H5
tttctttctaaaacttccattttttgattttttttaagtgaaggaacagtngaaaagcaacaggaaatggcaaatatagatatcgatgggatcttgaaggagcttcccaatgatgggcgtatccctaaaaccaagatcgtttgtactttgggtccggcttcacggtccgtacctatgatagagaagctgttgagggctgggatgaacgttgctcgcttcaatttctctcatggcagtcatgagtatcatcaagagaccttggataatcttaggtctgctatgcacaacaccggcatcctttgcgcggtcatgcttgacaccaagggccctgagattcgaactggattcctgaaggatggaaaagctgttcaactgaaggaaggccaggaaattaccgtaacaaccgattacgatattaagggatatgagaagatgatctccatgagctacaaaaagctggctgnttgatctgaagcctgggaaataccattttgtgtgcggatggtacaantcacactttcggtgttatccctgtgatcctgctgctgggactgtgagatgccgatgtgaaaaccagcgatgatcggtgagaggaaaaagtcaaccttcct

SEQ ID NO: 12485 - DNA, 573 bp, Gossypium hirsutum
  unsure (1)..(573): unsure at all n locations; Clone ID: LIB3829-005-Q6-K6-H6
ctcgnaacttccttttccgttttagatctcaaaatcaaaagctctctttttcatctcatggctgctactatcgtctccgtcaaagctaggcagatcttcgacagccgtgngaaatccaacggttgaggttgatgtggaaacatcgaacggtataaaggctagggccgcagttcctagcggtgcatccactggaatttacgaggctcttgagttgagagatggaggttccgattacctcggtaaaggtgtatcgaaggctgttgctaatgttaacacaatcatcggccctgcattgattggaaaggacccaaccgagcagactgcaattgacaatttcatggttcaacaactggatggaacccaaaatgagtggggttggtgcaaacaaaagctcggtgcaaatgccattcttgccgtgtcccttgctgtttgcaaagctggagctgaagtcaagaaacttcccctttacaagcacattgctaaccttgccggtaacagcaagttggttcttcctgtccctgctttcaatgtcatcaatggtggttcacatgcaggaaacaaacttgctatgca

SEQ ID NO: 12486 - DNA, 595 bp, Gossypium hirsutum
  Clone ID: LIB3829-005-Q6-K6-H7
gtcgaaaaatcattcaaaaaagatgatttcatcacagttcagtgagactggtagcatggtcagtgttagctctatggagaataacttgaataacaacaatgggcttccacaggtgagcggcagctgcttgatggggaatgggtttgttaacaacaattcaggcattggaagtggaggaggatttgggaatatgaatggtgggatgggtctttctcccaatccaactgctatgagatctaccatagggaacaactctatgaattacactggaagggtgagcatgccattgatgcctcaagatgctatgaaccatcagcaacaagaattagctaacagattactgaatgggcttggagccgtgaatgggtttagtaaccttcaatttgattggaaatccccctaaattagccttgctgactattgttttatgcatttgcggaggtgtgtggtgttaatacagagtgcttgtgccatgcatcctggttgtgccttttgagtttggagtggtgatgtatagttaagaggatttcttcaacctgatacctgttatagagagaagggcaacatgtaactcagccttggcggttgaatagtt

SEQ ID NO: 12487 - DNA, 564 bp, Gossypium hirsutum
  unsure (1)..(564): unsure at all n locations; Clone ID: LIB3829-005-Q6-K6-H9
cggncgcgtggggcaaggtctgtccctgctcataaggttatattgcaagcatcagggaactttgttctgagctcatcacatgaagatgttattcagctacagcaggtagcatatccaactctgcacgcgcttcttcagtatgtgtatgcaggccaaacacagatttcagaggcacaacttagttcgttgtggggtttggctttacggttcgaagtgatgccactagtgaagcaatgtgaggaagcaatggagcggtttaaagcaaacaaaaagttgtccgactcgggtgagactatggagttatcatatgcgagttctcatatccactttggaggaaatttctgttgtgggctcccaataaacatgcagagactccaacaattgcgttcaacaggcgagtacagtgacattagcatttacattgagggtcaaggtctcattgctcgggctcataaagtcattctcgggttatatagtgtcccatttacaaagatgttcacgaatggaatgtgtgagagcaactcacctgaggtttgtttaagggatgtgtctccagcagcattg

SEQ ID NO: 12488 - DNA, 565 bp, Gossypium hirsutum
  Clone ID: LIB3829-005-Q6-N6-A1
ctagcatctagccgaaaaacatatttgacagaaaaataattgaaaccagcattgagcaacctctgctgtgaagtgtccacattattatttgtcatgtttgacacagatcctatactgtgttgaggattgtgtcatgccgacacagatactcctccacttttgaagggtccaagtatcagagaggtggcaaccaagtgcagctttatgagctgctagatcccctcctaaaagatgattacatggggtctatatgttttcgtatttctatatattcttgccttttctagatatgcacaagaggcagtatagtactttttaacttattatagtccatagctctttttgaaagaaaaaaaaaaattcttctcaattagatgacgatctacattgcacgaaccagtcacaatcaattcaatttatcagatttctatcttttcaaatttttccttgctaagaaacttactcatgcattttgactctagaccagaaacacaaatctggattactgacattcaataaattaaacttattcccatgtttggcatggttatttataataaattaa

SEQ ID NO: 12489 - DNA, 544 bp, Gossypium hirsutum
  Clone ID: LIB3829-005-Q6-N6-A10
tcgcggatctagaatagtcagaagagttctttttctttgtgggtggattagagcaacaagcaagacaagtgcgtgaaatctggtgtgggaaggtgcataaactgtggttccagagctgatcttgtggagtacgagaaagtattgaagcttttctttgtgcctgtttggagatggcctgggaaagatccactcttgcattgtaacaattgcaaacttttcttccctgaggatttgtcttttccacctcccaagatcgattcttcatctgctgccgtttcagattctctgcgttgccgtttttgtgacaggcttgttgagcccgagttcagcatacacgaacctggtgaagatgtgttgtggtcgaaattccatatcaataggataatggtgccagtatccttggagccctgatgacggtgtcaagaacttcaccaaactgagatgttcgaatgccacagtaagtatgcaacacaaataaggaagatactctattttaacactgaaataaaagaagcaaggaagatactctgttttaacactgaac

SEQ ID NO: 12490 - DNA, 518 bp, Gossypium hirsutum
  Clone ID: LIB3829-005-Q6-N6-A11
aaaactcaaagcaacaaaagtctaaaagcttattacacaaaagatttaggttatacaattgataaacctctcttcaatctatagtatgcttatataattgttctatggtaatcctgggaattcaatagactagtaacattgagtacagatcaccaactacacatgctcagggcactccataagtaaaaccacaaaatgatgtgagaaaacaaaatgcatacccaaggactttgtgacattatctctgcaaaagtatcatgggtaggagaaagagatagtcgatgccatgaaatgatggcaaaactgcaaagagtggatctccgtaaccaacggcatctccatcttcgaagaggatctttaagactgttccagccatatcagacctaataggtagttcacaaccaaattgattcaagaatcctatcacttgtccttctttgatcaaatcaccctgcaagtacttattacttacgaggatcaagaaaagccaggtgaagatacaaggtcatgatagtaag

SEQ ID NO: 12491 - DNA, 186 bp, Gossypium hirsutum
  Clone ID: LIB3829-005-Q6-N6-A12
ttttaattttttttttgggagggtagaactaaatattttttgttacattgaacgaaacaaaggggtttacagggacttttaaattgaacgaaacagggttttttatcttttttaaatctctaaataaatgaaggggggggggggtgttttttccatattcaaagaacaatggtaagtttctttaag

SEQ ID NO: 12492 - DNA, 527 bp, Gossypium hirsutum
  Clone ID: LIB3829-005-Q6-N6-A2
atcagaatcagatcaacccaattcattccaaaatgcaaacttccagatttcagctgtcccattcatacttgttttaaaaccgaccatgtaaccgttacaacaaaacgtgcgacaatatgcaatttgcaaacaaataatacagctttgtgaaaaagggctagcctttacaatagaaaataacccaccaaatactcacgtaatcatattaacaaaaactccactatgaaggggaaaacaaaatgcctaataattcatgaaagtataacggtagctgcatccttaaggaaggaaatccaaactcgggcttggtaatattctcattctctcatacaatctcggagtagcgatcccatgttttctagcacctgatctcatatgaaccagcctttgtaatatagcgaacccattcaactgtgttatacccactcttttcccagaccttaagaaaccggacacgtaaaccggaggctgtaaacattggaacctgaaattccatctgaattggaggccttgtccatgacttcttt

SEQ ID NO: 12493 - DNA, 580 bp, Gossypium hirsutum
  Clone ID: LIB3829-005-Q6-N6-A3
aggatacaagaaaaaacgcatatcaccttatgcttaatatataaatagaaaacattacatatacagcttgcaaccaaaatcaaaataaaaactatatttaagaaccataataagctagataaatcacaaccatccattattcatcatcatcatcatcaaagattcaacggtgcctaccacgactttcattgagcctattgatcatgtacagagcattactggtaactttagccacattcgtgatcttcctcttcacattagatttaaccttgccgtcaactccttcgaacccatcaagacacgtgtcctcattcgtcagcgccgcactcacccatgtccgcgcattactcatctgaaactcgaacgtctcccctctcaagtgcttcaactcccctaatgtcttgctcaactcctccatcgactcatctatttgctccacgcagtcactcagtgcgactcgttccctcttgttgtaccccgtcacactcgtcgacaagtagttcgacactttacgggcacgggacaggctgacttttacggcggcttgggctaactcacgtggggtgttggctgggccgga

SEQ ID NO: 12494 - DNA, 565 bp, Gossypium hirsutum
  Clone ID: LIB3829-005-Q6-N6-A4
aatagaacaagcactactgcaattttatcattaacaatcaagataacaaaaaagcatccaattcaaatgcatctctgatggataatgaggagaaaccaaattatttataacaagtccaccctatcagcctctacaacctcagctctactaaaattcactcttggctaaaaatactagccaccattacagcagtgaacaatgctcaaaaacagcatagaggtgcaaaattaaaagtttaagcgtcattaagagcaaggactccaggaagttgtttgccctcaagaagctccaagctggcaccaccaccagtagagatgtggctcatcttgtcagcaagcccagctttttccacagctgcaacagagtcacctcctccgataattgttgtcactcccttcccactgagttccgcaagcttcttggcaaccgcctcagtgccggcagcaaacttctcaaactcaaacacacccattggtccattccagataatggtctgggtagtgtccaaagattcactgaaggttttgatggagtcaggtccaatatccaagcccatccaaccatc

SEQ ID NO: 12495 - DNA, 554 bp, Gossypium hirsutum
  Clone ID: LIB3829-005-Q6-N6-A5
aaaacgaaaaaggatgtcgtttgctattggcggattatgcaacagtcggagcaaacaagtacgataaatgacgatgcaagactaaggtcgtgactgcaaaattacagggtctgtgaaggatgaagagccgtttgattgtgtacaaaatagataagatgttgttgcctagggagggagttgttcaagccaatggaagcagccgaggcaccacagccatccaaatccaaccacaagacagtagcaacagcacccgcagaaagtgatgctcaatacttgcacataataaccaatccaagcactgaagcacataaagcaactccaagattacttactagacaaagccacacattatctttgtaatcctaatactgaatcaccattaacccctgctcagttttcagtttctttgctatgctacggatggcgtaaaaatgaaaatgtcatcaagcctatcattgctagcggagttgccaccgtaaactagaagcccaagttggccatcccttacgccgctggaaaaagcacaccatccacgaggcccgggatgagtttct

SEQ ID NO: 12496 - DNA, 507 bp, Gossypium hirsutum
  Clone ID: LIB3829-005-Q6-N6-A6
aaaaataaaaaaaaaattggatgggggagggggaggtaaaaatttttttatttttttattaatgggaaaaggggaaaggggagaaaaaaaaaaaaaaaaaaaaaaaaaaaagagaaaaagaaaaaaaaaaaagggggcaaggggaaaaaaagggaggaaaaagaaaaaaaaaaaaggggggggggagaaaaaaaagggaaaggggaagggcccaaaaaaagaaaagggggggaaagaaaaagaaaaaagaaaaaagggagaagaaaaaagggaaccaaaaaaaaaaaaaaaaaaaagcgggggggggaacaaaaaaaaaaaaaaaaggggggccagaaaaaaaaggagggggaaaaaaaaaaagggggggggaaaaaggaaaacccaaaaaaaaaaaaaccaaaccggaaaaaggggacaagggttaaaaaaaagaaggaaaaaaggaggggggccggggaaaaaaaaaaagaaaggggggaaaaaaaagcaaaacaatcccggaaa

SEQ ID NO: 12497 - DNA, 528 bp, Gossypium hirsutum
  Clone ID: LIB3829-005-Q6-N6-A7
aattcaatgagttttgagagagataatggcattaactatataagttccaaacataacatgtcccaaggcaaaaacagaaaagagagaagtattttacatttcactagaacttggcttcaacaacccaacccaacccagctcagctcacacaaatagaaatctcatgtctgcctccgtcaattttcctagagcctctgtggagccacccaccgtcccttcaaacactaattccttcttttcttgcagctttaatatcctctcctctattgtgttctcaataacaaacctcacaatccttattggtttacattgccctattcggtgtatcctatcttgtgcttggcgctccacagctgggttccaccaagggtccatcaagaaaacatgtgatgcaactgtgagattaagggcaacacctccagctttcaaactcatgagaaatatcttgcaatctggatcctcagtaaaactcttaattgcagcatctctcgcagccaaggacatgctccctactagttgaacacatta

SEQ ID NO: 12498 - DNA, 517 bp, Gossypium hirsutum
  Clone ID: LIB3829-005-Q6-N6-A8
cagcagaaaaaaaggctaactttgcatttcccaacattgcatacaggaaaagcaataatacaggggaatttaacttatagtttataaactaacagacagctgggattcctagggcaattggtgagtacacagaacagaaaaaaaaaaagcagcaactctgcaaatggctgacaatactacttagcatgcatatggaagacttctaactgtatgtacactccaatttagaattatgaactcaatgatggggtactgtataaagagagaaattacaaagggaaagtgattgaatcaatgaaatccggttgaccctctagactgatacagctccaatctacttttggcctcttgtaagagtttgccagttgcattctgggtcatgttggattgcctggatgcccattcgagcacggtaagaaccttggcttgagcaagttcctcgctgtcaggtacatggtgggaaatgtagcataggagaagtaatgctgggagttgaacaatatgttccccaaaatac

SEQ ID NO: 12499 - DNA, 426 bp, Gossypium hirsutum
  Clone ID: LIB3829-005-Q6-N6-A9
gggggaaaaaaaaggggggtttaaggggaaaaactttataaatttccaaaaaacccaaaaatttttatttaaaacccattggggcatttttaaacaagaagagcccaaatcccccattattttcccacccccggggcctttcccattacccaaacccaaaaaaaactttaaaaataaaaaaaaaacccaccccttatgaaatttcaggaaaaaaagaaacaaacaacccccccggggggtttttttttttggaaaaaaaacaaaaaaattttttttaaaaaccttaaaagaggggggtttaaagggcctttaaaagggccactaagggaaacaggttggtctttaaggggcttaagggggttaactcccaactttccgaggggaaaggcaaaaaattttttggggagggggtttggaaaaacaaaa

SEQ ID NO: 12500 - DNA, 567 bp, Gossypium hirsutum
  Clone ID: LIB3829-005-Q6-N6-B1
gaataaaatggtggttcaatacatacaattttatatgaatgtcgtggacagcacaacaggcatcaaattatcaaaatctacacacacacaaaaaagcaaattataaagaccacctaacagcagcaaatcaaacgtatacaactatatataatatcatgaaattgatgggcccttttctcacaccgacatagaccatgattttacaacaacctaattgcccagctctcttattaaattacccttcattgacaactgcattttaacaatgaaattggctgaaccaaagatcaggaagcactggcagcaggtggagctggggttgggttgaatgctttctgctcggcacagcttagctcctcgtgtggccctgcttcctctcgcccaacacctagtaagtcaaggtaatgaaggtaatgggagatgatgatgttcatgggatcgatatcgccttgcccgcaagtgtaatctccgtagagaacgttcatggtggagccaaaagtaggaccccgtttttcctctgtgtcattcttggttggtttccagttacccacgaaaatgtcgtgtgct

SEQ ID NO: 12501 - DNA, 530 bp, Gossypium hirsutum
  Clone ID: LIB3829-005-Q6-N6-B10
ctggcaagcccgcaaatgcataaatcccctctcacagtgctctcaaaaggaaccatttatatatcttaacgtgagattctacccattccaagacaaaatgggcatcaaaatgccatttaaataaaataaatccttcgctaaagtagtacaagtaataaaataatcaagtaggtcatctattccagctttatccgatccatgtcattgatcactccttcaagcttgacaatctgtcgaaggaaataatcaccatatcttttcactggcatggattcaacaacatgaatcatgtcatcatcaatgtagaagtccacatcagcattagagataatctttccatcagaatcaacagcatgagttttgtgcttgtatgtcaataagatggtcctcagagtgggctcatccacttccaagtaatttgcaagcttcccaagagatatagttgaatacactttaagaaatgtccgaacacctgataacaactgctgttgcttcacttcatatagaaacagcttcaactgaagtctata

SEQ ID NO: 12502 - DNA, 490 bp, Gossypium hirsutum
  Clone ID: LIB3829-005-Q6-N6-B11
atgagggatgccctgcaaccagggtttccaatgctgtcatatcttccacttcaaatttaaaatcatgcagggactgtcaaaatattgaaatgataatgaactaaccataaggacagggtaagattgacagatcaattcttgcaagttattgctgaatgacatgatttacagaaaacaatagaaattgacaatgttccgtctgtttcaaaaatgcagcatgggttaattaggaagctatatacatagttgggatttgcacaacatttataaaccatccatctgctgaaatgagaatgaaagaaagggttgcagtttgacaaaacagaggagatcggtcaagcactgttcccttctccctgtagtatcattttctgcataaaatcccaggcttctccttaagcattggtctttacgccaacacttccatgggcccaaaaaggcgtagcaggagtgcgcctcagtgccttcactgccattgggttacccttgc

SEQ ID NO: 12503 - DNA, 492 bp, Gossypium hirsutum
  Clone ID: LIB3829-005-Q6-N6-B12
ggggggggggggtttttttaatttttttttttttttttttttttttttttttttttttttttttttttttttttttttttttttttttttttttttttttttttttttttttttttttttttttttaaaccaaaaaaaaggatttttggggtatgttgggggaaaccaaaacccccaaaaaaatttacaaacccctttgggaaaacccaaccctaaaaatttccaaatttgaaaaaaaaaacccttgggggtttttttagcccgggggcccttacccctttaaaaaggggcccccggggcccccaaatttttttttttacccccccaatcaaaaaatttttttaaaaaactttgggccaccccgccccccaaaaaaattcaaatcccaaattgggggattccctggaaaaccctttttcccttgtaaaactaaataacaaaaaaaggggcaaaaaaaaaatttttccccctttttcgggaaacagccaaaaa

SEQ ID NO: 12504 - DNA, 574 bp, Gossypium hirsutum
  Clone ID: LIB3829-005-Q6-N6-B2
gaagactagtaagatactgaactgaaatctacaacacttaagacacaagaagcaatttaaggttatacagtatcaagttctttgccaagcttgccaccaagcttgccacatgcaagttttgcatctcttcagttggaaaagaagggaagagaaatgataatagataaactagcaagaccagagggatgaaagaggcttccctttctgacaagtcacgacatgttccaatacgatctcctccacttgtttttccacatcttctatgcactgggaagcatctatcatcttccatgaagaatcttcaagaagcttatagtgttgtgcaactttcttctgaaactcgagctgctcgtatctctcacctccgtagcctcctctttctgcagctttctcgggcggtatatcaaggtacactaccagatctggagctattagcccattctctggtgccttacaccattcgaaatcaagtcctttagcagatgagaaagcgactccagaataagagtaacggtctactataagggtggttccagctttcagttttgcttccatcattgatctcttctcccac

SEQ ID NO: 12505 - DNA, 513 bp, Gossypium hirsutum
  Clone ID: LIB3829-005-Q6-N6-B3
agagtccgacaccagagtttactcattgattacggggttacagatcaacagcgcctagtttaagcatcattagacagggaattgggcataacttgaatcccatgttgggggtgaactgggatacgaggggcgggtgagtgaacatacccaggggagagagaaatggggtatctttgtagaatcatggaaagagcagtctttgtttcattgattgcaaagggcatcccgacacaagctcgaggtcccattccgaaaggaataaatgcagccgcattgtacttggtagctttcgcgatcccttcctcgaacctttccggtttgaaaacatgggcatcgtctccccataactcagggtcatggggaagtgccatgtttgggatcaaaacatttactttagcaggcaagactagctttcccacttgaacttgtcttctagctcttcttaccatcccatttaagggagtatacaatcgtagagtttcattaatgatcatgctcatgattttgagttcg

SEQ ID NO: 12506 - DNA, 571 bp, Gossypium hirsutum
  Clone ID: LIB3829-005-Q6-N6-B4
atataattactctatctatacatcaatgatcaaataatttttggagggtgaattcatatgtcaattccatttgagtaatttctaggagtctttctttttcaacttgaaaaatgaggtgattacggtaaataactagctagatcgcttgttagtaatatatacaatgatcactataacaaatcaaactagtaaaagcctagttatatagagcaaccacaggtaattaatttgtccctaccaaactttagccatacatatatgccaactctatataaacccccaaaccccctcaccttctcaacctcaaagccaaaagcattgtgcaccattttcactaagccttcaattttttattttcctataacctatttctagctgcaacatcaaattctcattggctaaagagagaaattaaggaaaggataagacaaggggagagaaatagagagggggggagagactacattatttcttcttttttttttgcaatggaaactattgtttttattatactatacgtgattctctttctctcaactcttctttcatatccatttcttaggaagcaaaa

SEQ ID NO: 12507 - DNA, 553 bp, Gossypium hirsutum
  Clone ID: LIB3829-005-Q6-N6-B5
aaacaaatatcttaaattttatttaaaataagaaaacataaacttaacattcagttctaggcacagtatctatccaaatgaaagctgtagcattatagatgtcgaatactaggaacataaaatctaagtagcacacactagtggataaaatgcttcaagaaactgacaaaccaaaaggtgtttgcttaggtcctttgcttgaggtggccttcattggcaagcttgaagagacgagcctgagctgctgcagcgctgtttgaaccaagtgctgcaacaaaagtctccctaacttgcttagtcgagaatgggaacctattattcaccatggagttgagaaatgaggctgttccttctcggtaaagcgccccaagtccatcagtacgtgtgtttgaaagtgcttggggcaagctcatgcttgttccaagtccaggaacgttggtcacgccaaatgcgttgcctacagtgccccaccaaccaagcagaccccatatcagtgtggggtgactcctccagaaatcgcatgtaccaccaattggtggagttggagcaggaa

SEQ ID NO: 12508 - DNA, 543 bp, Gossypium hirsutum
  Clone ID: LIB3829-005-Q6-N6-B6
gggaacaattgctaagtttagaagttaacatagataaaaaaaatattacaacccaatgtgagaactattgttaagtttagacccaaattaaccctattttttattttaattattcagtcatagcttacatattgcatacttaatcatgcactaaattctccggctatgctttggaattgattgttagcttacctcatccatgaaatcagagagctatagtccttttcataccattaatattccctatgtctggcaaactcgcataccatatattatcacatttatagtattacaaattatatttcaaaccatgatcacgactgatacttgacagctgaatcagtttaaatcatgaaagatacatataagaataataggtaatttgtatgtttaatcatatcaatctacgaaatcacactttgattaaatggcaacttaaaaggctgaagagctaactcagtgtctcccatcatggagaagtagtaacttaggaactctttgtatcgaaaagctctgtataatggaggctgtgctgcattggtc

SEQ ID NO: 12509 - DNA, 512 bp, Gossypium hirsutum
  Clone ID: LIB3829-005-Q6-N6-B7
catctaaaaataatggtatcttgcattcagggtctccactaccagggggtctctgatttattccagtcaataaaaccatacacatagcctgttgtcccctaattacattacagtaactgggtttcatatccatacaaacaccattcaaatcttagacacggcacactatcacatatggctccggaggaagtccaaaattagctcgttcacgagctcgggtgattgctcttgaacaaagtgggttccttcaggcaaatatattatatccaaatcaggtacaagttcttttgccttcccaaactttatgtattcttccatcccaggaaatttcaagacataatctttgcaacccattatcagtaatgccggaactttaactattggatctgttatcccaaagtcttcatcgaatgacttataagcgttgcattctacacaactctataccctgatggtatggtcgacctgctgctgctatgacctatatggaacttgtaatgcagtcttgaatc

SEQ ID NO: 12510 - DNA, 524 bp, Gossypium hirsutum
  Clone ID: LIB3829-005-Q6-N6-B8
gaaacaaaaaagttacttagaaacttgaaaggagtaaagtacataaactgcgcatgctttgctaagtattgagcatgaaaagctcaagaaaaagttcacttagaaacataaatgcaacaacagtcacagcataatgactatttctttcagcaactggaagttgagattagaatttgcccaactggcataaagtttttccttcctaatcctcgtactccgcttcctcttcctcatactcatcttcatcagctgttgcatcttggtattgctgatactccgagaccagatcattcatgttgctctctgcctcagtaaactccatctcatccatgccttctcctgtgtaccaatgcaagaaagccttcctcctaaacatagctgtaaactgctcacttacacgcctaaacatctcctgaatggatgttgaattgccgataaatgtggatgccatcttgaggcctgtgggtggaatgtcacaaactgttgacttcacattgttaggaatccactcaacaaagtaggaa

SEQ ID NO: 12511 - DNA, 519 bp, Gossypium hirsutum
  Clone ID: LIB3829-005-Q6-N6-B9
catcaatggtgtatcatttaatttatactccgcaaataattccaacaacggataacaagtttcaacacaacgtctacttcaaggaatgcattcaccaaacatatctatggagcatccactaagaaagaaaatgcacagctacgaacaagaagatggggaatgtgagtttagaataaaattatcgaaaaagcttgtctcggaaacctccccaaattcattccttaagccaactttagagagaaaacaaaacctaaaacatctgtgtcgttggcttcttcctatttttgcaatcatcatcagcttatgcatcagcaaatcctagctcagagagcttcaggtgagcttcagtgtaatcagcaaagaaagcatcctcatcagctgcatatttgtcaaccaatggacggaaaacagggtcggaaaggagaactttgtcagttggcaactgtaacaggccagccttctctccagtcaagagctccttgaagtaagagttgtcgaagataagagggttggtagtcc

SEQ ID NO: 12512 - DNA, 525 bp, Gossypium hirsutum
  Clone ID: LIB3829-005-Q6-N6-C10
acaaaattgaggttggacattaaaataaagatacaacattccatattatacaagggagaagttgaacattatggaagcaaagatgtaataagtttattacacagatacagcctaactgcaaatgcctctctaacatacaatgatttttaaagaatttcatctgaactttgtggaaactggaaagttcccatttttaatgcttaggagtaagggaaggaaatgagggtattgactgcaatattaacttccggccactctgaccaccaggggttgaccctaactcacattgaggaggagagatcctcttactgttaggggatgaagtcttaatcccagttccaggagacgaattgcctcgtagaatctcgggcgtttcatcttcagcaatagtttggaaatgcttttcgataatgttttgaggtcgaatgatgctaggcttaccatatctttggccagtatacagtgcggaagatgatccgatggcaatgaaggaccgtggcggtttgcttttcgatgaaaatggca

SEQ ID NO: 12513 - DNA, 522 bp, Gossypium hirsutum
  Clone ID: LIB3829-005-Q6-N6-C11
aaaagctcaaactccataaaactttagacactaatagttctctccatatgactagttcctctaaagagtgaatttggtagtgatacacaatatagttgagcatcaagcacataatgtccatagtagaaaagacgacttaaaacccaaccaacagaacatgagaaatgcttcaatttgtctgcattgcttcagtgtgatacttctctagatcagcgtcaagatcttctgccgaaaccttttctccacggccccttccctgtccacggcctcttccaaagccacggcctccagcaacaccacgttgcctacggaatcctccacccctgccacggccacctctaggggctccattagaacttccaaaagcaacattggcaactgttggtgcagcaggggtagcaatgtttgttcccacaatctcgattttcatcggctttccatcaagttgaacattattgtatctcttgaccgcagccatagcatctgctttccgtgaaaagacaacttcagcggttcccttcg

SEQ ID NO: 12514 - DNA, 282 bp, Gossypium hirsutum
  Clone ID: LIB3829-005-Q6-N6-C12
gcgggggggggtgtgtaattaaataacaataactttaataacaaaacaggtacaacactgtcaatgggaaaactcgagcggctcatcaacagtttgcttgtatgaacaacaatgggagaagaaagtgctactatgttctatgctacttacatcaggggggggggggttccaaacattatttggaggaacgtacgatgactcaacataaatgggaagcaaagagaaaatgataactcacaagctgatggagggagtgcattgactacagggtgtctgagactg

SEQ ID NO: 12515 - DNA, 577 bp, Gossypium hirsutum
  Clone ID: LIB3829-005-Q6-N6-C2
aatacagtcagcaagcctttatttaatcaaccattcacagaagggccaaatatctttgttgcaagagaataatcataagctcagagcagaccataaaatattacatagatttcttggtacttctatttcatccttgtcatacctattattttttacataatcataataaacatacaggaaatttaaaaaaaaaaaacctaaacccataatcaacctaagatattttcgtcatcatcacatcggccactacctatcattgtagagttataatggggaaggcagctctctggcagctgctgctgctgctgcttggcttgctgctgagaccagtaggtgtgggcgtttagaaccctgtccaagagttcttggggtaccggctctccccgcctttgctgcggggatattcttgccgtgtgcagtagtgttttccacttatccttcaaatcaacataagtgcgatgcttcgcattatcaaaagctcttagtttaacatcacgccaccttccagttccaagtttctcaacggcctgaaccaaggcttcaacttcagaaatagagaaaggtcgacgaattcttc

SEQ ID NO: 12516 - DNA, 565 bp, Gossypium hirsutum
  Clone ID: LIB3829-005-Q6-N6-C3
ggaagaaaacgttaattgttctattgatttagtcttagatccaacaaacatctgaagatcacaaaggacttgtttagtcttagacgagacaaacatacttacgattacagaatacgtacgtaataacttaatccttgcagcaaactgagaagccctttatttttcactttggttttagctttttaagaagacgaatgacggccttcacagagagggctttcatcaaagttcttagcaggatatttagccgtaaccatcccaacttcaaagaccaaattatccccgctggatcgaatcccggttatggaccaccatttgaacaaagcccgtaccctgatcccatcgagttccgctatctttccgttttcaatcttccccgttacccgcttcgagtaagtagccaggtagttgtcaggcgggagcgtgatcttgcacgtgccaccgagatcaatggcgaagttaccggatgtttggttaagagtgtacttcgtcaccgaggccggaagaagacgatcggaaaaccatatttataagctcggtgtgtgcctgggtgaacggaggtttg

SEQ ID NO: 12517 - DNA, 563 bp, Gossypium hirsutum
  Clone ID: LIB3829-005-Q6-N6-C4
atattaacaaaatatatattaacaacatatttagggtttgaaattcactgcagatgaaatatatgaagcatcattgagatgtcatacattgaaatccttaatttgcaaataatagatgaaccccgcactgttttatctccaaagaactattccttagtttcgacccataatgaagagggtagaatttaaaggaagcctcattgtaaatgcacttgtttgatgcctggctttcaacgaactcccaaactttgaaatcatcatataagaggaacatgtgatcccacccaaacattcggtcttcatggtttagtactcccaccccccaaagggagaatgaacaagtaaggtcatgactgtcgccattataggattttagatgacattcacatctaatgccaaaattcctaccattataacgctctgggaatgaaacaacgacggaagcaacaaaagatggaaagtttatccaccactctgaaggcaattggatgtttatggaagatcctaagctcttgaaatcaaaccattccgggatttcacttccggggacgcatgtaataaac

SEQ ID NO: 12518 - DNA, 552 bp, Gossypium hirsutum
  unsure (1)..(552): unsure at all n locations; Clone ID: LIB3829-005-Q6-N6-C5
aatcgttaatgagaatcttcacttcaaaatgataatgtattgcttaataatgaaggctacactaacctatcatcaaaatcaatagtaaccatattactatnaaatgaagtgaaccagatcgaaactagtagaataatacagtataaaatagttcattccaagtatcaggtaatccgggaaggcaccaatggctacaatcagctgacttttgcgggttagccctctgagaagggctgaaatcaccacggtaaattgatgggtgcccgtctttcctaagctcagagagcattgttatgtccatcaaatatgtaggaacatgcatctccctgatgacttcattcactacacccatctgatctgcatatgcactggtgtacgtagtccctttcattggttccgtctctccataacagttttttgcagtcatcgcagttgctgcagcactccattcatttggattgtaatggtcgggggaagcagactggaaaaagactctggttctagttatgtcgacattggagtcaacccaattggcccatgttcttagccctt

SEQ ID NO: 12519 - DNA, 436 bp, Gossypium hirsutum
  Clone ID: LIB3829-005-Q6-N6-C6
cggccacgggggcaaagtggggggaaaaaaaaaacccgggggcggggaaaaaattgggcccaacccccaaaatagggggacacctggaaggacgggttttggggtaaaacgggaaattaagtttaaagtttgggggaaggctaacaggggcatgcttgcaaaaattgaaaaaaaaaagttggaaaaaaaaaggaaattcccaaccaaatatgggctaccagggactaactaaaacccgaaaaaaccccctgagaaaaaccttttttaaaaaggaaaggggccccaaggccgggatcctaaaaaacccaggggggccccccctttgaaaaaaaaaccacccggttaaagtgaagccttttggccgggaaaaaaaaaaggttaaaaaaggggcccttttgggcctccaacaatttaaaaggcccggccccgggggccc

SEQ ID NO: 12520 - DNA, 523 bp, Gossypium hirsutum
  Clone ID: LIB3829-005-Q6-N6-C7
atatgattcttttatggatattattaattaattaagcttaataatgatatacaaaagcagtgttggaaaatcaaacttccatcatcttgtttatttttttttattatcaaggagacactcctatactactacatgcctctttcccaatacaccaaactcgacggctcctacttgtacttggtgttgcatttatacttgcatcactgtacaactccacgtccgtatcggattcgcagtacttcccctctactttgttcataacatcactgagtgagtgagagtgccttggatttcccacatttattccaggaaagcaccatgttgccacccctgaatttgggttacacaaactatcttcttgtagaatttctcccatcctgcacattatgctgaaagccaagttctttaggactcgtgaatatgcttccagaatggaatgtccaacatccttgccatattgaatttttgaagcatcaagaaatgtttgaggaaggtttgggtatgcactctttatctgacgtaa

SEQ ID NO: 12521 - DNA, 529 bp, Gossypium hirsutum
  Clone ID: LIB3829-005-Q6-N6-C8
acgaggaaaagacatatattcttttcattattatataacaaaaatcagtacaacaatatggttattatacatacgattccattttcttgcaatgttgaattgatggaactctacgagtatctactactgacaggtgacaaaattttggctacatatttaatttctcaatgttctcattatttctagtctaataataaaaacaacagcaccttctcaggcaactccacagatggaaaaggaagagttgcatagctaggcaaaatgaatattttgtgagtttcttcatattctagttcattggtgtcaaatccaccatcaacacctccttttgttgctgaccaccctcatccctgccattatctactttttcagcttcaactgataaaatctcatccaaagcagatgatccagtatcaagagtgttgagaacatccacttggtttgcttcagcttctgacttaacagaatctgattctatcgaatgcccttctcctcgagttcatgtgcatcatagaaccaaataccattt

SEQ ID NO: 12522 - DNA, 515 bp, Gossypium hirsutum
  Clone ID: LIB3829-005-Q6-N6-C9
caaaatctataaaatataaattattaacatatcataaatcatcttaaacatcattatcacacgatacaatacacattggtgagtctaatatattgctctatgctgtccatggcattcatgttcattggcaaatacagcctgttcattttcatctaggaatgaattaaagactacaatcatggcttccaatgaaaccacttttgcttatgcgcctaggaattagaatacactgatctgtacaagaataatctataagcttcagcagctcccattcaactggacctgcattgcacctcaccattctaaggttatcttaattgaaagagaaaaaatagttaatgatatcgattatgctcagagctgcaaagctaaatctgggtgagctgtatcggctcgacttgaacttggtgacccaggtgactgaaatctgatattaagatctgggggaactgaatctggtttctgttttggtgacaagcttgagtctggtttttgttgtggtgataacatggact

SEQ ID NO: 12523 - DNA, 464 bp, Gossypium hirsutum
  Clone ID: LIB3829-005-Q6-N6-D1
gctaaaacttgcatcaaatcatttaatataacattcaaaacagtcatgacttccatttccgcttatgcaatctgcaatgtcactaaaactactttgggcaagctttaactaaatcaaaacatagaacatcattaaatacttgaaaatccctttcatctatgctcactatagagcagaagcactagcaaagcacagttcaagcaaaaattatatattcgaggggaaagcaaggggcaaaaggtgataacatggccaatggcactctcaacagccgtggaaaaaaactgggtcctctaaatcttgttgaatgcaacaatgtcacagctttgaatgtattcattgcgtggctctgtcgtgaggcactcctctataagggtatcaactgaaacaagatcatccactatggtaagcatgatctgtagcttcttgatgccataaccaacagcaaccagctttgatgctcc

SEQ ID NO: 12524 - DNA, 528 bp, Gossypium hirsutum
  Clone ID: LIB3829-005-Q6-N6-D10
gcacaaaaaaaacataattactatattggaataaaatttaagcctcagagctaaatgttcttgcttgactcattcataaagataccaaatatgacagaatcatcaaatgaagtatatttttttcattgacaatcatagtttggtttataacagtcactgatcactgccggggaatgcttaaatacaccctccatctaccacagaagcaacctaatataataaacactcaataggggcgataccaccggccatcgttgctgtgtttccccctgtttgaactcccactatctttactatttctctgatgtggaggtgggcttcaaagttgagcttctggttgttgcagaacatatgcaatgcggccatcaggtaaaagcattggcatcattgacatgccaggtggacttggtccacttgcatagattaatggctgtgcaaggcctgcaataccatatggctggacctagagaaccatgagcacccccggacagaccatacccaacgtgaggggggtaattcaggaagaaa

SEQ ID NO: 12525 - DNA, 522 bp, Gossypium hirsutum
  Clone ID: LIB3829-005-Q6-N6-D11
caccaacagtgtcgattatcccatttaaaattggagcttaaaatccgggattaccggtaaaatatccaaaatatccatgaacaagtgacaagtataatgaagatctcgatcagaggacgtcgcttaccaatcactaacagttcatctagaacggttttttattcaaaactgcagctaatcctattaaggcaaaccactcctcttccaaacagattatggaaatgatgaatgcattcatgagaggcatgagtaagccaattccttctcctcggtcagctcctgtccggtcaagtccaacttcttcctcgagaattcatcaattgccagtccttggacaattgtccattctccattcttacaagttacaggggaaagaatagatgaccccagctggtgcattgtatgaaccatcagagtaaacccccatggaaacccatgtaccctcgggagttccaaggacccaatcacgaatgtgatcacaagcagcactagcagcagatagtgcacttgagagtttcctag

SEQ ID NO: 12526 - DNA, 432 bp, Gossypium hirsutum
  Clone ID: LIB3829-005-Q6-N6-D12
gggggtgggttttttttttttttttttttttttttttttttttttttttttttttttttttttttttttttttttaacaaacaaacacaggggattttttagggggtcaaaatatttttttgtccaacattttaaaattaaaaagggctttttgttgttgggggggttttttaatactaaattcattcataccctggaacatgggaggggaagggtaatagttaatgggggggggtcacagccccctttttgcccttttttgggaaattagggaaaatagggaacctgattctgggagcccaagtttttaccatgacttggaaagaaattgtaggtggcaaaaccaaaaacaggggggccgggggtttaaaaagggccggaaaaaaaaaagggggtgaaataaacctactggggggccctattaaggggttt

SEQ ID NO: 12527 - DNA, 567 bp, Gossypium hirsutum
  Clone ID: LIB3829-005-Q6-N6-D2
aaatataaacatatattaggcttacattctgcttagaacatacaatttccttaacgagaacaaaagggaacttaatatatactacttatttatcttcagttatatgtttaattaaaactatttgacaagttcatagcttctaggattacaaacgaagacactacaagaaatccatccatttcctctcttctcacagaacttattactgcaagcttttcagctattacaatatgaaaaacacatactcaagaagtgtcgttttttgggggctttggttgggtttttcaaggacatttgtgcttgttgcggtgggttctcatatcagtgtaacatttgccacacatttctctgttgccatatgtccctggtgggacacatttgcatctgtcacagcatgtcatgcaagctctcaagcataggttagtccttgagtgtaatttgcacctttgtccacataatgggatgcaatccttttttgtcctaacaggcggcaatggtggacttggtggcttgtaaggcggtgctggagttgttggtggcttaactggaggtgtaggaactgggggc

SEQ ID NO: 12528 - DNA, 575 bp, Gossypium hirsutum
  Clone ID: LIB3829-005-Q6-N6-D3
agaataaagtggcttatataagtgcaacgaaaagttcagatacacgaggtaaaacctgaacccgtgtttttacatgctttcacgacagaaatctaagtaataacgaaagagaaacctgaaccttgtcctgttatgatcaagtgctttcaatccaacagagctaagacaacactactccaaggttgccagtcactcttgaattagccaatgttttggcgataatatctttcaactcaatctctccaggaaaccttccctccttaagcttagagaaaaccaattcatcattgcagtaaacctcgaaagcaccggagctttgcagaaaagactgcattacattcccaagaagccaagcagttgcaatggacccgaacctgtttgcacgcaaggaataataccacggaggtggtgtcgtaatcccaatcataggaaaaatctgttcacctgccatcataatccctataactccaaattggaaaactggaaccactttcgaaagcaaacgtttcggcaatgatggtggatagttatcaaggattacatcaattccaggaaactgggcttctaacatcttc

SEQ ID NO: 12529 - DNA, 571 bp, Gossypium hirsutum
  Clone ID: LIB3829-005-Q6-N6-D4
aaaagctcaatctaaaacactattataggatataaggagcgtaaattacaatagagtgaaggctgagagagatgggcaagataagaagccaagaaagcaaaacctattagaaaagacgaaacatgaacctctccaaaaaccgaaacccacaaacggtacagcaataaatgaaaatccacaaccttaaaacatgtcggatcaaaccaacacctgaagtgctctggatcagagagaatgagtcttaagtgacagtaaagcaaccgcaacttactgttgttgttgataggcccctggctgctggtaatttccatatccaggatagcccccatagtacatgttaggatcttggggaggaggtgcatatccatatgcttcatatccttgagcatatccataatatccagtattccattgggcctgatcaggttgaacctgtttgcttgaaggactacgtccccatgaaagcctaacatttcttcctcctaaaacagtaccattcaaaacagataaagcttgctccgcactggccctgttagcatattgaacaaacccacagtgcttgttagccgga

SEQ ID NO: 12530 - DNA, 541 bp, Gossypium hirsutum
  Clone ID: LIB3829-005-Q6-N6-D5
cttgtagttgaatcgactccccatttctacatttaatttcatcaagaagagaatatttcacaacaataaaaccagtgttgaaatctcttatacaattcaatatttacaaagaggcatgaagataagacagttgaatttggagaagcctaaaatcatttacgcaggatttaaaagcattatagcaatttaaaagattgaaaataaatataatagcataagagagacatcttctcattgtagcggcaatcacaggatggcacaccgagcagcttgcttgcggagctcctctgtctctttctctgctctttctagattctctcgaagcttccggatttcatcatttgatttcatttgagctaactgtgccaactcttccgccttcagccgtgctgcctgctcctctgctaactgctgctccaacctgacagttgtctccttcagctttgactcaaccatttcagtaattcgcataagctgctcttcatatgatctttcaatctgctccttaaattcggatatttctcgcttggagtagcccttt

SEQ ID NO: 12531 - DNA, 559 bp, Gossypium hirsutum
  Clone ID: LIB3829-005-Q6-N6-D6
aggggtagaaatatgaagctatctcatatatgataatgatcacaaaagacattagttagcaaaggaatggatttagtacacatacaagttgaaggtattcagcaatcttaaccaaaaaagggggtaaacgaagagaaaaaggaaacaacagaagcatcctagcagttctccaaatacgagaagccaaaatagatcaggatctcgccatttactgatagtacataagctgctgagttgttgcaacgttttggtatccgccatcatagattgcttgaccagctgcagccgcacccattcccatggccacttgcttaagggcggtgctgaccctgtggatgcatcatacccattacctgtgcaccgccatatttactcattgccatatgtcgttcataggcagccaggtcggcagctgaaaaaccaggcatatgtgcagcagccggtggaggcaaaggggcagagcttgttcctggtgcagtaggcttgctaccccatgaacacttaattggtttaccgcatagaattctagcatttcccatctgtatagctaaagctgctt

SEQ ID NO: 12532 - DNA, 384 bp, Gossypium hirsutum
  Clone ID: LIB3829-005-Q6-N6-D7
ggcaaaaagatgagcttttctattaagtcatatcggtttgcagatttgaatgggtacatcatgctgaaagttggttcaccggtaatcaatccaagctccggttcaactggctgggcatataaaggagccaaccccattttcatgatgacgaaaaaggttcgaatcaggcttgatgggctttctcggtaaagcagatttgaataagtacatcttgttgtctgatacagtgcaactcgtgccggaagaatggtttaatgataatcaatccaagttccggctcaactgcttaagctttatagagggtactttcttgaactcatgtttaccaatagtcacgggaagagcaaaccccgtttttgaaatgatgaaaacggttgggaatcc

SEQ ID NO: 12533 - DNA, 495 bp, Gossypium hirsutum
  Clone ID: LIB3829-005-Q6-N6-D8
aagaaaaaaggactttgcaccaaaggtagggcccagtctcctaaaattaacactaacaatagaagcatcattggcacttccatgcatgccagaggccttgattaatgggacaagaacagggtactaagaggccctcagttcaagtcccctgttctcaaatgggcgaggacaatactaaagagagtaaaaggacaaaaatgtaaatcacttccatgcgcaggaagcaaccaaatgctattcatccaaccaagggacagagccccattttttttttcaagcctatatctatcgcagtagttctcaagtagggtttttatgggggcattaaccaaggagcttagaggataaggagggaaccctgccattctgaaccttgacctccacttccccaaaagttcatgtcgttcaactttttcagccccctcacaagctatgatgttaacgacatcccttgccaggcattgctggtcaacatcgatccggtctttatgttcc

SEQ ID NO: 12534 - DNA, 532 bp, Gossypium hirsutum
  Clone ID: LIB3829-005-Q6-N6-D9
aaattaaattctttaggttttgatgctaaatagaatgtttagctcttgttcccaagtttaccttagccttgccttgtttgtttgtttcctcgtaattatatatattacaagtgtttcagacagaacacaattacagtgtaaaattagaaactcccagaatcccgagcaatttctattattattcccatagcatctcttctatattttgctaaagctgaagaacgaggctattattaaaaagtccattatgaaatgagtttggttcaccaaaatcactcacttacacagaagccatgtgccggatcaagtcgatcacacgagaactgtaaccccattcgttatcgtaccacgtgacaagcttaacaaaattgtcatttaatgcaatgccagccttggcatcaaagatgcttgacctgctgtccccaacaaagtcagtcgataccaagtcttcatctacgtagccaaggattcctttcaaattagtttcagattccgccttgatagcgcccttgatatcttcataagaagcctt

SEQ ID NO: 12535 - DNA, 575 bp, Gossypium hirsutum
  Clone ID: LIB3829-005-Q6-N6-E1
aacaaaactggatccaatttaaataaaaataaagcgttacaaaatttataaataaagattcaaaaatccttaacatcaaaaataaataaataaacgaacactaagaaaagttattaaacaaaaataaaagagaaaaaataacaaggttccagtattcttcttcagacccatatggtcgccggaggcggcgccgtcgagctatcaccgtttatcccataaattgaaacccaaatacatttaaaaaagaagaagaagcaaactgtaatgaaaataagcaaaatagcaaacccaaaaaagaacaaattaacatagtgaataaccgacaatggccaacacagtgaatataacagtgggactcacgtgaccggcagcattatcggaggtgctgttctccgacgaaccagccggcgaatcagctggagatccggcgggagtgtcggttggtggagctggtggtgaagcggctaatggcgatggtgcttcggataatggagaaggtgtcggtgaaggtgaagaaactggttcaggagcaggtgctggcgacggtgactttccgaacactcggagggtaacaa

SEQ ID NO: 12536 - DNA, 517 bp, Gossypium hirsutum
  Clone ID: LIB3829-005-Q6-N6-E10
ggagaacaaattcatctaaaaataatgatatactgcatttagggtctccactatcagagggtctctgatttattccagtcaataaaaccatacacacagcctgatgtcccctaattacattacagtaactgtgtttgatatccatacaaacaccattcaaatctcagacacggcacactatcacatatgactccgcgagaagtccagaattagctcgctcacgagctcgggtgattgctcttgaacaaagtgggttccttcaggcaaatatattatatccaaattaggtacaagttctttagtctatccaaactatatgaacctttgcatcccaagaaattacaagtacataatctttgcaacccattatcagtaacgccggaactttaactattggatctgcaatcccaaagtcttcatccaatgacctatatggaacttgcaatgcacacttgtaatccggattactcgtataaagctccgcgagttgcaagaacttactgcagtgaaccaaggg

SEQ ID NO: 12537 - DNA, 528 bp, Gossypium hirsutum
  Clone ID: LIB3829-005-Q6-N6-E11
tttctttgaagaaatgttcccgtttcattaaccaaattcttgaaaacatcaagaactatacagcatccattaaaattcgatcgatttaaatctaacacttgcgagagaaagataatacaaccaaacgaacacaagcatatatctcttattctaggcattagtcaactaaaacaaactaacctaagctctctcgcctctgatcctcctggcaagctggatatctttaggcatgatggtaaccctcttagcatgaatagcacatagattaatatcttcaaacagcccgacgagataagcctcggcagcttcttgaagagcggcgacagcgctgctttgaaaccttctatcggtcttgaaatcttgagcgatttctctcacaagcctctggaatggaagctttctgatcaagagctcggggctcttctggtacttcctgatttccctgagagccacagttcctggcctgaaacggtgaggcttcttcactcctccggtcgccggagctgacttccgagcagccttcgtggg

SEQ ID NO: 12538 - DNA, 576 bp, Gossypium hirsutum
  unsure (1)..(576): unsure at all n locations; Clone ID: LIB3829-005-Q6-N6-E2
aatgagaactgtgtcatttgcctgcattaaataataatttgaaggtacatggnaaatggctcataaacaagtccatatcaaaaggttcatacatccttgggaacttactaaaacaagtgctacataattaaaggaaaacgttatgatttgaacatatagttggaaatggcatatatttactcccatgagaaggtgagtctatggtgagtaccacttgcagatgatccgggatgtccgattcgaaacactccatttccatggagatcagtattggcactttgatcagtggccaaaatggttcctacttgctccccctccattcctagacctttatattgcaagtttgggatcaaggatgaggttgagccagactgcatcataatgctcaaactaatctcccgagtctcagccggttgtgatgacagaagagagagagcacgattagactcgacggttcgatttaacccattcaacaacattttctggctgatgccaccattgcttgatgaaggattagcattgacaagcggttgacaaacagaaactcctgggtgtgatgaattagcactttgtaag

SEQ ID NO: 12539 - DNA, 585 bp, Gossypium hirsutum
  Clone ID: LIB3829-005-Q6-N6-E3
gaactaataatgaaagatttattttgtataagcaacaaatatatatataaacaataattagaactacccttttctcccatgaatgtatacatactgggaaatgttcgtgggatcacaataattcactatacaaattataaaccaaactacaatgaagccaatataaagcttcagagattctataaaaaatttcaaataaattattttcggcgacaaccgagagttgaccgaatctgcaccttcaagagcagggtgaaagttcttcaagcagtcatgattatttataacctggacagctctggaatgatcgaagaaatcatcatccatctatcttggcatccaaatgctaaagcaacatactttagccgacaacttcatatgtcgaatacaggaggtggcagtttccagaaattccacgaattgaaatcttcctgctcggagcaggttgtcggtggaaacatgccatgaacaagggcgtgaagagatgtataagattttgtgtcaacacgacggttcacggcaacctcaccctttgggttaataatgaagattttccctttcgggattccgaccttaacgtagctg

SEQ ID NO: 12540 - DNA, 421 bp, Gossypium hirsutum
  Clone ID: LIB3829-005-Q6-N6-E4
ggggaaaaaaaaggggttcccttaaaaaaaaaaaaggggttaaaaaatttaaacttttaaaaaaggaccaagggttgggcccccccaaattaaggttcccccccccccccaaaaattaaagggccccccccgggccctttaaaattttttttgggggggaaaaaccccaattttgggggggggggggaaaaaaagggcccaccccacttttttttaaaaaaaaaaaaaaagggggggaaaaaaaagggccccggccccctttggaaaagaaaaaaattttttgcttcgggggggttttctttgacccagggacccaggggttccccaagggggccccctttgaaaaccaattcccctaaattaaaccgggtaaaaaagattccttcaaaaaaaaaaaaaacccggttttggggggggggca

SEQ ID NO: 12541 - DNA, 553 bp, Gossypium hirsutum
  Clone ID: LIB3829-005-Q6-N6-E5
atccaaagaaatataatttttattctttgataacgactaaaatggtacaaattatccttttttttttgcttaattaatacacaataagcaaaagcgaagaatgttacaattaacaagatgcaacatctcccacaaaatagtcccacacccaaaacaataataccaaatcttaaaatgagaacatcttaatatcaaaccactaagactcccaaccctcctcgcgaaaatctaccctcaaaaagacaagaatgcaacaatcaacacaaaaccacgtataaccaagaaaccattaagcccttaacaccaaagcccttaacatgacaatggtgatacatccatggtatagatagatattgttctaacatttaacactgtttggtgtctcaatagaagcaatggtatcaccatttattgcattctcaatctttgttggaggtgcaattaaccctttttcttgacatgtctcacagctcctacaaacatgtcttccaagctgtacttaaattgaaaccctaaatccaacagctttttggaattgaagaccacatttccc

SEQ ID NO: 12542 - DNA, 570 bp, Gossypium hirsutum
  unsure (1)..(570): unsure at all n locations; Clone ID: LIB3829-005-Q6-N6-E6
gagtgactaatactatagtttaccctaatatatttaaaatccaaacatcaacacgtgngaaaacagccaaacgacaatgattcccctacttttttttcttacactcaaattcaacaaagatatttttgttcttccttttttaccctctaaaaaaccagcataaaaaataaaaaaaaacaggcggggaaagagctttttcacttaccaattaccataggggtaagaaaaaacaaccgccattttttaagcgcatccattgggcttaaacccgatccgagagcccgctaaatcataagcaaccagaaaaccttgttgctggatatttccaattatggacaaaccactcatggtaccggcgaaagcaaagcaaaatgtcccactgctatcgaccggaatcaaatagttcgtcgccggtaatgacacgtcagctcctctgaaatgtaacaccactgtcggtactttaactgaagtcttaccggaaaagtcgtaacatgtgtcgaatagtgagaaagcgggtgcccgtttcaggttcgatgacccgagacggaaagcattccttaatgcgatgta

SEQ ID NO: 12543 - DNA, 520 bp, Gossypium hirsutum
  Clone ID: LIB3829-005-Q6-N6-E7
gactaataataaacagccatcaactagagctgcatttgtttaactgaaaacagagaaagtttagcatccgtagttctccaaccaaaaatgtacatatccggtttttatttcccttattaaacaagtaaaaaggggcccaagttctattcctctttctcactcttgaataacatcattaaaacttgaataggaaaaatatcccaaaaaatgaacagtcctgttgttgttggcaacgccaacaccgcctctaattattttcaacattatcggggagtaaacaaaggcatcaacattgaaattaattaagctgcagactccttggcaatcttatctgccttggcaatcacttcctcaatacctccaaccatgtaaaatgactgctctggcaggtcatcatactttccatccaacactccctggaagctggtgatactctccttcaactccacatacttgccaggggcaccagtgaacacttctgccacgtggaaaggctggctcaagaacctttggatcttac

SEQ ID NO: 12544 - DNA, 505 bp, Gossypium hirsutum
  Clone ID: LIB3829-005-Q6-N6-E8
gacagatctcaagtgtgcttgtaaatcattaaggaacacatccttttgctttatacatacattattgacatcaaattaacaaggcacgataaataattaaatgaacatatatcataatccaacaacaacaataattatggagtccgttctggatgattcatctttgtagtaaaacggcagctcccaccaagccaaaccataaagtcaaagcaacccaaaatgctctgttcttctccagtccaacaggaggtcgccacaccagaaaatcagccagaaagtctctggaggagcgaagctgattggttgttgatccgcttgtcttctgatctttgtccttgtacttgtcagtccatgtcgctgcatagctgtcgtaactagaaccaatcagcggtattgtaaccatctcttcctgggatatcttgagtttgggtgcttgcaaaatgtagcggagttcagcagcttgccgtcgaatgctcacactagggtgcttcttctctaattgctg

SEQ ID NO: 12545 - DNA, 544 bp, Gossypium hirsutum
  Clone ID: LIB3829-005-Q6-N6-E9
aacatccaaataccatagataaagatcaacaagccaacataaatactacaatgtccaaaaattaagcaactttatagttcaaaattgctttttttatcttttacactctttggagcacatggaaggggatttcccatgccatttttagaagacaaaaactcttcctcaggttaaacgcacgagctcatttttagggtttcaagtccggtttttccacatatatatatagatgatagttttagttgacacaaaacaacaaaaagtaaagggggagaatgtacattcactttttgagtagcttctgagagagaatcctcttcgaatacgggctgttgcgtgatattgctttatgggactcgattgcttcaacgagtgaattgtgcagagatccctcggatacacggagagcggtttgcacaacgtagtttgcatgcggatcttgaagcaaccgttcaaagtgatctgtagacagcaattcatgaatgagtttcgatcggctctcatcatttaacaccatgagacatttttcgaccacgtgactgct

SEQ ID NO: 12546 - DNA, 575 bp, Gossypium hirsutum
  Clone ID: LIB3829-005-Q6-N6-F1
actccataaaaaaaatttattcatacaattcacatttcaaattctgacagagaaaagaagcacaaatctatttcagaacaacaatttcaatacatagacaccaacataatagttaactgaatgagaggatcgattttgagggattatcgatcgaaagaagaaactaaagcatccacaaaacactctgtgaccttatttccttgtgagactctgcaaataaaaagctaacaaagtttttcaaaagactatttagatgcaagagctggcagatgaagaactgtacagtagcaggcatcttcaagctcatctcagcatgaaagcatgattctgttttgcaaccacaatttgtggggttcttgataatctgttgttggacttgccttagagcaagcaaggtaatacatagcttgtgccacccccatcatcttattgttgggggaaagaatgagttagagaaacggtggaacaaaagctaatgactttatggaatttgttaacaggtaatggcaaccgaggcactcttctccaactgcatttcccattttcagcactgatttcgcaaagacatgatgggt

SEQ ID NO: 12547 - DNA, 373 bp, Gossypium hirsutum
  Clone ID: LIB3829-005-Q6-N6-F10
atatggaaaaaattggatattatgtagttacgaaggagctttatagtccatcggaaatgtcccacaaactcaatgtcaacatgtgtcaacgaaaataaaactgcggaatacccagtattcagtgaagcaagcaactgcccataaaactacgtggagagatgacaataacccaatacattacatttgtgtggtaggcgaaatgtgtgtatgggcttcatgtctattgccgcatgccatacagcgttatggcatcaggcaaatgcctagcgtcaggagagcgttcaggtggagtcttcaggtgtcagtcacgcaaagcaaggcaaggctgcatcggcgagcatgatttttgcaacccaatggaacgggaaaacag

SEQ ID NO: 12548 - DNA, 521 bp, Gossypium hirsutum
  Clone ID: LIB3829-005-Q6-N6-F11
ataatgagaagattttttaaaacttgaattccactttgttgatctgaaagaacatacagaaaaatttaacattttatgagaatcatcacactcattctcaaaacattacgaaagctcaagattaaaaaaggaagtaaattacctcaaacaggatacatctgcatgctttttttatttttaacatgttctttgtgtaagtaatcaccaaactaagcccttttttcgtctaaacctatcaacacggtctgtgctcattcgagacttctcaggcttatttgacttcttagacttctccagtcgactatctaagctgtttctagaaacttctggaaggtcagcatccagtttaaaagtatccgaagttccaccatcaggtggttttgtctgattgtcagagttcaccgctattttttcagaaccatttgtggctgcttttgatttatgtagagacagtacaaatttcttcaaatgtctaatgaattctgggtagagctccagattgcaatgtcctcctccgttta

SEQ ID NO: 12549 - DNA, 465 bp, Gossypium hirsutum
  Clone ID: LIB3829-005-Q6-N6-F12
gcttgggggggtgtgtttttatgagaaaggagtcatttttttctatatttttctagtagctttggttacataaatgttacaataaatgtatacgagtgtgtatataaatgaactatttatacaaggcttaattcatcagaagaacttgaagtttccagggggggatgagattcaattgcagcaagcttcttttgcagggccagtaacccttccccagcatcacatatgtaggctgatgcttgcctgccagacaaagttgctccttccatactatctatataatcctgctttgtataagatccagcaagaaagaagttctttattggtgtcttctgatcaggtctgaatggatcttttccaggtccttcgcgatataagagattgcccccattttgacaaccagatgacccattaattccctaaaccctcgggatgatggggaataaagaccaaaaacctgctttc

SEQ ID NO: 12550 - DNA, 567 bp, Gossypium hirsutum
  Clone ID: LIB3829-005-Q6-N6-F2
aaccacagtacattccatcgccaaaaccaccgtctgtgtctcggacattcggcttttttatcattgctgagcgcattgtactctctgcgcaccaccatgcatgtcctcatcttcctcataagcttcttgttgagcttgagcctgtttcctacgcatctcttcctcaatgttaacatcatgcatggttgtttcctcgcactcatccagctccatgtcagtcagctgaaccgatgccttgggaggaagcacagcctccagtgccttgcattggtctggggtcaacgagtcagggaagtcaacagtgaagtgaatgaaaagtttacctctcataaatggcctctgataaatcggcattccttcatcgtttattgctttgaattgatcaggcttaacgacttccccaggttgggttttaatgagaagttgtctgccatctaagtgagtcagtatgaactgaaagccacaaagggcctcagtaagtgccaatgtatgctctacaaataagtcatcaccctttcgtttaaatttaggatgatctttctgttgcaggacgaatacaatgtcccc

SEQ ID NO: 12551 - DNA, 592 bp, Gossypium hirsutum
  Clone ID: LIB3829-005-Q6-N6-F3
gatcttaccaccgtttcatttacatgacagtgaaagctaaagtccacgctgacagttccaatacaatttttaaattagacaaaatgtcaatttagatttggtcatcaagtaaaatatggctacctagtacaaaagtatttcggtgctaagaaattagcatattatatatccatctgctagtggccaacaattcctaccaggattgctgaaaccggggtatgtcttcttgcaatctgctgcctgccaccgctaaagcttatctctcatgtagaaatgctgcagctatggtttgtcatcatatacaaggtgatgcctaataactcttctttgttcgtccaactcataatgagctctaaattcggagctagaaaagaaggcctccaaattagtgatttcatattcttcagccttggcttgtagatctgccattttcacatcaacatgggtaagccctgaagttgatccagaaagtatttcttcaaagcgcactgcattattcacaagctccctaagaagtacaagaagaagtccatcgtagtctttcttgaaggttatgtattgcctgaagctctttcttaaggctttttgtacc

SEQ ID NO: 12552 - DNA, 529 bp, Gossypium hirsutum
  Clone ID: LIB3829-005-Q6-N6-F4
gcacatggaagggattgcatgtattgattagtttcctccgaaacacggaaaaccgcaacactatgagtccgagaaaacaaaatctgattgcaaaataactcattatgaatatcaaatttgctgttcaaccaacaaacaaagcatctgtctacaaagcaggagaggcagatgcctcctcttcagtgaaaaacgggataggttttgttggagaaggaaggcggccaatgctgtcaactttatccttcaatttcggaggaggcctggctggttttggcaacaacctgcccttcttttcaaaccactcaggtttgagcaaagctctcaaccctaatttgttataatgaactctcctcacagatccacccgcagcttcgactgcttcctttgctctaacagtcacccttgacacctcgagatgaattggccatttgatctgttcagcaccacgacccatcaaccttactccatcctctatctgtttcccgatggccccagcatccttgagtgtcttcatcgggatcaattcatg

SEQ ID NO: 12553 - DNA, 518 bp, Gossypium hirsutum
  Clone ID: LIB3829-005-Q6-N6-F5
aataaaagaaagatatataactaagttttcaaacaacatcaaagttttcaaacatcattgttacagtctccttacctaccaatatgatccatcaaaaattagaaaccaaggaatgaatggtctaaccaaatgtattttttaaacaatgacatgaccctagcaattcacccacactaagccctaacagattttgataattttttgcagaaatacaaatcttaccgttttttaaccgttcatcgaataatcgtagctcagaggtggttggtggacaaacggagcctgaatacagcatgcataaactgatcatatgaatgggaaaacatcatattagcacttggccactgcatgtaagcaccatccctagaagttggattcaatcccagctcacaaaacggactcacagctggcctcgaaggaacaccataaccgaggggagcttgtgtatttgcaatctgacccaactgaggaaaagcagaatcatactgcatgaatggaagttgaatcttctgcatatt

SEQ ID NO: 12554 - DNA, 558 bp, Gossypium hirsutum
  Clone ID: LIB3829-005-Q6-N6-F6
caagaaaactagagtttcatttccattaaagtaacatacatcataatgagattctaacaatgcttccatattgcttaaggcagtcttcccctacactgtgaaaacaatcacccaaaggacatacaactaagaaaaaaaagccctgtgaatctagttttgttaaaacaaattaagctttcttaggagacttggtggcctttgatggagatttgggttctttgccggcggccttttcagtcttcttcggcaaaagaactgggttgatgttcggcaacacaccaccgtgagcgatggttaccccggcgagaagcttccctaattcttcgtcgttcctcacggcgagtagaacgtgccttgggatgatcctgtttttcttgttgtcacgtgcagcgttcccagccaattccagaacctcagcggccaagtactcaagaacagcagccaagtaaaccggggctccggttccgacccgctgcgaataccttcctttcttcaaataacggccgatcctaccaacagggaactggagaccagctttgacagaccttgaaacgggct

SEQ ID NO: 12555 - DNA, 520 bp, Gossypium hirsutum
  Clone ID: LIB3829-005-Q6-N6-F7
cgagaaaaaactcatctcattccacatctaaaacacacaaaaaactctaatttatgacataattaaaagctttattttggtttaaatattattttctttgtctataactcaatgagcagagcagcaaatgttatttgataccatttaaacagctgagctataaaactaagctaagctctttgaagcaatctcgaatacgttctctgataatccattggcagacattatcgtctccagttgttgcttggctagtgtttgacggctttcatcgaaacgcctccaccttgagaaggctgacaccatgcgagaggccacctgaggatttagcttgtcaagttgtagtactatttcacccaaaaacttgtagccggaaccatccttggcgtggaaattcacagggagatccacaaaatcctccgataagtgagtaaaccttgtttggattacgaaggtcgaatgctggatgatttaagagtttgcggaacattctcggacgttaccggggaatgtttagaacatg

SEQ ID NO: 12556 - DNA, 524 bp, Gossypium hirsutum
  Clone ID: LIB3829-005-Q6-N6-F8
agtaacacattggtttcattcaaattctacatttaagagtcccttacaggagatgctaatattattatattatcaatattgtttattttaattgatgaaatgggattgctgttgaaccccatctaaaaattccaatatccttgctagggtggtgaaggcaggtttttcttgatcactgccaagcaattatcattaggccttgtatgaggcagatacctaattttactctcaggattatgccgttccaactgatagttgaggaggaaatggtgaagaaaaatagaaatttcaagcttggcaagatcatttccagggcacaacctgcttcctgctccgaagggaaggaaagttcctgctttggcgttatagtcatcccatcgagaaggatcaaattcttttggatttggataaatctcaggatccaagtgaatgcttctgaaccaagctaacactttccatccctttggaatagtataaccgcttattttgacgtctgtttttgcctcacggaagaccatcagtga

SEQ ID NO: 12557 - DNA, 487 bp, Gossypium hirsutum
  Clone ID: LIB3829-005-Q6-N6-F9
agccagaataattagcttggaaaatgaaagccatttacatgatctacatgcttcaaatcatatatttactttacaagggggggctccaaggaatggcaccgggcctaccggacccttttttaagttaacccaaacatcacatttcacataaacaccgtacttcactggctttatagcaccagctttccatttgaacttccccaggaacaccacccttagggccaccactccgtacgcctaatccattattagtccattcaccacttccgccgatgctggcaccgtcccgctacccagcagaggggtcagggccaccgggctctttgccttttgggacagggggggcaagtccattgcgggagtaatctggtggtttttgtacgaaacaaaagcttgcaaattggcgtaaaaaatagagactctcctgttggggttttttggcccgatggtgaactgcatggaaatggaaatgatgggttgggagggg

SEQ ID NO: 12558 - DNA, 440 bp, Gossypium hirsutum
  Clone ID: LIB3829-005-Q6-N6-G1
gattgcgaaattatttgattaaaaggtgcaaaaaagaaaagaatttatttgtcaacatgcgaataccttttcctaacttttttctgttcctattcctcagaaagcatataaagggtgaaaaaaagagaattgagatattagaggggggaaatcacaagctaagaacacgatatttatcctccaaaggctcagaattgacaaaaatctaataacaaatgggttgattacttcatcggaacctggttaaccccaattgtcgctcttgataatttcaagcatcatgtagtcccaagcacaagtattgataccttaagactgcataacttgcctatgatgcatattcagtgccatagtcaagatcaaaaaggatgcccctgcgattttcagagcccatcctgatcctgaatttcttagccagagattcaaccggacgcgtggct

SEQ ID NO: 12559 - DNA, 305 bp, Gossypium hirsutum
  Clone ID: LIB3829-005-Q6-N6-G10
acgggggggggggcccgccagaggaatccggggccgtaccggggggccaaccaccccccccaaaaggggggggagggggggggggaaaaaaggagggacaaagcggctgcgggaaaaaaattggggttcgcaaacaaacacaaaaaacaaaccagccgcaaaaaaaaaaaggaaaggcgggggtaccaagggagggaaccaacaaaaattaaggggggcggactgaccggcccccaaccaggaaaaaaaccgggcccgccaccttaaaaaaaaaatccacccacggcgggggggggggggggaga

SEQ ID NO: 12560 - DNA, 531 bp, Gossypium hirsutum
  Clone ID: LIB3829-005-Q6-N6-G11
ggggggggggtttgactatatttcatcattcagggcatttgctttcataaaactcaagacaatatttagaaagaactttaaagaaagaaagatacacaagtctgcaaatatccagaaatgcaacagttgttacagcaaaagtaaatggggtgggggggggcacatccaaaacaggagaaaaaaaagcaccagcaactgggagttgagattttgaattgccaaaatggcaatatctttccttctccttagtcctcatattcgcgttcctcttcttcttcttcgtactcttcatcatcagctgttgcatcttggtactgctgatactcggagaccagatcattcatgttgctctcagcttcagtgaactccatctcatccatgccttcccctgtgtaccaatgcaagaaggccttcctcctaaacatagctgtgaactgctcactcacacgcctgaacatctcctgtatggatgttgaattgccaataaatgttgatgccatcttcagcccagggggtgggatgtcacaaacg

SEQ ID NO: 12561 - DNA, 548 bp, Gossypium hirsutum
  unsure (1)..(548): unsure at all n locations; Clone ID: LIB3829-005-Q6-N6-G2
aatctgaatttcattcattcatttcaaacaaaacgctattcgaaataaccactgggaaattagactttagnaaatacaatggcgcctaaaatcctacattaccaacattaacattttcctacacaaaggaaattacatacataattaaataaatgaaactaagccttcttaggagacttcttggtagccttggatggcgatttaggctccttggtcgccaccttttcgtttttctttggtaaaagaactgggttaatattgggtaaaacaccaccatgagcaatggtcacaccagctaaaagcttcccaagttcttcatcgttcctcactgccaatagaacatgccttggaatgatcctattcttcttgttgtctcttgcagcattaccagctaactcaagaacctcagcagctaggtattcaagaactgcagcaaggtaaaccggagcacccgttcccacacgttgagagtatcgccctttcttcaagtaccggccaattcgaccgacggggaaactgaaatacggctttcactcgaacgagaaact

SEQ ID NO: 12562 - DNA, 568 bp, Gossypium hirsutum
  Clone ID: LIB3829-005-Q6-N6-G3
caaaggcttctttaaattaatcaataggagaaaagtcgatttgataagtcttaaaacttttacattaactccctgactcaaggggtcaaggcacaattaccagctaaagtagaacagctgggtttaggtgatacagtaaattcccagcttcaatagctggcattaaatgaattgaatgtaggaggataaatagcagctggctcgttgtattcacaaacatgatgtttcgatctttacaacagaaaaactggtattttcttttgaaaaatcagcttgttgtagtagacctgcaaatgaatttttgctggttttggcattggacattgcatgatcttgctttgtctctcagttcctcgaaagccctcattgtttcgacatcaaatccgccagcaaactgatgtacacggaatgcaaatctaacaccttgaacaatcagttcctcttcttcaggcccaccagttccaactgcttcaagctctgaagatatccgtctcatgtacttcatcgctagtttcactgatgccagcttgatctggcttacaataccagtttcaagcatccaatccat

SEQ ID NO: 12563 - DNA, 553 bp, Gossypium hirsutum
  Clone ID: LIB3829-005-Q6-N6-G4
accaatcactgcatggaactctctcaccatcacaggatatggatgtggaccagcaacagatcccaaaatgtaatgagttgtctccacgttagtcacccaatcccggatagcttccgatgtagcatcttttagtgttgcagtacccgagtgaactgctctaacctctgcaccaaggagccgcattctgaaaacattaagcgcctgtctttccatatcttgagcacccatgtaaataatgcactgcaaaccaaaccgtgcacacacggtagctgttgccactccatgctgaccagctccagtttcagcaataatccgtttcttgcccaaacgtttagcaagcaatgcctgagcaacagcattattgatcttatgagcaccagtatggttaagatcctccctcttaaggtatatatctggcccttcaccattgggacgcttgtaatgttcagacagccgctctgcaaaataaagtggactttccctaccaacatagtctttcaaaatcccagctaattcttcctggaatttttcatctttggagagggaatgaaaa

SEQ ID NO: 12564 - DNA, 547 bp, Gossypium hirsutum
  unsure (1)..(547): unsure at all n locations; Clone ID: LIB3829-005-Q6-N6-G5
aatctaatgtatatcatccttgcttaaaattggaaagaattggaactatttggtacaaagtaaaatcgaataccaaatcatacaacatgcattttttccctagccactgcatggngaaaaaaatgtgaaaggaaaaactatatcatttcagaatccttgaggaactgttattaatacaaactctttactaagctacgctaatgcataagggcaacggcggcctcctgaatgaaaggctgcgtgacatgcacgaattgttaggcttcccgctccacctcttcccaacaccgacgagctccttttccctcattcatcttcttaacgaatgcaacaaaccgtctccaattgtccggatgaaagagcgatgggttcatcctcaagtacgtaaatgcacacatctctctatcaactgctgagccatcgacattcaacgatgaagctcgtaagatctgctcgtgggcgtattcatcataacggggaagtgcattctccccggcaagtggaacttgtgctgctcctgttgctaaagcaacttgcttcactagct

SEQ ID NO: 12565 - DNA, 525 bp, Gossypium hirsutum
  Clone ID: LIB3829-005-Q6-N6-G6
aaataaaatttgcattaatcaaagacaagtaggccactaaaaactgcgatacacactgtaaacaaaacaagctgaaaatgcagcctaagcaagtattacaaatactattagattgctaatatatttgtaatttgcctacttcattttttttttatccttatttagctgcggatcaaacagattagaatccctcccttattattgtattagcatggtctcttaaagaagacgtttgaaactgatcggggatcaactttaagccctctttttcacagccgacgaaggtccattgccaatggatggagcagccttgctcgattgtccaaccacccctcgcactatagccagaacccctaatggaagaaacggtggataatacatggccatcaaattggctgatgccttctgggaattgagaatgtctcccaccatagctgtcgtagaggcaacgatagaggcaccaaagaggaggcaggtggtgttgaaccagggcttagagtataacaacccatagatgttaagcaa

SEQ ID NO: 12566 - DNA, 446 bp, Gossypium hirsutum
  Clone ID: LIB3829-005-Q6-N6-G8
aaacaaacaagggggctaaaaccccctgggggggcccccccccccaaaccggttttcctaaatggggggccccttttcaggtttgggtttgccatttccccccatcccgaatggggtttgtccaaacccaaatttgcccgggccccaagctttaaacaggccccatcccggggaaaaaaaaacaaaagggaaaaaaccctttttttaagggggaggcccccagcaacagcccccaacgcctttagaaagggtccaagccccccccgtttggggctgatctttcccccacgcccgcgttttttttcacgaacccccataccccgaacccgccggggcatggccctctcccccgcaattggagccttggcccaaaggggagcgggggtcctcaagggggtgggggaaccctaaaacccacccttccccggacccgggggtcccccccg

SEQ ID NO: 12567 - DNA, 524 bp, Gossypium hirsutum
  Clone ID: LIB3829-005-Q6-N6-G9
acttcaagtgccattaatatattatagcaaaattctcaatacatttttgcaacacgacactgatacaggacacaaactcagaataaccaaaaaaaaaagacaaataaagggagaaaatagaaaaaaaaaaaaggtaatgaatagggcactatatgaatgagattagaagcattctggggatgaaaatagagtataggtgagcagcaaggcaattattattcagtactatggataagcaggcactgagacaggcagcagggctgaacttaagattggggcttgtcccacttgaggggcttcacaacttcccaggtgaagtctgggtcgtcccttccaaagtgtccgtaagcagctgtcttcaagaaccgaccattgccacctctcttgaggtccaggttgatggtgatcataccaggcctaaagtcgaagttctccttcacaatttggagtatttccttgtcaggaatctttccggttccgtaactgtccacaaagacagataagggctcaggcacaccaatagc

SEQ ID NO: 12568 - DNA, 430 bp, Gossypium hirsutum
  Clone ID: LIB3829-005-Q6-N6-H1
atgcaattctgatataggttcaaagtaaaactaatttatgcaatgccatccttaattatcatacttgacatttggtactatcaatttctggatgtttttcaaaaaaaattgtaagacatgaattctaatttcatctgtcaatcttgcttcaaggcctttgttatgtaggctcttattagtacatattgctaaataagccaagactgtgacacttatacctccaagcagaaccactcggtcatatgcagcttcctggacggtgtatacccggagaccaatcgtattccaattgctctccgtccagacagggtccagcatccccataggatctgaggagttcggaggcagcactttccatgttccagagtccaacttcaagcgagttgaatatgccgggacgtacctggttgtggagttaacacaaatgcct

SEQ ID NO: 12569 - DNA, 524 bp, Gossypium hirsutum
  Clone ID: LIB3829-005-Q6-N6-H11
ggaagagagaaaagaatattcattttcttattaatttcattttcagtacaaaagcaatttgacatgggatcaaactgcatggtggctaacttgatcagacaaacacagaatccaattattaacgaaaaataaaataagggaggcacgtaagtggcatttagctctcaattcaagccgagagcgaatggaatattgctagaatttagccactcatttccttgtataaatggctcaatagtaaactgagttgcctcagtggaactgttgatgaccctataaccaggccaagttactcttgcactcgtattggaccctggccctcggttcaggtactccccataatagagggtactcaaagcaaacgtcccattccattctaaccatccggcaggatccactgaatcatcaatgtacgaacgcataataactgtcctggaatactctttccaaggacgccccaaaaacgtcttgaaagatgattttacggggactaaatccgcagctgcagcgatcttgcagttcaa

SEQ ID NO: 12570 - DNA, 579 bp, Gossypium hirsutum
  Clone ID: LIB3829-005-Q6-N6-H2
acccaaacgccatgcatcctaaccaggagcaatttatttataatagaaaacaaaaacataaaaccataaaagagattttcaactactcttcttcctcttcttcctctttccagcagcatttcagagttgatcttggtgatccacagccaccagtgctcttaaatttctggtacatcatggaacctccacttgcaagcccttcaatgcccatctctccgcaacagtattcttttacgtccagcaggcagctctgctcaagtgactgaccaccaccaacatcaacgtgaactgctacagaaaagtcactcggtttgaagcatttcaacaccctcccgaccaactgcttcagattcttatctttcagattatatcccacagcttcaaagcttgcatagctaaatccatcttctggggtaacatgaatagtagaaattgcagcaccttcaatcgcattcatcgagtaaccacagggtccaaactcaaaatcacatatctcagactctggaaggatcttccttatgccagaattaatggtcatcacagctgcggagcctgattggtctttgtagaaaaccgacg

SEQ ID NO: 12571 - DNA, 398 bp, Gossypium hirsutum
  Clone ID: LIB3829-005-Q6-N6-H4
tcgcgtatctatattgcagcattagaatagttgctttattgcgagaaagttatttacatttcatatatcatgaacaatcaagatcaaaatcaaaactcgtaaattaaggccataaataattaatttcctaaataggcaaccgacaaagcaaactattttagatgaaaacttgaggaaattattaaattaaacaaaactgcattaaaaagatggacatttctgtaaaaatacaaaaataagttacaaacagtgacatgtgtaaaaccctaaacaaaatacatcagagagtaggtgattcttggggagaagtttggccacttcagggtggagaacaacattcctgttctcataagtatcatcgaagtatttctaggagtattgaatctgccccatttttc

SEQ ID NO: 12572 - DNA, 561 bp, Gossypium hirsutum
  Clone ID: LIB3829-005-Q6-N6-H5
aattgagaaatataatatcttcatatccatgtataaaaatggatccgacatgaaacatgattacttaatttaaacccgaagagttgggagcaagaaatccagcattaacgattaactagcaagtcatcagaagctgagacaaaacagtgtttcagctgaatattcaaagttgaaccagcttagatttttaagaacaataaagggataattaaatgcaatatctaaaaagccagcttttgatcatcacttcactatgcagatcttaataaccgaagcagccccgatacggtgcagtgcaacgatggcatcaccaggcttgcacaaccccttctccgtagctgacttcattgctgcttctaagatgacctcggtggattcggcatcagttgccttggctgacccttctgccaggatgggaaccaagcccctatatatcagactgtgtctggctggaccttcgtcactgcaggtccaatcaaatgaatcggttgtcaagactgggacaaccacggataggataggaacagctggtctgtacttggcgaccaatttggctgtcgt

SEQ ID NO: 12573 - DNA, 547 bp, Gossypium hirsutum
  Clone ID: LIB3829-005-Q6-N6-H6
caagcatcatgtatttatgaatatagcgagcatatatgcaggcaaagtccaacaaaaataacacggagatcgatataattctgaacacaagtacaaaattgctatcaaaattattgaaatatgttttagggtctcaacaaaccactgaagctctgccgcacgcatccagtctcagcacattatcatctaaacaagcatcttaatagggtgcaactggagcacggaagctagctccggcatagacagcttccgcaccaagctcctcctcaattcgcagaagctgattgtacttggctaaacgctcagacctgcatggagctccggtcttaatttggcccgtggccaaaccgactgaaagatcagcaataaaagtatcctccgtttcaccactgcggtggctggccatcacaccccatccagcttgcttggacattttcacagcttcaatactttcagtaacagatccaatttgattgaccttgagaagaaggcattgcaagttttttcagcaatagccttcgcaaccctctttgggttggtgaccaaa

SEQ ID NO: 12574 - DNA, 517 bp, Gossypium hirsutum
  Clone ID: LIB3829-005-Q6-N6-H7
actaacaaaataaaaatttatattcattcattcatgtactacaaaatttctatcagaacgagaacaatgattggaagctatactcgggaagcctcaagccgagttccgttcgaatgcactgggaacacctccaaatcatattaggacactcgtgcagaccttcctcgcatacatggccaccaatactctcgtgtctaccgctgccactcttgggtctcacacgctggccatgacacaagcacactgtagatagtgcagagggggaagaaaagcaatgtaaacaattaactattcaaccgccaaggctgagttacatgttgcccttctctctataacaggtatcaggttgaagaaatcctcttaactatacatcaccactccaaactcaaaaggcacaaccaggatgcatggcacaagcactctgtattaacaccacacaccttcgcaaatgcataaaacaatagtcagcaaggctaatttagggggatttccaatcaaattgaaggttactaaaccc

SEQ ID NO: 12575 - DNA, 506 bp, Gossypium hirsutum
  Clone ID: LIB3829-005-Q6-N6-H9
tttttttttttttttttttttttttttttttttttttttttttttttttttttttttttttttttttttttttttttttttttttttttttttttaaaaaaaacgggccatttttaaaaaaaaccccgcccttttgggggggttttaaaaagctttttggacctttcctgagaaaaaaaagagatcccaattttgccaaaaaacaaagggggggggggaaacaggggcccaaagccctaattttcccaaacccggagacccccggagtacagaaattaaagcttgcccttaaagggggggggaaaaacatccttaaaaaaaacctaagggggggggctttaaaacattcctttgggaaacattttggaaaaggggaccttttaaaccccgaaagagattttttgacccccaacaaagaaaccttgcccctaaatgaaaaggctaatggccttgccctcgcctggaaaaccaaatggggggaatctttgcttgtttatggggacccc

SEQ ID NO: 12576 - DNA, 519 bp, Gossypium hirsutum
  unsure (1)..(519): unsure at all n locations; Clone ID: LIB3829-006-Q6-K6-A1
gntttctcgtgctctgtttttttattctttgttgagaaagaaggatccttgctttgctttgattatttttcaatgatgatggagctttttgtattggggtgtacgggagttgtggtgttcctccacggtgccaatttcttcttccatgttctttctcaacatctcgctgttcgatctctcagtttcttgggatttgttggatggtaataccaaaaagggaagaaaacagagatgattaatatatctttttgcaaattgagatgtggatcatgatgcttttgtaaatatttgattacaacttagattttgggcaaatataaaatataatatgataattatgtattggtagagcaaaaatggaaaggctgtttgccctcaatatagagcaatatcatctttctatactgtattctatccatttatgtaccccatatttgattaaatcttagattttgagggtatcaaatataatgaaatttatgtatccttaaaaccaaaagggaaaagctttgatccccc

SEQ ID NO: 12577 - DNA, 260 bp, Gossypium hirsutum
  Clone ID: LIB3829-006-Q6-K6-A11
gttcgccattagacttattatcctcctatttcttaaaagctactgcctatctaatattctaactagactagctctgcgttaatatgggtactggcgggaggtaggtaccaaatcaaactgggatgcatgagggagaaacctgaacaaccggtgcaggtgtgatgaataggtaacagtacaggtggcgactgttgcttctgcaacatacactggggcttaagaaccaaatgaagcaaagtcttgagcagtatctgaacaac

SEQ ID NO: 12578 - DNA, 583 bp, Gossypium hirsutum
  Clone ID: LIB3829-006-Q6-K6-A12
gttaccttgggtctcccaaatcctcagtcatttcaactctaaaaccctaatccccaaaatgggcaaattttgggtgatttttgttgcttcgatctcgatccttcttccatttctatgcaattctttctctcccgagactcctaccgatcgccgagtcctggttctcctcgacgatttcgccgtcaagtcgtcccactcctcatacttcaactctctcaaattacgcggctttgaccttgacttcaaactcgccgacgatcctaagatcgccttgcagcgctacggccagtatctctacgatgccttgatcctattctgcccctctgttgaacgatttggaggatctgttgatgttgctgccattatcaattttgttgattctggtcatgatttaattattgcggcggatgttaatgcttctgatttgatccgggaagttgccaccgaatgtggagttgatttcgatgaggatccttcggctatggttatcgatcacactggctatgcagtttcggaaacagaaggagatcatactttgattgcatctgatgattttattaaatctgatgtgattataggaagc

SEQ ID NO: 12579 - DNA, 250 bp, Gossypium hirsutum
  Clone ID: LIB3829-006-Q6-K6-A2
gtttgttaagggctatacctattaaggcgtaagacactgtaatatctggtttttgggcatctatggctttttgtgcgaggattattacttgctgttagataagttttttacatattattgttatgcctcctgaaactagggaggttgaataagttacttgggagagtagaagaaacaatcctcgaatcacttcccttgacgccttttgaacgaaacaggttcatatttaagatagtttatttggctggca

SEQ ID NO: 12580 - DNA, 626 bp, Gossypium hirsutum
  unsure (1)..(626): unsure at all n locations; Clone ID: LIB3829-006-Q6-K6-A3
gtcgcacagttgccgtgggataacctcaanagcttttgcataagnaatggagataagtcgatacttgaggcagcatgcacgcacaatagctgggaagtcgcaactttttattaattcttatgcaaaagctcttgaggttgtcgcacagttgccgtgggacaatgctggatttgatgctactgatgtgctgaacaaattaaggcagaaacatgcgcttccatctggtgagggtgcttcttatggagtggacatcaacactggtggaatagcagactcatttacaaactttgtctgggagccatcagttgtaaagagcaatgccatcaacgctgctaccgaggctgcttgtcttattctaagtgtggatgagactgtaaagaatcccaagtcggagagtgcacagggagaagctgctgctagtgccatggctggcagggggcgtggccgtggacgaggaatgaggaggcgttgagacttcacagtttttatgttcaacttgtcttattgttgtctaatgaaaatgaggatggaagattctaattaattaggttttgttcatcttgtatttgttcagtgtttttggccaaattgtttgaagatgtgtgctttttgattgtcattattat

SEQ ID NO: 12581 - DNA, 187 bp, Gossypium hirsutum
  Clone ID: LIB3829-006-Q6-K6-A4
gtgttagtctcggctttggtgggtgccgctgtcggtccttggcttgccgtcttaattgtcgtttcttttagagcggtttttgcttgtctgttcacgccgtttcctttggcgcgtgtcgcgttgcgcttgttgtcttccaagtgtgggggggtgcgccttctggttttttttctgttttttgcgcctt

SEQ ID NO: 12582 - DNA, 533 bp, Gossypium hirsutum
  Clone ID: LIB3829-006-Q6-K6-A5
cgtctgagacacacataacctccagacactcaggggtaaacctccaatgttgaaggattccctgacggtaagccatccatgaaaccattccccggtgacaaaccatccaaggtaagggaaagggagcacctcatgaacctaaacctcctcatagacacctcttaagtgagccacacaaatatgtaataccacccaaaggtaagggagagaagcctccccatgagcagaaaccacaccatggacaccacccagggcaccttctgggaatagaaaattaaagcacaaatcatcctaaggttctcatcaacctacaattaggagatcatcatcagcgtgtatggtaggactattttactataggaataacagttgatgttgatttatccttttattagttgtgtagcgatctagttacgtatattttgttcatggcttggaggctgtgccgtgcctaccttatgactatgttgttttagaaattccagcctcatctatggttcgacattttatgatatgaactctctatattaact

SEQ ID NO: 12583 - DNA, 596 bp, Gossypium hirsutum
  Clone ID: LIB3829-006-Q6-K6-A6
cgccaatcgctgtccgccttgaccgaccgtccggcatcgtcttggccctcgatttttcccttttgtaaaccttttttcaccaattcccgaaatggcagtgaaaccctccaggccgaaaagaaaatcgcgtacgacgcgaaactgtgccagctcttagatgagtacacgcagatcttgatcgccgcagccgacaatgttggctcgaaccagctccagaacattcggaaaggtctccgaggcgactcagttgttttaatgggtaagaacactatgatgaaaaggtctgttaggatgcatgctgagaagactgggaaccaagctttccttaaccttatccctttgcttcagggaaatgtgggtttgatctttactaagggtgatttgaaggaagtcagtgaggaagtagctaaatacaaggttggagctcctgctcgtgttggtctggttgcacctattgatgtggttgttccacccggcaacactggtcttgacccatcacagacctctttcttccaggtgctcaatattcccaccaagattaacaaaggtactgttgaaattatcaactcccgttgagcttatcaaaaaaggtgaca

SEQ ID NO: 12584 - DNA, 582 bp, Gossypium hirsutum
  unsure (1)..(582): unsure at all n locations; Clone ID: LIB3829-006-Q6-K6-A7
gtttcctttctcgattttctatttagccaaacaanatgcagatcttcgttaagactctaaccggcaagacgatcactctcgaggtcgagagctccgatacgatcgacaacgtgaaggccaaaatccaagataaggaaggcatccctccagaccagcagcgtctgatcttcgccggaaaacagctcgaagacggccggaccttggccgattacaacatccaaaaggagtcaactctccacctcgtcctccgtctgcgcggtgggatgcaaatcttcgtgaaaaccttgactggcaagacaatcactctcgaggtcgagagctccgacacgatcgacaacgttaaagcgaagatccaagacaaggaaggcatccccccagaccagcaacgtctcatctttgccggaaaacaactcgaagacggccgtaccttggccgactacaacatccagaaggagtcaactctccaccttgtccttcgtttgcgcggcgggatgcaaatcttcgttaagacgcttaccggaaagacgatcactctcgaggtcgagagctctgacacgatcgacaacgtgaaagccaaaatcc

SEQ ID NO: 12585 - DNA, 457 bp, Gossypium hirsutum
  unsure (1)..(457): unsure at all n locations; Clone ID: LIB3829-006-Q6-K6-A8
agaaaaactattagttgctaggatagcacttctttgcactgccaagctccccaaanacagaccatccatgagggatgtaattacaatgcttgtggaggcaaagccccgaagaaaaagcagtagcaacaatggcggaaatgcatctaacaaagaaatccccgtgtttagcacatcacctgtaaatggccacgtttagcacccacccttttggttttttgggccaaaactaaactatattcttctctgtatgtagcattgttttttgttaatgcatgtagtcactggttcatattgttgttcaggaaattaacagataaatcaagcttgggatttctcccgtgtcaggcaagaagattaaacccatagtacctgaaattgttgactctcattgtcaaatgtatttgtagtagtaaacatctatagattaattcttggaatatccagcttttttttcana

SEQ ID NO: 12586 - DNA, 590 bp, Gossypium hirsutum
  Clone ID: LIB3829-006-Q6-K6-A9
cttaatgcaatttctttgggtaagtaaatctcatgtttttcagctggaagaatatcctctctacggaaaccgatcagacgaggtatcttgtgtggaacatctctgtgaacaattatgttatcaccttgatattgcctcttttgttgcttgtgtcaattccggtcaaccatggagttcaaaattctcattactattgtctggacatgaaaacatagtatctggaagtgaagatgctaagttagacacatttgttgaaaattttgtgttggaaaggctttctgttcaatctccccttcgggtactgtttgatgctgttccaagcataaagtttcaagatgctattgaattgattagcatgcagccagttgcttctactcttgagggctggaaaagggtggaagatattgaacttatgcacatgcgttatgctttggaatccaccgtccttgcactaggagcaatggaaagtagcatgactggtgagaaagagactcatcaagtggcactatgtcatttgcaagacctaaagaaccatttggcgggcataaaaaatattccacgccggatactgatggtgaatgtgataattt

SEQ ID NO: 12587 - DNA, 588 bp, Gossypium hirsutum
  Clone ID: LIB3829-006-Q6-K6-B1
ctattcagttttgtaagagctatggctaaggacattgaggttggtggtgagttccaggccaaggactaccatgatcctccacccgctccattggtcgacgctcaggagttagccaagtggtctttttacagggctgtcatagctgagttcattgccactctcctctttctctacatcactgtcttgactgtgatcggttacaagacccagaccgaccctgctaagggcggtgaagattgtggcggcgttggcattctcggcattgcttgggcttttggtggcatgatctttatccttgtttactgcactgccggtatctctgggggacacatcaacccagcagtaacctttggacttttcttggctaggaaggtgtcgttggttcgagccatattttacatgggtgctcagtgtttgggagccatatgtgggtgtgggctggtcaaggccttccaaaactcgtactacaaccagtatggaggaggagccaacagcctggctgaaggatacagcactggaactggtttggcggctgaaatcatcggcacctttgtccttgtctacactgttttctctggcactgatccc

SEQ ID NO: 12588 - DNA, 580 bp, Gossypium hirsutum
  Clone ID: LIB3829-006-Q6-K6-B10
gttaagactctaaccggcaagacgatcactctcgaggtcgagagctccgatacgatcgacaacgtgaaggccaaaatccaagataaggaaggcatccctccagaccagcagcgtctgatcttcgccggaaacagctcgaagacggccggaccttggccgattacaacatccaaaaggagtcaactctccacctcgtcctccgtctgcgcggtgggatgcaaatcttcgtgaaaaccttgactggcaagacaatcactctcgaggtcgagagctccgacacgatcgacaacgttaaagcgaagatccaagacaaggaaggcatccccccagaccagcaacgtctcatctttgccggaaaacaactcgaagacggccgtaccttggccgactacaacatccagaaggagtcaactctccaccttgtccttcgtttgcgcggcgggatgcaaatcttcgttaagacgcttaccggaaagacgatcactctcgaggtcgagagctctgacacgatcgacaacgtgaaagccaaaatccaagacaaggaaggcatcccgccagaccagcaacgtctcatcttcgc

SEQ ID NO: 12589 - DNA, 591 bp, Gossypium hirsutum
  unsure (1)..(591): unsure at all n locations; Clone ID: LIB3829-006-Q6-K6-B11
gtgatatcaattggatcagnactaccaattgcaaggagacactcacttcagcgttttcttgagaagcggcgggacaggctggtgaacaagaacccatatcctggtccatcaacaccaaaatggttgatggcgccaaagctgacgtgagtgccacaacttcaccagagtctggctgcttcaaggcatcacccattcgtcaagaagatatccaaccaaaagctccagctcatgttgcgtaaagctaagcatataggattccttatatatatatatttgataaaaactgaatctagctctgttattgtaagttacaaagtgcagaggaatacatctgatctgccactggagttaggtgtggatagcaagtgtacaattaaacaggtctcatggtaggatctgtccacttgtttccctattgccttcttgggcagcagttttgatgtttcctaaacctggacaccctctctctgatctgcctgacaaataacatttgccatgtatgtatgattctctctgttctatgggtatgcaaagactgctaatttgtgtgtaacgtgttccaactttgtacattacatttcttttctatgg

SEQ ID NO: 12590 - DNA, 569 bp, Gossypium hirsutum
  Clone ID: LIB3829-006-Q6-K6-B12
tccgcgtcacagagaggttcagcctgattctcaacaaagtgttaagagatttcagcagtgttgtctttcggaaaatgtggcacgacttgccaatatagtgtcggaggcagctaattccaatgagacaatggatatgcaagacttgtttatgaaatcgactttggattcaatattcaaagttgcatttggggttgaactagatagcatgtgtggatccaatgaagaaggcaaggagttcgcagctgctttcgatgattcaagtgctttaactctttatcgatatgttgatcccttctggaagatcaagagatattttaacatcggatcggaagctgcattaaagagaaatataaaagtggttgataatcttgtgtataagctgatccataacaagattgagcaactacgcgaatccaaggacgattcggctgtaataaaaaaggaagacattttaactagattcctcgaagtgactgacactgaccccaaatacttgcgagatataattcttaacttcataattgctggcaaagacacaacagcagcctctctgtcgtggtttatataca

SEQ ID NO: 12591 - DNA, 628 bp, Gossypium hirsutum
  unsure (1)..(628): unsure at all n locations; Clone ID: LIB3829-006-Q6-K6-B2
ccgcccacgcccgtccgnnaccggccatttagcttactgccagnaaaatccaagcatcaatctagcaaagcaaagcgtttgctaatggagggtctaattcaggtgccttatgatgttacggtcaggttcatgttgacttccttggagcgcaatttgttgcctgatgctattataaggaggttgactcggcttctcctggctagtcgtcttcgttctggttataaaccctccactgagctccaactctccgatctccttcagtttgctcattccctaaaggagatgcctatagctatcaagacagacaagcctaaaactcaacattacgaattgccaacctctttcttcaagttggttcttgggaagaacttcaaatacagttgttgttacttttctgacgagtcgaaaactttggaggatgctgaggaagcaatgttggaactgtactgtgagagatcgcaattaaaagatggccaaacagttcttgatgtggggtgtggatgggggttcactttctctatacattgcccgtaagtaccccaattgcagggttacaggggatttgcaattccaccactcagaaagcttttatagaggaacaataccgggatcggcaattgcaaaatgt

SEQ ID NO: 12592 - DNA, 607 bp, Gossypium hirsutum
  unsure (1)..(607): unsure at all n locations; Clone ID: LIB3829-006-Q6-K6-B3
cccagcgtccggcctcttttttttttctctcttgttgtttgttttttgattgtttcgatcaaaagtaagatacggttttactaactttccgtgccgcatccaccgatgccagataatcggcaaattcagaacaatgttgtttcgaatcaatccgctgatagcattgaagaagcaattttgcgtttgaaaataaatgataataatcaagaggtgggtgtttctaaatcagtctcgtatcctgatcgtcctggtgaaccggattgttcttattatttaaggaccggatcatgtggttatggaagtaactgtcgttttaaccatccggcttatgatgctcaggccggccaatatcgagaagaactccctgaaagagttggacagccagactgtgggtacttcttaaagacaggaacttgcaaatatggatccacatgcaaatatcatcatccaaaggacaggaatggagctggacctgttacatttaacactcttggtctccctatgcgtcaggatgaaaaatcatgcccttatttcatgaggaccggatcatgtaagtttggagttgcatgcaagttccatcatccncagcctgcttcagctgggactg

SEQ ID NO: 12593 - DNA, 614 bp, Gossypium hirsutum
  Clone ID: LIB3829-006-Q6-K6-B4
ctcagattaaagcagcttatagaaagaaagttgggaatcgcatcctgacttgtttcccgttcacgaaaagcgttcggcggagtctaagtttaagttgattgctgaagcttatacttgtctacagtctggttcaggaagagaaggttcgtactcagctacatattcacgtgtcgtcagaacgggagtaccaaaggctcatgggggaagaagaaaccgtggtttgattcagattcctttccttcttatagttctgggaactgttggacttgggggattaaatgcaaccagggcttatagaaagcaaaaagaggcatgcccttctcacaatccattcctcccctgaccaagacattattctgttttttcatttggtatcggtatggaagattcaatttatgttagccttatgtatcagatgtgttatagccgataagtataagcgcaaatttgggttatataatcttcaaaaagaaaaaagaggttatataggattccttttgacctcgatcggtttaaatagagatgcgaataagtaatcacagtgagcgaatttcataatgtaaattctacattgtacgttgtactcatgtatttgtacttatatcttcggcaat

SEQ ID NO: 12594 - DNA, 409 bp, Gossypium hirsutum
  unsure (1)..(409): unsure at all n locations; Clone ID: LIB3829-006-Q6-K6-B5
ngagatggatctgagcaggctttgcttaatgaactcaagcattggatgaacatcttaaggcacatggcccattcattgctgggngaaaagataagtgcagttgatttagctttgggaccaaaactttaccatcttgaggttgctcttggccatttcaagaaatggactgttccggaaagcttgactaatgtccgcaattacatgaagtcgatattcagtcgtgaatcgttcgtgaaaacgcgggctgctaaggaatacgtgatcgccgggtgggcacctaaggtgaatgcatgaacaaactggaaacagtgaggtgtttgaagagtgtgagttatgtaataaaatgtgagggatggtgatgtaataaaatgtttgaatctatgagtgtcaatgctactaagtaattggt

SEQ ID NO: 12595 - DNA, 586 bp, Gossypium hirsutum
  unsure (1)..(586): unsure at all n locations; Clone ID: LIB3829-006-Q6-K6-B6
agnaacactcaagaaaggtcttctccaactcagcttaaatccttcctaggttcactctctggaacttcccaagaaacatggatgctcttttcacagcactctttgaggatgttgggaaagggtttgctaaggaagtaactaaaaagaagaactaccttgcagcaggggcggcggcagcagctgcagccaatgaagagggatgccagatgatgcttctacattctatggagttattttgcggcaaggccagccctgaggcagcaaaggaggtggctttagttattaaagtattgtatgatgatgacatattggaagaagagttcatcatggagtggtaccagaaaggtataggtggtagtaataagagctctcagatatggaagaacgtcaagcccttcatcgagtggctccagaatgctgagtctgagaccgaggaggagtgattctctagctcttggtatggttgcatggctacttctaggtacaaatatgtttctctcttgatcttgttttttaaataaagtacagtgagcacggccctacatgctctctgtaatttgagtgtctggatttttcagctgcttat

SEQ ID NO: 12596 - DNA, 585 bp, Gossypium hirsutum
  unsure (1)..(585): unsure at all n locations; Clone ID: LIB3829-006-Q6-K6-B7
ccccgcgtccgtccatcctcctccaatttcactctctttttcaactttcccttcttctctttgttttaaagaggggcttgagttttagccaaagaaaactccatggctaaacttgttgctactttcttcttggctctcattgccatctccatggttcaaactttggttatggcatcacatggacatggtggtcaccattatgataacaaacgttatggacctggaagtctcaagccttaccaatgtccatctcagtgcacaaggaggtgtagccagacacagtaccataaaccatgcatgttcttctgtcagaaatgttgcaggacatgcctttgtgttcctccagggtattatgggaacaaacaagtttgcccttgctacaacaactggaaaaccaaggaaggaggccccaaatgcccttaaattactcaaaagaagacccttttttttcttttttacattattatccctataaatttcctatttgaaattcaagtcattgaagcataaggttgcactgtaatactaactatatattttatgttgntagttgttactagtggtttatgtgttttgttttttttt

SEQ ID NO: 12597 - DNA, 584 bp, Gossypium hirsutum
  unsure (1)..(584): unsure at all n locations; Clone ID: LIB3829-006-Q6-K6-B8
gtagnattggggaggctaaagaaacttgcgaagagtgaaaccagcagtggctgatggaccaagaggggtagattcccatcttaaggcctatgagagggcacagcagatgctccaggatcttgagtcggagatgatgaataaaggaggaggggatcgggtcgaacaaagccggctctttgacgccttccttggttcttcatcaatttggcaacctcaaccttgcaaggaccccatcagcttgccaaaatcaaatgcagttaaaccccaagatgattttggtgatgagaacatcaattcgaatgtaacggtaaaccaggtggtgattcctcaaccaaaaccagtcgctcttcctttcggaaattctctaaatatcgatgcactgcccttttactcatcaaagctggtgaaggaggtgaaagctccagttgtgaatcaattgcatgagacccttaaaagaacacggtcaggaaactcagctaactctatgagagtgaatgaaatgggtggagactgcacaaagcctttatctgaagaactggaaaaaccagagattaagacaagaagaaggctctctctttcaacta

SEQ ID NO: 12598 - DNA, 528 bp, Gossypium hirsutum
  unsure (1)..(528): unsure at all n locations; Clone ID: LIB3829-006-Q6-K6-B9
taactacttagnaggtttggtcaatcaagaaaactgcagcttctgaatttaatctatgatgcaacaccttcagattatgtctccatgataatcacagattatggcatgattccacccacaagtgtgcctgtcattgtgagagagtatagaagagatcacctgtggtcgtagttcaagacggctcgtaaatgtattccagaggattttccacaattttgctcatgttgtcgaccatcattctggtcaatcgcaacggaacaataaggatagtatttttttttatcacatgttctttcctctgttctttcttcatggaataaggctataggctgacatggtttcctgtgttattttttttctccttttttcctcttaaactgactcagtgaagagtgcaatccgttcgcctctccgggcagaattgatcctatctcatatatattgtagacaagccatggtttgttctttttcctcccttgaggtatcaaaggggtgattttgttgcaaatttgactttttttttcncga

SEQ ID NO: 12599 - DNA, 249 bp, Gossypium hirsutum
  Clone ID: LIB3829-006-Q6-K6-C1
gcccgtctaagtgaaaaatctggtgctaggaaaagctttgatcattttaattcttgaaaacaggattttagtttcattttgcgaggcaaccctaagaaatctccggccgggtatgttgaatgcagccatgtattcttaatatcggtaggagtatgtattttgttgaagggcttagaaagcatattctttttgaggtaactctcgtataaacttcttaaagattaatgtgatgacacaaatttgggaatt

SEQ ID NO: 12600 - DNA, 580 bp, Gossypium hirsutum
  unsure (1)..(580): unsure at all n locations; Clone ID: LIB3829-006-Q6-K6-C10
ctgattcatttcagactgatggtgatcatatcaggtatgttgcaaccgagttggcaactgacatagtcgttaatgttggggatgtgaaattctactgtcataagtttccattgttatcgaaaagtgcacgtttgcaaaagctggtcgcgacgtcgaatgacgagaacggtgatgaactacacattcaagacataccgggcggacctggagctttcgaaatatgtgctaagttctgttacggcatgacagtcacactcaacgcgtacaatgttgttgctgctcgatgtgctgcggagtaccttgagatgtacgaaactgttgagaaaggaaaccttatctataaaatcgacgttttcctcaattcgagtatattccggagctggaaagattccatcactgttcttcaatcaacaaaatctctactcccgtggtccgaggaattaaaggtggttagccgcagcctcgattctatagcttccaaggcttcaattgatacttccatggtggaatggtcatacacttataataggaaaaagctcccgtcggaaaatggaaacagtncgcaatggaatggtgtaag

SEQ ID NO: 12601 - DNA, 532 bp, Gossypium hirsutum
  Clone ID: LIB3829-006-Q6-K6-C11
gcaaaaaacacgccatgtctcacacaccctgttctttaaatcaagagcagtcaaccaacgggtctgatctgagctcaaagcaccaaaaacagcagcccccaccggcgccggagccacagcagcctctaatggagccgacacaatggatgggagctatgcaatacccggcggctgctatggcactgatgcaacaacaacagatgatgatgatgtatcctcctcatcattacatggcttataataaccctcattttcattatcaacaacagtatcaacaacaacagttgcataaacaacaacacggatctaattcaaatgaggttaaaacgatctgggttggtgaccttcttcattggatggatgaaacttatcttcataggttcttctctcaatctggcgaggtttcgtctataaaaatcatacgaaataagcaaaccggacagtctgaagggtacggattcgtggagtttagctctcgagcaacggctgataaggttttacagagctgtaatggttctctgatgccaaatac

SEQ ID NO: 12602 - DNA, 560 bp, Gossypium hirsutum
  Clone ID: LIB3829-006-Q6-K6-C12
gttatggacaagttcatcacacactctgtgccttttgccgatattaacaaggcattcgactacatgctccagggtataggtctgagatgcatgattcatttggatgcttaaggaaagttgctgctgtatatttgcccatccaaggatcaaaactctaatgttttgtcctactatgtgttatattatgtgcctacttaagctacctttcccggttatcaagagtgcctatatagaactctctctctctcaaaaaaaaaaaaaagagaaaagagttctttatatggagttttatattatatgctgagagaataaattatcttgtaaaagcttgctttgttaatgaaataaatttctattacaaaaaaaaaaaaaaaaaaaaaaaaaaaaaaaaaaaaaaaaaaaaaaaaaaaaaaaaaaaaaaaaaaaaaaaaaaaaaaaaaaaaaaaaaaaaaaaaaaaaaaaaaaaaaaaaaaaaaaaaaaaaaaggggggcccccttttaaaaaaaccaaattttccttcccgtggtttgaaaaagaaaaaactttttttttgggggcc

SEQ ID NO: 12603 - DNA, 631 bp, Gossypium hirsutum
  Clone ID: LIB3829-006-Q6-K6-C2
ggaaaagactccctctgcaaaagagttagcttggtaagtgaaacctggtcaactttaaagaatagtttccctgcaattgatgaagctatcactaagatgcaatcaaagctaagagacaaacttgatcatcaacacaacagagatgtctctaactcagggactgctttttctcatgaaatttccccaattgaaaccactcgtttcgatggaaagaattaccattgcagggcagaacacatggaacttttcttaaagcaattgctgattgcgtatgtgcttactgatccatgccctagtctcaatattagttctgaagcaaccagtgaagaactggctcaagccaaagttgctgaaaaaaagtggatgaatgatgactacctgtgtcaccactgcattttgagcgctttgtctaataacctgtattatcaattcccaaagaaagctaagactgctaaagagctgtgggaagagctaaaattagtctatctttacgaggaatttggaacaaagagagctcaagttagaaagtacattgaatttcaaattgttgatgaaagaccaattgttgagcaaatgcaagaactcaacatcatagctgattctattgtcgcaactggaataatgggtgatg

SEQ ID NO: 12604 - DNA, 587 bp, Gossypium hirsutum
  Clone ID: LIB3829-006-Q6-K6-C3
cattgagcgacccacttacaccaatcttaaccgtcttgtctcccagtgatctcctctttgactgcttcacttaggttcgatggtgccttgaacgtggatgtaacagaattccagaccaacttggtcccttacccaagaatacacttcatgctttcttcatacgctccagtcatctctgctgagaaggcttaccatgagcagctatcagttgctgaaatcaccaatagtgcctttgagccctcatctatgatggccaagtgtgatcctcgccatggcaagtatatggcttgctgtttgatgtaccgtggtgatgttgtgcccaaggatgtcaatgctgctgttgccaccatcaagaccaagagaactattcagttcgttgactggtgcccaactggattcaagtgtggtatcaactaccagccacccactgtcgttcctggtggtgatcttgctaaggtccagagagccgtttgcatgatttccaactcaaccagcgttgctgaggtgttctcccgcattgaccacaagtttgatctcatgtatgccaagcgtgcctttgttcactggtacgtgggtgagggtatgga

SEQ ID NO: 12605 - DNA, 569 bp, Gossypium hirsutum
  unsure (1)..(569): unsure at all n locations; Clone ID: LIB3829-006-Q6-K6-C4
cttctacctcttctctggtanagttcatcgaaggacaaatcaagatccctgccaaaatgaacgacgctgatgtatccaagcagatccagcagatggtgagattcatccgccaggaagcggaggaaaaggctaacgagatctctgtttccgctgaagaggagttcaacatcgaaaagcttcaattggtggaagcggagaagaagaagattaggcaggagtacgagaagaaggagaagcaagttgaaatccgaaagaaaattgagtattcgatgcagcttaatgcatctaggatcaaggtccttcaggctcaagatgatgtggttaatgctatgaaagaatcagcatccaaggaccttctcaatgtgagccatgatcaccatgtttacaaaaggcttttgaaagatctaattgttcagagtttagttagactgaaagagcctggagtcctactccgttgtcgcaaagaagatttgcatttggtggagtctgttctggattcagcaaaggaggaatatgcttctaaagtgaatgttcatccaccagagattatcattgatgatgtccatctt

SEQ ID NO: 12606 - DNA, 404 bp, Gossypium hirsutum
  unsure (1)..(404): unsure at all n locations; Clone ID: LIB3829-006-Q6-K6-C5
tngcgaattaccctcggagcctgcaaaatcctcgcaaanaagatgccaagcctgaatctggagatcataaacgaaagtgaacagctggaatttagccttgatgataggcttctggtagacaagatgtatttgtatcggacattggtggggcataggaaagataagccggagtatgtgttgcttttgtaggtgcattattttggctcagccgttttcatttctgctttattaaaactagagtactactttgttagggacaattttattttcatggatccttcttagctggtcggtgatctagagatgtatgctacctttgtttaatttacaagagatttggtatttgtaatccttgttatttaaagttggcatcctatcgagcaatgcaatgaagtttttggatt

SEQ ID NO: 12607 - DNA, 595 bp, Gossypium hirsutum
  unsure (1)..(595): unsure at all n locations; Clone ID: LIB3829-006-Q6-K6-C6
tgacttccaaaaaaaatcctgatcctgtgctaanaacctgaagatgggatgaagaagaagaggtgaatggacaccctcaacaattcccaaccccgagtacaagggcccttggaagccaaagaaaatcaagaaccccaactacaagggcaagtggaaggcaccaatgattgacaacccagatttcaaggatgatccagatctctatgttttccccaacttgaagtatgtcggtattgaattgtggcaggtgaaatctggaacaatgttagataacatcttagttgccgatgatgtagagtatgccaagaaactagctgaagaaacatggggcaagcagaaggatgctgaaaaggcagcatttgaggaggcagagaaaaagagagaggaggaggaatcaaaggatgccccagttgattccgatgctgaggacgaagatggtgctgatgatactgaagggcatgagtctgattccaataccaaatcagacgatgaggacaaggaagatgcacatgatgagctctaagcactgcaatatttcgctgacaattcggtttggagataaaaacgccaaaatcttccctacccttaataaaaa

SEQ ID NO: 12608 - DNA, 572 bp, Gossypium hirsutum
  Clone ID: LIB3829-006-Q6-K6-C7
cacgaagcagttttccatattgataaaggcagtgaaggactggaagaagcaaaagaggaaggggaaaggaaatagagaatgaatcataatcggcaatccaacgatgggaagcatgatgatgactctgctctctccgatttccttgcttctctcatggattacactcccactatacctgacgaactggtggaacattacttagccaagagtggttttcaatgtcccgatgttcgattaataaggcttgtagctgttgctactcaaaagttcgttgcagaggttgcaaacgatgcacttcagcattgcaaggcaagacaggctgcagttgtgaaggacaaaagggagaagcagcaaaaggataaacgcctaatcttgacaatggacgacctctccaagtcattgcgtgagtatggagtgaatgtgaagcagcaggagtattttgcggatagcccttcaacaggaatggaccctgctactagagatgaatagttggagttagaattatgttattactttgttgatgctgctggaaacctcctttatggccctttattacttgattgctcagctta

SEQ ID NO: 12609 - DNA, 590 bp, Gossypium hirsutum
  Clone ID: LIB3829-006-Q6-K6-C8
aaacccaaagggaaaggagtttgctaacaaattggtggggctagcaagcagagcagccgccaacaacaacgtggtgatcgatgtgtgcttggtcacatcatttgcggtattaggcattcgatctctgaaccagcaaatgttattgaatccttggaagccgagaaagattccttgaccaaatctaacaaagccctcaaaaggttatgtgggattggaagcagcagctcttcgccgaagcgtcctccccgtctcctcttgtccctctcgattccctcaaagctatctacggcgaatccccaacccctccaaccggagatgctgcaaaaggtgtaaaatcaccaccagcaaagttcgttgtttgaactctgaatcggattttagtaatctttgcgaggaagctagaacttttgggtattttcgtagttgagaggtgaatatcttcttctttgagatcaaatttctgataataatacagttctgtgatcaactgcagtaattttgtagaatcaaatcaaccaatcaacagatttagagaagagtggaattttcctgccttagcctcttaaaaaaaaaaaaaaaaaggcggccgc

SEQ ID NO: 12610 - DNA, 606 bp, Gossypium hirsutum
  unsure (1)..(606): unsure at all n locations; Clone ID: LIB3829-006-Q6-K6-D1
ctttctttctctctctcatagcttcctcccagcctctgctccccctataagcttcgttaatggcgtttcagatctcaaaaaacaaactctaaaccttaagtaaacgcaaatcctacccaaacccaagaccaaaatcgagataaaaaaatcatcctttcctatcaaaagccttcattcatttttttttgtgtgtgtggttttttttttccttttattcgaggtttaattaatgcataagaaaatggcgttttcgttcccagacgaggtgctagagcatgtgttctcgttcatacaatcagataaagaccggaacgcggtgtcgatggtgtgtaaatcgtggtacgagatcgagcgttggtgtcggaggaaagtgtttgtggggaactgttacgctgtgagcccaaggatggtgatcagacgtttccccgagtttagatccattgagttgaaagggaaaccgcactttgcggatttcaatctggtgccggacggatggggaggttacgtgtttccttggatcgcggagatggctggagcttatccttggctcgaagagattcgacttanaagatggtcgttaccgacgaaagcttggagcttattgct

SEQ ID NO: 12611 - DNA, 597 bp, Gossypium hirsutum
  unsure (1)..(597): unsure at all n locations; Clone ID: LIB3829-006-Q6-K6-D10
cggccgcgtgggngaagcatttgggtcgtttcgaagtaattggaaacttcaggnaaaagtaaagaagggagccggaggaaggaaaggtggtggcccgaagaagaagcccgtttcaaggtctgtcaaagctggtctccagttccccgttggtaggatcggccgttacttgaagaaaggaaggtattcacagcgtgttggaaccggagccccggtttacttggctgctgttcttgagtacttggctgctgaggtcctggaattggctgggaacgctgcacgtgacaacaagaaaaacaggatcatcccaaggcacgttctacttgccgtgaggaacgacgaagaattagggaagcttctcgccggcgtaacaatcgctcacggtggtgtgttgccgaacatcaacccagttcttttgccgaagaagactgaaaaggccgccggcaaagaacccaaatctccatcaaaggccaccaagtctcctaagaaagcttaatttgttttaaaaaagactagatccacagggctttatttttcttagttgtatgtccttttggggggattgttttcatagtgtangggaagaatgctgtaagcaaa

SEQ ID NO: 12612 - DNA, 584 bp, Gossypium hirsutum
  Clone ID: LIB3829-006-Q6-K6-D11
ctctcaatctcagctgctatggcacccatcgcacggttacttttgctcgcgcttctctcaactgcactcacgatttcatcagggtctggggatgggtacaccatcaatggtcgagtgaagatcccccaaggtctgggtacaaaagggtttgctttgcctggaaaaacgtcaaatgtcaaagttatactcaatggtggccaaattgttacttatctgagacctgatggatatttttcatttcagaacataccagcagggactcatttgattgaagtggctgctattggctatttcttttctcctgttagagttgatgttagtgctagaaacccaggcaaggtacaggctgcattgacagagaacaggaggggtctcagtgaattggttttagagccgttgagagatgaacaatattacgagattagggaacctttctccataatgtcggttgtgaaaagcccaatgggtctcatggtgggatttatgctggtggtggtgtttttaatgcccaaattagtggaaaacatggatcctgaagaaatgagacgagcacaagaagaaatgagaaaccaggagttccctcc

SEQ ID NO: 12613 - DNA, 633 bp, Gossypium hirsutum
  unsure (1)..(633): unsure at all n locations; Clone ID: LIB3829-006-Q6-K6-D2
ctcagaatcaaacttcaaaatggcattttgtcaagggctcagnaaaaccaaagcttactttaagcggtttcaggttccatacaagagaaggagagagggaaagactgactaccgggctaggattcgcctaatcaatcaagacaagaataagtacaacactcctaagtaccgattcgttgtccgatttagcaacaaagatgtcaccgcacaaatagtttctgctaatattgctggtgatatggttcttgcttctgcttactcacatgagcttccacgatatgggcttgaagtgggtcttacaaactatgctgcagcttattgcactggtttgctgttggggcgccgtgtgcttaagatgctcgaaatggatgatgagtatcagggcaatgtagaggctactggagaggatttctcagttgagccaactgagacaaggagacctttccgtgctctccttgatgtagggctgatcaggacaaccactggcaatcgtgtttttggtgctctaaagggagccttggatgctggtttggatattcctcatagcgacaagaggtttgctgggttctccaaggacaacaagcagcttgatgctgaggttcatagcaagtacataatatggtggccatgttg

SEQ ID NO: 12614 - DNA, 593 bp, Gossypium hirsutum
  unsure (1)..(593): unsure at all n locations; Clone ID: LIB3829-006-Q6-K6-D4
ccgtccgggccaatgggctcatcggnacaaaccattgaagttcctgatctacggtcgaactggttggatcggtggtttattaggcaaactctgcgaatcccagggaatcgattacgagtacggctccggccgtttagagagccggatttcgcttgagtccgacatagccaacgtgaaaccgacccatgtattcaatgccgccggtgtcaccggtcgtccgaacgtcgattggtgcgaatcccataaggtggagaccatcagaaccaatgtggtcgggacccttaccctcgctgacgtctgcagagacaaaggcctcatcttgattaattatgctacaggttgcatctttgagtacgatgaggctcatcagataggaacgggtatcgggtttaaggaagaggatactccgaatttcaccggctccttttattctaagaccaaggctatggtggaggaattgctcaagaattatgaaaatgtatgtaccttgcgagttaggatgcctatttcatcggatttagccaatccccgaaacttcatcacaaaaatcactcggtatgataaagtggttaacattcctaactcgatgacca

SEQ ID NO: 12615 - DNA, 605 bp, Gossypium hirsutum
  Clone ID: LIB3829-006-Q6-K6-D5
atcgttatacaatctcatcgacattcacagcaaggcagttgcatccattgttgacaaggctgaaccattagaagcacaattgatatatgcacctgtttgtttagatagcagaacacgaagcaaacgtacaaataccgcttgctgtgatcctcctcgagtatcttcttcagaatatgaagattcaattcattcagccaataatctcagatgtcagatggtgttaacatcagatgaaggcttaggaaattccacgggcaaaagtgtagaaagtttcccgttagatgcctcggatttggccaattttcttacgaaggataggcacttaggattcaattgcagtgcacaaattcttctaagatccgtgcttgtggagaagcaagagttatgtttctctgttgtttcactattgtggcacaaactgatagcagcccctgaaacacaacccagtgccgaaagcacttctgcccaacagggatggagacaggtggttgatgcattgtgcaatgtcgtatcagcatctccggcaaaagcagcaactgcagttgttcttcaggcggataggggaattgcagccatggattgccaaaaatgatgatcaaggtcag

SEQ ID NO: 12616 - DNA, 487 bp, Gossypium hirsutum
  unsure (1)..(487): unsure at all n locations; Clone ID: LIB3829-006-Q6-K6-D7
ctccgaggacaaataggaaaatttaggtttttttgattaggggaaaatggcgatngaggaaagtttacagcgagataaaaggtatgaaattgaaggaagttcctggttacttcaagccgatgctatctatgggttacttgaagaaatctgttcagaggggtttggacaattaccatgctaagtacattgagactgattctatcgaacctctctaccatgtctgtttcggtgggatgatcttttcttaccttgttgctcttcccaacgagcgtcgccacctcgagcacaagcagcatgctgagcaacacggtcatcattaatcccatctagctttaaagatggttcggatcgttgttgtgcccttctcagttttatccggtaacaattcgatttgcttaatgctttttggttgtaatttgtgaacaatgtaggcagaggaagatgctgtcttgatcaaatgcaaaaataaaagagtacaattttcttt

SEQ ID NO: 12617 - DNA, 575 bp, Gossypium hirsutum
  unsure (1)..(575): unsure at all n locations; Clone ID: LIB3829-006-Q6-K6-D8
cgaaaggagctggattcgatgtctctttcggagctccgcctgctctccgcttttctcgccatggnaaaccaccgattctctgctctgtgtagccagggaatgtggtggaggaaagttaactgcgaaagttcaaagctttatttgggatcattgcttaaccaaagctgtagggaaaggctatgaatcttattcgaagaagtttgtaaagaagcttattacagagattgaatcaaaccatggtaatgtgttggatgaattgtatgaacaatatgcttcctacatgatttctttcaaggacgataatccagtcaaagaaaatgagagagtctgcaaatgcatttcttttcttttccctgattgttttaaactatctatttgtccaaaatcacggaaactggttgtcccgctacagtgttcactcaacatgcttgagggagatacagggtgttcagtttggccctccagtcttttcctctctgagttgatactttcttatccacatattttctcggggaaatcatgttttgaggtcggatccggtgttggtttggttggaatttgtctagctcatgtaa

SEQ ID NO: 12618 - DNA, 588 bp, Gossypium hirsutum
  unsure (1)..(588): unsure at all n locations; Clone ID: LIB3829-006-Q6-K6-E1
naaaaaananagcaccactgatggggttaataatggtgagtttgaccctggtgcagcacctccttttaagttgtctgatattaaagctgcaataccaaaacattgttgggttaaagatccatggagatctatgagttatgttgtgagagatgttgttgttgtgtttggattggctgctgttgctgcttatttcaataactggttgtttggccactttattggattgctcaaggaaccatgttttgggcactttttgttcttggtcatgactgtggacatggtagtttttccaataatccagctttgaatagtgttgcaggtcatcttcttcattcttcaatccttgttccataccatggatggagaattagccatagaactcatcaccagaatcacgggcacgtcgaaaatgacgagtcatggcatccgttgtctgagaaaatttacaagagtttggacaatgcaacaagattattgaggttcaccttgcctttccctatgcttgcttatcctatctatctgtggagtcgaagtcccggaaaaaaggttcacatttccatccagacagtgatttatttgtcccaaatg

SEQ ID NO: 12619 - DNA, 345 bp, Gossypium hirsutum
  Clone ID: LIB3829-006-Q6-K6-E10
attttcagcaggttgaagagaagtgcgattagctattgaaatggcggcggtgagaggagttgtgctaaagcacctgagaatgaatgcaacatccttgtccctgcttcgtaaccctaaacccatccctaacggccactgtgctctcaccttcaacgccatacggcgccgatattccgacgacgtcatgggctcattccttgacaaatctgaggtcaccgatcgcgttgtctccgtagtaaaaaacttccagaaaattgatccatccaaggttactccaaatgcccattttcaaaaagatctcgggttagatagtttgggacactgtggaggttgttatggctcttg

SEQ ID NO: 12620 - DNA, 604 bp, Gossypium hirsutum
  Clone ID: LIB3829-006-Q6-K6-E11
ccgagctaaaggttcgtttctctttgcgcctttcttctctcggccgaaggtaagtcatggttaagcataacaatgtcgtgccaaatgggcacttcaagaacactggcagaactatgtgaagacttggttcagtcagccagcacgaaaggctagaagaagaatttgtgggtttttcacttcgttttaaaaaaaaatattattttagtggttgaaattgtttgtttaatgatggtgtttttgtggatttgcagcaaggcaaaagaaggctgtgaggatctttccaaggccaactgctggaccccttcgccctattgtccatggccagactttgaagtataacatgaagttgagagctggaaagggtttcacccttgaagagcttaaggctgctggtatttcaaagaaacttgcaccgaccattggtatcgctgttgatcaccgccgtaagaacaaatcacttgaaggtcttcaagccaatgttcagaggcttaagacctacaaggccaaacttgttgtcttcccaaggcgtgctcgcaagttcaaggctggtgattcaactgccgaagagctcgcaactgcaacccaagtccaaggaccatacatg

SEQ ID NO: 12621 - DNA, 195 bp, Gossypium hirsutum
  Clone ID: LIB3829-006-Q6-K6-E12
tttccttgctgctttacattttctcctaactaataaaatttgcttcttttttcatggagactttgctcggacaaaatgtgttggtgttccttttttttttttttctctttttgcttgtctgctcttgttctgtgagtttattctactaaatggattcatatggaagaaacccatccttttgcttgcagctccttc

SEQ ID NO: 12622 - DNA, 640 bp, Gossypium hirsutum
  Clone ID: LIB3829-006-Q6-K6-E2
caaattaagggaaaatttgcaagaggaagaggatttgatggttaagattcttaaaacagatgaagatgaagatcaaatgaacaccacaacacgatgctacggttttgagcatcgaatcagccacaaatcgatgttgccacgatcccatttcgttcaagttccacatgtaaaccaattgttctcttgggattgtggacttgcttgtgtgttaatggctttaactactattggtgttaatgattgtagtattgagtatttagctgaactttgctgtacaactagcatttggacagttgatctagcttacttactgcaaaagttttcggttagattttcctattataccgtaacattcggagctaacccgaactactccggtgagacatattataaggagcaactgcctaacgatctggttcgagtagatacgctatttaaaaaggcggtggaagcaggaatcaatatagggtgcaggtccatcagtggtgaagaaatctcttgttggatcttgtcgggaaagtatattgcaatcgctttggttgaccagtacaaattgagtcagtcttggatggaggatgtcatcatccctggatttcagggaaacgatgtaggatataccggtcactatgttgtgatatgc

SEQ ID NO: 12623 - DNA, 548 bp, Gossypium hirsutum
  unsure (1)..(548): unsure at all n locations; Clone ID: LIB3829-006-Q6-K6-E3
cactttcactttgaaagaaatagaattcctacaactttcaagnaaaanagtgggaaaaaacagaagttcaaattccaattaaattttaactcaatataaatttgaagtttatttttgaacaaatataattttgaagatcttcctgtttaggtgcttagatcctctaatctttactgtttatgttcccagcttcctttggatttattttactaatttctcgcattgatcttcttctcggcttcatggagttctgatttatcgcacgttttacgagtgtgatggattcagaaaatattttgtcttcggttgggcttaaagttgcccatcagaatggtgtttatccacaacttcgggtgtgtggggatgatagtagttcagataatgcgaatgggagtgttgaggaaaccatcgaaacttatttgcagaatggaatgaatgacaatgtaggaactggggaagctggagaagactccgatgatttcgttgaaagtaatgcattgattgattctgaggaaggggaaatagaggataatatgaagcaatccaaa

SEQ ID NO: 12624 - DNA, 586 bp, Gossypium hirsutum
  Clone ID: LIB3829-006-Q6-K6-E4
cttatttattttctttcaccttttcctttcaggtacttctctttctcaccctattattttgtatttcgctgttcctctagtttgattttatgatttgaattttagattgtagatctgatctttaagaaaattaaaatttaacagatcgagagaaaaaaagaatggcagaggagcatagatgccaagcgccagaaggccatcgtctttgcgtcaataactgcggctttttcggaaattcggcgacgatgaacctttgctccaaatgttacagagatctctgtctcaaggaacaggaagcttcttcgatcaaatccgctctttcctcttccccttcgtcttcgtcaacggttgtcgaatctatttctcaggttcctcttttggctctccctgaagtcaacagagaatcggcggtcccggagattgcaccggcggccgaacagctatcgcagcaacaaccgaatcggtgcatggtttgcaggaagcgggtcgggttgaccggattcagatgcaagtgcggtgttacgttttgcgggtcccacaggtaccctgagaatcacgggtgtacgttcgatttcaagaagtcggc

SEQ ID NO: 12625 - DNA, 587 bp, Gossypium hirsutum
  Clone ID: LIB3829-006-Q6-K6-E5
attttacttgggatcaggagattccaaagctttgtaaaataatctttttttgttgatttggtctgtaacataatcctgtagttgtagagtcttagtcattagccatttaaagccactttgaactgtgtactcgcctgatttgtccccttaccatattataacatccggttgagtcctgcttaccaatgggatagacaagattacctcagcttgatccctatccagggtgggtagctaagaatcattccagatgtttcttgattcaccgttctctatcctccagcctgttctttcttctaataagcttcgtgcgtttcaaatgctgcgccaggtaaaagaggggtaagctcctaaccttgcatttaaaaacttaccacatagataatattttaacttcataatgcacgcaaacaaacagacaggttgggtgattagtctccatccctatttagccagcagggccatattaaatgttactaaatccctaaacctcataccttcaaacgcttttggactacatatcgcgaaccaactacaccagtgaatatctttattagtttttaaatttcgccaccaaaatttactca

SEQ ID NO: 12626 - DNA, 609 bp, Gossypium hirsutum
  Clone ID: LIB3829-006-Q6-K6-E7
gaaaaagttgatagagaagctagagataggagaagagaaagagacggtgacacagaaggagacagacctgagaagcgcagcaagtgctctgataaagaatctgatgatgggtgtgcagatggtgaaggggctacggaaagggaaaaggaaggttttaattctggagtccagcagcgtaaaaggatgcttcgtccaagaggcagccctcaagtggctagccgtgagccttcttttagaccccgacctcaagacaacgaaggatctcagggtaaacctgaagtgtctactgttgtttataaagttggtgaatgcatgcaagagctgattaagttgtggaaagaatatgaagcctctcaagctgataaaaatggtgaaagctctcaaaatggccctactcttgaaattcaaatccctgctgagcatgttactgccacaaatcgtcaggtcaggggtggtcagctatgggggactgatatatacacagatgactctgaccttgttgctgttcttatgcatactggttactgccgtccaactgcttctccacctccaccagctatccaagagctacgtgctactatccgtgtgctgccaccacaagattgctac

SEQ ID NO: 12627 - DNA, 600 bp, Gossypium hirsutum
  unsure (1)..(600): unsure at all n locations; Clone ID: LIB3829-006-Q6-K6-E8
caagnaatgctagcaaccattctttttttttctctctctctctctctctttttgaaagccaaagaaattccaggtacccgatctgtttagaagtgaagctaatttcttcgatcgaagcagctgttggaagagttgcagatctgttgtgtggctttggattctataaaacatctgtttttgttttatttttttgtctgagaactggactcctataacaacaaccaacgttgttcaaagtgagcataaaactttttttttcttttctgaaaaagagagtttatattctttgttggtaattccaggaacagcttttaatttgttgctaatccaggaacagctgatttattaatgggggtttgtcatttaatagtccttttattaagataaatagtgatgctggtggtggtatctaccatctttagggtcagcagcaaaaaagaaaaaaaagaaaagagagagagctttaaataatttaaggaagaggaaagagagaaagaaagaaagaaaaaaagggggttgggcttcagatcggcatcaaacattcagcaattattgcttttcattagcttaacagtgaagcagaaaaagggtttctttctc

SEQ ID NO: 12628 - DNA, 580 bp, Gossypium hirsutum
  unsure (1)..(580): unsure at all n locations; Clone ID: LIB3829-006-Q6-K6-E9
cgacaatgctganactctgctaactttcacactcttcacgcttcttttctcctacgtttctgcaacaacaattacactctacaacaagtgccctcacccagtgtggccaggtatccaacccagcgctgggaagccacttttagctcgcggtggctttaaacttcgacccaacaaggcctactccatgcgtctccctcccctctggtccggtcgtttctggggccgtcacggctgctccttcgacgcatccggacgcggccgttgcgctactggtgactgcggcggatccctcttctgtaacggcctcggcggtgccccgcctgctacgctagccgaaatcaccctcggccaggaccaagatttctacgacgtgagcttggtggatggctacaacatagcaatgtcaataaccccattcaaaggctcaggcaaatgtagctacgctgggtgtgtgagtgacttgaacttaatgtgccccgttggtttacaagtgagatcgaaggataacaagcgagtggtggcttgtaaaagtgcttgctttgctttcaactcgccgaggtattgctgcactgggaccttt

SEQ ID NO: 12629 - DNA, 598 bp, Gossypium hirsutum
  unsure (1)..(598): unsure at all n locations; Clone ID: LIB3829-006-Q6-K6-F1
cngatgactgtaatgcagcagtatctctcccatcttccaagtcatctaccctgtcatttaaaaactcagtcactttgtccctgaagnaatcaacttcaacaagagtgttttgtacccaaaaaatgtcagccttggtggaaatgtggtttccattagagctcaggtcactacagaagctcctgcaaaagcaccaaaaatttccaagaaagatgatgagggtattgttgtgaacaagttcaaaccaaaggaaccctacattggaaagtgcctcctcaacaccaaaattaccggagatgatgctccaggagagacttggcacatggtttttagtaccgaaggggaagtaccatacagagaaggacaatccattggtgtcatcccagatggtattgacaagaacggaaaaccccacaaacttagattgtactctattgctagcagtgctttgggagattttggcaattctcaaactgtttccttgtgtgtgaaaaggcttgtctacaccaacgaacaaggagagatagtgaaaggagtttgctccaatttcctgtgtgacttgaagcctggtgctgaagtgaagatcacagggcctgttggg

SEQ ID NO: 12630 - DNA, 552 bp, Gossypium hirsutum
  unsure (1)..(552): unsure at all n locations; Clone ID: LIB3829-006-Q6-K6-F10
gaaatattagagtttcggnaggaaaatcctatatgtaatattgctctgaaagcagaggacaaggattttgagacaaatctttctgattcatctgcctttgagaatcaattgcttgaggaggaggatgagagtcaagaagttttatcagacaggtcaattgttccaggcctcatcgcttccccttggttgcacgcgaaaatcacctgcaatcctggtctggctggtggttcatctaaaagaaaaaggatgaacagctttgcattgctatcacgagctaataccaagaacaattctcccacgaagcaggctcatcaaggactcagccaagtggttatttggaataagaaagactcattacagcaggatgtgctatacacaaatgatagttctactcagagatcatacggtaacaatgtgagccttcctccttgccgaactagtacaggtcgtgctagtgatgcaatgactagtaggaacaaagtaagagagatattacgcctattccaagacatctgccaaaagctcttacatgaagaagaatcaaagataaac

SEQ ID NO: 12631 - DNA, 582 bp, Gossypium hirsutum
  unsure (1)..(582): unsure at all n locations; Clone ID: LIB3829-006-Q6-K6-F11
ggnaaaaaanaaaagttagaacaaattggggattaatggaggttgatcttgaacccaagtgttagacacttcatctatgacggagaagggatacggagaatttgggtgttcacactatagaagaagatgcaagatcagggcaccttgttgtgatgagatatttgattgcagacactgccataacgatgccaagaactcaattgaaattgatccttttgatcgtcatgaggttcctcgccatgatataaaaagggttatttgttccttgtgtgacagagaacaagatgttcaacagtattgcattaactgtgcggtctgcatgggaaagtatttctgttcaaaatgcaactttttcgatgatgatgtctcgaaaaaacagtaccattgtgatgaatgctgcatctgcagaattggtggagcagagaactttttccattgtgataaatgcggatgttgctattctatgataatgaagaactcccacaagtgtgttgaaaaagccatgcaccataattgcgccgtttgttttgagtttctctttgatacgacaaaagagataactgtcttaccatgtggacacac

SEQ ID NO: 12632 - DNA, 572 bp, Gossypium hirsutum
  unsure (1)..(572): unsure at all n locations; Clone ID: LIB3829-006-Q6-K6-F12
cggncgcgtgggtccaagtcaggtcggggtcgttctagtaaagttttccatggaattgtcgaaccaatatttaagcttgcagggtttaaattggaggttgtcaaaacaacatctgcaggccatgccaagaagctggcatctacagttgatatcagcacatgtcctgatggaataatatgcgttggtggtgatggcattatcaacgaggttctaaatggtctgcttagtagagacaatcagaaagaaggaatttctatacccattggaattataccagcagggtcggataattcactggtttggactgttcttggagttagagatcctgtctctgctgcgatttctattgtgaagggaggtcttacagctacagatgttttcgctgttgagtggattcagactggtattattcactttggaatgacggtttcctattatggatttgtcagtgatgtcttaaagctttctgagaaatatcagaaacgatttggtcctctacgatattttgttgctgggttcttcaagtttttgtgtttgccaacatacaactatgaagtggagtaccttcctgc

SEQ ID NO: 12633 - DNA, 618 bp, Gossypium hirsutum
  unsure (1)..(618): unsure at all n locations; Clone ID: LIB3829-006-Q6-K6-F2
cagacagcccgtaagtcgactggtgggaaggctccaagnaagcaacttgctaccaaggctgcccgtaaatctgccccaaccaccggtggtgtgaagaagcctcatcgctaccgtcctggaactgttgctcttcgtgaaattcgaaagtaccaaaagagtactgagcttcttatcaggaaattgcctttccagaggcttgttcgtgaaattgcccaggacttcaagactgatttgcgtttccagagccatgctgttctagctctccaggaagctgcagaggcataccttgtgggtctttttgaagacaccaacctttgtgcgatccacgccaagcgtgtcacaattatgcccaaggacatccagttggctcgtaggatcagaggagagcgtgcttaatttccatgtgtgtggatcagtcgcttagaaagaagaaactattgtttatttttaggcaaatgtattggttttttgttttttctaatcatcttttaggccatgatggtagtggtaggttcaatgtgatgtgatgatgaagtggggcgtctgatatgttaatggacaatagctcatgtctggtatagtctgtttaaatgtgtttttgcttaatcgaaagtgctt

SEQ ID NO: 12634 - DNA, 610 bp, Gossypium hirsutum
  unsure (1)..(610): unsure at all n locations; Clone ID: LIB3829-006-Q6-K6-F3
ngaaaggtcactttatatgggcaatctcaaccttctgcaccgccctttgagaaaggaagtgggccgttacctatgaggagtggccagaagaagtttatcctccctatgccaatggacctggatacattatttccagtgatattgccaagtttattgtctcacaacatgccgatcaaaaattaaggcttttcaagatggaggatgtgagtatgggaatgtgggtcgaacaatttaaccagtcgacgactgtccaatactcccatagttggaagttctgtcaatacggatgcatggtagactattatactgcacattaccaatcccctaggcagatgatttgtctttgggacaaactttctagaggtcaggcacgctgttgcaacttcagatgacaaccgtcaactcctgccgtttgttagaacgactttatgtacgttaccttcctccgccctgtattttcgccacgttctacccatttttgtgcaatcaagtgagctccagagggttttaagtgttgagttacaaccttctgttgccaagatacagattgttctgtgataacatcggacaagtaggttcatttagcttgaattgtatacgcatttatgat

SEQ ID NO: 12635 - DNA, 538 bp, Gossypium hirsutum
  Clone ID: LIB3829-006-Q6-K6-F4
tttctttctcctcttctttctttttttcggatcttctttctccctctctccaagttcttcaattctttccgtctccttttcgctcgctctctggtaatttcatcttttagaacagggccggtctagccaatctctaccaggacggtttaatgttgaccttcgagggtcaaaagatccaaggctctcagagcatcgtcgctaaactcatcagccttcctttccagcggtgttagcacagcatcaccactgtcgattgtcagccctccagcgttggcggcatgctggttttcgtcagtggtaccctccaactcgtcagtggtttcaattcgtaggatgagaaccggtatagtgcaggaagaggagtgcacaaaaatctgaaacgtgcagagaaagctcgcattctagttagcaaattaccatgtaagcttctagtagtaatcttacatcttgaagtaggtttctgtgacatattaacttaatctcctttgttaaatagaaaacatgatttattgcaatgcaagatttagttgatttgctt

SEQ ID NO: 12636 - DNA, 592 bp, Gossypium hirsutum
  unsure (1)..(592): unsure at all n locations; Clone ID: LIB3829-006-Q6-K6-F5
cgnattcattttagtctctatcttttactacgtagccaccacttacttccgcaacctccctcagccactatctttcgtcgcctggccaatttattgggctcttcaaggttcagtcctcactggcgtttgggttatcgcccatgaatgcggtcaccacgcttttagcgattaccaatggatcgatgacactgtcggtctcatcctccattcatcccttctcgtcccgtacttttcgtggaaatatagtcaccgtcgtcaccattccaacactggttcccttgaacgcgacgaagtatttgttccgaagaaacggagcagcattagatggtgggctaaatacctcaacaatccaccaggtcgtttcgtcacaatcaccattcagctcactctcggatggcctctttacttagcattcaatgtagcaggtagaccttacgaaggattcgcttgtcactacaacccatacggtcctatctacaacgaccgtgaacgacttcaaatctacatttccgacgtcggtgtccttgctgtcacctatgggctgtaccgtctcgtgttagccaaaggtctagcttgggtcatttgtgtttac

SEQ ID NO: 12637 - DNA, 588 bp, Gossypium hirsutum
  Clone ID: LIB3829-006-Q6-K6-F6
cggccgcgtgggccggcatgatgtagttgggttatcagcagagaggatatctcctgaaatgcctagtaattccattgctgcaagtagccaggaggacggacttagtgatcttcatgagttggagagttcacttgcttcatttcctattaagccacttcaagcactcaaaggctgttttgacattggtgaagctgagggtacaaatggtccaaattggaaaggtgttacccagttggaaagtgaacagttaattacaaagtcatcaagagccatggaccaagatgctggaagaaatgagggtgagaactccgggcaaagtagctcttccacacgccaggtcgttccagagcataaaaagttcttgagcggttcgctaatacctgatagtgccttttcacctaacaagtttactggagatggggacagggacttcccacagcctaaatttccatctgaacgcaactacagtggaccattgttgtaccgccagaggagagaaacaaataacccttcatctgaggattcatcggaaggagcagttgttcagcggggacgctttaaggtgacttcagcagatctcagtcccaa

SEQ ID NO: 12638 - DNA, 580 bp, Gossypium hirsutum
  Clone ID: LIB3829-006-Q6-K6-F7
gcgaaaaccctaccatctctgctcactcgccatgggggcttataagtacgtgtcggagctatggaggaagaagcagtcggatgtgatgaggtttttacagagggtgaggtgctgggaataccgccagcatccatcaattgttagggtcaaccatcctactcgccctgacaaggcacgccgcttgggttataaggccaaacaagtaatggttatgtggtttaccgtgtccgtgttaggaggggtggtcgcaagaggcctgttcccaagggtatcgtgtatggtaagcccacaaaccagggtgtcacccaattgaagttccagcgcagcaaacggtctgttgctgaggagcgtgctggccgaaagttgggaggtctcagagttgttaactcgtactggatcaatgaggattctacttacaagtactttgaggttatcctggtggatgttgcacacaatgctatccgcaatgacccaagaattaactggatctgcaatccggttcacaagcacagggaacttcgaggacttacatctgctggtaagaaaaacagggtctccatggaaagggtcatttgcacca

SEQ ID NO: 12639 - DNA, 589 bp, Gossypium hirsutum
  unsure (1)..(589): unsure at all n locations; Clone ID: LIB3829-006-Q6-K6-F8
cggccgcgtgggattttttttccagcagattgaatgcaaagcaaccgatgggagaagaaaacaagaagattagngaaagaagaggtaattgcaaagctcaaggacgatggtgatttcgacaagctccgtctcaaaatcatccgcaagctcaaggacaacgaagaattacgcaacaacatcatttcagctgtgaagcagtcggcagcacttaaccgtcctggcgctgaaaacatgaaagtaaggcaactatcagatgccatacatgatgaggttgggaacaaagtgatgggccagatttcagatagtctctgggaaataataagctcggaaggtagcatgagaactgaaattacagaaacggtacaatctgtttatgataaattagctacacctcaagggaaagaaaaaggtgaatcatctgtccatgaaatggtacatgttgaaaaggaatctgagagtaatggtaccattaaggccacagctagaagagtcgatgagacattatctgatggtgatccacaagaaccaccaggtttctctatgtcaaataatcgtcacagcagccactgtcagcaatctcacaaggcta

SEQ ID NO: 12640 - DNA, 575 bp, Gossypium hirsutum
  Clone ID: LIB3829-006-Q6-K6-F9
ctggttctcatctccagtcaatcctttgtttccattgccaatatatgtgcaagggcatttgcagatcttagtacatgtttgaatatgaaacttctaggtctgtttagtttctgttgaatatcgtatatatatgctctaatatttgaacgatcttgactttttattgcacatttattgattattgtgagggagtctccttctattacaaccttcggccattcctgttccactcctactaggaccgctttcctacacgcgattgcttcagctgcaaatgcggaagttaccccgtgatggatctctgagcaggaaagtaagacaaccccttcttcgtttctgacaacaatccctgaggcagattggtggtgatttgaatcatacgcaccatcaaaattaatttttacgaactctctagatagcccaaagtccacaacaaaagaggcggctctggtataaagtaagctgatcaaagattcaggatattcgcgaaaatatggtcgattgtttcaactctttctccacatcgaaggcagcttgtactactgacaagctttcggtgctgcatattaacccta

SEQ ID NO: 12641 - DNA, 585 bp, Gossypium hirsutum
  unsure (1)..(585): unsure at all n locations; Clone ID: LIB3829-006-Q6-K6-G1
ctatatcctctttctaaaataaacaaaatattaattaggatatatggcaggtgattcagggaagaaggaagagatgtcaaaggtgaaaatcatcagcacaagtcatgtgaagcctggaaagagataggaagaaaagaatgtcaattggttacttttgatctcccatatttggcattccattataaccagaagctgttgttttacaagtgtggggagtttgaggagaaggtggaaaaactcaaggatgggctgagagtggttttggaggagttttatcagctagcaggcaagcttggtaaagatgaggatggggttttcagggtggaatacgacgacgatatggacggtgtcgaggtggtggaagccaccgccatggagatcggcatcgaggaactggcggctgaagacggcactgcctctttcaaggacttgataccctacaatggtgttctgaacttggagggccttcacagacctctcttgtctgtgcaggtaaccaagttgaaagacggagtggcaatggggtgcgcattcaaccacgccatccttgatggaacttccacttgncatttcatgagctcatgg

SEQ ID NO: 12642 - DNA, 605 bp, Gossypium hirsutum
  unsure (1)..(605): unsure at all n locations; Clone ID: LIB3829-006-Q6-K6-G10
cggccgcgtgggcttttctaatcaaactaaataattttgtttaattttttcaattaatacaaattccatagcaatggcttgcagtggacagcttcatgtggaggttgagctcaagtctcttgcagaaaaggtctggngaaaccattagggactctaccaaaatatttcctcaagctttgtcccatgattacaagagcattgaagtgctcgagggcgatggcaaggcccccggatccatccgcctcatcaattatgctgaaggatctccaatcgttaaggtttcaaaggagagaattgaatcagtggatgaagctgagaagatatatgtttacagcatctttgatggggatctcatgaaatactacaagactttcattgctaagatcaatgtgattcccaaaggagagtcgagcttggttaaatggtcttgtgaatttgagaaggcaagtgaagagatccctgacccaagcgtcattaaggaatttgcggtgaaaaactttgtggagatcgatgactatcttcacaccaaggcttagaggccagctctcctattagcttgncatatatatatatatgttttattaatgaataatatgcggngttta

SEQ ID NO: 12643 - DNA, 589 bp, Gossypium hirsutum
  Clone ID: LIB3829-006-Q6-K6-G11
acgtcttggccttttgttactaatactaccaacccaaatggcagtgaagccctccaaagccgacaaggaaaatcgcctacgatgctaaattatgtcaactcttagacgagtacacccagatcttaattgcggcagccgacaatgtgggttcgaatcagctccagaacattcgcaaaggtcttcgaggtgactcagttgttctcatgggtaaaaatacaatgatgaaaaggtccgtccgtatgcacgctgagaaaaccggaaaccaggctttccttaaccttatccccttgcttcagggaaatgttggtttgatttttaccaagggtgatttgaaggaagtcagtgaggaagttgccaagtacaaggttggagctcctgctcgtgttggtctggttgcacccattgatgtggttgtcccacctggcaacactgggcttgacccttcacaaacttctttcttccaggtgcttaatattccaaccaagattaacaagggtactgttgaaattatcactcctgtggagcttatcaagaagggcgacaaggttgggtcttctgaggctgcacttcttgccaagcttggaattag

SEQ ID NO: 12644 - DNA, 569 bp, Gossypium hirsutum
  unsure (1)..(569): unsure at all n locations; Clone ID: LIB3829-006-Q6-K6-G12
ctcgtctcttggnatcgaggaagatgtgggataggcggtggtggaggaaacatatgcggcggcggtggtagaggaggtgctgatggatccgacggcagtgataacgaatggggttattgggattcgaataacgggaaagacagctccgatacttattatcagaaaatgatccaagctaatcctggaaattcgcttctcctcagcaattacgctagattcttaaaagaggttcgtggggatttagtgagagcagaagaatattgtgggagagcaatcttggcaaatccaaatgatgggaatcttctctccatgtacgctgatttaatctggcaaactcataaagatggtcctagagctgaaacttactttgatcaagccgttaaatctgcccctgacgactgttttgtactagcatcatatgcacgatttctttgggatgctgaggaggaagacgatgaagaggaaaaggctggcgaaaaatttagtaatggatcagatcaaagttttttccatggagctcctcctttggctgctgcttcttaagcctcgtggtgtgaaataacttgtat

SEQ ID NO: 12645 - DNA, 620 bp, Gossypium hirsutum
  unsure (1)..(620): unsure at all n locations; Clone ID: LIB3829-006-Q6-K6-G2
cggncgcgtgggnacaaacccaaacaaatcaataaacaacttcaacacacatccaagtccaaaaccccagataaggttgtccaaaactcgaccaatgaatatcagcagcagtcgaaaccagacatcatcatcggtctgggattttttcaggttaggcttggttcgagcaccagaacttgaattccatgagttgaaaattcggaccaacaacaacaataatcggagtcgaaattctgtcagccgtaacagcagttgtagtagcagtaacagtcagctagattcgatcaaagggttcttaagaaaagggttgtttagtggatgtaaatgttcagttaatgtagttgaaacagttccattgaacaaaatagcagtcatcaaaagtatgatgataaaaaagaagagtgagaaagagaaagcaatgtttcaagccgccatggaagaaaaaacgaagctactgcaagaagtgaagataaagaagaaaatgaaagaaaagcgagttttgtcacgtcatcgaacgtatgaatggttaaaggagctttcacatgcaggctttgttgatgaggcttgaagaaaaaaaagactcaatgaacaatctctcgcatgcttccctttttctttac

SEQ ID NO: 12646 - DNA, 596 bp, Gossypium hirsutum
  Clone ID: LIB3829-006-Q6-K6-G3
ctttttcttccataatcatactaccgtcgtccctctctctcgtctctgcaaatcagttgtcctttcttattcttctcttctcatctcagttctcacccactgccgtgtccgctggtttatgccggatctgacccgtatccagtgtgtatcgtgtcgacacggctactgcaccacaagttgccgagtccggataacgaaggctgcgacaaacagaagtaacttttgtttctttatttaacgcaattacagggtttttgaaaattaaaatggaggtagagaatgcagaaaaagtaaatctggaacagaaaaagaagcataaagggaaacacgataagccaaagccatgggacgaagacccaaacatagaccgttggaagattgaaaagtttgacccttcttggaaccccgatgggttactggaagtcagctctttttccaccatcttccctcgttaccgagaaaaatacttgcaagaagcttggccaaaggttaaatctgctttgaaagaatatggtattgctgctgagctcaacttggttgaagggtctatgacagtttcaacaacaagaaaaatagggatccatatgttatcatta

SEQ ID NO: 12647 - DNA, 558 bp, Gossypium hirsutum
  Clone ID: LIB3829-006-Q6-K6-G4
cacgatccgtattgtgttgggattcatgctgttggccctcatctggaaattcgactttccaccattcatggtgcttattattgctatcctcaatgatggtaccattatgacgatatccaaagatagggtcaaaccatcacctctaccagatagctggaagctggcggaaattttcactactggaattgttcttggtagttacttggcagtaatgacggttatattcttttgggctgcatacaagaccaactttttcccgcgtgtatttggggtggcaactcttgagaaaacagctcatgatgacatcaaaaagcttgcctcagctgtatatttgcaagtgagcattataagtcaggccctaatatttgtaactcgatctagaagttggtcctttgttgagcgtccgggtttactactattggcggcctttgtcatagctcagttgattgctactcttattgctgtgtatgccaattggagctttgctgcaattgaagggatcggatggggttgggctggtgtgatctggctttataatattatcttctatatcccact

SEQ ID NO: 12648 - DNA, 598 bp, Gossypium hirsutum
  Clone ID: LIB3829-006-Q6-K6-G5
gaaaaacgtatttaaatacgtacggtcgggttactcagcagatcgtaacggaggtggtagcggcggcggcggttggatatttgatcagatcgtgatccaaatggctgaggacaagtataacctcaagaatccggcggtgaagaggatattacaagaggtcaagggatgcaatccaatccctctgatgatttcacgagcctccctcttgaggagaatatatttgaatggcaatttgcaattaggggtcccagggattctgaatttgagggagggatttatcatggaaggatccaattacctgctgagtatccatttaagcccccttcatttatgttgctgactccaaatgggcgttttgaaacccagacgaaaatttgcttaagtatatcgaatcaccacccggagcattggcagccatcttggagtgtgcggaccgctctagtggcactgatagctttcatgcccaccaacccaaatggtgctttaggttctctagattataagaaggaagaacgacgtgctcttgccataaaatctcgtgaatctccacccaaatatgggaatcctgaacgccaaaaacttattgatgagatacatg

SEQ ID NO: 12649 - DNA, 585 bp, Gossypium hirsutum
  unsure (1)..(585): unsure at all n locations; Clone ID: LIB3829-006-Q6-K6-G6
cagnctgtaaggatcatcgatgagaacttatttcatcttgatcgtaatcagagctatgctaatatgccatcagnanaagaatttacggggagtgcttaggtccgaagttgataggtctgtctccaaagataatatcattatagttgattctttgaacagtatcaagggttatcgatacgagttgtggtgtttggctcgtgctgctgggataaggtactgtgtgttgtactgtgatgttggagaatcgcactgtaggaaatggaatgaagagcgtcgggagaagggagaggctgcatataatgatgtgatatttgaggatttagttagaagatttgagaaaccggatagaagaaatcgttgggattcgcctttgttcgagctatgggctcataatgatggagtggagagatcttctattgccattgtagatgtggttttgtatttgacaaaaaaagcagactcgaaatctcgggatgttaagattttgcagccaaccattgccacacaaaatacccggttttcagaggcaaattcactgtatgagatggacagagccacgcaggaggtgattaatgctattgtgga

SEQ ID NO: 12650 - DNA, 185 bp, Gossypium hirsutum
  unsure (1)..(185): unsure at all n locations; Clone ID: LIB3829-006-Q6-K6-G8
gttgcnaggcaagctatttgatatattatgtaaggcgatgctagttttgggtagcttgtcaatatatatgagaaagttgtagggtgtttttgagttacggtatcttcttatcaatctattgggcttttgcattttatgtaatataaataagtaatttttaattcagtaattgaaatttgactctt

SEQ ID NO: 12651 - DNA, 503 bp, Gossypium hirsutum
  unsure (1)..(503): unsure at all n locations; Clone ID: LIB3829-006-Q6-K6-G9
cggccgcgtgggggnaacactcatttgagcaaaagcttgggatcatcaaaaatcctactgctcattcttcacaatcccaaactcactccaagtctagtagagatgatgataataaccatagccaagcccaagaccaggtgatgatgaccaccacagatgccttgccctcgcctcgtgactacggaaacggaagctcttcttggttttggtagtgtcataacaatgatcatttcaatttgtatacacctacccctgtcaatgtcttggacttactagaccacgacgaccacgtctctcttgattttgtttggcatggctttgcctaaccttgtaatctctgcactcctttttgtcacctcaattattgttttctactttggattgtattgcaacatttattatttttttactactttccctgttttccttctttcttttgtgttatattacatggattgggattgcattgttataattaataattgattatcccttattcctcc

SEQ ID NO: 12652 - DNA, 626 bp, Gossypium hirsutum
  Clone ID: LIB3829-006-Q6-K6-H1
attttcgtcatttgcttaagcctgttacgtagattgggttctttatattacagccatcaagttaattttagttttgttttttgccccttgttttttttgagagaatttggaagtaaactactagttctgctgctacaacattcaacttctggtgattgttctggttagatgagagaaggctgtggattttcgtttccagagcagcgattcgattggcgatcgcatgacttgagttctttggctgctcctcatcctttggttcagcaaaatactaatcctcaacttgttaactctggcatcgatatggtctcggtcccgaggactctgccagattatgcaaatcctggaatagtacctcaattgcaggttggccaagttaacgaaccttgtggctggttttactgttcaccccactattggcagggcttggtgcctgcttcaaccaacccttatgagtatcacaatgaaaagattgtttcgaaggctggttcggggtgtgctcagaagagattccttgtttttgatcaatctggtgatcaaactactatgatatttagctcttctttcggactcctatcaaatgcgccactttgggttcaaaaactcctgctgcttgtaactttaat

SEQ ID NO: 12653 - DNA, 560 bp, Gossypium hirsutum
  Clone ID: LIB3829-006-Q6-K6-H10
cggacgcgtgggtaaggtttgtcagtcgttgaacgatgctaggcgtttctctttatatcacccaggtctactgcttcctgtcctagagaaggtgatgttggtactggtaaagtcaatgaagaacccgagaagtgctctttgcaagacttcgattatggctgcttcagatatcttcaatgcctacggcgaaaaattgcttgactcaactgattctagtgcatttgatcagctgttactgcagttgttactgaaagcctctcaggacaagaagtttgtgtgtgaagaagccgataagtcgctgacagcaatggttaactccattgctgctttacccctgcttcaaaagctccgcggatttgttaaccatggcaaccttagagtcagagccaaagctgcagtttccatttccaattctgtttacaaaatgggatcagaagaaatcaaagagttcgggtcagttaccttgcttcaaatggcttcggatttgctaaacgataggctgccagaggccagagaagcagcaagaagcattgtactttcagtatacgaggcatttacag

SEQ ID NO: 12654 - DNA, 583 bp, Gossypium hirsutum
  unsure (1)..(583): unsure at all n locations; Clone ID: LIB3829-006-Q6-K6-H11
cacacagnaaaagccccattctgatccaatttgctttaaaatcctctcaaacatcaaaatttgtttgcaaacagaccaaaaaaatccagctatgggcaatacggagaagctgttgaaccagatcatggacctcaaattcacctccaaatcgctgcaacgccaggccaagaagtgcgagaaggaggagaaatctgagaaattgaaggtgaagaaggcgatcgagaaaggtaacatggacggtgctcggatctacgccgagaacgccatccgtaagcgcactgagcagatgaactacctgcgtctcgcttcccgactcgatgctgtagttgccaggctcgatactcaggctaagatgaccaccatcaacaagtccatgggaaatatcgtcaagtctctcgaatcttccttggccaccggcaatttgcagaaaatgtcggagacaatggataaattcgagaagcagtttgtgaatatggaggtccaggcagagtttatggagagtgctatggctggctctacttcattgtccacaccagaaggtgaggtcaacagcttgatgcagcaagtggctgatgattatggg

SEQ ID NO: 12655 - DNA, 566 bp, Gossypium hirsutum
  Clone ID: LIB3829-006-Q6-K6-H12
cttgaaaagttcctttatcatggcagcccacaaaaacctttgttccagggttgattgatttggctattcaaaggaactgtctgattggaggagatgacttcaagagtggccagaccaagatgaaatctgtcctcgtggatttccttgttggggctggtatcaagccaacatcgatagtgagttacaaccatctgggaaataatgatggcatgaatctgtcagcaccccaaaccttccgttccaaggagatctcaaagagcaatgttgttgatgacatggtttcaagcaatggaatcctctatgagcctggtgaacatcctgatcatgttgtggtcatcaagtatgtgccgtatgtgggagacagcaagagagccatggatgagtacacatcagagatattcatgggaggcaagaacaccattgtgttgcacaacacatgtgaggattccctgttggctgctcccattatcctagatttggttctccttgctgaacttagcaccaggatccagttcaaggctgatggagagggcaagttccacactttccatcctgtggctacaatc

SEQ ID NO: 12656 - DNA, 626 bp, Gossypium hirsutum
  unsure (1)..(626): unsure at all n locations; Clone ID: LIB3829-006-Q6-K6-H2
gnaacaactttgaaggtctcatatcgactcgagtttccactgatgacggttcaaacatagaagcatttgatgccaacactgcatttgatgcctctttgtcttggaaggatataggatggttaagatctattacaaacttgccagttctgctcaagggagtacttactcatgaagatgcaataaaggctgttgaagtaggggttgatgggattgttgtctcaaatcatggagctcgccagctagattatgctccacccactatttctgttctagaagaggtggttagtgcagttaaaggaaagattcctgttttatttgatggaggaataagacgaggaacagatgttttcaaggcgttagcccttggtgcgcaagctgtccttattggaaggccagcagtttacggacttgcagccaagggagaatacggggtgaaaagggttattgaaatgcttagggatgaacttgagctcaccatggccctctctggatgccctactctcaaccatattaccagataacatgtcagaactaagcatgagagaccccgctccatgctttaaaatactacaatattgttgaatcgcattcataaatgtattcagatcattcctgaatctgtcatc

SEQ ID NO: 12657 - DNA, 597 bp, Gossypium hirsutum
  unsure (1)..(597): unsure at all n locations; Clone ID: LIB3829-006-Q6-K6-H3
cttgcccgagnaaaagttcagtcagtgcaaggtctgacccttaccgctgatggaatgggtgcagtttttgatgttgcagaagagatgtggaagcatttcttactggtgctngaaaatgcagctaatgttaacttagaggtgttgaagaatgcgttgccacccttgcaacagagggacatgtcaagaggaagatttggtggtggacggggtggttttggtgatagaaatggtggtggtagcaggttctctggcggcagaggtggtggccgaggtgggttttccgatagaaggaatggaggtgggcgaggtcattataatagtaagagatggtgagtgaactctttgacttcagccaatgtaataagagtactcgagggaagtggcaccacctgaagatgaagaagaagatatgaacccttgcaacattttatctacttgtgttaatctgtatttttttatttttatttttcgtttttaaattgtatgataatccctgggggttttgccttcctccccagttttatttcttatgttttgctagaaatgtaagaaaaatcatttaatatgtaatccttgcctgcgaccaaaaacttagca

SEQ ID NO: 12658 - DNA, 602 bp, Gossypium hirsutum
  unsure (1)..(602): unsure at all n locations; Clone ID: LIB3829-006-Q6-K6-H5
gttgtctcatttcgccctcagnttcatggtgtaggtacttctccgtcatcagaggtttttgtgcacaacttagttgctngaagaaagtctggtcagtcgttcatctgaatttgaatctgcgatccaaatggggagaggtcttctctaagggttctatgtgaaaagaaatctcaagagtctgaatctcagcatgatagagaaacgtggggattcttaaaggtgatgtttgaagatgacgggacagctaggacaaagttgctcatgcatcttggttttagcccacctgcagaagaaaaagatactgtacaaaatgacctctctcagagtgtgactgatattacccttgaggaaaaagtgagctatgagaaagaagctaccccctttgctgctgataatggggaggatttcttcaacaatcttccaagtcccaaggctgatacaccagttgcaacttctgaaaataattttcatgttgagagcacagttcctagcacggatctaacaccacaagaatcagatgggctggaggaaagtgctgatccatcatttgatgatgctgttctacgtgctttggtggtgggtgactataagggagcagttgc

SEQ ID NO: 12659 - DNA, 583 bp, Gossypium hirsutum
  unsure (1)..(583): unsure at all n locations; Clone ID: LIB3829-006-Q6-K6-H6
gnaaacaagatcaaactgatggagatcgaggaagtgaacaactacgaatcattgccgcttctctcgttgaaccacgtctcattattgtgtcgatcggtctgggattcaatgcgattctacaagaaagtttaggtttcgttccgatcaaacgcccctcttctttcaagttcaatttcaatggtgcttggttgtacaattacggtatcggtatacacttaatcgagaatccattgatagacgatttcgatactatcattgagccgaggccgattaatcccaaagacaatcacatatcttttcaatgtagagatgttgagattgtgaaagggagacttgaagatatggggatgaaatatgtaacggcagtagttgaagatgaaggtaacacagttgatcaagtgttctttcatgaccccgacgggtacatgatcgaactttgtaactgtgagaacattccgatacttccgttgtcggcttgcttgttcaaaccgaggatgagtagtttcagcagggcggttttcgggccagcaaaatgcgggcttgtagaaaatgcgatgatggagagcttgagcatgnatatgtt

SEQ ID NO: 12660 - DNA, 583 bp, Gossypium hirsutum
  unsure (1)..(583): unsure at all n locations; Clone ID: LIB3829-006-Q6-K6-H7
tctttcccttttcccttttccccttgcaaagnaaaaacaaaatttgcatttaggtaaggcctggaaaggaaattgaaggcaacaaacaacaatgaggtccaactccaaacctcattctccttttaacaccaagctcatcctcatctgtgcttctgttgttctcttcgtcttccttctcattaccaccacctcttccttttccaaaccccccatttcacaatcccatctctccaactccacacaccctgtcgacgacagtgaaccaaccccactagattgcccatcccttcccttgaccccaacatgcaccaaaactccaccttctctagccaatgccctcatccactatgccaccaccaacatcaccccacaacaaaccctcaaggaaatctcggtttccgctagagttttagagaagaaagccccttgcaacttcttggtattcgggttaggacatgacagtctgatgtgggcaggtcttaaccatggtggtcgtaccgttttcctagaagaagacaaggcatggatcgaacagatcaagcaaaaacttcccagtttggaatcgtaccatgttgagtatgta

SEQ ID NO: 12661 - DNA, 577 bp, Gossypium hirsutum
  Clone ID: LIB3829-006-Q6-K6-H8
ctcagccaaaactaccgcctgggcatcgttggaaattcctccacacagcgccaactttcgacttcaagttttcttgtgattgaatcatttgctagccctgcagaaattgaagctatgaggaagagaatggacggaatgcttcaggcctttgaccctaccaccaccgcttctattttctccaccaaaaatcaagtaaaattgaccagtgaatacttctatgaaagtgctgaaaagatttcctttttctttgaagaaaaagcatttgatgataatggaaatttaaagcaaccgaaggaactttctattaataaagtcgggcatgcgttacatgagattgatccagttttcaaagaattctcttgctctgagaacgtttcgagtttgcttttctccttaggttacaagaagcccgtgatcattcaatcaatgtatatctttaagcaaccaggtataggaggtgaggtaactcctcaccaggacaactcgtttctttatactgaacctaaaacttgcactggtctgtggctagctctagaagatgctacagttgtaaacggctgcctttgggccattcctg

SEQ ID NO: 12662 - DNA, 251 bp, Gossypium hirsutum
  unsure (1)..(251): unsure at all n locations; Clone ID: LIB3829-006-Q6-K6-H9
gngnaagcctgcganccagtgaaactgttttaccgtaggagaggcttgaggcacttctaactctgacaccatgtcttcagtaggagatcttttcacttcaatgaatccagcttattattattaaaaaaaaaaaaaaaaaaaaaaaaaaaaaaaaaaaaaaaaaaaaaaaaaaaaaaaaaaaaaaaaaaaaaaaaaaaaaaaaaaaaaaaaaaaaaaaaaaaaaaaaaagggggggcccgttttaaaggaac

SEQ ID NO: 12663 - DNA, 561 bp, Gossypium hirsutum
  Clone ID: LIB3829-006-Q6-N6-A1
tttttttttttttttttttttttttttttttttttttttttttttttttttttttttttttttttttttttggggacaaagcttttcccttttggttttaagggtacataaatttcattatatttgatcccctcaaaatctaagatttaatcaaatttgggggacataaatgggtagaatacagtttagaaaggagattttgctttatattgggggcaaacagcctttccatttttgctctaccaaaacataattatcaaattatattttatattggcccaaaatctaaggtggaatcaaatatttacaaaagcattatgatccacatttcaatttgcaaaaaaaatattaaacatctctggtttcttccctttttgggattaccatccaacaaatcccaaaaaactgaaagaacgaacagggagaagttgaaaaaaaaaatgggaaaaaaaaaatggcccccgggaggaacaccaaaaattccgtacaccccaatacaaaaaggttcatttttttttggaaaaataattaaagcaaaggaggggtccctttttttttaac

SEQ ID NO: 12664 - DNA, 535 bp, Gossypium hirsutum
  Clone ID: LIB3829-006-Q6-N6-A12
aacctgcgaagcaccttctatatccacctcaaaatcatagtgcatcaaaatccatttttggagatctgttagggtttgattttcatcacttgaaactaaaactcaaagttcttaacactttctactgataccatttatggactgaccatgtgttggctacgaaattgtaatcccaccgtgccaaggcgaaagcatactagatatgccacactttacttgttatatagatgaacaaaagaaaagatgaagaatcctgccatcgtagaaaatgcagctccgtagtagggataagcaggtggtatgaatctttcatattcattgcgtctatatggcctgactggaatctgctttgaaagggataagcttgtatacccaagcttttggtactcaaccttgaactggaaaacaccataaacatctggaaccttaaatgacgcagaatagagaccctttttgtcattcgacaaagttttcaaaatatgggggctcatcatgtaaaactggacttggacatcgtcagtaatgtatggctccc

SEQ ID NO: 12665 - DNA, 583 bp, Gossypium hirsutum
  Clone ID: LIB3829-006-Q6-N6-A3
gaaggttatgatcatggagttgcataataatgacaatcaaaaagcacacatcttcaaacaatttggccaaaaacactgaacaaatacaagatgaacaaaacctaattaattagaatcttccatcctcattttcattagacaacaataagacaagttgaacataaaaactgtgaagtctcaacgcctcctcattcctcgtccacggccacgccccctgccagccatggcactagcagcagcttctccctgtgcactctccgacttgggattctttacagtctcatccacacttagaataagacaagcagcctcggtagcagcgttgatggcattgctctttacaactgatggctcccagacaaagtttgtaaatgagtctgctattccaccagtgttgatgtccactccataagaagcaccctcaccagatggaagcgcatgtttctgccttaatttgttcagcacatcagtagcatcaaatccagcattgtcccacggcaactgtgcgacaacctcaagagcttttgcataagaattaataaaaagttgcgacttcccagctattgtgcgtgcatgctgcctc

SEQ ID NO: 12666 - DNA, 72 bp, Gossypium hirsutum
  Clone ID: LIB3829-006-Q6-N6-A4
gttataataaaatgatagggaagggagagggggggggaaaaggaggagaaaaggaaagagggggcgaagaag

SEQ ID NO: 12667 - DNA, 535 bp, Gossypium hirsutum
  Clone ID: LIB3829-006-Q6-N6-A5
agttaatatagagggttcatatcataaaatgtcgaaccatagatgaggctggaatttctaaaacaacatagtcataaggtaggcacggcacagcctccaagccatgaacaaaatatacgtaactagatcgctacacaactaataaaaggataaatcaacatcaactgttattcctatagtaaaatagtcctaccatacacgctgatgatgatctcctaattgtaggttgatgagaaccttaggatgatttgtgctttaattttctattcccagaaggtgccctgggtggtgtccatggtgtggtttctgctcatggggaggcttctctcccttacctttgggtggtattacatatttgtgtggctcacttaagaggtgtctatgaggaggtttaggttcatgaggtgctccctttcccttacccttggatggtttgtcaccggggaatggtttcatggatggcttaccgtcagggaatccttcaacatgtggaggtttaccccctgagtgtcgtggaggtttatgtgtgtcctca

SEQ ID NO: 12668 - DNA, 558 bp, Gossypium hirsutum
  Clone ID: LIB3829-006-Q6-N6-A6
ggcaaaaagactaattaagacttcataaatcatccaaaacttagagcaatcaaagtacatcaacgagaactatgagaaacaataaagcagataatgtaaactgtcaataatcctatatgtttatgctttaatacaaataaccttagtcgaagagactgaatcccatatcgtcatcagactcttcttcaggttcaggtttcttttcctcctcggcaggggcagcagcaggagcagcaccaccaccaccaccagcaacaggggcagcgacaacagcaaacttacttggatccgccaagtactccttcactttatcagcctgggggaaggaatactcagttgcaacagcaacggccaatacattcttgtagccattgatgaacatgtgtggtgcagcagccagggttgggtacgagatggcgagagacaatgccgtaaccatggagacaccagtagcgaatttctcaatcaggtcatcctcagtaaggtcaagcacctcagggctaaagactgacccattgtcataaacagacaagacaacaagaccgtatgagaatggcc

SEQ ID NO: 12669 - DNA, 529 bp, Gossypium hirsutum
  unsure (1)..(529): unsure at all n locations; Clone ID: LIB3829-006-Q6-N6-A7
aggtaaatatgcaaattccattcaaaganaaaccatacatagatgcaaccggtaaacaaagactagaaattatttaaaaggccatcaaagggcacaatccttcacgtaaaaccagaaaacccacattaaggaagaccttaaggcttagaacccaccacgaagacgaagaacaaggtgaagagtggactccttttgaatattgtaatcagccaaagtccttccatcttccagctgtttcccagcaaaaatcaacctttgctgatctggtggaattccttctttgtcctgaatcttcgctttcacgttatcaatcgtatccgagctctccacttctaaagtaatggtcttaccggtcaaagtcttgacgaagatctgcatcccacctcgaagacgtagaaccagatgaagagtcgattccttctggatattgtaatcggctaaagtccgcccgtcctcgagttgctttccggcgaagatgagacgttgctggtctggcgggatgccttccttgtcttggattttggctttc

SEQ ID NO: 12670 - DNA, 465 bp, Gossypium hirsutum
  Clone ID: LIB3829-006-Q6-N6-A8
gaaaaaaagctgggttttccaagaattaatctatagggggttactactacaaatccctttgacaatggggggcaacaatttcgggggcttgggggttaatcttcttgcctggcccgggagaaatcccaagcttggtttatctggtaatttcctgaacaacaatttgaaccaggggctccctgccttaacaaaaaacaatgctccctcccgggaagaattttgtttagttttggcccaaaaaaccaaaagggggggggctaaacggggccctttacaggggatgggctaaacacggggatttctttgttagatgcatttcccccattggggctactggtttttcttcggggctttgcccccacaagcattggaattacctccctcatgggtgggctgtctttggggagcttggcagtgcaaaaaatgctatcctagcaactaatagggtctttcggacccgtgggt

SEQ ID NO: 12671 - DNA, 527 bp, Gossypium hirsutum
  Clone ID: LIB3829-006-Q6-N6-A9
cccccagcaaccaactatagtgattaccaattccaacagatactttgccatatggaataaacaaacatatttgacaggttcatatcacatgacctgttatgttaatgagatgcatttcctgcacaactttttgctttttcttggttgaaattaacaaatttgactagaatgtattatcatcaagcttacagactaagtagcttagacggggctgctcgtaatatagtcaatgcctccttccaactccatggcctttcagataacgggagaaggcgctgcaaaattgataatcgccattcccaatcttcaatgaaacgtttacccattgaaattctccactccaaagcctgcctcccagacatgcttaaaccatcagtggatgcatgctcctcctcagctgtgcttgatggaagactatgacgtacaatatcaagtagcaaccctgtgaaagatatagccattttgtttccaacttcatatatggttaaatcaatatgttcggaaccacattcaacagactgtttaaa

SEQ ID NO: 12672 - DNA, 568 bp, Gossypium hirsutum
  unsure (1)..(568): unsure at all n locations; Clone ID: LIB3829-006-Q6-N6-B1
acaaattcaatggtctggaaaaaaacttcatttcattcatccaagcatgccagcctttactttgaactcatggctgcacagttcttgcttcaacagattttacatggcagagctgctcctgaaggatcccagagctttagcaccggatgccctcaatataaactggtgatagattgcggcaatggcagctccaataaaaggtcctacccagaatatccaatggtcatcccatatcttgtcctggttgaagataacagcagcccccaaactacgagccgggttgataccggttccggtgatgggaatagtggctaagtgaaccatgaacacagcaaacccaatgggaagtggtgccaagacagggatatgggagtctcttgcattcctcttgggatcagttgcagagaaaacagtgtagacaaggacaaaggtgccgatgatttcagccgncaaaccagttccagtgctgtatccttcagccaggctgttggctcctcctccatactggttgtagtacgagttttggaaggccttgaccagcccacacccacatatggctcccaaacac

SEQ ID NO: 12673 - DNA, 494 bp, Gossypium hirsutum
  Clone ID: LIB3829-006-Q6-N6-B10
ccattcaaagagaaaacctacatagatgcaaccggtaaacaaagactagaaattatttaaaaggccatcaaagggcacaatccttcacgtaaaaccagaaaacccacattaaggaagaccttaaggcttaaaacccaccacgaagaccaagaacagggggaagaggggactccttttgaatattggaatcagccaaagtccttccatcttccagctgtttcccagcaaaaatcaacctttgctgatctgggggaattccttctttggcctgaatcttcgctttcacgttatcaatcgtatccgagctctccacttttaaagtaatggtcttaccggtcaaagtcttgacgaaaatctgcatcccacctcgaagacgtaaaaccagatgaagagtcgattccttctggatattgaaatcggctaaagtccgcccgtcctcaagttgctttccggcaaaaatgaaacgttgctggtctggcgggatgccttccttg

SEQ ID NO: 12674 - DNA, 516 bp, Gossypium hirsutum
  unsure (1)..(516): unsure at all n locations; Clone ID: LIB3829-006-Q6-N6-B11
aaaaccaccaagcatccatagnaaaaaaaatgtaatgtacaaagttggaacacgttacacacaaattagcagtctttgcatacccatagaacagagagaatcatacatacatggcaaatgttatttgtcaggcagatcagagagagggtgtccaggtttaggaaacatcaaaactgctgcccaagaaggcaatagggaaacaagtggacagatcctaccatgagacctgtttaattgtacacttgctatccacacctaactccagtggcagatcagatgtattcctctgcactttgtaacttacaataacagagctagattcagtttttatcaaatatatatatataaggaatcctatatgcttagctttacgcaacatgagctggagcttttggttggatatcttcttgacgaatgggtgatgccttgaagcagccagactctggtgaagttgtggcactcacgtcagctttggcgccatcaaccatttttggtgttgatggaccaggatatggg

SEQ ID NO: 12675 - DNA, 529 bp, Gossypium hirsutum
  Clone ID: LIB3829-006-Q6-N6-B12
gtctaaacgacttggttttgcttatttattagttgcctgaacccgttttataggacaagagatgattcaggtttcacgtggtatatagatgtttaaagtttacaatgaaccgagacagcgaacagatgaaaccaggtttaagtttgacatcggtgaaatgcacgaacatgaagacccccttctatatggagattgatcatcgtcctgtatgtcactgttctgttctcatcactcaatttgaatacaaagtagctgagaagaacagctgagaagatcttcatctgcctataagcaaactctttacccagacaaatccgaggtcctgcctggaaagctgtaaacttgaaagggttttctagctggaacatgccattcttgtcaagccatctctcaggtctgaactcctccgcattgtcaccccaaatgaacctcattctacccattgcataaggctgataagcaatcatatcccctttccttgcacacaggaacggctgggtagagccttaaagtttcagttatagctgca

SEQ ID NO: 12676 - DNA, 581 bp, Gossypium hirsutum
  Clone ID: LIB3829-006-Q6-N6-B2
ccaatggagtaggagttgcataaaatattcagcgattctacagttgctcttattttagtcccctaatgcccaaagttgattattggtggaaatgagcactgatgacggctttatttcttcttgaataggaaaagtgcaaccatccattcttctccattattgtatccaaagagttccgcaacagcaataaagaatgttctccaatacactgtccatttcacagcctgatccttgccataggtggactccattattggcttaatggaagccaagcttcggtccatcctcttcagccactcttcactagtttttgcataatgtttcccattcacaaaccaatggttgacaacagaaacatcatcctggaaatatagaagcagattagctgaaggcattgtacctcctgtaaagaagtacctggttatccagtcatcttcatttatgtcctcaaagtggtaagcaaatgctttatggcagaaataatgaacaaaaagaagactatcctctttcatccactttgatatcttcttgagaagatcgtgatagttcttcatatgctcaaacatttcaatcgaatatat

SEQ ID NO: 12677 - DNA, 275 bp, Gossypium hirsutum
  Clone ID: LIB3829-006-Q6-N6-B3
gagaaagaatcttttcacctgcattttattcacaacccacacaaaaaaaaaaaaaagccttcccgtccccccagcattttgcatatatcaaatattcagggaaaaaaaaaaagcctacaacactgtcggatcacaggtgaaagggggtgcaggaagtacacatataatgaagtgctctcagaaagttttggatttaacaaaacagacatgttaaaaatgatgatgaaacgacacagattaaactcgctctgatcatgcgaggcatttgtcggaac

SEQ ID NO: 12678 - DNA, 560 bp, Gossypium hirsutum
  Clone ID: LIB3829-006-Q6-N6-B4
aagcaacattgatcttaattgccgaagattaagtacaaatacatgagtacaacgtacaatgtagaatttacattatgaaattcgctcactgtgattacttattcgcatctctatttaaaccgatcgaggtcaaaaggaatcctatataacctcttttttctttttgaagattatataacccaaatttgcgcttatacttatcggctataacacatctgatacataaggctaacataaattgaatcttccataccgataccaaatgaaaaaacagaataatgtcttggtcaggggaggaatggattgtgagaagggcatgcctctttttgctttctataagccctggttgcatttaatcccccaagtccaacagttcccagaactataagaaggaaaggaatctgaatcaaaccacggtttcttcttcccccatgagcctttggtactcccgttctgacgacacgtgaatatgtagctgagtacgaaccttctcttcctgaaccagactgtagacaagtataagcttcagcaatcaacttaaacttagactccgccgaacg

SEQ ID NO: 12679 - DNA, 408 bp, Gossypium hirsutum
  Clone ID: LIB3829-006-Q6-N6-B5
accaattacttagtagcattgacactcatagattcaaacattttattacatcaccatccctcacattttattacataactcacactcttcaaacacctcactgtttccagtttgttcatgcattcaccttaggtgcccacccggcgatcacgtattccttagcagcccgcgttttcacgaacgattcacgactgaatatcgacttcatgtaattgcggacattagtcaagctttccggaacagtccatttcttgaaatggccaagagcaacctcaagatggtaaagttttggtcccaaagctaaatcaactgcacttatcttttccccagcaatgaatgggccatgtgccttaagatgttcatccaatgccttgagttcattaagcaaagcctgctcagatccatcat

SEQ ID NO: 12680 - DNA, 559 bp, Gossypium hirsutum
  Clone ID: LIB3829-006-Q6-N6-B6
gcaaactgaattcaacttgctcatataaagcaaacggaaaagagtcttaaggataagcagctgaaaaatccagacactcaaattacagagagcatgtagggccgtgctcactgtactttatttaaaaaacaagatcaagagagaaacatatttgtacctagaagtagccatgcaaccataccaagagctagagaatcactcctcctcggtctcagactcagcattctggagccactcgatgaagggcttgacgttcttccatatctgagagctcttattactaccacctatacctttctggtaccactccatgatgaactcttcttccaatatgtcatcatcatacaatacttagataactaaagccacctcctttgctgcctcagggctggccttgccgcaaaataactccatagaatgtagaagcatcatctggcatccctcttcattggctgcagctgctgccgccgcccctgctgcaaggtagttcttctttttagttacttccttagcaaaccctttcccaacatcctcaaagagtgctggtgaaaagagcatc

SEQ ID NO: 12681 - DNA, 527 bp, Gossypium hirsutum
  Clone ID: LIB3829-006-Q6-N6-B7
gtaattaaacgacaccatcttcattaataaaatagaacaaagattagccactctcattttaatggagtgacaatttggtacaaaaaaaaaacaaaacacataaaccactagtaacaactaacaacataaaatatatagttagtattacagtgcaaccttatgcttcaatgacttgaatttcaaataggaaatttatagggataataatgtaaaaaagaaaaaaagggtcttcttttgagtaatttaagggcatttggggcctccttccttggttttccagttgttgtagcaagggcaaacttgtttgttcccataataccctggaggaacacaaaggcatgtcctgcaacatttctgacagaagaacatgcatggtttatggtactgtgtctggctacacctccttgtgcactgagatggacattggtaaggcttgagacttccaggtccataacgtttgttatcataatggtgaccaccatgtccatgtgatgccataaccaaagtttgaaccatggagatggcac

SEQ ID NO: 12682 - DNA, 524 bp, Gossypium hirsutum
  Clone ID: LIB3829-006-Q6-N6-B8
aaaccaaagtgttttttattatcttgatgggtgtgggatgcgccttatttgagaggcatacataaataaaatgtaaataatacttaaggctacaaccttaagaactgctaccccttttttttcaggaataggaagtcaagtaggtgaggagaacaagttcatctccaaccttagactattaagttacttgagaaactaaatcagttaaccaacatcaggctctgggagtcaaagaaagagtaatatcttggaagaccttaagcctcttatcagttttctttggaaacatcctttgagtcactgcttcatttgctgggcctagaactgcagctgaaatgatagcctcctcaaagtcttggctatctggtaataaatcagccaatttgtctcctttctctttagttgaaagagagagccttcttcttgtcttaatctctggtttttccagttcttcagataaaggctttgtgcagtctccacccatttcattcactctcatagagttagctgagtttcctgaccgt

SEQ ID NO: 12683 - DNA, 495 bp, Gossypium hirsutum
  Clone ID: LIB3829-006-Q6-N6-B9
ctggaaaaaaaagtcaaatttgcaacaaaatcacccctttgttacctcagggggaggaaaaaaaacaaaccatggcttgtctacaatatatatgagataggatcaattctgcccggagaggcgaacggattgcactcttcactgagtcagtttaagaggaaaaaggggaaaaaaataacacaggaaaccatgtcagcctatagccttattccatgaagaaagaacagaggaaagaacatgtgataaaaaaaaaactatccttattgttccgttgcgattgaccaaaatgatggtcgacaacatgagcaaaattggggaaaatcctttggaatacatttacgagccgttttgaactacgaccacaggggatctcttctatactctttcacaatgacaggcacacttgggggtggaatcatgccataatctgggattatcatggaaacataatctgaaggggttgcatcatagattaaattcagaagctgcagattt

SEQ ID NO: 12684 - DNA, 252 bp, Gossypium hirsutum
  Clone ID: LIB3829-006-Q6-N6-C1
aattcccaaatttgtgtcatcacattaatctttaagaagtttatacgagagttacctcaaaaagaatatgctttctaagcccttcaacaaaatacatactcctaccgatattaagaatacatggctgcattcaacatacccggccggagatttcttagggttgcctcgcaaaatgaaactaaaatcctgttttcaagaattaaaatgatcaaagctttttcctagcaccagattttttcaccttagacgggc

SEQ ID NO: 12685 - DNA, 520 bp, Gossypium hirsutum
  Clone ID: LIB3829-006-Q6-N6-C10
attcaatatgcttcgttccatttgctcgaaaaataatacaagtggtagtaaaaccagctacaagagtcgtcgtctctaatcccctactgtccatttaattcatagaattttacaaaaaaccagaccatgtcatatgcatcaaatcatttgctaaggtgtgtggtctgaacctaagaaagtgaatgtttcctacttacggaaggagtggacttcgtttcttcggggctctccgacgtatcgctgctgctgatttcaccgtttctttccttactcgacttgagtttcgagaatatttttgacatggccaaacctttcattctactcgccgccaccctttcgatgtcggttttggccatgccatttctgtttgtttcgccgcttaatcttagagttgtaagctcccctttcaaagccttgatgtcctcggctgttggcactgaatcccaatcctcttcagtgttggttgtcgtggaccttgagctaccatgagaccctccggggagaagggctctaacggacc

SEQ ID NO: 12686 - DNA, 525 bp, Gossypium hirsutum
  Clone ID: LIB3829-006-Q6-N6-C11
gtaaaataacatattaataaattgtaaaatacaagtccaaaagatacaaaaacaaaatccagctacaaaacttatgtaatctgaatatcaagctaaagcagcaatcaaaaccaatcctacttaaataatgaataacttgttaaaacttccatacctcaccactcttaagaagcactaggaacggcagctgcagcagcgtacatgctaggacccggacttggtggagttgcaccgtaaccgtaaccataaccaccatagccttgccgtcgataataacctccattccactggtttccagaatcagctctccgctgtttgtttccaatacttcgaccccaaaaaagtcggacggtctgcttgcctatgggtgttccgttcaagctctggattgcttcctcagcgtccttcctgtttgcaaatagcacaaacccacatccttttccaggcggtattttcacagagatgatctcaccaaactgggaaaagggttgtctaagatcatcatcactaacatccgagtcaagt

SEQ ID NO: 12687 - DNA, 384 bp, Gossypium hirsutum
  Clone ID: LIB3829-006-Q6-N6-C12
gggaaaaaaaatttttttaataaaaaaggggggggttaaaaaaaaaattaatttttccaggaaaaaaaaaaaaaccccataaaaagaaccttttttttttttttttttttgggggaggggggggggtttttttggggccctttgaaaacggggaaggggggtttaaggggggccaaaaaaaaaaacaggggggggaaaaaaattagagttttgaccttggggggggaaaattaaaaggggcaaatttttttaaagcatcaaaaaaaattagggttttaaaactaaaccccggggaaatggaaaaaaaagctttttaaaaatcccaaaaaggccaaaaggggggaaaaaaattttcaaaatccgggcgggggggtgaacccggaa

SEQ ID NO: 12688 - DNA, 394 bp, Gossypium hirsutum
  Clone ID: LIB3829-006-Q6-N6-C2
gacagagaacaaggatctgcaatatgttaaccaagcttaaaccatttacaaaatgttccacctgcatagaatgggcatgtagaataaaattaaagcgatttagtgtttattacctaatacaacggaatagaagaactgagctaccaaaacagcatccattccaattaactatacattactatcaatcatgtttacctttgcaacagcaggtattggataattctaaccattttgattcccattcacaggtttttcgatttttttattacgggagaacttggaaatatgcccctttttcccacaatagttacattggatgggcttaccatgcatttgtgattttggttttttagaggggacacctgttttgtttatatcccttattcttgggcca

SEQ ID NO: 12689 - DNA, 586 bp, Gossypium hirsutum
  Clone ID: LIB3829-006-Q6-N6-C3
gagccgactactcgtcaaatctattgcagtccatatagagtcttgaacaaagcttcgaagagtcgaagttcacacaatagaataagcaaaacacacgataaaagcaaacaaatcattgggtagcaaaatgcaagccctccactcaaacattacttatttagtactcatcttcatcttcctcatcaccctcgcctgactcagcaccgacttcttcataatccttctcaagtgcagcaaggtcctcacgagcttccgagaattctccttcttccataccctcacccacgtaccagtgaacaaaggcacgcttggcatacatgagatcaaacttgtggtcaatgcgggagaacacctcagcaacgctggttgagttggaaatcatgcaaacggctctctggaccttagcaagatcaccaccaggaacgacagtgggtggctggtagttgataccacacttgaatccagttgggcaccagtcaacgaactgaatagttctcttggtcttgatggtggcaacagcagcattgacatccttgggcacaacatcaccacggtacatcaaacagcaagccatatacttgccatg

SEQ ID NO: 12690 - DNA, 562 bp, Gossypium hirsutum
  Clone ID: LIB3829-006-Q6-N6-C4
cgaacaaaatttcactgacttttatcaaacaaataaactattcggggagaacaatatgagaaagcaaatacatgggaacaaataacttaatcactatgctctatggccgatgacaaaagctgctgagaaaaacaataccatcttaagccttcaagcagcaacctgaccaaaaagccacttgcggatctctggaagtttcttattgaatgcaacatccaaccgtgcatccaaggtattctcaaacacaatttttccatctcgagatgctatgactacacctccagagcagaaaggcccgtgagcctcagcatgatgatggaaaaaaccatgatgatgagaagggccagggggaagatggacatcatcaatgattatctctggtggatgaacattcactttagaagcatattcctcctttgctgaatccagaacagactccaccaaatgcaaatcttctttgcgacaacggagtaggactccaggctctttcagtctaactaaactctgaacaattagatctttcaaaagccttttgtaaacatggtgatcatggctcacattg

SEQ ID NO: 12691 - DNA, 414 bp, Gossypium hirsutum
  Clone ID: LIB3829-006-Q6-N6-C5
aaaaccaaaaacttcattggtttgcccgggggggggccccctttaaataacgggggttccaaatcccaaatctttgggaaaaaaaacaagagggggcatacatttttagaccccccccccgctaaaaggggcccctgaaaaaaaaatgggccctaacaaaggggccccctggttttaaaaaagccaaaatgaaaacggggggcccaaaataaggcccctacaaaagcaacccataccccgggttatttttcctatgcccccccaagggccgaaacaaaaacattttggttaccaaaagcctttcataaggggtaaatccccgggggccactttcggtaaagaaccccaaaaaagggtggggattttttttgggaggatcttgcaggccccggggggaacttcccccggccccgg

SEQ ID NO: 12692 - DNA, 518 bp, Gossypium hirsutum
  Clone ID: LIB3829-006-Q6-N6-C6
gttcaaacagttaaactcgtactaagaaagcatcagtgaaagttcttttgcctgtagcattcaattccaacaggaaactcctaagactagaaactttttttattaaggggggggaagattttggcgtttttatctccaaaccgaattgtcagcgaaatattgcagggcttagagctcatcatgggcatcttccttggcctcatcggctgatttggtattggaatcagactcatgcccttcagtatcatcagcaccatcttcgtcctcagcatcggaatcaactggggcatcctttgattcctcctcctctctctttttctctgcctcctcaaatgctgccttttcagcatccttctgcttgccccatgtttcttcagctagtttcttggcatactctacatcatcggcaactaagatgttatctaacattgttccagatttcacctgccacaattcaataccgacatacttcaagttggggaaaacatagagatctggatcatccttgaaatctgggt

SEQ ID NO: 12693 - DNA, 512 bp, Gossypium hirsutum
  Clone ID: LIB3829-006-Q6-N6-C7
acacattgactgggaaaattattagccacagcaatgtaaatgttaatcgagtctattaagctgagcaatcaagtaataaagggccataaaggaggtttccagcagcatcaacaaagtaataacataattctaactccaactattcatctctagtagcagggtccattcctgttgaagggctatccgcaaaatactcctgctgcttcacattcactccatactcacgcaatgacttggagaggtcgtccattgtcaagattaggcgtttatccttttgctgcttctcccttttgtccttcacaactgcagcctgtcttgccttgcaatgctgaagtgcatcgtttgcaacctctgcaacgaacttttgagtagcaacagctacaagccttattaatcgaacatcgggacattgaaaaccactcttggctaagtaatgttccaccagttcgtcaggtatagtgggagtgtaatccatgagagaagcaaggaaatcggagagagcagagtcatcc

SEQ ID NO: 12694 - DNA, 525 bp, Gossypium hirsutum
  Clone ID: LIB3829-006-Q6-N6-C8
aagaggctaagggcaggaaaatccactcttctctaaatctgttgattggttgatttgattctacaaaattactgcagttgatcacagaactgtattattatcagaaatttgatctcaaagaagaagatattcacctctcaactacgaaaatacccaaaagttctagcttcctcgcaaagattactaaaatccgattcagagttcaaacaacgaactttgctggtggtgattttacaccttttgcagcatctccggttggaggggttggggattcgccgtagatagctttgagggaatcgagagggacaagaggagacggggaggacgcttcggcgaagagctgctgcttccaatcccacataacctttttgagggctttgttagatttggtcaaggaatctttctcggcttccaaggattcaataacattttgctggttcagagatcgaatgcctaataccgcaaatgatgtgaccaagcacacatcgatcaccacgttgttgttggcggctgctctgcttgcta

SEQ ID NO: 12695 - DNA, 530 bp, Gossypium hirsutum
  Clone ID: LIB3829-006-Q6-N6-C9
aaatgaaatgtatactccatatgtatagtttaacaacttgaaggtttacttatatacaaatatataccataaactgcccaaaaaatcttcctacattatttacatcatcatataatatattgtaaccagagaatggagaaatgagttgcagatgttgaaactcgaaacctaattacatgaattcccggatttcggattagattcggggaattgtatggtactaggaataagcaactagaagatggacgctgtatcagacaagctgatgttccgatctgatcgacttgtaacaatggggtttcctaaagcatcaagatcaataacggctgtttcaccgggactgtaatttccagccaggagggcttcacttaggggatcttcgactattgcggtaactgccctcctgaggggccgtgcaccgtaggtctggtcgtagccttgctgacaaatgaggtccttgattgattcagacacctctaaaccgattcccagtgatatgagtctagcattaacctcttgcaacatcaggt

SEQ ID NO: 12696 - DNA, 571 bp, Gossypium hirsutum
  unsure (1)..(571): unsure at all n locations; Clone ID: LIB3829-006-Q6-N6-D1
acgtggtgtaccccgaagctcaggcaagggcgacacgtatggcaatctagctctcaaagccttgaacagcctccatattatgttcccactccaatcatgtctgcgccattatattaggctgcataaaactgaaccgggaacaatgagtaacgcaatgaacatgtacctgagacattcattcttgagatcaatcgagctgaatccaaggaaatttctcatgaaagcctcaatccagaatcttcatccattgtccaaacaaaaggaggcatgtcgaaccttggccctgcaatggacctatatatgtagagcttatcaactgggcagttctctggtcttgaatcaggaggtcccctctcatctataacttcaacattcaaccttggcatcttctgacctagcagcttacatgctgcgaagctcacagcgcaagaagacatccaaagggatcgnattgnntncagntttgcagcattggccaaaagagccttgtcaccaaaggggcaatctntgatctccagtttccgaaagctttnacacccggaaagcacatgatgtagtcccaaatcactat

SEQ ID NO: 12697 - DNA, 512 bp, Gossypium hirsutum
  Clone ID: LIB3829-006-Q6-N6-D10
caaaaaaactagagtttcatttccattaaagtaacatacatcatgataacattctaacaattcctccaatttgcttacagcattcttcccctacactatgaaaacaatccccccaaaaggacatacaactaagaaaaataagccctgtggatctagtcttttttaaaacaaattaagctttcttaggagacttggtggcctttgatggagatttgggttctttgccggcggccttttcagtcttcttcggcaaaagaactgggttgatgttcggcaacacaccaccgtgagcgattgttacgccggcgagaagcttccctaattcttcgtcgttcctcacggcaagtagaacgtgccttgggatgatcctgtttttcttgttgtcacgtgcagcgttcccagccaattccaggacctcagcagccaagtactcaagaacagcagccaagtaaaccggggctccggttccaacacgctgtgaataccttcctttcttcaagtaacggccgatc

SEQ ID NO: 12698 - DNA, 517 bp, Gossypium hirsutum
  Clone ID: LIB3829-006-Q6-N6-D11
aacaaaggcttataagcggacttgttaatagatggataatgtcttaacaataaattttcaactcttctttgtttatgacatcaaagcatcacaacaatgaatagatgttatgagaagttgaatcccataataagttctgaaaatctgcaactatcaagtaaaacactacataacctttgagatgcccccaggaattcaaaaggtatcatcccttctttctgcaatcaaaagatgaatatcagggtagaagaccaatcgagctcgacgtttgaactgccccttgattttgccaaaccattatctcgaagttcctgctcctcaatcgaacacttaattcctcccacctcctggtaacaaactagctaaggagggaactccctggtttctcatttcttcttgtgctcgtctcatttcttcaggatccatgttttccactaatttgggcattaaaaacaccaccaccagcataaatcccaccatgagacccattgggcttttcacaaccgacattatggag

SEQ ID NO: 12699 - DNA, 581 bp, Gossypium hirsutum
  Clone ID: LIB3829-006-Q6-N6-D2
atccaaaaactaataattcaattacactagaattgcaaaaaataacaaaaattcttaacaaaattgaaacaaaatgcgaaataagttcaaccccttacaaaatgcaactcagttctggacaaaactgcagtcaacagcaatgtataataaagaaaagctggaataattttagtgctttgaaatgagcattcctacattcaatcctcttcctctgaatcagcaccagcagcggcattaagggtgtgtaaccgttcaatcaatttagatttcctttcctcgtatgttagcttcttcaagttgaaccttttgtgctgcttaggaggctccttttcagtcttctttgcagttggatcagctcggatggcagcatgaactttcttgtacaaggactcgatgttatcagcctcaattcccctcttaatatactcgctgaagtgagactgatacttctcaggttcatcttccatcaaagtcctcatatatgcagcaacatggccaccatatatgtacttgctatgaacctcagcatcaagctgcttgttgtccttggagaacccagcaaacctcttgtcgctatgagg

SEQ ID NO: 12700 - DNA, 454 bp, Gossypium hirsutum
  unsure (1)..(454): unsure at all n locations; Clone ID: LIB3829-006-Q6-N6-D3
aataactagnaattttgcaccctactttacacacatacacagtttgatctttcaaccccactattgaaattgaagaaggaatatgtaattagcatcaccaaagataaattaaactagttaaatatgtcaaaagcttggtttgggtccaataatacaaaacatcaagacccaccaaaatcacattctaaccaccatatcttctagaccctaaagactactactccacacatgatttcttttgcgttgaacggaatgcccttgttcatgggttgtaattacgatcgaggacggagagcatccaacggtctatgagcggcggatggagcccaagggttcatgtggaaagctctatgatgggttagggctagctgatgatgggaccgaggatcaacggcggcggatgatggtgggttgggtggaacccgaaccctctcacatgagtgcacatggagag

SEQ ID NO: 12701 - DNA, 526 bp, Gossypium hirsutum
  Clone ID: LIB3829-006-Q6-N6-D4
aaaactcaaaatgcatattcataaccagataaaaccatttccaactgacttattcaaatgttcatatttgaatacaacattcaaatacaaaaataccagcaatctttcgggtcatctgggaggaggcgtgtgtgattatcggccgaggttatcaccatccatatcgacccacacgaaccaaattcataaacaagatgataaaaagaagaggaaatcaatgaattcataacctaaaatctcaagctcaaatagtctcacatagtttatctttgaagacaaactttttatcaggcaaagtaactgctcaagctccaccagtctttttattcggttcgaatacatacttaacaagagactttttaatcgaaaggagctcagggaattctgtcttcaatttgggggcatcgagttcgttgttgcttctcggggctaccataactttggcctgctcctcgagattgaagttcttccaggtgaagttagggtcaatgtagtcacgggacatttctaatatctcattgggact

SEQ ID NO: 12702 - DNA, 541 bp, Gossypium hirsutum
  Clone ID: LIB3829-006-Q6-N6-D5
caaccattaaaaactttaggtaccgataatgctgagatgaactaaactatccaaatacaactgattgaaaccatagaagttaactgaaattacatactgtaatccctaaaacaaatgggaatcttggcctataatataacaaagctaatttatagtcaaagtaagattagtgacataaaaccttggtgtggcagagtccttgtattgcatgcttttaacaaccttaaaaggcttcatccccatgtccttcagttcaacccacttgggaaaaagttctattatattcctctatgtagccggacctgaaaggattcgaaggttaattcatgttacatcgaaatattacagcctagttctttggcggcggtgttgaaaaaagtataggcattccttttgcaagttgactatgagcttcccatgttaagcacttctcgatatcagtatgccagtcgatgacactgatactgaaataaggaccatggttaccatttatttccagcttaggatttgattgcagaatattgcgaaataccgatatgct

SEQ ID NO: 12703 - DNA, 560 bp, Gossypium hirsutum
  Clone ID: LIB3829-006-Q6-N6-D6
acgacaaaaacttggtgcaggcgacccgcatctaagttcacctgtgtagaacaaaatacttaaagaacaagttttatagggaaacgtggtattgatacaactgcatataggtacaaaagtgtaatcagttacaggctatggctacttttacttttaggtgaaggatttaactgcagatgaggtagtgaccaaacttgagagaaggccaacaatgagggcactgttatatgtggtcggctcggcttgcattgagttgttccgggaatcgatgtatgtttcattaaggaaaggcccacccacaaggcctccaacagccacattaggattcggttcagttgaatcaagccacttgaagccgtcggtgcaaccagtagtcgcatcagctggaattgaagctcctctatgatgcacatattgtgggtacttatccccataccccacaagaaagctcattttcaaagggtttttgcccaatacataatcagcctgtgatttggcaaactttctaagatccgacggtttgaatgaatggtcaccacaggttatttttgcagtctgtg

SEQ ID NO: 12704 - DNA, 488 bp, Gossypium hirsutum
  Clone ID: LIB3829-006-Q6-N6-D7
aaaaaaaatgtactcttttatttttgcatttgatcaagacagcatcttcctctgcctacattgttcacaaattacaaccaaaaagcattaagcaaatcgaattgttaccggataaaactgagaagggcacaacaacgatccgaaccatctttaaagctagatgggattaatgatgaccgtgttgctcagcatgctgcttgtgctcgaggtggcgacgctcgttgggaagagcaacaaggtaagaaaagatcatcccaccgaaacagacatggtagagaggttcgatagaatcagtctcaatgtacttagcatggtaattgtccaaacccctctgaacagatttcttcaagtaacccatagatagcatcggcttgaagtaaccaggaacttccttcaatttcataccttttatctcgctgtaaactttcctcatcgccattttcccctaattcaaataaaaccctaaattttccttattttgctcactg

SEQ ID NO: 12705 - DNA, 529 bp, Gossypium hirsutum
  Clone ID: LIB3829-006-Q6-N6-D8
gaaaaatgtaaaatattcacattcagtatcatgtttaagattcaccaataaacccaagatacaaatcaagttacagtaaacaatcttatgctagaacgatcataagacttcatgtacggaagcaaatcaaagggcctcagtgtagatgttaggtctttaattctaagatcagcctgatctgctaatgcaagaaatcgatcgaaagtatcggcattccgaataacagaagcaatataagcaacagggtctgcccttgatacgagatcaacagcattgttgacttcactcgtattgattcgttgagcatgaaaactagatgcatctaaatcatgggcatcatttaccttaccatcaccgggaaaagagtttggaatacttccttcccgattctcgatatatgacttctttttgttcgaaagaatggctagtactttaacaagatgtggaagacaagatggatcataaataacatctgcacctaaaataatttctggcatgaagttttgcagttccttttctgatgctgatt

SEQ ID NO: 12706 - DNA, 458 bp, Gossypium hirsutum
  unsure (1)..(458): unsure at all n locations; Clone ID: LIB3829-006-Q6-N6-E1
cccccaacggaaagggcgaatttggggtttaaaaaaaaaaaaaaaaaaaaaaagggggggaaaaaaaaaaggggggggggccccccccccggggggaagtttaaaaaacccaaaggggggtttaacccaaaaaaaaaaaaaaacctcgggggctaaaatgggatggggaggcccaaaaaagggggggattggttggaaggaccacaaaacccccaaggcccccaaaaaaaggaccctttcaaaggcttttaaggagacccccgggaaaaaaaaagggaaaaggcccaaattttttgggcccccgggagaattccccgggcccgggtttggtggtttnggnggttaaaaaaaagggaaaaggggggaatggggggaaaaaaaaggaaaaaaaggggttcggatagggggggggggggggnaaaacaataaaaaatncgaaaaaagggggggcccccccc

SEQ ID NO: 12707 - DNA, 501 bp, Gossypium hirsutum
  Clone ID: LIB3829-006-Q6-N6-E10
acctcaaaatcaggcgattgcaaatgatataactagtaaatatgttcctcctcgatactacaggcatttgtccaggcgaggaaattagggaattatccaatgcagtttcatgtctcacatgaacgaagtaaaataaagaaaaagtttgagtcataatttcctgtctactttgcctgggggtgagaagcaatgaactcgacagcatgactgatcgtgctgatcttgtctgcctcattatcaggtatctcaaacccaaattcttcttcaagagccataacaacctccacagtgtccaaactatctaacccgagatctttttgaaaatgggcatttggagtaaccttggatggatcaattttctggaagttttttactacggagacaacgcgatcggtgacctcagatttgtcaaggaatgagcccatgacgtcgtcggaatatcggcgccgtatggcgttgaaggtgagagcacagtggccgttagggatgggtttagggtta

SEQ ID NO: 12708 - DNA, 527 bp, Gossypium hirsutum
  Clone ID: LIB3829-006-Q6-N6-E11
gcagggaacttctcaatttaataaaatgctcaacaaaaggattactgtcataataccaaagttttctaaagctgtctcagttcacttgacaaaatgaaaacaaaatttaaggtctttttagcaagccaaataacaaaacactgtccccaaaagggtaaccttacttcttgtcttccttctcggcctcggcagctttcttcaacctagcaccaatatgacgttcgttcgcacgttcaacacggagcttgttgtatgccttgaatgatttcatgtcctcggtgaccttcacgagctcaacggaaggcttctcacgagaaataggcatgtatggtccttggacttgggttgcagttgcgagctcttcggcagttgaatcaccagccttgaacttgcgagcacgccttgggaagacaacaagtttggccttgtaggtcttaagcctctgaacattggcttgaagaccttcaagtgatttgttcttacggcggtgatcaacagcgataccaatggtcggtgcaagtttcttt

SEQ ID NO: 12709 - DNA, 202 bp, Gossypium hirsutum
  Clone ID: LIB3829-006-Q6-N6-E12
gaaggagctgcaagcaaaaggatgggtttcttccatatgaatccatttagtagaataaactcacagaacaagagcagacaagcaaaaaggaaaaaaaaaaaaggggggccccaacccatttttgtccgagcaaagtctcctatgaaaaaagaagcaaaattttattagtttaggatgaaaatgtaaagtcagcaaggggaaa

SEQ ID NO: 12710 - DNA, 561 bp, Gossypium hirsutum
  Clone ID: LIB3829-006-Q6-N6-E2
aaaaaaaaaaaaaacatgatttattatacaacaattatatattgcaatatacaatttcatgtacaaaatgagtgcattgttgtacaaattgccagtaatttgcagattaaaaatcaaatcattagaccaactacaccatacaaagactagttatttcttccaagagcttactatacacaatcttcaaatacgagcaagtgcagaaatggtgaggagagctcgacaaacagttacatggcatggatcgtggcatatacatgaagtgtagaaaattataagacggagtaatttggtttccggctctcctcgagtgatatcagaagaagatcttcgtcggtaccgaaggatttgcgtgcttcttcgagacactttgatgagaccctgtcgtgttcccgagaactcgcgggatctctgatctcgaactcgtctgttccggaatcgtagccgcatatcacaacatagtgaccggtatatcctacatcgtttccctgaaatccagggatgatgacatcctccatccaagactgactcaatttgtactggtcaaccaaagcgattgca

SEQ ID NO: 12711 - DNA, 541 bp, Gossypium hirsutum
  Clone ID: LIB3829-006-Q6-N6-E3
gcaaaataatgtaagcatatttacaactttaaaatggacataattcacaaaacaaagtttccattcggtttggacaaaccccgatcgatcatggatcctcaaacagcaacagactccaaaatttccgaaaattaggaggacaacttggtgaaggaggattgacatacagtggttcaaacaggaaagcaggaatcctaactacaagcccagcaacctttgcaagtgacacacgaaacaaccaaagctgctgaatatagaaggcaacgttaacccatgatgtaaaatttttcgtgcttgattcattgatgatttcagtctttagacatctttatttacgcaaaatgaggtcaagagctttgtatatgaacatccgcttcaaaccattgccttgcctggtgcttcgtgtaatcggctattgtaccaagtccacataaccttgctctccaaccattggccctcgatctgtgtcagcctgactttcacctgaatcagctctagaaactgtctcctgctgttgggatggagataattccccatttgt

SEQ ID NO: 12712 - DNA, 499 bp, Gossypium hirsutum
  Clone ID: LIB3829-006-Q6-N6-E4
caccacaggggattaaaagaaaaaaagagggactttttttttttccaaagcaaaagggggaagaaaaaaaaaaactaagggggcccataattaaaatattattataaaatatttatatttaaagaagaaaaatttttatccagcccaatgggtttactcttgggggggcggcccaaaaccgaagcacgggtctcgatcttatcaaagttggaggaaattggaaaattccccaagggctgggcttcccataataatcatcttctactaaaatcttctcgagcttccctgctttgacgaggggattagcgcgggcgatctcctttttgccgacctttttgaaatcaaacgtacacccgggattctaagggtacctgggggacccgaaaaacgtaacaccgcacttgcatttgaatccggtaaacccgacccgtttcctgcaaaccatgcaccgattcggttgttgctgcaaaagctgttcggccgccggggcaatctccgg

SEQ ID NO: 12713 - DNA, 559 bp, Gossypium hirsutum
  Clone ID: LIB3829-006-Q6-N6-E5
caaaaattattaatttactttagtaaaatgtacaagacgaccttaaagagcaaatagggggatttttgggggtccgaatttcaaataatctaaaaaaattctaggcttaccaacaatggtatggaggagaaaaaagggtgcattcatagaactaaaagaaagaattattcaaaaatcgaagaattggagtgtgtaatttgtcatttagtggtaaagattttttattagatcaattttacaagcacttccgatatatgtcatgcagtgttttaaattaccaatattgctttgtaaagaattagaaaacctgatgagtaaattttggtggcgaaatttaaaaactaataaagatattcactggtgtagttggttcgcgatatgtagtccaaaagcgtttgaaggtatgaggtttagggatttagtaacatttaatatggccctgctggctaaatagggatggagactaatcacccaacctgtctgtttgtttgcgtgcattatgaagttaaaatattatctatgtggtaagtttttaaatgcaaggttaggagcttacccc

SEQ ID NO: 12714 - DNA, 514 bp, Gossypium hirsutum
  Clone ID: LIB3829-006-Q6-N6-E7
gacaacaaattaatatctattgatgggtatagggttacactaaatgagtaacttgggttgactaaattgtaataaacactaaaacactagaatgtagaattcaacacttcaaaatatattatttcataacactgactttttactcctccataagaacatgacaaagggtctctgtgcatgtgaagataccaaactcgaaaaaaacagctaatttggagatagaaaatgcactcgagcaagtgtgtactcttttccagctatccaaacccctgtttgcgaccactgcacatcttcccagtcaacattctccaccaatacctctacatgctcgagtggcaagggaattccaattgaacgcatgactttctggggaaggggcttcttacaccgagaccatctgaaaacatctatcagggtgttctcagagtcgttcttttcaccatttgaggaatgtgcgtggtgattttgagacttctctgtatctgcttcatgtgcttgagacgctgctgtagct

SEQ ID NO: 12715 - DNA, 494 bp, Gossypium hirsutum
  Clone ID: LIB3829-006-Q6-N6-E8
gatgccaaatacaatatagacaattttcagaatgatagtgtagcatagggaaaacaataacttcaatccaattgtttggtggaaacacaccacgattaaaccccaatacgccaatggataaaccacaaatactaacaattttcagacgcccaataataaaatgtttttatcacccaatgcagggggaaggatcgcattcactcgctgcagctttttcttctatcttctcttttcaggaaaaattatggggccaagaggaaacgttttcaaaaaccgagctgcaaacggcaatttaatccaactggaaactaatgggggggatggttctccactgggggggatccctctataaaaaaaaacctttggaggtgatgaggcaaaaaaggaggagaattggactgaagggtccccctgttgaaaccagcaatgccggaagaaattgcaaagttgaggttgtagtcactccctaacaccggttgtgctgttgccaccgg

SEQ ID NO: 12716 - DNA, 512 bp, Gossypium hirsutum
  Clone ID: LIB3829-006-Q6-N6-E9
cgccatatataatgtttctaattaataaagtcccactactacatagaaagcgacatctagtatacgaagaaattaaatatacgtagtagatatagcatctaactttgatgatagttattactaagtatatataaaataacaattctagcgacgatgggggcaaaaagtgaccaaatagttgccgcgggtgcaagtagcaatgctggttggatcatcgtatgcataggaatatgctttgggacaagctgccttgaaaatcttcgaatacgctgttggcttgcatgactgggggttcccaaaggtcccagtgcagcaatacctcggcgagttgaaagcaaagcaagcacttttacaagccaccactcgcttgttatccttcgatctcacttgtaaaccaacggggcacattaagttcaagtcactcacacacccagcgtagctacatttgcctgagcctttgaatggggttattgacattgctatgttgtagccatccaccaagctcacgtcgt

SEQ ID NO: 12717 - DNA, 538 bp, Gossypium hirsutum
  Clone ID: LIB3829-006-Q6-N6-F1
ttttttttttttttttttttttttttttttttttttttttttttttttttttttttttttttttttttttttttttttttttttttttttttcccggggaaaaaacacaaggtaaaaatgggaaaggggcaaaaccaatttttcccccaaaaaaaaaaggggggttttccggggacccaccttttcccctaaaaattggccctaaccacccgggtgggggggaaaaatttaggggggggggggaaaataaaactttcccgggaaaaaaaaggttaaaaaaggggggggcccaagggaaccagggaaaggccggaggggaaaaaccccccctagaaaaggaaactcaaacggcccaggggcccccttttttaattgggccttgggataaaaacaaaaaaaaaccattttgggcccccaaaaaagtattgatttcgccaatccccttttcaatcccctaaaccccgaaaagggaaacaagggggttttttttttaaaaaaaatccaaagtttttaaaaaatgggggccaatggggttgag

SEQ ID NO: 12718 - DNA, 517 bp, Gossypium hirsutum
  Clone ID: LIB3829-006-Q6-N6-F10
gaaagctctcacatgtgataggtgtattgatcagagtttgtacccgatgcacatccataaacgatatgttcactaaagaagatcattagcaacaaaataaaaccaaaaacagcattcatttcatttacacgaagcccttgcatattcatatttaactatgaacatgtgcatatgtcagtgcttctttaggaatccaaaatgttcttaatggtctgccttaatacagcctaccagtgcactttgaagagccacaacagcaaactttctttcttatgtcaccactctcatcgtgaacttgatctatcatataattgtaatggtaagtcaactcttgcaagggaggaatattctcggcagcaaagagcattatgtgcgggattctcttgtcgtcatgatcataaaggacattttgtgcatacaaattaggtgaacaactatggtttatgaatctgcccatattaccaaaccgtgccgcatcaatggtgaaaccatattctggtacaacttggcggaaact

SEQ ID NO: 12719 - DNA, 523 bp, Gossypium hirsutum
  Clone ID: LIB3829-006-Q6-N6-F11
agggaaagtggaatatatttagcaccagcgatgatccaaatacatagcatctgcattcttacaagtttcacgtgttctactaatacaatccccggctccagagcgagctggcatgttgcagcggattagcttacagagatgagtaacaaagaataaagaaacctattattccagctaccctctgctgccccaaagtgaaatttacccattccataagagttaacgattgaactaaaacaggaaactgagaagtgcgaaataaacatcgaggaagccatcatcaaactgttttcataatctctgatgagcccgtagcaatgcgtccacgtgtcagcttggtattgtatgagctgcatatcgggcacttgtgtgccacaaaatggaaattaacctcggaattttccccacagtcattgcagagaatccaaaccctcctattctggtaaatttgaggcatccctgttgaagcaacttctcggtcaagtcgttcccacactcgggtcatatcacaaaacgattttga

SEQ ID NO: 12720 - DNA, 539 bp, Gossypium hirsutum
  Clone ID: LIB3829-006-Q6-N6-F12
aaacaaagagggtaaatgtttaatacatttagaagctcacagtcacacagaatctaacgggaggaaagtgtatttactgtaagagtaagaacataataaacaagcaacagatacataaacccaacaaaaatttacaggggtcctcactgtatgtatgtaatggcacaaatggggagggattaacatgaaaaaatatcacaagacattgttttttgtataaggacactcacgagaggagaagggagcaccggcatccaagatattggcaaaaagaaattttcaaaaaacacatctcttaatcattatacatgacggtcagggaagcgaccaattagtctgcactgttctggaagcaaagatgatgccacttgtccattgagggggaaaaactcaccatcaataccacaaccattatgcgtgtgtttcccagccttaatcttaactgatttcaccttgacatattcaacatatggcagtgaaaggtgtttacccatctgtagcagcaagaaaaatctcatcaacttcaaccgcccactccc

SEQ ID NO: 12721 - DNA, 575 bp, Gossypium hirsutum
  Clone ID: LIB3829-006-Q6-N6-F2
cttgcagatttttcattctattatatatcaattctaatctgatgtccttaatagtcatttttcattctcatctcaccgttacagctgcgtttaaattcaaacacacactccactattgtttctaatctcaccgctacagtaactaatctcaccgccaccgctatttttaacctcaccggaggtaaacacaccgcccatccaaattagcccgcccatccaaactaaccctaaatatatataaaataacaattctagcgacgatgggggcaaaaagtgaccaaataattgccgcgggtgcaagtagcaatgctggttggatcatcgtatgcataggaatatgctttgggacaagctgccttgaaaatcttcgaatacgctgttggcttgcatgactgggggttcccgaaggtcccagtgcagcaatacctcggcgagttgaaagcaaagcaagcacttttacaaaacctggtcctttttatttgtttcaaaagcgaagccctaactcgcatgctgtttggatcttaatcgtcaaagatccgattcatatctatctctgatctgatccaaaacgaaac

SEQ ID NO: 12722 - DNA, 578 bp, Gossypium hirsutum
  unsure (1)..(578): unsure at all n locations; Clone ID: LIB3829-006-Q6-N6-F3
agttaaaaataactgatataaaatttgagcaatataatgtgcaatattcgccttttttccatcagccttacaattaatgataaaggtaagaattgcaaattcaattcagagaacaggttaaagaaaccaaaacatgaaagcaagagaagaacttgaaaggcaaagggggtttagtaccaagtgttccaacaacctgagtatcataaatgcgtatacaattcaagctaaatgaacctacttgtccgatgttatcacagaacaatctgtatcttggcaacagaaggttgtaactcaacacttaaaaccctctggagctcacttgattgcacaaaaatgggtagaacgtggcgaaaatacagggcggaggaaggtaacgtacataaagtcgttctaacaaacggcaggagttgacggttgtcatctgaagttgcaacagcgtgcctgacctctagaaagtttgtcccaaagacaaatcatctgcctaggggattggtaatgtgcagtataatagtctaccatgcatncgtattgacagaacttccaactatgggagtattggacagtcgtcgactggttaa

SEQ ID NO: 12723 - DNA, 539 bp, Gossypium hirsutum
  Clone ID: LIB3829-006-Q6-N6-F4
aagcaaatcaactaaatcttgcattgcaataaatcatgttttctatttaacaaaggagattaagttaatatgtcacagaaacctacttcaagatgtaagattactactagaagcttacatggtaatttgctaactagaatgcgagctttctctgcacgtttcagatttttgtgcactcctcttcctgcactataccggttctcatcctacgaattgaaaccactgacgagttggagggtaccactgacgaaaaccagcatgccgccaacgctggagggctgacaatcgacagtggtgatgctgtgctaacaccgctggaaaggaaggctgatgagtttagcgacgatgctctgagagccttggatcttttgaccctcgaaggtcaacattaaaccgtcctggtagagattggctagaccggccctgttctaaaagatgaaattaccagagagcgagcgaaaaggagacggaaagaattgaagaactttggagagagggagaaagaagatccgaaaaaaagaaagaagaggagaaagaaa

SEQ ID NO: 12724 - DNA, 502 bp, Gossypium hirsutum
  Clone ID: LIB3829-006-Q6-N6-F5
gaagtccaaattcaaaagcatttaaaatagaagtaaccccaaatccttaacaataatgtaacaaatttaacacattcctaaacgcattattatcggcaaccgcaacgctttcggcaaaattagatcttatttttaaaccaaaatacacctttgctgctttgctcaccttcgtctggttcaacgtaaatacactcctttgcctttttaaatatcgctttataaactggggtaccatcaaatgaataatactcgcccaatattggctttattgcctttgttgcttccattgcgtggtaatgcggcattgtcgaaaacaaatgatgagcgatatgagtttcagttatgttatggaaaaccttgtttaatatcccataatttcggtcgaccgtcgcggagggctccacgtaaccaatcccattcggatgaatcgtagtgtggtaatgcagggtgagtgtgttgcaagtttgtgatcatgacgaggaatgcattaacgatgagcaat

SEQ ID NO: 12725 - DNA, 561 bp, Gossypium hirsutum
  Clone ID: LIB3829-006-Q6-N6-F6
gtgtaaagatttatggctaaatttattattatacaaacaccaaatcaaaatgtagagccattttgctcaaatagtggctaatttacccatttgttgaataaaagggactaaaatacaatccaaattttgtgacacaaaaaaatcacctctccgtccggttgggttcctagctatagcccatccagataactatcgcttgccatcagggaaccagccacatccatctagttctagttctgaatgttcttcattttctgtctctgcaattcctcaacgagattcccaatactctgttgcagctgaagcacctgagattgcagctctttttcccttgcaaaagaaggcggtatctgcaaaaggtcattggtgcccacctctgacaagtccccgagcttaccagatgattgctccaaatatttgatcagtctgatgatctcttccctttgcatggtgttctgttgcaaaatgcattgtagagatgggagaactgcacttgctctaaggtttagcgacgttggactggttgaacctccatggccaggttaaacgtgcagttggtag

SEQ ID NO: 12726 - DNA, 406 bp, Gossypium hirsutum
  Clone ID: LIB3829-006-Q6-N6-F7
aaaaaaaagggggggccagggttttttttgaaagggccggggaaaaaccttaaaaaatttatggcccccaaaaaaaaaaaaaatgggggggaaaaaaaaagagaggggggtttttaaaaactcccaaaattttaaaaccaaaaagggggtttttaaaaaaaaaaaggggaaaaagggggaaccccataccccacgggggggggaaaaggggaaaagggtttttttttttccaggggccccccaaaaaagagggggtttttggggggaaaaaaaccctttccaggggaaaccccttttttttttccccccaagggaaagcccccaaaatcccctgttttttgaacccggtttgcaaaccccattaatttttggggaattggggaaaaaattggggcaaaaacccccc

SEQ ID NO: 12727 - DNA, 523 bp, Gossypium hirsutum
  Clone ID: LIB3829-006-Q6-N6-F8
gatacaaaggtttagaagtcgttcaaataagaggtacatacagtttcaattttcacatccctaccttgagcattttcaaaagctccaataaatcagttattagtaacaaagaaataaagcaacagagattaggaactagtgaaaaccaacagatgacgataagaatggttatttttgtaaaacagcctcttacaatattagtaaccccttgctgattctcaagaatgctagcatagaaaaaattatcaaaaaggaatatggaatcgggttatcacaattagcagataaaaggctccctccccgactgaaaacagaaaggagaggcccttagagcagagaaaaggtataccgtctcagtagttcacgactgatccatttatagtgcaacatttacatcacgattgctgtgggaaacaacttgcaagtttactctcatcaaccaaatccaggaggcacatcagggtcatcatcactgacatcacacggatgcttctgatcaatatctacagaaaagccaggtggc

SEQ ID NO: 12728 - DNA, 539 bp, Gossypium hirsutum
  Clone ID: LIB3829-006-Q6-N6-F9
aaaagagacttataaacaataccttttcagaggaaagatgctggaaaaatccggatacctttagcacgcaaacctcatgatgatttccttacctggagaggctagtttccggtccgcagtacctataaactattacaaacttttgatgaaattcctagagcttacgctttacaaactgactacaggaatttttacaaaaaaaactctggctcctaaatctaccaaataaaatcaaggttacagtatagagaatttcatggaactatttgccgacgagggttaatatgcagcaccgaaagcttgtcagtagtacaagctgccttcgatgtggagaaagagttgaaacaatcgaccatattttcgcgaatatcctgaatctttgatcagcttactttataccagagccgcctcttttgttgtggactttgggctatctagagagttcgtaaaaattaattttgatggtgcgtatgattcaaatcaccaccaatctgcctcagggattgttgtcagaaacgaagaagggttgtcttactttc

SEQ ID NO: 12729 - DNA, 533 bp, Gossypium hirsutum
  unsure (1)..(533): unsure at all n locations; Clone ID: LIB3829-006-Q6-N6-G1
aagacgtaagttccgtgttgttattgacagcacagcataaccaagctagtagattcgagtaacaaactggggatagcgtaagaaatgttaacaaacataacatttgttgtgatcaaaatcacgaaagacaagacaaatgataacaatggtcttgattattgatctaaacttccaacacaaactccttatctttctccagcttctccagtgctccagcttccaaggcgatctccacgtcaatgctccgtccaccactcttcccttgatacaaatacaccatcccatcaaacctgttgttggatccgctcctcaccccttccggttttccccacccgaaatccacatcgtataccttgaacctgggagagctccccaccgccacgcagttcacaccagcatccttgtactcgaatatcttcggtgctgnttnccactccttgtttcgttcttcgatggnctttgngttgtgcgcttttatagctttttgtaccaacgatgcaccgaattgcgggtggattagccgacaataaccc

SEQ ID NO: 12730 - DNA, 492 bp, Gossypium hirsutum
  Clone ID: LIB3829-006-Q6-N6-G10
atggcaatgtcagtaatttttctatcacggtagcattgaaacgtctagtaacagacactacagggagtagaaaccccgcatattattcattaataaaacatatatatatatatgacaagctaataggagagctggcctctaagccttggtgtgaagatagtcatcgatctccacaaagtttttcaccgcaaattccttaatgacgcttgggtcagggatctcttcacttgccttctcaaattcacaagaccatttaaccaagctcgactctcctttgggaatcacattgatcttagcaatgaaagtcttgtagtatttcatgagatccccatcaaagatgctgtaaacatatatcttctcagcttcatccactgattcaattctctcctttgaaaccttaacgattggagatccttcagcataattgatgaggcggatggatccgggggccttgccatcgccctcgagcacttcaatgctcttgtaatcatg

SEQ ID NO: 12731 - DNA, 519 bp, Gossypium hirsutum
  Clone ID: LIB3829-006-Q6-N6-G11
aatctcaaaattccaagcaccacatcaaacaaaactacgataaacaactcatagcgttctcagatttttctctagtcttccaatcctgaatctttatactaataaagacaaacttagtcaaagagactgaatcccatatcatcatcagactcttcttctggttctggttttttctcctctgcagggacagcagcagccggagcagcaccaccagcagcagcaacaggggcagtagcaacggcaaatttgcttggatccgccaaatactctttcactttatcggcctgacggaaagaatactctgttgcaactgcaacagccaagacattcttgtagccattgatgaacatgtgtggtacagctgcaaatgtcgggtatgagatggcaagagacaatgcagtaaccatggagacaccactagcaaatttctcaatcaggtcatcctcggtaagatccaacacctcagggctaaaaacagagccattgtcataagcagacaatacaacaagaccatatgag

SEQ ID NO: 12732 - DNA, 525 bp, Gossypium hirsutum
  Clone ID: LIB3829-006-Q6-N6-G12
aagattccaatgaacaatacatttccatatctgattatttcacttttacataacatggattcaagaatgagaagagcaaaacggagctctcaaataactacaaatttcactctttttactacaatatctcactctttttactacaattgcaaagaatctaattaaataaaagctcaaaagacgaatcaaaatataactaaagaaaagggggggaattaccaaaagtccaaaaaagcttaaatacaagttatttcacaccacgaggcttaagaagcagcagccaaaggaggagctccatggaaaaaactttgatctgatccattactaaatttttcgccagccttttcctcttcatcggcttcctcctcagcatcccaaagaaatcgtgcatatgatgctagtacaaaacagtcgtcaggggcagatttaacggcttgatcaaagtaagtttcagctctaggaccatctttatgagtttgccagattaaatcagcgtacatggagagaagattcccatcatttgga

SEQ ID NO: 12733 - DNA, 547 bp, Gossypium hirsutum
  Clone ID: LIB3829-006-Q6-N6-G2
aaacctgaattcagaattttcattttttaaatttaaaacttcaataattaacaaactgcaaatctcacaacacacagtgagacagattttataggcacaacagcctgcaatttgaagcatctaaaagaacaaaaatataaaccaaaaagaacaaaaaagttgaaaaatgatgaaagtaaagaaaaagggaagcatgcgagagattgttcattgagtcttttttttcttcaagcctcatcaacaaagcctgcatgtgaaagctcctttaaccattcatacgttcgatgacgtgacaaaactcgcttttctttcattttcttctttatcttcacttcttgcagtagcttcgttttttcttccatggcggcttgaaacattgctttctctttctcactcttcttttttatcatcatacttttgatgactgctattttgttcaatggaactgtttcaactacattaactgaacatttacatccactaaacaacccttttcttaagaaccctttgatcgaatctagctgactgttactggtactacaactgc

SEQ ID NO: 12734 - DNA, 573 bp, Gossypium hirsutum
  Clone ID: LIB3829-006-Q6-N6-G3
acattccaatgggcaccaaaacattgactaaaaatccaaatgtacaacagtttccatgattcaaactctgaaactatgatatcatgtaagttatatgatcaattatcccaaaaacatagtcgggtgatcaactatatttaagctccaacatgatatatcaaggtttttttactagcctaatatcagccttttttctcaacaattgcacatccgcaccacggattgccaaaagccagcaaatatttagcaagctttgtcataccatgaacttgtctacaacaaactttctagtttacctatactaggtatgcttggatttccttttccttttggaaggctgttcggcagcaggggcagaaatatattcttcagcattgatattttgcaaagatttttgctttccgaattccttggccttttgcttcgaggacttagcaagggcagcaacatcttcctccttgttctctgacttgttagaatcttgcttcacgggttccttgggaggaacaaatgctgcttctctttttcttttgttttcagctgttttctgtgcctgcttctcttgcttctctt

SEQ ID NO: 12735 - DNA, 543 bp, Gossypium hirsutum
  Clone ID: LIB3829-006-Q6-N6-G4
atccgaaaaattaatttgggttcttatttctactatcacagttttgttttttttttactacaacaaaagcaaaacatatggttttttactactaatataaacataaaatgccataaacaataacctttcccttgtaaaatggcggacgggattaaggtaataaaagatacatatattagagcttcactctcaggaaaacgctccctctcattacattttccactattccttcggaataccattcccccaccttacaccgtgtacgcttgctggattgtgtctatgtccaggttcttcaatctcaccaccgattccacatgccctttcagtgtatgcagttctctcaacctagcaatttctgctctccttttggcttcctcagccatttggttcagctctgtgaaatgggttcgctccgtaaacatcttagtatcaggtgcctgcaaaccatgcaatgttctctgtgcatgcgcccattgaagctcacgttgctcttttccgaaatccttttgccttgtgaaagcaatcctttgctcaataaca

SEQ ID NO: 12736 - DNA, 555 bp, Gossypium hirsutum
  Clone ID: LIB3829-006-Q6-N6-G5
ctaaaaagatttcaccaggaattgaataatcaaaattacataagtatttttatcatgcttgcatatatatatatatggtaattgattgctgacacatactgttaattacagtagctgatacttatcaagctggtataatatattacagattgattcattatagatgtaaataaatgtctttgaagggtttcttacttcttgttgaactaatacggcaaagcgagtacaggtcaaccgagatccttgaggcgagaactacgaaccatccataaaaacagcaccatgtccgctggatttcatgaacttcttgaacaaaagaaccaaaattgctatcgtaagtccaacggcagcccatgtaaacaagcggtcatcggcagatctttgaaccctcatctctggcctttgcagtggctgattacttgattcctcggcaggaatctctcttgcagccctcactcccattacagcagtacctggattagcattggccagaaccagaggctcttcttcgacagccctgtcacctactactgggttcggtagcccattcccagc

SEQ ID NO: 12737 - DNA, 558 bp, Gossypium hirsutum
  Clone ID: LIB3829-006-Q6-N6-G6
gaacccttcaatcatagatgcaaatgacattgatgattagatatgattgatgctgtcctttaatcattcatcatacgcatcaatataacatgtcctgcaaatgtaaactgttctcttaatgactctcaatgccgagtctaaagataattatgagacaatctaaaatggatctttggagaaagtaaaagtagaaaataaagtagtgacctttgacaacactgttcaaggtataaaactaggtaagtattagtagtattaccctctttcaagcaatagttccaagttctcgattcagatagtctacaaacatcctctttgcactgttggaatcggaagggggaggtcgtccactcaaacttgtttgtcctgttaacttgatgaatgttctccgtaatctccgtagctccggcaacccaaccgatctagaaatatcgatattcggtaaaccttgaccaatggagatattggcaagaggtcctccaattgactgggattgtgcttccacaatagcattaatcacctcctgcgtggctctgtccatctcatacagtgaatttg

SEQ ID NO: 12738 - DNA, 519 bp, Gossypium hirsutum
  Clone ID: LIB3829-006-Q6-N6-G7
gaaaaaggaagcctgcattcaatttttccaagatttccttggcagagtccttatgatcatatcccctgtacacatggccaaatatacttcaacatgagtacttcaagattgaacacaccagtttttgcagaaaaaaaaaaaagaatcccagcaaagtgtaaatttatgagggaattcccaaaagacagtatgatagctgcttcagctgggtagtttatacaaagcaacaaccttaggtggataatcagccatatacaacccggggatgaagcataagttcgacacgtactacactaggctgattctccgataaccataggtagacaatcagccatatacaacccgatcatataggctaggccgattctccgacgtttatttgtgcaagcagtaaatctaataaggcgggctcatggtacagagcgcttaacgcaattgtccaaatcgcaaatccgatgctgttgtggatgaaatccaaagaggtggtggccagaatagctccgaaaattgagaaacttt

SEQ ID NO: 12739 - DNA, 187 bp, Gossypium hirsutum
  Clone ID: LIB3829-006-Q6-N6-G8
aagagtcaaatttcaattactggaattaaaaattacttatttatattacataaaatgcaaaagcccaatagattgataagaagataccgtaactcaaaaacaccctacaacatttctcatatatattgacaagctacccaaaactagcatcgccttacataatatatcaaatagctttgcctgcaac

SEQ ID NO: 12740 - DNA, 444 bp, Gossypium hirsutum
  Clone ID: LIB3829-006-Q6-N6-G9
tttttttttttttttttttttttttttttttgttttttttttttttttttttttttgtttttgttggggtagtgttaggggaggaagaggagaagtaaacgccaaaaagaaatacaagaaaaaaaaaaaagaaagaaaaaaaaaagggggggggaaggaaaaaaaggaaaaagaaaaaaaaaggggaaaaaaagaacaaaaaaaaagcacaggggggaagaaggaaaggggaggaggaaaaaaaaaaaaaaggggaaaaaaaacagggaaaagggaagaaaaaaaggacgaagaaagagaaggaagaagggaaaaaaaggggggaaaaaaaggagaaaagaagaaaaagaacaaaaaagaagaaaaaaaaggaaaaagaaaagaagagaaaagggagagggaaaacaagagaaggaaaaggaaaagaaggggaaaagggggggg

SEQ ID NO: 12741 - DNA, 590 bp, Gossypium hirsutum
  unsure (1)..(590): unsure at all n locations; Clone ID: LIB3829-006-Q6-N6-H1
aaacaacactcaaaccatatattatataaaattacatccatccatgaatgataacacatcaaagcactacaaagactatggttaaaccccatgatgacagcatacatgaaaaaaagaccatacgtacatacatgcataaccacactaccccatataaaaggccatgaaaggggctttcaaagcaaatttgtttgcatgctcttttgcttatgcaatatattcaacatcaaagaaaagaggatacacacaaacaaaagggcagaagaagaaagtgaagattgggacccaataaccacctaagcggcgtgcacttagccaccttttatgagggtcccttataataaccagtcttctcattcacactgctaaaaaaccccatcattctcaagcgtgagtgttactttctaaacccccaaggtgaagactaatgattcactcccctttattgggacataaatatactgctttctatagattttncaacccaaatcttactggtttttcctactcaaatcattgaagaaagactcacttggctcttcatttttgggtcctttgttggaagacgccaaaaatatggctacacatgc

SEQ ID NO: 12742 - DNA, 493 bp, Gossypium hirsutum
  unsure (1)..(493): unsure at all n locations; Clone ID: LIB3829-006-Q6-N6-H10
ggttggaactgcttngaaagcttgtgtttatttccatcattgaaaaagaacaaagtgtagggaaacaagagttctatagcaaatagcagactacttagaaaccatgtgaaagcagcatttacatgacagaagtccaatcccatagtgtgattctactatatgtgctgcttctctaaagcttctactttgaactcttactgggaagaaacgactttgatcatcaactgagcttgaatcattgataaatttgactggcaaaagctttgccaatcctccaccggatccagcttttcgttttctgtgaatgcctcgtatactgaaagtacaatgcttcttgctgcttctctggcctctggcagcctatcgtttagcaaatccgaagccatttgaagcaaggtaactgacccgaactctttgatttcttctgatcccattttgtaaacagaattggaaatggaaactgcagctttggctctgactctaaggttgccat

SEQ ID NO: 12743 - DNA, 524 bp, Gossypium hirsutum
  unsure (1)..(524): unsure at all n locations; Clone ID: LIB3829-006-Q6-N6-H11
cacactaaaggttgatctctatttatttgaaacaagcaccacatgtaatattangaaagcaaacttcaattcagtaaaaatttacacataaaacttgatctttaagctgaaattatataatcctaagtaacaaagtcttactatttatcacaagctcattcaaatggataccacgattcttttaacctctagccttaagctcggcgaggcgccttgacaaatcgtcctcatcaaccttctcctgtgtcttggttggcacagcatgagcggcgggctgtggcaacccaacagagacctccaacccataatcatcagccacttgctgcatcaagctgttgacctcaccttctggtgtggacaatgaagtagagccagccatagcactctccataaactctgcctggacctccatattcacaaactgcttctcgaatttatccattgtctccgacattttctgcaaattgccggtggccaaggaagattcgagagacttgacgatatttcccatggacttgttgatg

SEQ ID NO: 12744 - DNA, 506 bp, Gossypium hirsutum
  Clone ID: LIB3829-006-Q6-N6-H12
ctatgacgtcctgcacgctactaacttggatccttaacggcgcctttttttttttttttttttttttttcgaaaatcatactatcatatcttttcccaaaaaagtgcttggctcaagagtgagctacaaacatgagcgccacttggaaaataaatgagaaaaaaagaagcatagcataaaccatcatacaaccggtacaatctgtgacaacagtaaccacagctttttgaaaacgacagaaagggaaaatgggcctaaagttctaagaaccaaagctttgttccacttttctctcaactttttcacttgtgttccaaaatcatgttgttttcaggagccaagccaatgctggcccttagtatgttctccagcattgcacgctgcttggacagtgcgttcaccaccggtgtgcctgggggaacaagaggggctttggggaggtaactgaggattgtggccacaggatgggaaagtgtggaacttgccctttgcatcaagcttgaact

SEQ ID NO: 12745 - DNA, 568 bp, Gossypium hirsutum
  Clone ID: LIB3829-006-Q6-N6-H2
gaatgcttgaataatacagggtcgcagtttcctctattgcctcaaatgaaagtagtacaaccattaataggagctgatttatgagtttgttcaattaaatgatgacagattcaggaatgatctgaatacatttatgaatgcgattcaacaatattgtagtattttaaagcatggagcggggtctctcatgcttagttctgacatgttttctggtaatatggttgagagtagggcatccagagagggccatggtgagctcaagttcatccctaagcatttcaataacccttttcaccccgtattctcccttggctgcaagtccgtaaactgctggccttccaataaggacagcttgcgcaccaagggctaacgccttgaaaacatctgttcctcgtcttattcctccatcaaataaaacaggaatctttcctttaactgcactaaccacctcttctagaacagaaatagtgggtggagcataatctagctggcgagctccatgatttgagacaacaatcccatcaacccctacttcaacagcctttattgcatcttcatgagtaagtac

SEQ ID NO: 12746 - DNA, 585 bp, Gossypium hirsutum
  Clone ID: LIB3829-006-Q6-N6-H3
aacataaatactcagttcaccatgcttaaatattttttataattcttttctcctgctaatgtttttggtcgcaggcaaggattacatattaaatgtatttttcttacatttctagcaaaacataagaaataaaactggggaggaaggcaaaacccccagggattatcatacaatttaaaaacgaaaaataaaaataaaaaaatacagattaacacaagtagataaaatgttgcaagggttcatatcttcttcttcatcttcaggtggtgccacttccctcgagtactcttattacattggctgaagtcaaagagttcactcaccatctcttactattataatgacctcgcccacctccattccttctatcggaaaacccacctcggccaccacctctgccgccagagaacctgctaccaccaccatttctatcaccaaaaccaccccgtccaccaccaaatcttcctcttgacatgtccctctgttgcaagggtggcaacgcattcttcaacacctttaagttaacattagctgcattttcagcaccagtaagaaatgctttcacatcatcttctgcaacatcaa

SEQ ID NO: 12747 - DNA, 581 bp, Gossypium hirsutum
  Clone ID: LIB3829-006-Q6-N6-H4
aaaatggtaaaattaaatttataaatgtaatgacatctcaaggttcaaatatttcatcatacacatgtatttttctttatataaaaattataaaaagaaacaatactacttcagctaggctgaaatgagaagaattgtcattctacctgcaactgtaagtgatggaaccgattgcaatagctatcaatccgcaatatgatcgccattgacagaaaacattacggcatgctcacatgcgctgtgcccgcttacaaggaatgtcgagtccacaaacattcctactctccatgtagaaccattgcatgtatacatagtgttatgtacaatgtccgggatcgtggactaagtggagataagatagttaagttgaattagcctaccgatctgtcttctagacattgtagaataatagtttccgactttaagttctatctcaaagtccaggcatgcatgctgcccgtcaaagacacctatcaactggcagtatcttcattaacttagcaaggtcgtacgacttgaagtccttcccataacacaagcttaaatccaaggcagttttcccatccttgttttttcgggtc

SEQ ID NO: 12748 - DNA, 561 bp, Gossypium hirsutum
  unsure (1)..(561): unsure at all n locations; Clone ID: LIB3829-006-Q6-N6-H5
gaactaaaanatcaactctactcgatgaaaaaacagtcaaacatagtgtcctgaaactatttccagtaactgctttgctttcaaaaggagtattaatgtgtaaaggcaaaagtcaatatctaccaaatccaggaggggcgtttatgcaatgggatcaaaagaaccaatctatatattctgcagcagcaatcaagagaagctattctttgtctacatccaagggcttttatcattgccccaaatgtacacaagcaaaaatgaacacatcctcggacagtttttgccatctttatcacttatcttacattctgccttgtcttaatcatccgtttcagagttgcaagccaaaagttgcattcgtcccactcattggtagtcagaagaacctggatatgtagagctgtcccaaaatcattattgtccaacgcctggcagagctgaataagcttatcagaagcattttttgaaatgtctccactgttgagtttggcaaataaggcacctattttctttgaattgtcttctatttcacgcttcttggctgggttcgcacgtggtcct

SEQ ID NO: 12749 - DNA, 301 bp, Gossypium hirsutum
  Clone ID: LIB3829-006-Q6-N6-H6
cacaaataacaatggcactcactttctctacagatcatttctttcattcttttgatccatttataagaggccatatttccaatttttaatacattcacaagcctcatctatatatatatatatgtatacatacatatatatatatgttacattgggttcacaaccttattgaaaaaaccataaccaatacaatttttttcatcaaaaccaaacagaacagagtgattcttgtgtaatttttgggcaatttcaaaatgaaaagtccaacatatccatgctcaagctttccatcatcgcattt

SEQ ID NO: 12750 - DNA, 528 bp, Gossypium hirsutum
  Clone ID: LIB3829-006-Q6-N6-H7
attactctctgtttttctttgttactaaagaagaaaaaaataaaatactaaaaaacaaataaaattgctataactttataaacatagatctcaaagataaggcattaaaaatgaaaattgtgtcggataaaactgagaatcgaaaagggaaaaaataaaataacaatagcacgacttccaaatccttgttgggaggctcgaaattgaaagaatcaaggacaaaagggtcttccagagcgagacctgtgactgggaatggtgaaatgtcttagtaatccttgttgctccctcaaatagccttcacaaagaaaagccattgagaacttatcttcaacaactctgttcacatcatgcacaaacacatcagtctccccttcttctctattcctagccatcagccctgcagtgtagatggcattcattctcccaggggcttcatcatggaacccagttggggcatcaaccatgatcagatcccattctatgtcatatatctcgtttgggaaccctttgagtgctaagtcacat

SEQ ID NO: 12751 - DNA, 524 bp, Gossypium hirsutum
  Clone ID: LIB3829-006-Q6-N6-H8
aagtgttcgtgtcgaacatctttattagactcctattatggcatgggaatggcattacaaatcttcaaaatcatagaaacttagaaagaaatgaaaacgcccatctgggtcacatattactatcccacacttgcatctgagttaacataaacggtgatcatcatcctgtaatcttactttcaacaagagggaataatttttcttagacacgtacatgaaagctccatgcaattaccagggacgaactctcaagtctgtccagaagcgtaaaggggcttaggttcaacttttcttcggatccaattatcttctgcccacttgcagccatcagtatctaccgcatgcaagctgtatgcatgccgtgaatttgaagactgattttcaaaactttgatgaataaggtcaccatgaattacaaccaaagacccagcttttacttcaataggcacaaaatctttctggtcatacgatggggacggcctatcaaagtaaactccatcatcacccctaatgaaccttctaac

SEQ ID NO: 12752 - DNA, 141 bp, Gossypium hirsutum
  Clone ID: LIB3829-006-Q6-N6-H9
aaaaaaaaaaaagcgggggccaagggggggaaaagaccccccccggaaaacaggggggcaggggaaaaagggcccaaagccccccccccgggaaaacaggggccacggggatcgcgggctttccccgggcccggggggccc

SEQ ID NO: 12753 - DNA, 574 bp, Gossypium hirsutum
  Clone ID: LIB3829-007-Q6-K6-A1
acgcacaaacatagcagcaggattgaagcgagattcgaatggcgcccaggccaccaacgaaggcgatggagggggacggcgacggcgaccaacccaagccccaagttaaggggaaacgttgaaaagagtgactaggagcatggcaaagcagccgcaccccgagtctctgcccaccaaggagaagccaaaagcgaaggccaagaagcagaaaaaatctgcagatgaggatggagccaaagccgaagctgcgcctgaggagttggccgtcgctgacggtgggtctcacaacaagactgtagtggttgaacactgcaagcaatgcaattcattcaagacaagggcctttcaagtcagagatggtttggagaaaggtgtcccatgggtcaaagtgttgctcaaccctgaaaagccaagaagaggttgctttgaaatccgagaggaaggtggcgaaacattcataagtctgctggacatgaagagaccatttaaaccgatgaaggagcttgacatggagaaggtaatctcggatatcattgagaagattaaatgaggtgaccatgggtgtgtagacgta

SEQ ID NO: 12754 - DNA, 582 bp, Gossypium hirsutum
  unsure (1)..(582): unsure at all n locations; Clone ID: LIB3829-007-Q6-K6-A10
gccattttcctctccctttcttcaaaaaaaggnanaatctatggcgagcggcaacgggtcaggacccgaatcccgatgattataaaggcgtcgagttctggaccaacccggaacgagccggttggttgaccaaacaaggtgattacatcaagacttggcgacgccgttggttcatcttgaaacaaggcaaactgttatggttcaaggatccggcttcagtcagccgccgatcttctcctcgcggtgttgtttcagtaggatcttgccttaccgtcaaaggagctgaggatatcgtcaataaggcattcgcttttgagctctctactcgagattccaccatgtatttcatcgctgatacggagaaagagaaagaggattggatcaattcgatcggtcgatctattgttcaacattcgagatccgttactgattctgagatcgttgattacgatagcaaaagcaggtgatttttctgaattttttgctctcttttttaattttaatttttcgtctttttttttaatatgtgctgtaaattttggcttgtagaaataaagactaaaaatacttgtgcctgcttta

SEQ ID NO: 12755 - DNA, 573 bp, Gossypium hirsutum
  unsure (1)..(573): unsure at all n locations; Clone ID: LIB3829-007-Q6-K6-A11
gcgttcggttccaatttagaaaaagatagtcagcatttatcaccggttcaaccaaccaaaatcgtttgacttccattgatttaactgcaacaccaacttctttagaattgagtaatcaagagtctgaatcaaaaatttgagtaagctngatggaaaaaagagcagatatggtgtcttcaccaagccattgcttatcagaaaaagaaacttctttcgagcagtccttagacttccctacaaatcagcatgatatgggaagcctggatatagttgaagatggttcaaatatttcacatctcctgtccaatcagatacaaaattcttttactcattccgaccaaggcttttcaagtaaaccttcattggagttttcacagcaatcagattggcaaagtaagcaagaaagatatccatcaggttctattcatcctgcctttggcctgcttccagaggcaaccaaagttagcatggaggaaatgcctccattgccgcctcttcctccaatgcagtggaggttagggagaattcaacatgtttctccagcttcacaaagagaattggtcgaacagggtc

SEQ ID NO: 12756 - DNA, 567 bp, Gossypium hirsutum
  Clone ID: LIB3829-007-Q6-K6-A12
gcgttcgctcaactaatgcatgctatggagggactgcagctttatttaactgtgtcaattgggttgaaagtagttcatgggatggacgatatggtcttgttgtctgtactgacagtgcggtctatgcagaaggacctgcccggcctactggaggagcagcagcaattgctatgctaatagggcctgatgctccaattgcttttgaaagcaaattacgtggaagtcatatgtcccatgcctacgacttttacaagcctaaccttgctagtgaatatccggttgtcgatgggaaactttctcaaacatgctatctcatggctctcgatacttgctacaaatatttctgtcacaagtatgagaaactagagggcaaacagttctctctttctgatgctgcatacttcgtattccattctccgtataacaagcttgtgcagaaaagcttttctcgtttgttgttcaacgacttcttgaggaatgccagttctgtcgatgaaattaccaaggaaaaactggctccattctcaactttgaccggtgacgaaagctaccaaagccgggatcttg

SEQ ID NO: 12757 - DNA, 564 bp, Gossypium hirsutum
  unsure (1)..(564): unsure at all n locations; Clone ID: LIB3829-007-Q6-K6-A2
tttgcccaaacctgcagcagcgatctacaaagcaatttttttcccagtaaaatgggattattgagagctgctggtgtggtttacaagccagtagagcaacttgatcttggtcctgacagtaacgagatatatgtcgaagccgatatcaaagctcctcgcatgggaggattgctggcaaaaatatttgcgtggattctggagtcaaggatatttggagcattggcgttctacatattgaagaggctgaatcgagttcacaagtttatctcgaatgcaacggtggaggaaccacccatgtttgttccattgcatccttatgttgaccttgatgagcaagaagtcatagagattgattctgatgcatctccagcagaaagagttcaacaggctatgaattgccttcctttaacctcagagaattcactagatgctttcaaattcagctgtttccggcgttggacaatagcggattattcaagagcctatagaaatggggaaataactccattgaaggttgcagaagcggtttatatantgctgttcatgaatcttccagtcgtcctt

SEQ ID NO: 12758 - DNA, 567 bp, Gossypium hirsutum
  unsure (1)..(567): unsure at all n locations; Clone ID: LIB3829-007-Q6-K6-A3
ggnagtgatgtcttgtctttcactgttgcaggtgtatagtaaaatgatggggtgatggagtactttgatgaagtgaaagtttcagttgatgatgaacttgctttcttggaggtgttggagggatttagttgcatgaataagatttgtatcaccatattttgtcacccctctgttngaaaagatattcagctcatactccaaacgatcatgcattagaaaattaaaacttatcgattgcacgggattgacttcactacgtgttgtccatgcgttaccaaatttagggaaacttgagatatttcgttgttgttcacttcgagaaatcagattttcatatcgggatgagtttcacaaccttcgtcaggttcacgtaggtgtttgcccactgttgccaaacctgaattgccttgcttatgctagaaatcttgagatcctcacaattctcgactgtcagtctatgaaacaagttataagtgaggaggagatagcaggagatggacaagatacaagtgaggggagggtactattcaaagtcttcccaaagttaaagatgctttctctgacttg

SEQ ID NO: 12759 - DNA, 580 bp, Gossypium hirsutum
  unsure (1)..(580): unsure at all n locations; Clone ID: LIB3829-007-Q6-K6-A4
ggnatgtgctgctcctgttccaaaagtctttgtgtaagaccctcaatgcagatgtcgatcagcagggagcagctgcggggcgtcttgtggctgcgcattggccaagtgcacgaataataaaaagttcctttcaaattggacgacataccacaaccaaagatgcccgaagatattgttgaagaactgaaaggcacgattcatgatactatcctgattcaaaataaaactgttaaaaacattcctgatacaaatgaagactgcggatctagaaagcagccattacgagagattgggaacacaatggtcaaaccaactgctgcaaaacttgaccctagaaagaaaggccaaaaaacagtcattcagcctgatactaaggatcagccattacctgtgatagaaaatacaagaggaacaagaagaacaaacaaaatttcaggttagcccttatagtattttttccaagtaccccggaaaattatctgaaagtgtacgagttacttgctcgaaagcattgtactcaggcgaactatagcattggctactagaggtattcctttactaagtttcacatgggattttg

SEQ ID NO: 12760 - DNA, 563 bp, Gossypium hirsutum
  unsure (1)..(563): unsure at all n locations; Clone ID: LIB3829-007-Q6-K6-A5
ctttcattgcttccttgcctgccttaaacctccttcaagcatagccatgactactagaatggtaatggttgatgaagtcccttttcctccacaaatcacaactaccaagccactatctcttttgggtcatgngaattaccggacattagaaattcactttttgcaaatcaagttcacagcaattggggtttaccttgaaccagaagttgtaggacatttgcaacaatggaaggggaagcctggggacgtgctagctgaagatgatgacttcttcgaggctcttattaatgctccagtggagaagtttctgagagttgtggtgattaaggagatcaaaggttcccaatatggagtgcagctagagagtgctgtgagggaccgattggcagctgacgacaaatacgaagaggaagaggaagaagccttggaaaaagttgttgaattcttccagtctaaatatttcaagaaggattcagtcatcacttaccattttccagcaaattcagccactgctgagattgcattcacgacggagggaaaggaggaagcaaaaatcaaagtag

SEQ ID NO: 12761 - DNA, 570 bp, Gossypium hirsutum
  unsure (1)..(570): unsure at all n locations; Clone ID: LIB3829-007-Q6-K6-A6
tccggnaaaaaaaataggctttggnatatctgtgtcaaggctgctgttggtgcccctatgttcttggagactgtccattctcccatagagctcttcttactttggaggaaaagaantttcctacaacatgcaccttatcaatatcagtgacaaacctcaatggtttttggagataagtccagaagggaaagtaccagtggtgaagtttgatgacaaatgggtggctgattctgatgtaattgttggaatccttgaagaaaaataccctcagccttgtctcaaaacccctcctcaatttgcctctgttggatcaaacatatttggaacttttgtcacatttttgaagagcaaagacgctaatgatggatctgagcaggctttgcttaatgaactcaaggcattggatgaacatcttaaggcacatggcccattcattgctggggaaaagataagtgcagttgatttagctttgggaccaaaactttaccatcttgaggttgctcttggccatttcaagaaatggactgttccggaaagcttgactaatgtccgcaattacatgaagtcgat

SEQ ID NO: 12762 - DNA, 579 bp, Gossypium hirsutum
  Clone ID: LIB3829-007-Q6-K6-A7
cggccgcgtggggtgcgttggcccttggcgtgaggcgtacggggctgtgttgtcgtggttgttggagactggggcgtacggaggcgatgtggttgctgcttgtgaaggctgcgacgcgaggacccttctgccctagggtttgccgaagtttggcttggctttcgggctatgggtcatgtaactggactaatgggtttcaatggggccgggcaaattggcctatttacagaagccaccagccttatctccccgaagtagcaatagagcagattgaaattgaagatcttatctctcttaagtagcagtggagcagattgaagttgaacatcttatctccttgaagttgcagtggagtagatcagatatgacgaatcttatcttcttgaagttgcagcgaagcagattgaagccaccggccttatctccctaaagttgcagcggagtagacggaagtcacaagtcttatctccctaagatgcagcgaagcagactatagatagtgaatcttatttccctgaagttgtagtggaataggttaaagctacaagtcacaaatcttatacttctgaagttgcacta

SEQ ID NO: 12763 - DNA, 569 bp, Gossypium hirsutum
  unsure (1)..(569): unsure at all n locations; Clone ID: LIB3829-007-Q6-K6-A8
gcgttcgcccatntcgtgctcgtcaatatgatcaggaaaagagtgatttgctccaaacagacggaggagattttttcacttcttatgatgaagtttatgacagtttcgatgcaatgggacttcaagagaaccttctgaggggcatctatgcatatggttttgagaagccctcagcgattcagcaaagaggaattgttccattctgcaagggtcttgatgtgatacaacaggcacagtctgggaccggaaagactgcgactttttgctctggaattttgcagcaacttgattacggtatagtccaatgccaggctctggttttggcacccactagggagttggctcaacagatcgagaaggtgatgcgggcacttggtgattaccttggtgtgaaggtccacgcttgtgttggtgggactagtgttcgcgaggatcagcgaaatcttcaaagtggtgttcatgttgttgttggtacacctggtcgtgtcttcgatatgttgagaaggcaatcactccgtccagattatattaagatgtttgtcttggatgaggctgatgaaatgctctcc

SEQ ID NO: 12764 - DNA, 560 bp, Gossypium hirsutum
  Clone ID: LIB3829-007-Q6-K6-A9
cacttcttttttttcttttcctctctaaaccctatttgatctccaaatccttcgagatctccaagcttcgtcaccccaaatggccacgacacgcagatcccttcctcttctgagaaccctcatatgccggaaaaacccaaacccgaaacgtgacgtacatgccccgaccaggagatggagccccaagactcgtaacgttaatccccggagacgggatcggacctttggtgacgaacgcggtggaacaagtgatggaagcgatgcacgctccggtttacttcgagaagtacgatgttcacggtgacatgaaacgggtaccacaagaagtgttggattcgataaagaagaacaaggtttgtttgaaaggagggttaagaacacccatgggaggtggagtcagttcattgaatatgcaattgaggaaagaactggatctatacgcttcattggtcaactgttgtaacttacccggattgccgacccgccatgaaaacgtggatatcgtcgtaattagagagaacactgaaggggaatactcgggtcttgaacatgaggtggtg

SEQ ID NO: 12765 - DNA, 584 bp, Gossypium hirsutum
  Clone ID: LIB3829-007-Q6-K6-B1
ggtactcatgaagcgaaaacaatcagaggatctgctcctgaacttgataacgtttcttccgagcctgcaaccaaggaggatggaagcaatatctctgttgctaataacattgcagatgacagttgaaaatgtgatcatgaagaagctgctcctgaactcgataaggtttcttctgagcctgcaaacatggaggacagaaacagtatctctgttgttcataatgttgcacatcgatgacaagtcgtgttacaaacggttcctgaacatgataaggtttcgtatgtaaatactgtaaaagtctgtagaaacaaagggtagtaagctatcagcattagcggaaccgttcaatcccggagcactctacattgctgttacaagtgtttatgatgtaacagactgtcaagctatgcttgctgagcctgttattgaacctgcagttgcagctcgagttcgttgcggaccgatgttcccattatatcacggaaacaaccattcttacaacatgaaacaaggctttccgagataccaaactctcgaacaaactgagttccgacctccgcgagttatgaaccctcatgcactcg

SEQ ID NO: 12766 - DNA, 267 bp, Gossypium hirsutum
  Clone ID: LIB3829-007-Q6-K6-B10
caaacaccttctttccgataaaaaaaaactcaagagagaagaccatggccgatcaacttacggacgatcagatctctgtgttcatggaggcttttagcctctttgacctgggtggccatggttgcattactctcttcggttcgtcgctttccgtgttgccctctctcttctggttgtgtgctgggccccgtggcgctccgttctctcctgctttctcgtcctggtcctgggtccgccgctgctgtgtctcctcctgttgtgctggtg

SEQ ID NO: 12767 - DNA, 589 bp, Gossypium hirsutum
  unsure (1)..(589): unsure at all n locations; Clone ID: LIB3829-007-Q6-K6-B11
gcgttcggnaaaaaaatcatacgcaatgagcactgctggtcaggttattcgttgcaaagctgcggtggcatgggaggcggggaagccactatcgatagaagaagtggaagtggcaccaccccaaaagcatgaagtccgtattaagattctcttcactgctttatgtcacactgatgtatactactgggagtgtaagggttacactcctctgtttcctcgtatacttggtcatgaagcctcagggatcgtggagagtgtgggtgagggtgtgaatgatttgaaacctggagatcatgtgctccctatcttcaccggagaatgcaaagaatgtcgccactgtctgtcagaagaaagcaataacatgtgcgaactgcttaggatcaactgcgaccgaggtgttatgcttgctgatgggaaaaccagattttccatcaacggcaagcctatctaccactttgttggaacctcgacctttagccaatatactgtcgtccatgttggccaggttgccaagatcagtccaaccgcccctcttgataaagtctgtcccattagctgtgggatatgtacaggttttggggccactgtg

SEQ ID NO: 12768 - DNA, 579 bp, Gossypium hirsutum
  Clone ID: LIB3829-007-Q6-K6-B12
gcttctttatattctggtcagctaagcactctcgcaactaaagactcatatccgttcggcattatctttccaggcttagaatggagacctttctattcacatctgagtcagtaaacgagggtcaccctgacaagctttgtgaccagatctctgatgcagtgcttgacgcctgcctcgctcaggaccctgacagcaaggttgcctgtgaaacatgcaccaagactaacatggtcatggtgtttggagagattaccaccaaggccaatgtagactacgagaagattgtccgtgacacatgccgctccattggatttgtttctgatgatgtgggtcttgatgctgataactgcaaggtccttgttaatattgagcagcagagtcctgatattgcccagggtgtccatggccactttacaaagcgtcccgaagagattggagccggtgaccagggccacatgtttggttatgctactaatgagacccctgaacttatgcccctaagccatgtcctcgcaactaagcttggggctcgtcttactgaggttaggaagaatgggacttgcccttggctaaggcctg

SEQ ID NO: 12769 - DNA, 560 bp, Gossypium hirsutum
  unsure (1)..(560): unsure at all n locations; Clone ID: LIB3829-007-Q6-K6-B2
agagctgtgggctcnacttgatatttttagctttcagttaaataagtagataatataatataagaaaccgatcagtgcatatttgaagcatttatttgcagtgctgtaagactaaagtttgtggggtaaaattttgtgatcctcgcgttatttaaaaacccttgtgttcacaagagacatctcttattagcttttgcaggctggtgagagaagaaaaggaaagaagagaggtttattctttaacaagtaaggtacatggtacattcactgtgcagctgagttagaaaccttgttattgaaagatttgtgtagaatgtatatttgaggactgcctctctttgttaactagttaacttgttgagagtagctagctttagtggtctaatattctttacgggcagcaatgttgagttgtaattacattttgtatcgataatatctgtcctcgttgctgtcttatttggctttatcactagacggtaacagggatattgtttgtattcactttccgacccctttgaggtcatttttatttacaggaatggttggtctttttttgt

SEQ ID NO: 12770 - DNA, 577 bp, Gossypium hirsutum
  Clone ID: LIB3829-007-Q6-K6-B3
ctttcctcctccccccccgggcccttttttccttgtttagagaaaaaggagttgatggaccttttcattatcggtttggcacttattttcatccgtctatggtggcggtactcgtcggtcactggcggtggccctaagaacctccctccaggaccgcctcgttggccattcgttggaaacctgatccaaatcattctccaacgtcgacatttcgtctttatagtaggtgagctacgtaaactatacggtccaattttcaccttgcgaatggggcaacggaccatggtgattgttacagattcgagtctcatccatgaagctttggttcaaaaaggccacactttcgcttcccgtccaccggactccccgatccggctcgtgtttagcgtcggaaaatgcgctatcaactccgccgagtacggacctctctggcgaaccctgcgcaagaacctcgtcaccgagcttataacccctacgagagtgaagcaatgtagttggatccgcaaatgggcaatcgaaaaccatatgaaaaggatcaaaagtgaggcttttgagaatgggttcgtggaggtaatga

SEQ ID NO: 12771 - DNA, 590 bp, Gossypium hirsutum
  Clone ID: LIB3829-007-Q6-K6-B4
caccatggtggtccagtgggttcgaagtttcccttcttctgcagtgacagagaatacttgataggtcgtcggatttggtcatgtggtcggacatattactgtgttacaaagggagtaccatatccctctattcctagaaaaaccaaacctaggcgtgttgatttatactattcaagttggtgcattcgtgcagctgaatcaaggaaaggggatggccagctgactgcgtgcgaggtattactttttcaccatgaaaatatgggtataccatgggaaattgcaaagcttggggtcaagctaggcatgtggggaactgtcaggaagattgaccctggcttacgtgcatatcaaaccgaaagagcatcgggagcgcccctttctcattcagcttccatggctcaaataaacaccaaagtaactcaagactatctgacatccttggaaagcaatagtaatgattcatcagagcttgaaacacacaattcgtctgagaaaccagggaagaacaacattcccaaacttgtagttgttggtggggctatcgcggttgcatgtattctagatcgagggctcttaaccaaagctgttat

SEQ ID NO: 12772 - DNA, 581 bp, Gossypium hirsutum
  Clone ID: LIB3829-007-Q6-K6-B5
ccaaactgcaaaaactctccattttttatcaaagtctctagacacgatgggatctgaatctaaagttgtttgagttactggtgcctctgggttcattggttcatggctggtcatgcaggctactcgacacggttacactgtccgcgccaccgtgcgtgatcccgatcatcaatagaaggtaaagcacttgcttgatctaccaaaagccaacacccatttgacattgaggaaagctgaatttatctgaagaatgaagctttgatgcagacattaatggctgatgaggtgtcttacatgttgccactccaatggattttgagtccaaggaccctgacaatgaagcgataaacccaacaataaatggagtattggatataatgaaagcatgcatcagagcaaagacagtcaaaaaattgattttcacatcatcagctggaactgtcaatgttgaagaacaccaaggaactgtttatgatgaaagtaattggagtgattcggaatctgtctatgccatgaaaatgactgtatggatgtattttgtctccaagacattggctgagcaagctgtctggaagtttgca

SEQ ID NO: 12773 - DNA, 581 bp, Gossypium hirsutum
  unsure (1)..(581): unsure at all n locations; Clone ID: LIB3829-007-Q6-K6-B6
cggccgcgtgggngaaaagggatttggggctttaagaagttcgttcgaccactatgtcggactctcctatcccaggcttcccctgcttctggaactatgtcgactctcccctcttatttgtgcccaaaaccctgtttgaattcccttttgtgtgggtctatttaccgccaatctccatggatcgcgatgtccaatcagttgcatagcttaactgatactcgtttcccaaagagaaggcctcaagacaagccacgccgaaaaagagccagcttgagaccacctgggccatatgcatgggtgaagtatacaccaggggagcctattcttccaaataatcctaatgaagggagtgtcaaaagaaggaatgagaaaaagagaatgaggctgcgccgtgcgtttaaattggcagaggcaaagaagaggaaagctcaattgcaggaagctaataggaagaagaagattaagcaagtagagcgtaagatggctgcagtggctagggatagagcatgggccgaaaggctggtggaactgcaggggcttgaggaagagaagaaaaaggccatggcttgaaatttcacttg

SEQ ID NO: 12774 - DNA, 591 bp, Gossypium hirsutum
  unsure (1)..(591): unsure at all n locations; Clone ID: LIB3829-007-Q6-K6-B7
gcggtcacaatatttcgggtttgtaggttaatatgggaaccacggtcaaggggttgtgctgtcgctgttcatctcgtcccttttgtgttctgtagtacttgcatccaatgatgggctggttagaattgggctngaaaaagatgaaattggatccaaacaaccggcttgctgcgcagcttgactcaaaggatagagaggctctcagagcatctattgctaaaaagtatcgcttccgtaatgatctaggagactctgaggaaactgatattgttgcactgaagaattacatggatgctcagtactatggtgagattggtatcggaactccaccgcaaaagttcactgtgatatttgacacaggaagctcaaatctgtgggtaccatcaactaagtgctatttctcggttgcatgtttcttccattccaagtacaagtcaagtgagtcaagtacttataagaagaatgggaaatctgcttctattcaatatggtactggagctatttctggtttctttagtaatgacagtgttaaagtcggcaacttggttgcgaaagatcaggaatttatagaggctactaaggagccaggtg

SEQ ID NO: 12775 - DNA, 582 bp, Gossypium hirsutum
  unsure (1)..(582): unsure at all n locations; Clone ID: LIB3829-007-Q6-K6-B8
gnttagctcttcacaaatgcaggacaggtccatgcagctaaagctctgattaaactcggactagaagactgtttccaagggataatctgctttgagacactcaatcctacccataagaatacagtttctgatgatgaagatgacattgagtttctgggatcagccgttgctacaactgatgtcccgagcagccctgaaatttttgacataattggccattttgctgagctaaagccaggaccaagtgccacattattacccaagacacccattgtctgcaagccacaagaatctgccatagagcttgctctcaagattgccaaaatcaaccctcagagaactttgttcttcgatgatagtgtccgcaacatccaagcaggaaaatgcgttgatcttcacactgtgctgagacctaaaggagcagattatgcattagaaagcattcacaacataaagcaggcattaccagagctttgggaaacagacatgaaatctgaagtcagttactctggccaggttacagtggagacaccagtgacagcttagattccatgttatttattacttgttttaatatttatg

SEQ ID NO: 12776 - DNA, 577 bp, Gossypium hirsutum
  unsure (1)..(577): unsure at all n locations; Clone ID: LIB3829-007-Q6-K6-B9
ggnatattganagaatagatagactttgctcgtgttcaaaaggagctacaagaatgtagcagagaaaaagatcttcgggcattagggtctctccaaatcagacaatcttgctcgcttgactggcatcatccctggtccccttggcactccttatgaagggggctcctttgaaatcgatatcacattgcctgatgggtatccatttgagcctcccaaaatgaagtttgtgacgaaagtttggcacccaaacatcagcagccaaagtggggcgatatgcctggatatattgaaggaccagtggagtcctgcactcactcttaagacagctcttctttctgttcaagctttgctttcagctcctgaacctgatgatcctcaagatgctgtagtagcacaacagtatcttagagagtatcagacatttgttggtacagctcgttactggacagaaagttttgccaaggcctcttctttaggggttgaggaaaaggtacaacgactcgtggaaatgggttttcctgatggtttggtgagaagtactctagaagcagttgggggtgatgaaaacctggccctt

SEQ ID NO: 12777 - DNA, 588 bp, Gossypium hirsutum
  unsure (1)..(588): unsure at all n locations; Clone ID: LIB3829-007-Q6-K6-C1
tctcactctcctgttttgctgcctttaccaananagaatgaaaccaaaatttctgttactcttccttgtattatgcagtctcactatagacaacgttttagcaacctctcttggaactcatgccaaaatacccgacaatgaaacaatataccgagtctccaagcaacagtgttggggttgtattggagagtcactagagttcctattcactcacaatttggtgagggcaaccaaatgggagccactcttgttttgggatttccagcttgagaaatatgcccgatggtgggcacttcaaaggaaagcagactgcaagctacagcattcgtttccagaaggagatttcaagctgggagagaacatatactggggcagtggctcggcgtggaggcccagtgatgcagtgagtgcctggtccgaggaagaaaaatattacgactatgcaaccaactcgtgccaggagggacagatgtgcggccactacacccaaattgtttggaagaatacccgacgaattggctgcgctcgagtggtttgcgacactggagatgtgttcatgacttgcaattatgatccgccgggtaatta

SEQ ID NO: 12778 - DNA, 593 bp, Gossypium hirsutum
  Clone ID: LIB3829-007-Q6-K6-C10
caatggctgactctgctttcaaaaaagttcagattcagagagatgacactgcatttgatgcatatgtggttggcaaagaagatgcacccggaattgttgttcttcaggagtggtggggtgtggattttgagataaaaaaccatgccttgaagatctctcaactgggcccaggattcaaagctcttattccagatttgtatcgaggaaaggttggtcttgatgttgcagaggcacaacacctaatggatggtcttgactggcaaggtgctgtaaaggatatctgtgcttcggttgattggcttaaagctaatggttcaaaaaaggttggagtgaccggattttgcatggggggtgctctctctattgcaagttctgtcttagttcctcaagttgatgctgttgctgccttttatggggttccttcacctgaactggcagaccctgcccaggccaaagcacctgttcaagctcattttggagaacttgataactttgttgggttttcagatgtgacggctgcgaaggctttggaggaaaaactgaaagaatcaaaaactccatatgaggtgcatatttatccaggcaatgcacat

SEQ ID NO: 12779 - DNA, 567 bp, Gossypium hirsutum
  unsure (1)..(567): unsure at all n locations; Clone ID: LIB3829-007-Q6-K6-C11
aaccggctcctttgcgcggtctgcttgacaccaaggccctgagattcgaactggattccntgaagggatggaaaagctgttcaactgaaggaaggccaggatattaccgtaacaaccgattacgatattaagggatatgagaagatgatctccatgagctacaaaaagctggctgttgatctgaagcctgggaataccattttgtgtgcggatggtacaatcacactttcggtgttatcctgtgatcctgctgctgggactgtgagatgccngatgtgaaaacacagcgatgatcggtgagaggaaaaatgtcaaccttcctggtgtcgtggtggatcttcccacactcactgagaaggataaagaagacatcttgggatggggagttcccaacagtattgatatgattgctctttcctttgtacgcaaagggtctgatcttgtcaatgttcgtaaggtcctcggtccccatgctaagaagattcaattgatgtcaaaggttgagaatcaggagggtgttatcaacttcgacgagatcttgcgtgagactgatgcatttatggttgc

SEQ ID NO: 12780 - DNA, 573 bp, Gossypium hirsutum
  Clone ID: LIB3829-007-Q6-K6-C12
gtcattttgactacaagcttggtggtattgacaagcgtgtgattgagaggtttgagaaggaggctgctgagatgaacaaaagtcatttaagtatgcatgggtgcttgacaagcttaaggccgaacgtgaacgtggtattaccatcgatattgccctctggaagtttgaaactaccaaatactactgcactgtcattgatgcccctggacaccgtgacttcatcaagaacatgattactggtacctcacaggctgactgtgctgttctcattatcgactcgaccactggtggtttcgaagctggtatctcaaaggatggtcagacacgtgagcatgctttgcttgcgtttacccttggtgtcaagcagatgatttgctgctgcaacaagatggatgcaacaactccaaaatactccaaggcaaggtatgatgaaattgtgaaggaagtctcctcatatcttaagaaagttggttacaaccctgacaagatcccatttgtcccaatctctggatttgagggtgataacatgattgagaggtctaccaaccttgactggtacaagggtcccactct

SEQ ID NO: 12781 - DNA, 568 bp, Gossypium hirsutum
  Clone ID: LIB3829-007-Q6-K6-C2
ctcaactaaacttataacgttcgatcgtttaacgcaaacccatttttaagtgggggaaaggtttaagttcagagtcataagcaacatcaatggctccttcaactctgacggctcttgcggaagagaaaaccttgcaggcaagcttcgttcgtgatgaagatgagcgtcctaaggttgcttacaaccaattcagtaatgatatccctgtcatctctcttgctggtatcgatgatgttgatggcaagaggggtgagatatgcaagaagattgttgaggcttgtgaggattggggtgtcttccaggttgtggatcatggtgttgatactaaactcgtgtccgaaatgacccgttttgccagagagttttttgctttgcctgctgaagagaagcttcggttcgatatgtctggtggcaagaaaggtggtttcatcgtctccagccaccttcagggagaagcagtgcaagattggcgggagattgtgacatacttttcatacccattgaagagcagggactattcaaggtggcctgataagccagagggttggattgaagttacaaaggagta

SEQ ID NO: 12782 - DNA, 574 bp, Gossypium hirsutum
  unsure (1)..(574): unsure at all n locations; Clone ID: LIB3829-007-Q6-K6-C3
gnaaaactgataatgttccgccaggatgctgaggtatcaatcggaagagcggttagattttggaattcaaataaaggagaggaccgtgagcgagttggaacaagcagcaggcaaaaataaaaattcacgcacaaggcagggtcgagaagttttgcttctgtagctgaggccgaggaagtcaaatccggacaaaaagttggacgccttcagctttttgagattacgcataggaagaaagatggatctcctatgacatccgaagctggagaaattatggagaaactaaaggagaagaaggcggaatatgaagcgattgcttcgagtgatagttctgttaatcttgagaacattgataatagaattatcactgaagttttgggtcctgaaaggtacggtcgggttcgatttcaaggatctggtgttaccccgacccaatattttggatccggctcccagcaatacatgccttccggaagtcaagctcaagttgaagttcagaggttaagagaccagatagcttagatgcaagcaaacacggttgagcaaattgccgaggttcaacgaaaatatgaag

SEQ ID NO: 12783 - DNA, 585 bp, Gossypium hirsutum
  Clone ID: LIB3829-007-Q6-K6-C4
cagaatcaaaatctctctttctcgtcatatggcagcaaatggcgttgtttctgacaagagcttgatcgtcagcttcggtgagatgctgatcgattttgtccccactgtctccggtgtttctctagccgaagctcccggcttcctcaaagcccctggcggtgctccggctaacgtggccattgctgttgctagactcggaggcaaagcgtcatttgtcggaaaacttggggacgacgagttcggtcatatgctggccgatattctcaagcaaaacagtgtctccggtgacgggatcttgtttgaccaaggcgctagaactgctcttgccttcgttacgttacgcgccgacggagagcgtgagttcatgttctataggaatcctagcgccgacatgctgttgaagccggaggagttgaacgttgatcttatcagatcttccaaggtatttcactatggatcaataagtttgatcgtggagccatgcagatcagctcatttaaaggcaatggaagtagccaaaggagctggtgcattgctctcatatgatccaaaccttcgcttgccactttggccttcagctgatga

SEQ ID NO: 12784 - DNA, 565 bp, Gossypium hirsutum
  unsure (1)..(565): unsure at all n locations; Clone ID: LIB3829-007-Q6-K6-C5
cggccgcgtgggcttngacagcctcttctcctacacgatagtatgtactgtccttttaactgttatttttttgctctatgcaatgagttccgacttttttctcttgaaatatcaatttaagaggacaactcaccttaccttctggttttattattattttcattcaatcttttcaggatatgactgctagaaattatattaaccagaaggttgaagtggtgactgggactgcaactgttgactatttggaccaattggataaagcacttgcgttattagttacaaatgccaggtagcggggagtaattttgcccccgagttgattgtttacaatgctggaactgatattctcgatggagatccactgggtggattaaaggtcagtccagagggggtgatcaaaagagatgagaaggtcttcaggtttgctcgtgatagaaagatccctattgtaatggtcacatcaggtggctatatgaaaaccagtgccagagtcatagcagattccattataaacctctcaaatgaaggcttgatagagacaaatgtccacagcggaagaaaa

SEQ ID NO: 12785 - DNA, 577 bp, Gossypium hirsutum
  unsure (1)..(577): unsure at all n locations; Clone ID: LIB3829-007-Q6-K6-C6
gnatgatccttcgcttggngtactgctgattggagctgttcaacctttcttggattattttgttgctgatttcgactggtctgcggcatgtgtagaagaaagcatcaatttcttggagtgcttgcctggcttgttcaagccactagctatttttaaaatattggaatctttgctaaatttgttattatctgcaggtttttaggctttgcaccagcttgtaagatatcgtacggtttcatctggaaatgtcattttcaatggaagaagtggaaattaagcattctggagctgaagagcttagctatcagcaacaaaatgaaagctgcgaagcatttgaagaagaggcgaggggatcattctcatcacagtcaggtggaatttgtgtggataaacaagaatcaaatgatgcagaagcaactgaattgctggacaaggggtttatggagtatggttgcccacattatcgaagaaggtgccggattagagctccctgttgtggtgagatatttgattgtcgtcactgtcataatgaggcaaagaacaatatcaatgttgaccagaagctcagacatgatct

SEQ ID NO: 12786 - DNA, 591 bp, Gossypium hirsutum
  Clone ID: LIB3829-007-Q6-K6-C7
ctccgaaaacccaaaacaatgatttacccatgatttccactaaaaacccatattctttaacagttcaaagatcccaagaaaccaggagagatgctcaaagttatcaagctttcagtcaagatcaatattcaggtctttccaccatcaaaatcctggtataaaacccaagacccaatttttaaaccctgttataggaaccaaccttggtgaggtttctgtcaggaagggcaagaaaaagaaggaaagtttatggcaacaaggctgtcaagaaatgttgggtttgtgtgggttgggatattgggttcagggttttaggtgtttcccatggttggctttgaatttccacatggcttataaccttaacttgaacccttcaacattgcagcttgtgcagaactctggcaacctacccatggtagctaagcctctgtttggaattctctcagatgctctctatattgggggtgctcataggataccttatatttgcattggaggtcctgtcttggggtcaattggctttgtttccagttgcaggtcaagcgcttcctgccctcatggcttgtgttcttctcagtaatacaggggcag

SEQ ID NO: 12787 - DNA, 566 bp, Gossypium hirsutum
  unsure (1)..(566): unsure at all n locations; Clone ID: LIB3829-007-Q6-K6-C8
ctttctatggnatgatggaaagtgtttgctttngaaacgattgtgaagttgaatgaaggatttgatcgattttttgaaagagagcttgaaattcttggaagcataaaacatcgataccttgtaaacttgcgaggatattgtaattcacctgcatcaaagctgttaatctatgattatctagcaggtggcagccttgatgaagctcttcatgaacgatctgagcagttggactgggaaacacgcctgaacgttatcatgggagcagcaaaaggaatggcctatttacaccatgattgttctcctaggatcatacaccgtgacataaagtccagtaacattttacttgatagcaatttggaggctcgagtatcagactttggacttgccaaactgttagaggatgaagaaactcatattacaaccattgttgcaggaacatttggttatttggctccagagtacatggtaagcgggagagcaactgacaagacggatgtctatagttttggagtcttggtgcttgaagtcttaagtggaaagagacctactgatgcatcattcatcga

SEQ ID NO: 12788 - DNA, 568 bp, Gossypium hirsutum
  Clone ID: LIB3829-007-Q6-K6-C9
ctcaccaaagcagcgaacacaagaagagaagaattatcgaaggagaacaaagtccaattggctgagcctgaggaaaagaagtgaaggtggagaactccccctcatctttatctccggttctgtcggagaatgaggggtcgacagaatcttcacctttgtcggatcttaccttctcggacttcaacgagcagccatggcctgaagttattacttcgtcggagtcttttatgttgtccaaatacccatcatatgagatcgattgggattctattctaaaagcttagtttaatgtaacaacagatgttttccttgtgtatttattttttgtaaagctcactgcaattgagtttttggtagttgcagtgacaggttctttaggttattattaaagtctgtttatgagtttagggttcttagtattatcgtgtaagtcttaatgtttataagaatttataagatgttctccatggttgtcagctcgttttttcttgctggaccgaaaggagaaatttgttagcgtccataaaagttccatagcttctgtaatttgaatcctattaatgttatt

SEQ ID NO: 12789 - DNA, 591 bp, Gossypium hirsutum
  Clone ID: LIB3829-007-Q6-K6-D1
aaaaaatgtttttgtttttaaaatataaacttacgacatctacaaatggtgacctcagtgctacctagagtagaaagcttggcaagcagtgggattcaatcaatcccgaaagatatatcaggcctcaagaagagcttacaagcataggtaacgtgtttgaagaagagaaaaaagagaagggcctcaggttccgaccatcgatttgacagaaatcgagtcggaggacaaagaggtccgggaaagatgtcagcaggagctgaaaaaggctgccatggaatggggtgtgatgcaccttgttaaccatggcatctccgaggagctcatggatcgtgttaggaaagttgggcagaaattctttgaactccctgtggaggagaaagagaagtatgccaacgaccagagctctgggaatgttcagggctatggtagcaagcttgctaacaatgctagtgggcagcttgagtgggaggactacttcttccatcttatttttcctgaggataagagagacttgtcaatttggcctaaaatccccagcgaatacactgaagttacaagtgagtatgcaaggcaactgcgaggcctagcgag

SEQ ID NO: 12790 - DNA, 595 bp, Gossypium hirsutum
  Clone ID: LIB3829-007-Q6-K6-D10
tccgcccagcgtccgcggccgcgtgggttcccaaactgtcgttactcagcagccataccatccctccccgacctttactccaccttcctccccgaaaccataactttccaatcttcaccttcaaacccattttccttcccctttctcctcccattaaaccctcaaactccgtctccaaaccccccaaatttatccctttagcttccatttctcctcccccggcaacaccctgcaaatctcccgaaatcccagctctgtccccactcgacggttcaactcgaaccctcaaaacctttttctccttggccctctctgccaccatcgtcttcaccaaaatgatccaaaattatgctctcaaaacaatctcccagaaccccaacgcactttccaccgtgggccctctcttcttcgcttccttaaaggaccgccctagcggatacctcaacacgcctttgactgtggttgcagcgggattagctaagtggcttgacatttacagtggggttttgatggttagggttttactcagttggttccctaacattccctgggaccggcagcccctttcggctattagggatctatgtgatcctta

SEQ ID NO: 12791 - DNA, 599 bp, Gossypium hirsutum
  Clone ID: LIB3829-007-Q6-K6-D11
tgcatatgttatgattggagttggctgcaatgacgaattaagggaatcatccactggagctattgatttaattgattcatttgataaacagcctatggccacctttgcaatttctagcttaagtgatggtgcaaaaaagttagaattttctccacagttggagctttctttaagaagaccttgttcaaggagcgcaaagagtcaaggtaccaatgaaaagcatatactaaaccattctgatgcatcgcctttttcatggtataacagtaggaagtcattactgcctattttccttacactagatggcaaccgcgaagagggtaacagcaaccccagacaagacctagaaaggatgaggatggatgacgtgcatgctggatgtaatgatgtttccccacacttttatcatgcaaaatcaagtttaccccctgcatgtggtccaaaacaagttggaaagcaagaatattctccccttcctgtgagcacctcagtgcattcagaccctgatgttgatgactcagaacagtgttaccgctggtgtgatgaagctaccaattcttctaatgatcaaactcttcaagggcagaacaagcaggagc

SEQ ID NO: 12792 - DNA, 581 bp, Gossypium hirsutum
  unsure (1)..(581): unsure at all n locations; Clone ID: LIB3829-007-Q6-K6-D12
gtgcttcttccaggtagatgctcctcgggataatcttgcctctttattatcgtcctccttnttcatttctgatgttccagggnacccatttgaaaaggcaaaagctgctgcatctgttgaggacaagtggctccttgtcaacttgcaatctaccaaggagttcagctcacatatgcttaatcgagatacttggggaaatgaagctgtttctcaaactgttagcaccaactttattttctggcaggtatatgatgacacaagcgaggggaggaaagtttgcacctattacaaactagattcaattcccgtagtgctggttattgacccaatcacaggacagaaaatgcgctcctggtttggaatggttcaacctgagagtttgctggaggacctggttcaattcatggatggtggcccaagggattatcatgcaactctgtctcataaacgtccaagaggaagctcagttactccgcaacaaaaaattaaagtgtcaacagatgaaaccaatgaagataaggaaatgttgagagcaatagcggcttctatggagaatgcgaaagactctattaaaacaactg

SEQ ID NO: 12793 - DNA, 595 bp, Gossypium hirsutum
  unsure (1)..(595): unsure at all n locations; Clone ID: LIB3829-007-Q6-K6-D2
caanaattaaaaacacataattaagaacaagttaaatatttatcatacaacttcagaaaataataacaagattagtcttaggtttcattccccttaggtatttaggggatttatttcataactaaaaggaaaacatctcagaataataaagaatacaaaacataaagaaaacccaaaactcctgaaggggaaattgaggaaagatcttcagtcttgatggtgaactcggcttttgagatggatcaattggctttctttgagtaattccttactcactattctgtgtctcatttttcttcctcctctagggtgtatttataggctttggaatgcctaagagccctcaaaattatcctttttccgaattggactcaacttgggctcggcaaggacacgcccctgtgacacgctcgtgtgcgattgcttcaggccgtgctcgagcctgccaaattgacacggccgtgtggtctgcccatgtaaggacgtccaggccgtgttgattttgtactttggcctattttctccgattttggcccgttgctcgttcctttcgctctcctatactctcctaagtataaaacatgaaattaaagca

SEQ ID NO: 12794 - DNA, 573 bp, Gossypium hirsutum
  Clone ID: LIB3829-007-Q6-K6-D3
cataagccacccctgaggacgcatgttcggtttggtgttagggaacacggaatgggagctatctgcaatggcattgcccttcacagccctggcctgattccatactgtgctactttctttgtcttcactgactacatgagggccgccattaggatttctgccttgagtcaggctagagttatctacgttatgacccatgattccattggtcttggggaagatggaccaactcaccagccaattgagcacttggcaagcttccgtgcaatgcctaatgttttgatgctccgtccagctgatggaaatgaaacggctggagcatacaaggttgctgtcctcaagaggaagacaccctcaattcttgccctttccagacaaaagctaccccaattagctggaacttccattgagggggttgaaaaaggtggctacatcatttcagacaattcttcaggcaacaatcctgatgtaattctgattggaactggttctgagttagagatcgctgttaaagctgctgatgaactaaggaaggaagggaaggctataagggttgtctcccttgtttcatgg

SEQ ID NO: 12795 - DNA, 608 bp, Gossypium hirsutum
  unsure (1)..(608): unsure at all n locations; Clone ID: LIB3829-007-Q6-K6-D4
gnggaaactctacagctactctctttctcgtcaaaatttactccaattagtctctggatttaggtcgatggtcttcataagcggaatcttagaaggagctcaaggtatctacagaaaagatcctcctacctcttgcagtgcacgccctgttgctgaagacatgtttcattggcaagcgactattatgggtccacctgacagtccatatgccggtggagtgtttctagtcaccattcatttccctccggactatccatttaagccacccaaggttgcattcaggacaaaggtctttcaccctaatattaacagcaatggcagcatttgcctcgatattttgaaggagcagtggagccctgccctcaccatatccaaggtattgctctcaatctgctcacttttgacggacccaaatcccgatgatcccttggtgccagagattgcccacatgtacaagaccgacagggctaagtacgagacaactgctcggagctggacccagaagtatgctatgggttagtgtgctaatatgcatataataggagggctttattctatgaggctttgatcttcaatttaatatgtatgaatcaatgaaacagtatgtg

SEQ ID NO: 12796 - DNA, 592 bp, Gossypium hirsutum
  unsure (1)..(592): unsure at all n locations; Clone ID: LIB3829-007-Q6-K6-D5
gnagcatttggtcggttcgaatatggaaactaccggaaagtaaagaaggagccggaggaaggaaggtggtggcccgaagaagaagcccgtttcaaggtctgtcaaagccggtctccagttcccagttggtaggatcggccgttacttgaagaaaggaaggtattcacagcgggtcgggaccggagccccggtttacttggctgcagttcttgagtacttggccgctgaggttctggaattggctgggaacgctgcacgtgacaacaatgaaaaacaggatcatcccaaggcacgtgctacttgccgtgaggaacgacgaagaattagggaagcttctcgccggcgtaaccatcgctcacggtggtgtgttgccgaacattaacccagttcttttgccgaagaagactgaaaaggccgccggcaaagaacccaaatctccatcaaaggccaccaagtctcctaagaaagcttaaattgatttaacaaaactagatccacagggctttatttttcttagttgtatgtccttttggggggattgttttcacagtgcagggggagactgctttaagcaaaatggaagcattgttag

SEQ ID NO: 12797 - DNA, 583 bp, Gossypium hirsutum
  Clone ID: LIB3829-007-Q6-K6-D6
cggtcgcgtgggcggacgcgtggggttgtgttgagcgtcctaaggttgttcgcattcaaggaaaaaagagatccttaagcagaggttgaaagtcccaccagcactgaaccagtttacaaagactcttgataaaaaccttgcaacaagtctgttcaagttgctcctcaagtataggccggaggacaaggcggccaagaaaggaacgtctcctgaagaaagcccaagctgaggctgaaggaaaagctcccgaaacaaagaagccaattgttgtaaaatatggactcaaccacgttacctacctcattgagcagaacaaagcacaattggtagttattgctcatgatgtggatcccatagagttggtagtatggctccctgcattgtgcataaagatggaggttccatactgcattgtgaaggggaaatcacgtttgggatcgattgtccacaagaaaactgcttccgtcttatgcttgactactgtcaagaatgaggataagttggacttcagcaaaatccttgaggctatcaaggcaaacttcaatgacaaatacgatgagtaccggaagaagtggggaggtgg

SEQ ID NO: 12798 - DNA, 583 bp, Gossypium hirsutum
  Clone ID: LIB3829-007-Q6-K6-D7
caaagtctgtactcagattggcttatgtgttttaaatgggactcgctatatgaggtttctctttctcctccttactttatatgtttctaaagaagataatttcgatttatatatcatagctagacgagttaaaatgtgacacaaaagaaggcacttttatgatattggtgtcaaaaatagttcatttctaatcttatatggtaatagataattaaacataattttacgatattgattagttttattagtgattcgctgcaccttgagaagcttgccttgtgtttgactgatgtttggttcaccttgtgagcagcagtggaattaaaatagtggttgagaaggaaaacatggaggagttgtcagctcgggaccgactgttgtgcaccacctgtcagatgactgttttttggattcagagtcagcttaaacaaaagggcacgaaagacacagttctcaactacgtgaatgagctatgccagagcctaccaagtccaatgggagaatcagtaattgactgtgctaggatttcattgatgccagatattacattcataataggagacaaaccttttaagctcactcc

SEQ ID NO: 12799 - DNA, 587 bp, Gossypium hirsutum
  unsure (1)..(587): unsure at all n locations; Clone ID: LIB3829-007-Q6-K6-D8
cgctccttctcgctgcgatttcgtcttcaaaatctcagttctcaaatcgtagcgctcttttctatcaagccatggctctgatcttgcatgcagngaaaaacaaacaaaaatgcctttaaggcactcattgctgcagaatatagtggtgtgcaggtcaaaatggttgagaattttgagatgggtgtgtcaaataagactcctgagttcatcaagatgaaccctttggggaaggttcctgtgttggaaacacctgagggtccggtatttgagagcaatgccattgctcgttatgttgctcgctcaaaggttaacaaccctatatgtggttctacattgattgattatggtcatatcgagcaatggattgattttgcagccttggaaattgatgctaatattgccaaatggttgtatccaagacttggttacggtgtttaccttcctccagctgaggaagctgctattgctgcattgaagagagcccttggcgctttgaacactcatcttgcttccaacacatttcttgtgggacatgctgtcacccttgctgacattatcatgacatgtaatctctacttgggtttctt

SEQ ID NO: 12800 - DNA, 582 bp, Gossypium hirsutum
  unsure (1)..(582): unsure at all n locations; Clone ID: LIB3829-007-Q6-K6-D9
catcttcataatcttgcttgcttactgcatttaaagaaacanaggaactcaatgacccaacccacgctttttcctttattttcttcctaacaaacnnatgcttgtctctggnaaaacacataccaactactttacaaggtccatttcatcctataactatccatttcgatccgtctttacgtcgaggcagcgatgacatacccatggatgatccaaggctgaagaagaatgtgacctctatgttccctgaacaaattgctcttgctttatccactccaacttcaatgtgggtgtcctgggttactggggatgcacagattggtcccaatgtgactgcacttgatcctacatcagttgccagtgaggtttggtatggcaaagaaagtggcaagtatagtagcaaaaagagaggaaatgcaactgtttatagccaattgtacccctttgaggggctcttcaattatacctctgccatcattcaccatgtcagaattgatggcctggaaccagagacaaaatattactacaggtgtggagatagctcacttccagctatgagtgaagagcatgtgtttgaaactt

SEQ ID NO: 12801 - DNA, 461 bp, Gossypium hirsutum
  Clone ID: LIB3829-007-Q6-K6-E1
gtttttatactaagagtaagatagtgtttatctccctctactaagaaggcaaattggtcatatatctacagatcagaatagcaaaatggtcattctctttcaagaactaatccatttctactggcattaggtacacgtggcacatcagcacacatgacattgtttggttattccctaaatcacgctagaccttaacactacaaatagctgaaatttttaacaaacaagattaatttgctctttcatgctatcatataaattgacctatccatttgactaatatgagcaaaatatatttcaactcctaatataagggtcttcatgagattttcataatatcgccgtaagtagcttgcgatagcattacaccccgaatgttaccgtgaaaaagtgctacttcaacacatgtattctttagaaaggctgttacgcaaaatcggctactaaattttcttgaataa

SEQ ID NO: 12802 - DNA, 587 bp, Gossypium hirsutum
  Clone ID: LIB3829-007-Q6-K6-E10
caaaaaccctttccattttccctttatttcctttgccgcccctagggtttaattacattccgcacatggcttctgcagatgtcgagtaccagtgctttgtcggaggtctcgcatggaccatcaacgaccgtgctctcgaagaagccttcagtgcttacggcgagatcgtcgattcgaagatcattaacgatcgtgagactggaagatccagaggctttggcttcgttactttccgtgatgagaaatcgatgagagatgctattgaaggaatgaacggtcggagtcgatggaaggaatataaccgtcaacgaagcacaatctcgccgaagcggcggcggaggtggtggtggaggatttggaggaaaaggtgggtacaaccgtggtggaggcggtggatatggtggtcgccgtgaaggtggatatggaggtggtggatacggaggtggacgccgtgatggtggtggatacggtgatggtggatctcgttactcaggtggcggcggttcttgggcttaggttaaggcgttttagggtttgagtgagcttcggcgcttattttagggtttaatgggtttgcttgttagtga

SEQ ID NO: 12803 - DNA, 327 bp, Gossypium hirsutum
  Clone ID: LIB3829-007-Q6-K6-E11
gttttaaatgaaataggtggagattccctgggcgtcaacctcgaccttttggacagtcaccacggtcaccctccggacatgctgagatgggtggatggcagtcatcaggttctccacaaatggcaggtggacagcaattttcaggaccttctcaaatgccagggcagcagtcattgtcatggagatcaacttagatattatgcagggtgaagggtttcattcagtttgtcaccctggaactgatctgttttgcgcatctgtttttgtgatggtttagctattcttgtattcgaggagatctctcaaatatatttgaaagtttgatac

SEQ ID NO: 12804 - DNA, 552 bp, Gossypium hirsutum
  Clone ID: LIB3829-007-Q6-K6-E12
cccagcgtccgcctctttctcttttctgtctctctctcaaccacaaataagaagaaaaggacgcaaggcagaagaaatggaacagaacgtacctgtcatgaccaaaagatatggagcattgtaaaagcagttctcttcatgatgaggaaaggtcttttatctaagaggaagctcatggttgatcttaacgtgatgctcaaacgcggcaaaatcgccggtgccaaagccattggcaacctcatgttccaccaccacagcaaccgccaggtttcatcatcctccacggcggaggcgactgcaacggcagtccaggagtacgagttcagctgcagcaacacccccaactacatcttccctttcaacctcgccgccaagaagaaaaacagctactaccaccatttcttcgcctgcacccacgcgcctcctactctcgacgacgacaacgtggccaccatgaacgcccttaaggttgccttggagatgatcaacaagaacgacggcaacaacagcgtggttgctgcttcccccatgttaccagggttcggacaaacc

SEQ ID NO: 12805 - DNA, 444 bp, Gossypium hirsutum
  unsure (1)..(444): unsure at all n locations; Clone ID: LIB3829-007-Q6-K6-E2
gngtgcttgtactagtgctagtttggagccatcatatgtgctgagagccttgggtgtggatgaggatatggcacatacttcgattaggtttgggattggaaggtttactactgaggaagagatagatagggcagttgagcttactgtgaaacaggttgagaaattgagggaaatgagtccactttatgagatggtgaaggaaggtattgatattaagcagattcaatgggcgcagcattgatgaaatgttgaatattggtgaggcagttttggatatgaattcagtgccaaaagaatattttgcactgccagccaaagttgcttaagcagagctagaattgtatggctgtatcctggttttcttttcttgtccatgtacatgccttgagagctttcttagataatttatatgattagagagtaaatcttgcatcctattttgat

SEQ ID NO: 12806 - DNA, 557 bp, Gossypium hirsutum
  unsure (1)..(557): unsure at all n locations; Clone ID: LIB3829-007-Q6-K6-E3
gcaaactgctagnaaatcaaccggtggtaaggctccgcgtaagcagctggccactaaagctgctcggaagtcagcaccggcgaccggaggagtgaagaagcctcaccgtttcaggccaggaactgtagctcttagggaaatcaggaagtaccagaagagcaccgaactcttgatccgaaagcttccgttccagaggcttgtgagagaaatcgctcaagattttaagactgatttgaggttccaaagcagtgccgttgctgctcttcaagaggctgctgaagcttaccttgtcggactgttcgaggatactaatctatgtgctattcatgctaagagggttaccattatgcctaaagatatccaacttgctaggaggattagaggagagagagcttaggtctgttagtttttagttgattgattcctagaattagaaatctgtacttttttgttcattttgttgtatttgcagtctctgcaaatcattaatgaaattctatggaattttaacggtttcatgaaattgcaacatattcttcaagttgcgaggttcaaaa

SEQ ID NO: 12807 - DNA, 102 bp, Gossypium hirsutum
  unsure (1)..(102): unsure at all n locations; Clone ID: LIB3829-007-Q6-K6-E4
taaaatttgtgtngaataatggnaatcaaannncacttaaagtttgattttcttttcataatattttataaatagtgtaatgacgcgtcaactggtaaggtt

SEQ ID NO: 12808 - DNA, 575 bp, Gossypium hirsutum
  Clone ID: LIB3829-007-Q6-K6-E5
ctcagcttgcgtctaagtgattcttcgccgatccttctcattttcctgttgatcagatctctcgccacaaatctcttggagattttttagcatgctgttcgattgaaagagtctctatttatgattctaagaatcattagaagcaccaaatggtcaagactgctacctggttatataggtttactattggtgaggttcttgcggtaaaggttacagatcagaaccttgatgtttgggcaaactcgctagcatctgtgcctgatgccttgtgccattactattatcagtacctgtcttcaagttcggaagctgctgagggaatcttatgcattggctttctcaaacgttctcgccagcaaaaggaaattacaagggaacaagcagttcaagatctagagataataagagaagaacttgaacaattgctgttggcagaaagggtatgagagaatgtgggtgattaagtcaaatggagaaaggtacatcatgtctttgttgtgtgcaagtgttttctccctgagacaggcaaggaacctgacatcaagaatggttcaacttaaagatgcttccttgta

SEQ ID NO: 12809 - DNA, 556 bp, Gossypium hirsutum
  unsure (1)..(556): unsure at all n locations; Clone ID: LIB3829-007-Q6-K6-E6
gttcagccttcatgtaagggcgcngagcaatacaatccaaatgaaactgatgaccgcattgaagcttagcccatgaccgatccccattatcagtttcatttggattgtattggttcagccttcaatgtaaagggcgcgatgcaatgcccaaattgtagaaaaattgagaaaggtcaatggctttatgccaatggttgccgttcgtatccggagtttaatgtggatgattgggcacatgatgaggacctttatgacctaagtttctcagaaatgtcatttggagttcactggtgtccatttggaagcttagcacgacttcctacattcgaggaaggagagttatcatcaaccacatatcatgaattactgggacagaatgccatcttttctgaacattcagcacctgctgctcatccatgcccatatgtagcttactttgggcccacagttcatccatcatcctcaaattccagtggnaagtgtttcagatagttctagttacaataatcactggaatggtccatcagtgcctggtgaggtacctgcatcatatgct

SEQ ID NO: 12810 - DNA, 202 bp, Gossypium hirsutum
  Clone ID: LIB3829-007-Q6-K6-E7
ggtttttctaggatgggaccactctgaatgggaaagtagcattagctctatcttttgtgttcacctcttaaaaagttattaaatttagattccaatttctggatattaaggagtctgatttggcatgtgaaataagatgcctgatttggtatgtgaatttgaagttgttggtgaattgatttctccaaatctatataaccat

SEQ ID NO: 12811 - DNA, 575 bp, Gossypium hirsutum
  Clone ID: LIB3829-007-Q6-K6-E8
ccctaattaattcccgtcgcggtatccaaatttcttttctttaaccaagtttcaaaattcaaggcctaatctaatctgaacgttttgcttcccatcgacgttcgacttccctgtgatccttgtaagatagtataggatggaaaatctgcaatatgccgaggagcttgtgagggaatttttggtcttcagaggatttacaaatacattacaagcttttgagactgagagatggctctgttcttaagtgttacatagatcatgcattgcaatctggcaggaaagataaagttgtggagtttttcggaatgaatgggaatgatttgctgctaaagggttctgattggacagcttggtttgccattccttatgtgaacaaccctagcatcaatcctcagtttcgtgtatatttctccaaggaatggtatgaagctctccgtctttctgtgacgaactttttcagcgagatcttcaatgggactcttaatgatgggattttgacgaatgtccttaaccaaagcacgccttcctgccctactgaagatcagttcagaaaagatacaattagctggcttaag

SEQ ID NO: 12812 - DNA, 595 bp, Gossypium hirsutum
  unsure (1)..(595): unsure at all n locations; Clone ID: LIB3829-007-Q6-K6-F10
gtggnaaatcaattagcttcttcttttttttcactttcaagctctcatggctcccattattgaatctgggtggctgtatctgatcacgcatttcagtgacttccaactagcaagtctaggaagtttctttcttcacgaaagtgttttcttcttatccggacttccatttatatatctggaaagagctggattgctgagcaaatacaagattcagacgaaaaacaacagccttgctgctcaggaaaaatgtatcacccgcctgcttctgtatcacattggtgtcaaccttccgcttatgattgcatcttatcctttcttcagattcatgggcatgaagagtagtctgccatttccatcctggaaagtggttctgtcacagataatattctatttcatcctggaggattttgtgttttactggggacatcgttttttacatacaaaatggctgtacaagcatgtgcacagtgttcatcatgagtatgctactccatttggactgacatccgagtatgctcaccctgccgagatattgttccttggctntgcaacaataattggtccagccatcactggcccacatcttattactctc

SEQ ID NO: 12813 - DNA, 589 bp, Gossypium hirsutum
  unsure (1)..(589): unsure at all n locations; Clone ID: LIB3829-007-Q6-K6-F11
ccccgcgtccgctggntttcagggtttgatatttaacaagcaaatcagatgggacgctctagatgaacttgaagaagggttagagttcctaaaagagctcctgtgtcttttggaggcccggttttaagacgtgggatgccctttgttactttaagtaggagagttagtgaagtgcagtacgttgaagtacttccaggtatctacttccttgaccaatttgccacggttgctaatatcgaaaagctaaaggccggaaatcagacgatgagtgactactggtttttctttggttacacgggttggggctggcaccaactgaatcaggagattagggaaggtgcttggactgtaagcgatgataatgagagcttagattggccgttgaattgagagtatttcgaatgtcaaaggtagttggacttgtacggacacaagggaaatggaaaaaaggggaaacatttcttggctaagcttgtaaatatgagattttggtagttcactttctcttgtaacaaaattttggattgtgttttttgaaattttagatttcatttttctacaaaggttttctaaatgatgctcaccaata

SEQ ID NO: 12814 - DNA, 575 bp, Gossypium hirsutum
  unsure (1)..(575): unsure at all n locations; Clone ID: LIB3829-007-Q6-K6-F12
atttgccttaatcatcttcctctttctttaaaacctcttcctatttaatttccgactaaacttgcgctngaattccatggctactgcagaggttgtatcagctcagactgcaatccatgaggagaaacctgaagaagtggtcaaggttggagaaattgcaacagaagaggtaccggctgttgctcctgcagcagaacctgttgctgaagaaccaaaggaagcagtgcctgaagcagcatccggagaaccccaggctccagaaactgaagccacagttgaaactgaatcaaaggaggtggttaaagagcccaaggctgtgactgaggagccagaagttgagaaaaaagaagaagagactcctaaggaaacggtagcagagccagttgccgaggagtccaaggagtccaaggagacttctgagccaacagttgaagaaaccaaagaaagcacagagtctacagaagcagcagcagcagcagcagcagcagcagcagaagtaaaagcagaagccgaagccgccccagtggaagcacccaaagaggaagctgcaaaggaagaagagaaaccagctgaag

SEQ ID NO: 12815 - DNA, 587 bp, Gossypium hirsutum
  unsure (1)..(587): unsure at all n locations; Clone ID: LIB3829-007-Q6-K6-F2
gnggatctctcagctactttttctctcaaaattctccaattagctctggtttaggcgatggcttcaaagcggatcttgaaggagctcaaggatctacagaaagatcctcctacctcttgcagtgcaggccctgttgctgaagacatgtttcattggcaagcgactattatgggtccacctgacagtccatatgccggtggagtgtttctagtcaccattcatttccctccggactatccatttaagccacccaaggttgcattcaggacaaaggtctttcaccctaatattaacagcaatggcagcatttgcctcgatattttgaaggagcagtggagccctgccctcaccatatccaaggtattgctctcaatctgctcacttttgacggacccaaatcccgatgatcccttggtgccagagattgcccacatgtacaagaccgacagggctaagtacgagacaactgctcggagctggacccagaagtatgctatgggnttagtgtgctaatatgcatataataggagggctttattctatgtggctntgatcttcaatttaatatgtatgaatcaatgaaacag

SEQ ID NO: 12816 - DNA, 565 bp, Gossypium hirsutum
  unsure (1)..(565): unsure at all n locations; Clone ID: LIB3829-007-Q6-K6-F3
cttgntctcctgagtcatggacttcttgaagattgctttggtggtcatataattgaaggttatggaatgaccgagacatcatgtgtcataagttgcatggatgagggtgatattctttctggccatgttggctctcctaatccagcttgtgaaataaagcttgtggacgtcccagaaatgaactacacatcagatgaccagccttatcctcgtggagaaatctgtgttaggggtccaattgttttccaaggatattacaaagatgaaatgcaaacgagagaagtacttgatgaagatggatggcttcataccggagatatagggctatggcatactggtggccgtctaaagattattgataggaagaagaacatttttaagctggctcagggagagtacatagctccggaaaagattgaaaatgtatatgctaaatgcaaatttatagcccaatgttttatatatggagacagccttaattcttcattagtagcaattgtgtcggtggaccaagatgctcttaaagcatgggcttcatctcaaggcattaagtacaaagatttag

SEQ ID NO: 12817 - DNA, 591 bp, Gossypium hirsutum
  Clone ID: LIB3829-007-Q6-K6-F4
ggcgacccaaacccggccccgccacaaactccgtggggtgaattagacgaagacgacggcgaggatttggatttcttgttgccgccaaagcaagtaatcggacccgacgagaacgggatcaagaaagtgatagagtacaagttcaacgatgagggaaacaaggtcaaaattacgacgacgacccgggtccgaaaactcgctaatgcccggctcagtaaacaggcggtggagcgaaggtcttggcccaagtttggggatgctgtaagggaagatgttggtagccgactcactatggtttccactgaagaaatcctccttgaacgacctagagctcctggtagcaaagcagaagaaccgaaggctgccggagattccttggctcaactaggaaaaggaggtgctgtccttatggtgtgtaggacttgtggtaagaagggtgatcactggacatctcggtgcccatacaaggacctcgctctgccggctgagtcattcgtcgataagcctgcagtacctgaaactgcaactgctgctgctggatcagggaagaatacttatgttcctccaggtatgagagccggagctgataga

SEQ ID NO: 12818 - DNA, 586 bp, Gossypium hirsutum
  unsure (1)..(586): unsure at all n locations; Clone ID: LIB3829-007-Q6-K6-F5
ttcattgntttttttcagttatcatcgcttatttctttgcaacattttgatattggatgaaaacagcgaatgtttattgtcgaagttaactaagtcattggtttagtggcaaaagatctccgttggttgaaactagatcctggaatcgtcacgacatatgaccgcctgttttattattgatgctttngaaaacaaaatgctttaacatctggagtacttaagtggggtgcattaggggggaattatcggaggagcgactgttaagttttgagacagttattcggtaatatgctctatgaatgcatggcaaagagttcaaaggatatgctgtactgtatgtgatttacttaaagtagttctttatgattcatctttgcctgcttgttttagcctacaaatgaactgaatatgccccgcaggaaaacatatatggctgcctttgcaactgccgaggcctgcgattcaaacacagcgcttttggcaagcggtgaactgcgtgctctagaaccgattttcaagatatacgggcaacgtcgttcattctcaggacccattgtaacactcaaggtgtttgaggacaatgtcc

SEQ ID NO: 12819 - DNA, 567 bp, Gossypium hirsutum
  Clone ID: LIB3829-007-Q6-K6-F6
cggccgcgtgggtttcaccaatataatggtggaggaaaactgcagctgcccctgcaaacagcctgagcaaggagtttgggccaaaattaaaggagcatatgcagtattgcattgatcatcctgaggagatcagtaagattgccaaagtgaaagctcaagtttcagaagttaaaggagttatgatggaaaacattgagaagttaaccaatttttttcaggttctggaccgtggtgagagaattgagcttctggtggatagaacagaaaatcttcgctctcaggcacaagatttccggcagcagggaacccagatgaggagaaagatgtggttacagaacatgaaggtaaagcttatagttctcggaatcttggtcgctttgatcctcatcattgtactgtctgtttgtcacggcttcaaatgttcatgaattgtatgtgcgctctacattccatcggcaactccaagatcagaattattgcaatcacaagtaatgtctaatgctctttctagttagatttccttggttcttttttttttttttggaaatcacatgtgggttatgtata

SEQ ID NO: 12820 - DNA, 596 bp, Gossypium hirsutum
  Clone ID: LIB3829-007-Q6-K6-F7
gccataagcattcgtaacttcgccgccgttgattattatcttcaaaaatacgctgcggcaactaagtgagttggtgcgaagatgagtcgtggtgcagcagtgggacccaagggggaagaagaaaggagcgacctttactatcgactgtgctaagccggttgaagataagatcatggacattgcctcactcgaaaagttcctccaggaacggatcaaggtaggcggcaaagccggtgctcttggcgactccgtcaccgtcacccgcgacaagaccaaaatcaccgtcacgtctgactccaacttctccaagcgttatcttaagtacttgaccaagaagtacttgaagaagcacaatgtccgggattggcttcgagtgattgcttccaacaaggacagatctgtttacgaactccgctacttcaatattgccgagaatgaaggggaggaggaagaatgaagaatcagttccacattttttttctagtttactgctttattatttcttaggaacgtcttttatctatttaaggtgtcatgttctgcttttttccttcagaccttactctaatttgcaatgaaattttgattgctgatag

SEQ ID NO: 12821 - DNA, 593 bp, Gossypium hirsutum
  unsure (1)..(593): unsure at all n locations; Clone ID: LIB3829-007-Q6-K6-F8
gttggatagctcaaatcccaagctcatgaatgaatcaagnatgatgcgaatagcgcgggggtcaggacgtcatattcgagaggtaatggaaatgatggaggagtacaagcggctagcaaagatatggagcaagatgaaggggctgaaaattccaaagaagggtgaaatgagtgcgttgtctcggaacatgaatgcacagcacatgagcaaggtccttcctccgcagatgttaaagcaaattgggggtatgggtgggttgcagaacttgatgaagcaaatgggttctaccaaagacatgatggggatgtttggaggtggtggggacaagtaatgtaattttccacacccattccaaggctctactttggactgctaatgcaggacaggattctccatgttgaagacaaagagaaagaatatatgcatatccccaagtgcaaactgtgttttccagcacaggcatctattgtgattttgagatatataatttctttactatatttcaacatttagaattttaacagttcaaatttctccttttgtacgcatttagatgaacatagaagtgtttgggactgaaccttttacaaatg

SEQ ID NO: 12822 - DNA, 576 bp, Gossypium hirsutum
  Clone ID: LIB3829-007-Q6-K6-F9
tcgcccagctccgaaattttatttcctcgcagccaaacagatttacctcttatctccgaatcatctcatctatggctcgtaccaagcaaacagctaggaaatcaaccggaggaaaagctccgaggaagcagctagctacaaaggccgcgcgtaagtccgctccggcgaccggtggagtgaagaagcctcaccgtttcaggccaggaactgttgctttgagagagatccgtaagtatcagaagagcactgaactgttgatcaggaagcttcctttccagaggttggtgagggaaatcgcgcaagatttcaagaccgatctgaggttccaaagcagcgccgtcgctgctcttcaagaagcggcggaggcttatcttgtcggactgtttgaagacactaatttgtgtgcaattcatgctaagagagttacaatcatgcctaaggatatccagcttgctaggaggattagaggtgagagagcttaggttgcctgtatttacttgattgattataaaatttagaaagatctagatcttggatttagtttctggaatttgctttctcggcaaaatctttatg

SEQ ID NO: 12823 - DNA, 52 bp, Gossypium hirsutum
  Clone ID: LIB3829-007-Q6-K6-G1
gggggggggggggggggggggggggggggggggggggggggggggggggggg

SEQ ID NO: 12824 - DNA, 590 bp, Gossypium hirsutum
  Clone ID: LIB3829-007-Q6-K6-G10
aaaatatctgctttttcttagttttcctttttgtcccttgtttatttgatatttccccctcatggccgccgctgatgtcgagttccggtgcttcgtcggagggctcgcatgggccaccgacgaccgggccctcgaagaagccttcagtgcgtttggtgaaatcgtcgaatcgaagatcattaatgatcgtgagactggaagatcccgaggctttggattcgttactttccgtgacgagaaagctatgagggacgcgatcgaaggaatgaacggtcaaaatcttgatggaaggaacatcaccgtcaacgaagcccaatcgcgcagaagtggaggcggtggcggaggatttggaggaggaaacggtggttacagccgcggtggaggcggcggcggatatggtggtcgccaaggaggatatggtggcggacgccgtgaaggtggatacggaaatggtggagggtatggtggtggtgggtacggaggtggacgccgtgaaggaggatatggtgacggcggatctcgttactcaaaaggcggcggtgcatctgaaggcagctggaggtcttaagtttaggtttcaaagtgggcta

SEQ ID NO: 12825 - DNA, 556 bp, Gossypium hirsutum
  unsure (1)..(556): unsure at all n locations; Clone ID: LIB3829-007-Q6-K6-G11
ctggncactttcagnaagtattcagttaatgaagaagacttgatgttgtttgggtcccgggtagttttgaaataggtattgttgcagaaggctgggcaagtctcgaaattatcatgcaattttatgtatcggagctgtgataagaggagatactactcactatgatgccgtggctaattctgttgcatctggggtgctttcagctggcctaaactcaggtgttccttgcatatttggtgttttgacttgtgaggacatggaccaggcattaaatcgagctggtggtaaatctgggaacaaaggtgcagagtgtgctttgacagcgattgagatggcttccttgtttgatcaccatcttaagtagcctcagcattatccattacatgatgaacttgtgttgttgctgtgggatcattctatttggggagtttacggaaaagcaaaacggtaaacatagatagatcctggaactctaattctcaattttctttttatacactattcttgttgatctaataaatgaccaatgcttttgctttcttttatttatatgttg

SEQ ID NO: 12826 - DNA, 503 bp, Gossypium hirsutum
  unsure (1)..(503): unsure at all n locations; Clone ID: LIB3829-007-Q6-K6-G12
attttatggttgtaatgcaagaatagggtgactctcaacttgcatgatatacacaaatttaaaaattagagacttttatggttgtaatccaagatacgttgacgtagtctaacaaggtgataattttatttgatatagactattcaatattnaaaaaaaattgaaatcatattgaaggcggaatttgaggtttagatgtaatgggttaaaaggataggcatagtcattacttttgatgtttgatcataacaaactttggataactaaaatccttacttatccaaaaaataatatgcaaccaaaaagaaatgaaaatgtattgaaagggtagattttttgtttaattttttgaaccgtaaattattaaacttttgatgtttagaatgatttttctcttagcaatttagttattattattttttaaagtaatcgcaacttcattttttattttaatttttatataataaatgattaaataacagaagctatgggatttctaaggg

SEQ ID NO: 12827 - DNA, 565 bp, Gossypium hirsutum
  Clone ID: LIB3829-007-Q6-K6-G2
cccagctccgcctttccactccatgggagataaaagaacggaaacagcaaggaggagcggatgggaaaaagaaggaaatgagttcttcaacctctgttttcaaatttgagtgtctctgtgatggttgtgcttccaaaatcctcaaatgcattaatcaatttgaaggggtggagacggtgaaaccagagatgagctcaaacaaagtgacggtgataggaactgcggatcccactgccattaaagagaaactcgacaagaaaacgaagaagaaagttgagctcatttcttctcaacccaagaaagatgataacaaagaggaaaaaaaagagaaaaaacctgaccatacagaaaaaccaggattctgataataaatcagacaaaaaacccaaagaggccccggtaacgacggcggatttgaaggtgcaattgaaatgccagtgtgatggatgctttgataggattagcaaaattgtctctgaaaccaaaggtgtccaagagttgaaagtagacaggcagaaggagatggtcacagttaaggggactatggatgttaaggccttggctg

SEQ ID NO: 12828 - DNA, 564 bp, Gossypium hirsutum
  unsure (1)..(564): unsure at all n locations; Clone ID: LIB3829-007-Q6-K6-G3
ctctgnttaacaggctggcataagcacactatgtgaaattccactggaagcccattgtggggtcaaatgcttgctggaagatgaggcaatcaaggttggaggagctaatcacagccatgccactcaggatctctatgactcaattgctgctggcaactatcctgagtggaagctcttcatccagacaattgatcctgaccatgaagataaatttgactttgaccctcttgatgtgactaagacctggcctgaggacatcttgcccctgcagcctgttggccgcttggttttgaataagaacattgacaacttcttcgccgaaaatgaacagcttgcattttgccctgccattgtggttcctggaatctactactcagatgataagttgctccagactcgtatattctcctactctgatacccagaggcacagacttgggccaaactatctgcaactcccagccaatgctcccaagtgtgctcatcacaacaatcaccacgaaggttttatgaatttcatgcacagggatgaggagataaattacttcccttcaaggtacgatcc

SEQ ID NO: 12829 - DNA, 588 bp, Gossypium hirsutum
  unsure (1)..(588): unsure at all n locations; Clone ID: LIB3829-007-Q6-K6-G4
ctttgttgaatgtgacaccataaacaanagcatccgaatttaggattagattattgacaagttatagtctattgttcttgatgcgtaaagatgaaatgactaatgattgattaagttttgacggtggttaactcttgaaacttccttctgttctattaaccacccaaggcacccaaacatcagcagccaaagtggggcgatatgcctggatatattgaaggaccagtggagtcctgcactcactcttaagacagctcttctttctgttcaagctttgctttcagctcctgaacctgatgatcctcaagatgctgtagtagcacaacagtatcttagagagtatcagacatttgttggtacagctcgttactggacagaaagttttgccaaggcctcttctttaggggttgaggaaaaggtacaacgactcgtggaaatgggttttcctgatggtttggtgagaagtactctagaagcagttgggggtgatgaaaacctggcccttgaaaagcttttatccagctgatctgtgctggagctgccaattgttctacatcttttagtaattcttcacctacctggtgaatt

SEQ ID NO: 12830 - DNA, 555 bp, Gossypium hirsutum
  unsure (1)..(555): unsure at all n locations; Clone ID: LIB3829-007-Q6-K6-G5
gttggctctaacanaanaacacttgttcaggtcctaacggagccaaaaaagcactaggcaagcaatacaaaaagagttccaaattaatggcgtcaaactgcatatcactgaaaagctttgaaattaattgccagaaaagcaataaataaaaatacaggcgctcgcggcttaagagccatcttggagaatatcttgatggatgccatgtatgagataccagatgttaggaccggtgatgatgtaatagatgctgtagtagttgatgaggaagccattggatctgaagaccatagacaaggagctaagattctttatggtaaaggtgcattagaccgttacctttcacaacaaaaattgagggacttggagacaactgtggacggattggacggggagctggaggtggaagcagagcttcgttcggttgttgccagtatgtgatacatatattgatgaaattgtagatgtaacttgattgtacataataagctcacattgttttaaaatagactgtacaatatgcataaaccattttatgatatatatgcagttctt

SEQ ID NO: 12831 - DNA, 572 bp, Gossypium hirsutum
  unsure (1)..(572): unsure at all n locations; Clone ID: LIB3829-007-Q6-K6-G6
cttcccttgtccctgttaaaatctgtcactgtgatcattaatggccaccgctgaacctgaagttccagtcactgagcagcagcccgcggcagcagaggagccaaagccggcgngaaaagcctgtgaaggagaagagacccagagctccaaaggagaaaaagcctaagcaacccaaatccgcagcacatcctccttattttcagatgatcaaggaggcgcttttggctttgaaagagaagagtggatcaagtccgtacgctatagcgaaatacatggaagagaagcacaaggcggtgcttccagcgaatttcaggaaaatcttaggtcttcagcttaaaaactcagctgccagaggcaagctgataaagatcaaggcctcttacaagctctccgaagccggcaaaaaagagagagcccctgttacgaaagctaagatggagaagaaagctaagccagcttcgaagccgaagaaagctgaggcgacaaagaagccaacaaagagagtcggggccaagaagaaatcaactccagcaaagccgaagcagcctaaatctatcaagtcacctgcggct

SEQ ID NO: 12832 - DNA, 563 bp, Gossypium hirsutum
  unsure (1)..(563): unsure at all n locations; Clone ID: LIB3829-007-Q6-K6-G8
tccgcggccgcgtgggctttggtataactgtacgagcttgacttatatgcctttgttactctcactcttcatttcttgaagtacctatgtccggcacttatgtttgacccatatctaggtatgggtatggggatatagctctccaactacttngaaaaaanacatgaaaaaggttcaatatatttgttccagacacatactcattttcgacatttacatccgagtccaagtaatataattatatgttgtcgattgttctgcaattatatgtttcctttatatgtgattagcacaactacattgtggttgaaatgacaaaatgtaaatataagaaaaatgtgagaagaaatagatgaaaagaagatatgcaagtatagaaatgttgtgaagtacaattggctgtgattgtagaaaatttaaatttaattaatgtacaatatttaaattgtcatattacatttttatatttctactatgatataatttgggttgtgtcatttcctcaagtgagttggcatctcttgattcagtgacactatacttggtacaaatccagttgagca

SEQ ID NO: 12833 - DNA, 561 bp, Gossypium hirsutum
  Clone ID: LIB3829-007-Q6-K6-G9
ctctcttgaatatcaaccttttttatttttgttgttgaaattgaagatctgataaaaaattgtaaacatttcttaagttctggagagaccatttctctcctgatctcaatccatggcgcttcctcgatcgaagctactttttctgctgttcgctttgtcttttgcgatcgtcgccattgcagggtatgcctcaatctctcccgtctccctctctctcaaaaaatgcgttcatatatgttcgtggtggtgtttttgctgcaggaagagttattacgacatattgcaagtgccgaaaggagcatccgatgagcagatcaaaagagcgtatagaaagctggcattgaagtaccatcctgataagaaccccggcaatgaagaggccaataagcgatttgctgacattaacaatgcttacgaggtgttgtcggatagcgaaaagagggcatatatgataggtatggtgaggagggcctgaagcagcatgctaccagcggaggcagaggaggaatgggggtcaatattcaggacattttcagctcgttttttgacggagggtcggta

SEQ ID NO: 12834 - DNA, 584 bp, Gossypium hirsutum
  unsure (1)..(584): unsure at all n locations; Clone ID: LIB3829-007-Q6-K6-H10
cgnaggaccctacaagtggagtgtttgaattggaaccgagaattgtcctggtttcatcttcagacgttcagtattattgggcagcactagcatgtctcgttcagaatttcagttatttattgaacagctttcgcaaaagtaccatggggacacgtatcatttgatcactaagaattgtaaccatttcaccgatgaagtatgcctgcagctaactggaaagcctattcctgggtgggtaaataggctggctagactaggttcattttgtaactgtctacttccggaaagcattcaggttactgcggttcgacatcttcctgacaatccagcatattctgatgatgagagattagattctgctgcaatgtcgttaacagcagagagtgaggaagaggaagaggaagaggatggagtcacagatcatcatctgctgactataccaaatagcaatgttgcatttctcaaagaaaagacagtgtggcttaccagagaactatgatttccccctggactgtaattgtttcttttgtgggtctttattcgttcttgtagcatacattcccaaatgcatgagagtgtatcag

SEQ ID NO: 12835 - DNA, 555 bp, Gossypium hirsutum
  unsure (1)..(555): unsure at all n locations; Clone ID: LIB3829-007-Q6-K6-H11
caaaacaaagagaaaacaaaagcaaaatggnagaaatctcaggtctggttggcctttggagccatggccttgttattggcatcggcgacagcggatgacgtcgttgtactaacggaagatatcttcgagaaggaagtcggtcaagatcgaggagctctcgtcgagttctatgctccttggtgtggtcactgtaagaagcttgctcctgagtacgagaagcttgggtcaagttttaagaaggctaaatccgtcttgattggaaaggtggactgtgatgagcataagagtgtctgcagcaaatacggtgttcagggctacccaactattcagtggttcccaaaaggctctttggaacctaaaaaatatgaaggaccacgaaccgcagaggcccttgctgagtttgtcaacactgaaggagggaccaatgtgaagatagccacattaccatccagtgttgtagtgctaaatgctgataattttgatgaggttgtccttgatgagacgaaagatgtgttggttgagttttatgcaccttggtgtgggcattgcaaaaac

SEQ ID NO: 12836 - DNA, 559 bp, Gossypium hirsutum
  unsure (1)..(559): unsure at all n locations; Clone ID: LIB3829-007-Q6-K6-H12
ggnatatcaaagacctgctcctattcaaagcttttacgacgaaccatggtgtctctgtgcccaaactgtctggtccttcgtcaccaacatcttgacagaatccggaacttcatcaatccaaaacccagaatgacgtcttctcctacattccatcgctagtgtttgggccacactattgaccaaacgaggaacaaaaagtttcttaataaccgtcaaggagtcaccttccaccaccagatgtcggaagcccatgttaattgcgaaaagcaacgccctttcatacaccctcgcttcagccacgaacgcatcaaccatatcgctaaaaagataagtttctgctcctacaaaatcccctttgtagtttctggcaattaccgcagatgtagaagacctagaatcacactgaaaatttgcgttaaaatttattttgataacacccaaatctggaggattccaacatgtttctggtagcaatctgctagaaactctcatcttttcatgacacagacttaaatcctgactgtatcctcgaataaagccttaaagatcttccaaagaa

SEQ ID NO: 12837 - DNA, 553 bp, Gossypium hirsutum
  unsure (1)..(553): unsure at all n locations; Clone ID: LIB3829-007-Q6-K6-H2
tgnataacttgctggtgacaaagnagttctgaaaatgcggattttggactggcaagagaagtatcatcaatgcctccttatacagaatatgtttctactcgatggtaccgttctccagaagtcttgttgcaatcttcctcttacactcctgctattgatatgtgggctgttggtgctatattagcggagctttttacttcatctcctatttttcctggtgaaagtgaaatagatcaactgtacaagatatgctgtgttttgggtgcgcctgattggacttcctttcctgaagcaacaaacatctctcgtctaatcaatattagttattcagagattttacctaccaacctatcagatatcattcctaatgccggcccggaggctgttgatttaatcatgcaactttgttcatgggatccattaaggaggccaacagcagatcaggcattgcagcatcctttttttaatgtggatgctcgcattcctcatccacgactgcatgatccacttgagctcaggctaaacaacatggagtcaaagccaaatcttgagt

SEQ ID NO: 12838 - DNA, 558 bp, Gossypium hirsutum
  Clone ID: LIB3829-007-Q6-K6-H3
gtcttgacaagggtgtcaactagggcactaattgcgaaattgggcttgatgataacactgtggacttcattggtcatgcattggcacttcacagagagaccgctacctgggatgaacctgcattggatactgtaaaaggatgaagctttatgcggagtctcttgcccgttttcaaggtggatctccatacatatatccactgtatggattaggcgagctgcctcaggcttttgcacggcttagtgctgtttatggtggaacatatatgttgaataaacccgagtgcaaggtggagtatgacgatgaaggcaaagtttgtggtgtcacatctgaaggtgaaactgccaggtgtaagaaagttgtttgcgacccttcctacttgccaaacaaggttaggaagatcggcaaggttgctagggcaattgctattatgagtcacccaattccaaacaccaatgattctcattctgtgcagattatcctgccacaaaagcagttgggtcgtaaatcggatatgtatgtcttctgttgttcatattctcacaatgttgctccaaa

SEQ ID NO: 12839 - DNA, 594 bp, Gossypium hirsutum
  Clone ID: LIB3829-007-Q6-K6-H4
cggacgcgtggggtttctcacaccgtgccaatctatgaaggatatgcccttccacatgccatcctccgtcttgaccttgcaggtcgtgatctaaccgatgccttgatgaagattcttaccgagagaggttacatgttcaccaccactgctgaacgggaaattgtccgtgacatgaaagagaagcttgcttatgttgccctggactatgagcaggaactggagactgccaagagcagctcatctgttgagaagaactatgagttgcctgacggacaagtcattactattggagctgagagattccgttgcccggaagtcctcttccagccatctttcattgggatggaagctgctggaatccatgaaactacctacaactctatcatgaagtgcgatgtggatatcaggaaggatctctatggtaacattgtgctcagtgggggttcaactatgttccctggtattgcggaccgcatgagcaaggagatcactgctcttgctccaagcagcatgaagattaaggtcgttgcgccaccagagagaaagtacagtgtctggattggaggatctatcttggcatcactcagcaccttc

SEQ ID NO: 12840 - DNA, 557 bp, Gossypium hirsutum
  Clone ID: LIB3829-007-Q6-K6-H5
cggtcgcgtgggcggtcgcgtgggcggccgcgtggggaaataaaaacagtttcatttccattctaagtttgtgtttttgatttgccttttgtgggtttttttttataaaaaagttcagcaaaaatgtttattgagaattttaaggtggagagccccaatgtgaagtacacagagaatgaaattcagtctgtttacaactatgaaactacagagcttgttcatgagaacaaaaatggaacctatcaatgggttgttaaacccaaaactgtcaaatatgaattcaagactgatatccatgtccctaaattgggggtgatgcttgtgggatggggaggaaacaatggttcaaccctcaccggtggtgttatagctaacaaagagggtatctcttgggctactaaggacaaggtacaacaggctaattactttggttcattgactcaagcatcaacgatccgaattgggtcttacaatggagaagagatttatgctccatttaagagtcttcttcctatggtgaacccaaatgatattgtgtttggaggatgggacattag

SEQ ID NO: 12841 - DNA, 561 bp, Gossypium hirsutum
  unsure (1)..(561): unsure at all n locations; Clone ID: LIB3829-007-Q6-K6-H6
atttttgcctatggtcaaactggtactgggnaaaacttacaccatggnaagtgaatgcaaaagacgaagagggtcctaatggcgaattgccagcggaggcaggggtcattccaagagcagttcaacagatttttgatacactggagggtcagaatgcggaatacagtgtgaaagtcacttttttggagctgtataatgaagagattactgatttacttgcgcctgaagaaatttccaaagttgctttggaggacaaacagaagaagcagttgccattgatggaagatggcaaagggggagttcttgtgagagggctagacgaagaaattgttacaagtgctagtgagatatttactttgcttgaaagagggtctgctaagcgcagaactgctgagactttgttgaataagcaatcaagtcggtcgcattctctattttctattacaattcatattaaggaagctacgcccgaaggtgaagagcttataaagtgtgggaagctgaatttggttgatttagcaggatcagaaaattatctcgttctggtgctagagatggtcg

SEQ ID NO: 12842 - DNA, 594 bp, Gossypium hirsutum
  unsure (1)..(594): unsure at all n locations; Clone ID: LIB3829-007-Q6-K6-H7
gtgatcctattgaagaagttacaaanagtttctgagaggggaactatcattgatcagcttgcttactgcattaacagttacagggaggccgccatgtcaaacgataccaaatttgatcacattgaacttgccgaaaagcagaaggttttgaatgagtgtgttgaagctgaggcctggctcagagtagaaaaaacagcagcaggatcaacttcccaagtatgccacacctgttctcttgtcagctgatgtgaggaagaaggctgaagcacttgacaggttttgcaggccaataatgatgaaacctaaaccggctaaaccagccacgcctgaagcaccggcaaccccaccacatcctggaagtgaggctcaaccacagggtgcaaacagcccgaaagcaagccctaaccgcaatggtgaccccagtgaaaatgtgccggcaggaagtggtgaggcacctccagcatccgtagaaccaatggaaactgacaaagcggagactacgagtgccgcataaaagattagcagggtgagtcattttatgattttatatatatgcggccagaagttagttgttatgtataagcagttacaagc

SEQ ID NO: 12843 - DNA, 555 bp, Gossypium hirsutum
  Clone ID: LIB3829-007-Q6-K6-H8
cggctgtttaaagtaaaggaaagcagagagaacttgctgaaatgcaatgggggagctcctaccaaaaagcaaagtccaggagagttgcgtttgcacaaagattttctgagcttaacttacccaaatcttgtgctataacatttccaaatggaaaggataacctgatgaattttgaggtttcaattcgacccgatgaaggatattatttctgtggcacatttttattctcctttcaagtttctcccgtctatccgcatgaggcacccaaagttaagtgcaagaccaaggtctaccatccaaatattgatttggaaggaaatgtttgccttaacatcttacgtgaagattggaaaccggtgctcaatataaacactataatctatggtttatatcatcttttcacggaaccgaattatgaggatcccctcaatcatgaagctgctgcagtgttgagggataatccaaagatgtttgaatccaatgtgaggagggcaatgtctggcgggtatgttgggcaaacctttttcccacggtgtgtctagctttagcaaggtc

SEQ ID NO: 12844 - DNA, 569 bp, Gossypium hirsutum
  Clone ID: LIB3829-007-Q6-K6-H9
ggttatctgttcacaaatgctgacaggtccatgcagttaaagctctagctaacactcggcctaggaatactgctccaagggctaatcggttatgagtacactcacacctacccataagagtacaggctctgatggtgaatatgacattgagtgattgggatcatgcgttgctacacctgatgtgcccgagcagccctgaaattcccgacataatgggccattttgctgatctaaagccaggaccaagcgccacattatttcccaagtacacccatcgtgtgcacgccacaatattccgccatagagctctgctctcaagatcgccaaaatcaaccctcaaagaactttgttcttcgatgatagcgtccgcaacatccaaacatgaaaatgcggcgatctttacactgcgctgagacctaatggagcacattatgcattagaaagcattcacaacataaagcatgcattaccacagctctgggaaacagacatgaaatctaaaggcagatactctggccaggttacagtggatgacaccatagacagcttatattccatgttatttatta

SEQ ID NO: 12845 - DNA, 393 bp, Gossypium hirsutum
  Clone ID: LIB3829-007-Q6-N6-A1
aaaaaaaaaaaaaaaggacaaaaaaggaaccaaaaaaaaaaaaaaaaagggccccccaaaaaaaaaaaaaaaggccaacggggggggaaaaatgggggcaaaaaaaaattttggaaaagaaaaaaagggggggtaaaaaattaaaggggggggaaaaaaaaccaaaaaaaaaaaaccgggggggggggtttcccccgggggaaaaacccccccccccaaaaaaaaaaggggggggaaaaaaaaagggaagggccccccctttttttttttttaaaaaaaaaaaaaaaaggggggggggtaaaaaaaaaaaaaaaaaacgggaaatttttggaaaaaaaaaatttaaaaaaaaaaaatttgggaaaaaaaaaaaaaaaagaaaccctataaaaa

SEQ ID NO: 12846 - DNA, 150 bp, Gossypium hirsutum
  Clone ID: LIB3829-007-Q6-N6-A10
tttttttttttttttttttttttttttttttttttttttttttttttttttaaagggggggccagggtttttagggtttatttctaccagccaaaatttaccgcgcattttaaaaaaaaggggaaaaattaaaattaaaaaagggggcgg

SEQ ID NO: 12847 - DNA, 521 bp, Gossypium hirsutum
  Clone ID: LIB3829-007-Q6-N6-A2
gaatgaaataagaaaaactaatttaatttaaacctgtttccagttttgacaaatgcagatatctataagtctgtttattgatataaatgagatggtacaagcagcagactatatgatatgataccatagcaacaatggcaacttgtaaataatcaagcaatactgtgtattgctgtataccatggtaagttggttttacagtgttattccatcaagagaaatagaaggtatatgttgaaggccaaaaatattggtgtctcgtgaattctgctctgctctcttcactttttacctagtatgtcgtagaaaacctttggttttctgtaatctgtgatgcacaatgcctgcattgcaaatgcaaggtgcattaaagtgggttctgaccatggcttccctataaattgaaggccaattggcaaaccagctttgtcataaccaacagggacagtaatagcaggtagtcccaaaaagtttcctgctatctgatatcgaataatggtacctccatttacgtagtcaag

SEQ ID NO: 12848 - DNA, 380 bp, Gossypium hirsutum
  Clone ID: LIB3829-007-Q6-N6-A3
gccaaaaacgaacacatgcgtaaatcaaactaaagtgtgatccaacacactcctgtggatgacatcccggttattcaaaccaaatgatcaatcaatgggtctcctggggaggcaatgggcgtaaccgatgcgcaaccccattaaccaacctatagggataatgaagaatcccgtaaacgaaggcaaaaccaaacgtcaaagtatgaagtttattaacaacagaaaagcgaatgggactcatggtcatgtggtgggatccatgctccctacccatcctaggacctccaacaataaggccttacctgaatgagcattatgaaagctcatcgagcacgtttgcgcaccagggcgtcctttgaaaatctaggggttcatcaaca

SEQ ID NO: 12849 - DNA, 518 bp, Gossypium hirsutum
  Clone ID: LIB3829-007-Q6-N6-A4
gattccaaaggtttgctcaaaattcattcaatccttttgtctagttcgggtctaacaaccattagcaacatgtttaaagctcaaaatttgttctcgaacccatctctccctataaaatttgtatgcttatttcaatagagaaaaaacactcaaaatcccatggtgaaacttagtaaaggaatacctctagtagccaatgctatagttcgcctgagtacaatgctagcgagcaagtaactcgtacactttcagataattttccggggtacttggaaaaaaactataagggctaacctgaaattttgtttgttcttcttgttcctcttgtattttctatcacaggtaatggctgatccttagtatcaggctgaatgactgttttttggcctttctttctagggtcaagttttgcagcagttggtttgaccattgtgttcccaatctctcgtaatggctgctttctagatccgcagtcttcatttgtatcaggaatgtttttaacagttttattttgaatc

SEQ ID NO: 12850 - DNA, 513 bp, Gossypium hirsutum
  Clone ID: LIB3829-007-Q6-N6-A5
gaaagcaaatgtgtggcattttcatttttgggcttcactcaatcatgggagtgaaggaaatggatttgtaaataagcgaaaactccaatcatatcataatttattggaagagaaagcacaacaaacaggatgggtcttagtaggaaagacttggtaacaaaacagcataggttcatttgcaaagctcagcggagaggggattagctaaggaggaaatggtagttgcagacactccccttgttcctcctaagtaccatttcttgagcatctcgaccacattcgaattctctactttgatttttgcttcctcctttccctccgtcgtgaatgcaatctcagcagtggctgaatttgctggaaaatggtaagtgatgactgaatccttcttgaaatatttagactggaagaattcaacaactttttccaaggcttcttcctcttcctcttcaaatttggcgtcagctgccaatcggtccctcacagcactctctagctgcactccatattgggaac

SEQ ID NO: 12851 - DNA, 517 bp, Gossypium hirsutum
  unsure (1)..(517): unsure at all n locations; Clone ID: LIB3829-007-Q6-N6-A6
accaattacttagtagcattgacactcatagattcaaacattttattacatcaccatccctcacattttattacataactcacactcttcaaacacctcactgtttccagtttgttcatgcattcaccttaggggcccacccggcgatcacgtattccttagcagcccgcgttttcacgaacgattcacgactgaatatcgacttcatgtaattgcggacattagtcaagctttccggaacagtccatttcttgaaatggccaagagcaacctcaagatggtaaagttttggtcccaaagctaaatcaactgcacttatcttttccccagcaatgaatgggccatgtgccttaagatgttcatccaatgccttgagttcattaagcaaagcctgctcagatccatcattagcgtctttgctcttcaaaaatgtgacaaaagttccaaatatgtttngatccaacagaggcaaattgaggaggggttttgagacaaggctgagggtatttttcttcat

SEQ ID NO: 12852 - DNA, 512 bp, Gossypium hirsutum
  Clone ID: LIB3829-007-Q6-N6-A7
gggtactgggcaaaataggctcattacagctgcccctctttcctcattgtcgtgtaacgagaatggagcaaaaattataaaagggctaattttttctggacctgctgagtctcgacgcttcttttcatctttttcaagtagcctcgctctaatctagtgcaacttcagaagtataagatttgtgacttgtagctttaacctattccactacaacttcaggggaaataagattcactatctatagtctgcttcgctgcatcttagggagataagacttgtgacttccgtctactccgctgcaactttagggagataaggccggtggcttcaatctgcttcgctgcaacttcaagaagataagattcgtcatatctgatctactccactgcaacttcaaggagataagatgttcaacttcaatctgctccactgctacttaagagagataagatcttcaatttcaatctgctctattgctacttcggggagataaggctggtggcttctgtaaa

SEQ ID NO: 12853 - DNA, 508 bp, Gossypium hirsutum
  unsure (1)..(508): unsure at all n locations; Clone ID: LIB3829-007-Q6-N6-A8
gtgggtttttttttgaggaaaatggataaactttatgtagcatattttagaacacatgagattaaatgggtggcaaatattcttaaagaaaccattcatacttaaaatgcgtaaaaaggggaaaaccaaaaaagaaaaaaagagcacacttaattggacattggagacggggaagcgctcnccttgacaaccttctgaaaacgtaatctctcatcaaaggagatccgcgacattcgatgggaggtcctcgatgacaacattgtagaacttctgggatatcaaacaggattctttcatcatctagagtgacaaaggttatgggaacaccttttgtcccaaacctaccacttnttccgattcgggggaggtggttttctgggtgagtaggcagatcgtagtttatgacaagggagacttgctgcacattaataccacgggctaagagatcggtagtgatgagaacacggggaagaaccagaacggaattcccgcatgagggacatcacgc

SEQ ID NO: 12854 - DNA, 457 bp, Gossypium hirsutum
  Clone ID: LIB3829-007-Q6-N6-A9
ggggggggaacaatattatattcaccccaaaatcataacaaaaacaaaaaatggaaaagggggcacaacccaacagttgtttggggggggggggaaggtcgattttcggggatttcgaaaaaaaaattattctgaaaaggaagaatggagaatcccaacttaaaaaaatcttaccggggagaacccatagggaaaaaaaagactagcaatcaatctagtttagcaataacagcatcaacaacttcctggggagggctttgcccaccgaaaactttaattcgaaactggccctctaaaaaacacgtttcactggactttccagtcgatcggcaaatgaaggaaactggagaagtctcaacatcatggcaaaggaaaaaagcaatgccccgggatttgccgccttttgccctactatcttttcttttccaacatttccccctgaagcaccttgctcgaa

SEQ ID NO: 12855 - DNA, 515 bp, Gossypium hirsutum
  Clone ID: LIB3829-007-Q6-N6-B1
atcaaatgtcactttttattaataaaacaaaatctgtaaacaaagagaagcaatttacatatattatttagctacataacaacctcatctgcaaattaaacgtagaaattaaaacccagcttttcactaaaacatatgtgcaaattgcttttccctcgtatcctgcttactgaaatatgggcattatataacctaagcacatattgattgatgatgatgattgtatggtccattacttactccattcataaactgctgcctcttccttcttcgcttcgtcacaaccgtaaatccttcgccgtcccgggttttctttatatttacatctgatgtttttggttgttcacaggtgctggattgagatgccacgtcatgtccttcattcccatggagagcttttgcttctgttgctggctcagttgtaggtacaaactcgagtgcatgagggttcataactcgcggaggtcggaactcagtttgttcgagagtttggtatctcggaaagccttgtttca

SEQ ID NO: 12856 - DNA, 512 bp, Gossypium hirsutum
  Clone ID: LIB3829-007-Q6-N6-B10
gagaaagataaataagaactaacaacccagactaatgaacaaaaaacaagcaaacagggggatattaggggctagtccacgaaataatgcgtacaaagaaacaggcaacaatccaacaaaagggggtaacataaaaacatagatgccctattgagataaatagagatcttagcaaacttatctgccctgtgcccctttttacccattttttatccttacttggccatcatgactttgacgaactcctcataggtgagctgcccatcaccatcaacatcagcttcacggatcatctcatcaacttcctcatctgtaagcttctcaccgagatttgtcatgacatggcgaagctcagcagcagatatgaaaccattctggtccttgtcaaacaccctgaaagcctctttaagttcttcctcggaatcaggatccttcatcttccttgccattaggtgaaggaattcaggaaaatcaatgggcccatttccatcagcatcaacttcattgagcat

SEQ ID NO: 12857 - DNA, 453 bp, Gossypium hirsutum
  unsure (1)..(453): unsure at all n locations; Clone ID: LIB3829-007-Q6-N6-B11
aaattgagaatactcactcataattataatgcggtgcttttaacaattcaactaaattgtgcgacaattatggggggcaaaattttgtgcgcgagctcaaaattcaaaaaaaaaaaaggcagagtcatgggtaacaatccttgaggtgaacttcgggcaattttcagatgctacactccaaaacgcgttccagtgtatgaatccaaaatccagacgggggagattgagctctacatttcagtttgagcccaggccattgagctgtgttccaaaccataatcagattgaggaagcctgctccttgccaatttgctcattataggaagaccttcaaccattctgtgaagtgcggaccaccatccatctttagacatctgacgctgatctaggggactcttcnattgtgttatcatgcttcccttccaaaactccctggaagggtatcacagcatc

SEQ ID NO: 12858 - DNA, 526 bp, Gossypium hirsutum
  Clone ID: LIB3829-007-Q6-N6-B12
ttttaaaaacaaaattctcatgcattactgtgtcaataaagggcgcataaaatcagataaaccaatataaaatacaaatagcaaaggaaaaaaagaatggggcacatcatacctagattagaaacattcagggaggcgtagatatagggtaaaaaacaccaggattattcagcactgtggataaagtaagcagtgagcaggagggatgggcaaagcttggtttaagattgagactcctcccacttgaggggcttcacaacttcccaggtgaagtcagggtcctcccttccaaaatgtccataggcagctgtcttcaagaaccggttattgccacccctcttgaggtgccaggttgtttgtgatcatgccaggcctaaagtcgaagttctccttcacaatttggagaatttccttgtctggaatctttccagttccctagctgtcaacgaagacagaccaaggctccgacacaccaattgcataggagacttgcacgaggcaccttccggccaagccatttgctaca

SEQ ID NO: 12859 - DNA, 525 bp, Gossypium hirsutum
  Clone ID: LIB3829-007-Q6-N6-B2
acaaaaaaagaccaccattcctgtaaataaaaagacctcaaagggtcggaaagtgaatacaaacaatatccctgttaccgtctagtgataaagccaaataagacagcaacgaggacagatattatcgatacaaaatgtaattacaactcaacattgctgcccgtaaagaatattagaccactaaagctagctactctcaacaagttaactagttaacaaagagaggcagtcctcaaatatacattctacacaaatctttcaataacaaggtttctaactcagctgcacagtgaatgtaccatgtaccttacttgttaaagaataaacctctcttctttccttttcttctctcaccagcctgcaaaagctaataagagatgtctcttgtgaacacaagggtttttaaataacgcgaggatcacaaaattttaccccacaaactttagtcttacagcactgcaaataaatgcttcaaatatgcactgatcggtttcttatattatattatctacttatttaactgaa

SEQ ID NO: 12860 - DNA, 519 bp, Gossypium hirsutum
  unsure (1)..(519): unsure at all n locations; Clone ID: LIB3829-007-Q6-N6-B3
ctgaaatgattgataaaatggttgaaaatggcatgcttngaaaacatgaataaacactcaaaacaatgaaacaaaacatgtcaaaagtattattaaagtaaaaatacatatatatatatatatatatatatataaattgcctaattaagctttcaattttctcaccgaggcatgatcacggccttgagagggttcttcatcacaactgtgaaagaatatgtctcggtcaaatccggtggggcacccggaactggaacccacttgaatgcttgaaccatctttcctatcaacaagtttatgtgcaaaatgcctaggttccaagccggacaaatccgtctccctgccccaaacggcaccattttcaccgcacgagtcccggtgacgtcgacaccgaccccgtcaccgtgcaagaacctctcgggtcggaactcacctggatccgaccatatatctggattctcagtgatccatgcagtgtagaactcgacgtgaacccctgcggggattgtgtagccgcca

SEQ ID NO: 12861 - DNA, 522 bp, Gossypium hirsutum
  Clone ID: LIB3829-007-Q6-N6-B4
aatataaatagtatatatattcgaaatagaagagccactgaacaagaaaaggaactcagtttcggttttaagatctgttttcgacatggccatttaaaaaatccaactatctgatcccattctcttgtgcccaattctaacttcctatatggcccaaatattgcaaaaactaatataatctttccatcttccaaccttttaaacgcggctaagtgagaagattcatccatccccaacatctcacttcattgcaatggcaatctgctttgctggtgggtgcggtttccttcgattgacccacaaaaatattcaggattacaaccttcttccgatttttgcaaaccttcgagctactccgaatataacagctttggttaagagccctcgatctagaatacatgcaaccgcgatagccccaccaacaactacaagtttgggaatgttgttcttccctggtttctcagacgaattgtgtgtttcaagctctgatgaatcattactattgctttccaaggatgtcaa

SEQ ID NO: 12862 - DNA, 528 bp, Gossypium hirsutum
  Clone ID: LIB3829-007-Q6-N6-B5
gagatccaaacgaaatctttattttaattcgaaaaaaaacgccaaagcccttaacatgactatggggatacatccatggtatagatagatattgttctaacattaaacactggttggtgtctcaatacaagcaatgggatcaccatttattgcattctcaatcttcgttggaggtgcaattaaccctttttcatgacatgtgtccacagctccgacaaacatgtattccaagctgtacttaaattgaaaccctaaatccaacagcttcttggaattgaagaccacatttcccaagttttcatctgcatctttgaactcagtaggaatattgtagtctgggtatttttctcttagcattttggcaagctcaacaatggtggcctcatgggaggagcaaatgtatctgccttcagctttagggttttcaaacaagaatatgtgagacatgcagagatcatccaagtgcacaaactgcccttgcctaatgataccataatgagcttcattcccagtaaggggtgaaaggcc

SEQ ID NO: 12863 - DNA, 521 bp, Gossypium hirsutum
  Clone ID: LIB3829-007-Q6-N6-B6
aaataaataaatgtttatttattaaagtccatgtacaatagcctgtgggcccaaaaccaaatactatagcctaactgccctataccggttacaacccaatacctaattatactattaccctgtacccattacaccctacctagcccaggactaaagtggcccaactggcccaaactattacaccaaggtaggaaaccctagggtttctgccttctttctcctcaaaccgccgctaattctggaaggttcagggagcgtcgtccagctcccaaatcgaggccaccatcgatcatgtccaccatcaacgccgtgattccaggcctcagatcaggctgtagttgaagccaaattaacgcttgttctgtcgaaagagttcgaaaagtgatgtctatagttttggggttgttcttttagagctcatatgcggaagagaaccgctgactcattccggaactccagattccttcaatttagtgctatgggcaaagccgtacttgcaggcaggtgcattggagatagtg

SEQ ID NO: 12864 - DNA, 523 bp, Gossypium hirsutum
  Clone ID: LIB3829-007-Q6-N6-B7
cttagttgagaaattcaaatatatagtaaccattcattaaatgcaaacacaatatttttcacttcttctaaaaccaaatcctacagtgcaggaacgcaaatatttacaggcaacacagcatcatttcttttcaaggttttgggctttcgttggatctttataaatttaaatcatacacatatatagtttatggccattgaaaacctcaggtcccctttatgctgcttctgcaaacccaactctaagcttaccaaaatcgaacacagtgtggtagcgacccatgaaggcatctcccaaaatccagagaggtccacgaggaggagggacatccaaagcagtaaagccactgatgcattgagcttcagcaccttcacccaccttcagaatgtactcttctggtgtaagatcaaaagctttgccaccaatagtgaaggaaatggttggcatggaagaaagacttccacagtcgacagtagattctcccattgggtttggcacccgatcacaaagctgattggcatag

SEQ ID NO: 12865 - DNA, 525 bp, Gossypium hirsutum
  Clone ID: LIB3829-007-Q6-N6-B8
aagccatccgcaacagggaggaacccttttcattttatacattaatattatttaatataatgaagatgagagccagacatctggatcacctcaacaagggagaggaatggggaccatcttatgagggggtttcatcttcataaatattaaaacaagtgataaataacatgggaatctaagcgtggactggggtgtccactgtgacctggccagagtaactgacttcagatttcatgtgtgtttcccaaagctctggtaatgcctgctttatgtggtgaatgctttctaatgcataatctgctcctttaggtctcagcacagtgtgaagatcaacgcattttcctgcttggatgttgcggacactatcatcgaagaacaaagttctctgaggggtgattttggcaatcttgagagcaagctctatggcagattcttgtggcttgcagacaatgggtgtcttgggtaataatgtggcacttggtcctggctttagctcaccaaaatggcgcaattatgtcaaaaatt

SEQ ID NO: 12866 - DNA, 521 bp, Gossypium hirsutum
  Clone ID: LIB3829-007-Q6-N6-B9
atgggatcagaactcagtaattagaaacagcttatattcagatataattgtgtcattgtgtggggttcaaattcaccaggggggggaagaattactaaaagatgtggaacaattgggagctccagcacagatcagctgggtaaaagcttttcaagggccaggttttcatcacccccaactgcttctagagtacttctcaccaaaccatcagggaaaacccatttccacgagtgcgggtaccttttcctcaacccctaaagaagaggccttggcaaaactttctgtccagtaacgagctgtaccaacaaatgtctgatactctctaagatactggtgtgctactacagcatcttgaggatcatcaggttcaggagctgaaagcaaagcttgaacagaaagaagagctgtcttaagagtgagtgcaggactccactggtccttcaatatatccaggcatatcgccccactttggctgctgatgtttgggtgccaaactttcgtcacaaacttcattttgggag

SEQ ID NO: 12867 - DNA, 480 bp, Gossypium hirsutum
  Clone ID: LIB3829-007-Q6-N6-C1
gatcacgaaaatttttcattctcatgagcaatgatcgaattcccgatctcgtgatttagggacgaaatgagtaaccatcacatcacgtctcatggatagagatgacaagttcagaatttagcctgcactccttacctcctatatgatatagctatgtcgacactcaaatggcatacatattaacaacattactatgatgttcacatcaaattcatatatatatatatatttctattgagtaccttaatatacttgttcactagttttcggaaaacttgttagctttaatgaagtagtgagatagcatcgtgagaacaaattttcgaaaatattgaacaagtatagtgaagtaccccttagaattggaatattgaaccatatcaatatggcctttcgccaatataattacccggcggatcataattgcaagtcatgaacacatctccagtgtcgcaaaccactcgagcgcagccaattcgt

SEQ ID NO: 12868 - DNA, 477 bp, Gossypium hirsutum
  Clone ID: LIB3829-007-Q6-N6-C10
attaaaggggtccttttaaacaagagtcaaaataatatgggggcgtactccacacattccaaaaaccaacgagagagtgttatgtgtatgcgaccgatgagtaaagtgctgagattatcatcagtatgagagggagaacgagcgcatccatgagtccaaacgaggccatgcgaggggggctgcggcttcatcctcatcagcgcattcccatgcgcttcctccgctttataccatcggggggagcctggcatgaggggcgtgtgcgttgcctgggtaaatatgcacctcatatggggtgtttgagtctttcaggttttcctccaaaggcttcgcgggcggcacatctgagaacccaacaaaggtatcaaggtctccaaaatgagcttgaacaggggctttggcgctggcgggggctcccagttcaggggagggggccccataaaaggcgagcaacagcatcaacttgagggagactaa

SEQ ID NO: 12869 - DNA, 470 bp, Gossypium hirsutum
  Clone ID: LIB3829-007-Q6-N6-C11
ccgacgtgagacatgagtacttaatttaaaccccagagagtggggggcgagagatccagcgttaacgagtaactagcgagtgatcagaagcggagacaaaacagtgggtcagctgagtattcaaagtggagaccaggttagatttttaagagcaataaagggggaattaaatgcgatatctaaaaaggcaggttttgagcatcacttcactatgcggatcttaataaccgaggcagccccgatacggggcagtgcgaccatggggtcaccaggcttgcgcaaccccttctccgtagctgacttcattgcgtggtctaagaggagctccggggggtccgcatcaggtgcgttgggtgagccttctgcgaggggggggagccaagcccctatatatcagactgtgggctgggtgggccttcctcactgcgggggccaatcaaatgagatcggtgtgaagactggggacaacc

SEQ ID NO: 12870 - DNA, 531 bp, Gossypium hirsutum
  unsure (1)..(531): unsure at all n locations; Clone ID: LIB3829-007-Q6-N6-C12
caaactagcattctttgagggggttcaactacaattgagacgggaaaaagcgaacacacaatccgtgggcagatgccagtctcaaccaaatgagacacatatcaaaattgggctaaaaaactgtgaagtaccagactacatagaaaaccaaaatcaaagggggttgatactatcaaatgcgatctcatttcttcttgggagcagatttggggaccttagcaccggttgggatccttcttctcaacgctcttgaggacaccaacagccacaggctgacccatgtccctgacagcaaaccggccaaggggggggtactcagagaaagtgctccacaaccatagggttggggggaaccatctttatcatccctgcgtcaccattcttcaagaacttgggctccttctcaaggtcctttccagatcggctgtggatcttgggcagcaattcaaaaaacttcacagcaatgtggggaggggtggggantcaaggactggggcatatccgtttccaatctggccaggggggggtcat

SEQ ID NO: 12871 - DNA, 515 bp, Gossypium hirsutum
  Clone ID: LIB3829-007-Q6-N6-C2
aggaagaagtgaagtgggaaattttattttcatctattaccgatacccgagtatataatagaccacaagcatcaaatgtgggaaaacatgacatacattactcgctagaaaagaaatagaaacgggtatcaccaccacaaaaaaagtggaaatgcaataaaattaacacaacatagtggaagacgaaacagtgctggtaaaagttttatgcaaggatttcctccaatggcttggcttcaagcttgggcttctcattctcagcctccttctccttcaactgttgctgctctttggccaccttcttcagcctggcaagctcaagatctttgctcatcttcctcctatacatctcagcaaatgtgatgggctcctcaaggattggtttctctccctctctgatcttcaagggatacactgtggcatcgggtgctggattttggaatgtggctattgacaatctgctgcagtttgagttcaccactggttggtgatcagcattcttgaacctcccattg

SEQ ID NO: 12872 - DNA, 532 bp, Gossypium hirsutum
  unsure (1)..(532): unsure at all n locations; Clone ID: LIB3829-007-Q6-N6-C3
aactaaagnaatatgatataattaataaataaagtataatttaaaatatttttacaataatgttaaacgtgacaaaacttaaaaacattcttacaataagaaaactaatgtctaagacggcggcttttgcgattgttgaaacatatgcatcatctgctgaagctgtagctggaggtcatcgtactttttgctctgttctgctaccatcgctcgtgcctctgcctctctcgctgcagccgctgcctccctctctgctgcctccgctctaagttgttgctggagttcttcatattttcgttgaacctcggcaatttgctcaaccgtgtttgcttgcatctaagctatctggtctcttaacctctgaacttcaacttgagcttgacttccggaaggcatgtattgctgggagccggatccaaaatattgggtcggggtaacaccagatccttgaaatcgaacccgaccgtacctttcaggacccaaaacttcagtgataattctattatcaatgttctcaagattaacagaacta

SEQ ID NO: 12873 - DNA, 497 bp, Gossypium hirsutum
  Clone ID: LIB3829-007-Q6-N6-C4
atcaaaaacgcacaatgtgcaaatttacttcgatgttcagtttaaactttaaatgaggacagaacaagctcgataatcacattgcaaaattataaaagaggggaaaagagatttcctacacgctttaaaaccacaaagccttttccatcattacaacacaagcaatcgggtgtggggggaacaaaggtcgcatatcaaaggggaataaattgagaattctttgaaatgaaaggataatcacgggaggcaaaacaacgtgcaaattattcaaggtgcttaaaatctaagctccattgattaaggcaagggcatcggccacggttggtagtgcaggggattgctccctttttggggcgggtgatggctccacatgcatttgcaaatttcaacacttcccttaattttgcttcatcctcaagaatgggtgggttttcaacaatcttgcatagcaatgcaccaacaaaggagtcaccggcgccagttgtgtccacggtatt

SEQ ID NO: 12874 - DNA, 516 bp, Gossypium hirsutum
  Clone ID: LIB3829-007-Q6-N6-C5
acacaaacatttgtgcattaaacaagcttccttatatatcagttattcgataacctaagagagaagggggacacacggcaagcggccatacctcgtgtacaagggaagaccaagccaagctaatccctaagatactgccttgcaaactacttgaataacaactcgagacacactcatgctcctatgagtattattcctatgtaaaactcacacttctatctcctaatttctcctatttgcctgcttatatagtaaggatcactttcggttacaaacatgtgagtaacttggatagtattcatgccttgggattcttcagtagaactgacctttgtaatggagttgtttattgatagcaaagtagccttatatcattatttttcttccgctggggacatttgtctctatcaagccttcatttgagaggtttataatggaatctgctatgactctggcactggttttcatatagccacctgatgtgaccattacaatagggatctttctatcacgagc

SEQ ID NO: 12875 - DNA, 538 bp, Gossypium hirsutum
  Clone ID: LIB3829-007-Q6-N6-C6
aacgacgagggaaaaaatgacattttcctagagaaataaaagggatggaaacatccatcttatcctacattaaggggggaaatctaaacagaggaccatacaagcaaatgtgtatttgtgggctattgagtgagatcatctacaaaagaattgaaaataacaagcgctaaaccgaacccccgaaggagaccatgcgccacaaccgggaccattacgcgttgcagaagcttaaccagaactcaatgcttgatgcatcgatttggaaaatatgccatccaaggcggtttctacatcccactctaagccacttcagcctcgtgtttgcctagtattgtatgacttgcaattcggacatttctgagccaggacatgaaaccgaactagagattttgtcccacaatcgtggcaaaggatcgaaacaattttgttatggtactcttccggcattggcgcagctgcgatctcctcatcaaatttttcccagacctttgacatgtcacaaaccgatttggagcacagagggcaggcatattggaaa

SEQ ID NO: 12876 - DNA, 479 bp, Gossypium hirsutum
  Clone ID: LIB3829-007-Q6-N6-C7
ccaaaaaacatgtcaacactgttcaatttgatttatgtaatatttcatgagggtttacatcacagtgaaccataaattggaataaaagacaactcattatttagagcttttgctccatatacactatatgttatccatcatacatacatgcatacacattttctatatgagactacacatggatttacagtaaacaaaaactatgcgtaacatagagggcaaacatcatctgagcaaaagagaacataaaaatttgttgctgacttccaaagagatcattatgggacttccatcttgtttaagcagttccgacaggatgctgtttctcagaggttgataacatgttatcccttaaatgaatgtcaagtgtttttttccaaaacagacaaggccggagttaaataattatttgctttgtctggcaaatgggcaaccagctcataaagttccctcccttgctcagcaacatattcatgaca

SEQ ID NO: 12877 - DNA, 489 bp, Gossypium hirsutum
  Clone ID: LIB3829-007-Q6-N6-C8
aaaaggaactttcatccatcaaattattactgggataatgaagctttatcttacaaaaatgggataaacaacaagggtctgccaaaagcccaaatattctcaatttgtacttaagggctggataaagaagatacatattgatttcataaaggcaaagctcgaacgaaaaaaaaagcctaaaattaaaagagaaaaaggaggttcacccatgccaaatgaaggacaaatatgcacctaaactctacttccattgaacaggtcaaatggaccttccaacttcgatccgcatacagaatttaatgaaatgaacaagtgaaagctgcagctgctgatttcgagccccctcatttagggcttgttttttttttgcttgcactacttttgagttgtgagaaacatgaaggcaaaccaaacgtgtctctgttttcagcttggactactcaatcggagttggaatcataaaaatcactcgggtatggggtcataacc

SEQ ID NO: 12878 - DNA, 538 bp, Gossypium hirsutum
  Clone ID: LIB3829-007-Q6-N6-C9
aggacaagggagagggccataaataacattaataggagtcaaattacagaagctatggaacttttatggacgctaacaaatttctccctttcgggccagcaagaaaaaagagctgacaaccatggggaacatcttataaattcttataaacattaagacttacacgataatactaagaaccctaaactcataaacagactttaataataacctaaagaacctgtcactgcaactaccaaaaactcaattgcggtgagctttacaaaaaataaatacacaaggaaaacatctgtgtggacattaaactaagcttttagaatagaatcccaatcgatctcatatgaggggtatttggacaacataaaagactccgacgaagtaataacttcaggccatggctgctcgttgaagtccgagaaggtaagatccgacaaaggtgaagattctggcgacccctcattctccgacagaaccggagataaagaggagggggaggtctccaccttcactgtgttttcctcaggctcagccaattggg

SEQ ID NO: 12879 - DNA, 516 bp, Gossypium hirsutum
  Clone ID: LIB3829-007-Q6-N6-D1
ttttttttttttttttttttttttttttttttttttttttttttttttttaataaaagaaaccaaatcagctctcattattcaaataaaacaggtaaagaggagccaaggagtggagacagaccccacaaccaagggtttaaccccccaacgaaatatagcattcatcagagtacagaaagaaaaggttatcgcgacaaataaaaatactagtttcagttggacagattatcctgggtcttcctgaacagcttatgctccatatgctgagcaaaggtaccaggagggaacagtggaggttcggtctcaaaaacagtctccgggaggggcttaaggatgatcttatccttcgggggctcacaaaaaactgcccatgaaatcctaaccttctccttattaaccaaacccctgtggaaaatgctcttgaactttccattgctgaggatctcgatggggtctccaatgtgcatgatgatggagttgggaacacatttagcggtcacccacttgccttggt

SEQ ID NO: 12880 - DNA, 465 bp, Gossypium hirsutum
  Clone ID: LIB3829-007-Q6-N6-D10
aaaaaaaaaacaggggctctatggcgtccccccataaaaatccaaaaaaccagaaccaaaaataaggcgtcccaatacatcacccaaggggtgggggggcgacccaggcccaaaaatcccgaattatccccggggaaaatggggaaaaaaggttttagaggggcaaaatagataatcaaaggctaaaaagggagtaataatttttttaactaactctcttttgggggcggggaaaaaaaacatccctttacggggattaaaaatggggccggggggccccaacaggggaaagggtaaaagggggctaacatccagggggggcaaaaatggggggaattatattcctaaaggggttcaaagagggggcacatagatccctaaaacccaaaggggggtgccggccccagggaaaggttagggaaccaacggggaaaaaaccctaaccataaaaacccccctggaaag

SEQ ID NO: 12881 - DNA, 524 bp, Gossypium hirsutum
  Clone ID: LIB3829-007-Q6-N6-D11
attcaaaggggtgtgtaacccatatattaaagcgaattacagtgtatgtgcaatacaactaacctgcctaattacaataagtggtgcgaggggcgttcactcacacatatgagattaatacccggaaaaagggggggctacctcactaatcactacttactaaaagtgtggcctatttgaggtgggtgcgaaataactacattcatcatccatagcaaaatactcaagggggtgcaagatatttccggtatcacatgggcctttttttcttccgagaagatgcttgcgactgagaatatgaggcaagagttcaacaagaaataagttcctttccaagggggagcacaagattgtgtgttcatattttatggctatcaccattatctagaggggggcgatggtgcacttgacggataaactggcctttcactcgggggggctgctctgccaggcggttccgggtctgagatcgaacctttttctcaaaggatcgagctttccggttaagggggaacttcatcaaa

SEQ ID NO: 12882 - DNA, 533 bp, Gossypium hirsutum
  unsure (1)..(533): unsure at all n locations; Clone ID: LIB3829-007-Q6-N6-D12
gggggggggggttgaagactaaaagggtgttttgagtgtatatacataataaagtgggggggtctttcatcccctcataaataactccttgaagtgcaacacaaagtgagaaacagggatgtgaagagttcctaaaccaaaaaatcggggggggggggggggttgaatgaacttnaaaaccattgccatcttgacaatattcattcccacccaactaagatcatagaattggcaagccccgactcctcaaatgttaatttgctatcataatccagagatttcgaagcttctggaattggttgagtcaggcggaatggctttgattcagcttcaccaagttgagaatagcagaatgaccacagtagctgtattggatcagttcggagaaaatttctctgtactctgcgcccatcaggaaggcggactccaaccctacataagaggttcctgtcacccttaggttcttcaggtagaggaggatatgcaggcttcttagtcaagcatgattcttcctcaggtgtggatgatacttt

SEQ ID NO: 12883 - DNA, 525 bp, Gossypium hirsutum
  Clone ID: LIB3829-007-Q6-N6-D2
aataaataaataaataactcatttaagtaataataattctcatatcatatataattggtcccatgctcctgaaaacataacaatgcaaaactttcaatatttatggcttagatctctctcaaaacatggggaaagctgctaaagccaaattgcttccttcaccaacacaaccatctttgtcaccactttctttctgatctccatttatacactggcttggaggttggacatactaactcgtcttcacggagtttccacttccgaccctttttctgtaattccttcttcagtgacatttccatatatagcttcttcagcttattcactctactcttcctggcttctaattccctgtaagaagcaactgtcttccttttaataagatcagggatatcaccagaagggggagtaactctgctttctgaagcttgtgactgtaattctctagcttcttccctatcctcggcatagtaaatgtgtctgttagatggatgattttcaacagaatgcaacactgcagttagc

SEQ ID NO: 12884 - DNA, 496 bp, Gossypium hirsutum
  Clone ID: LIB3829-007-Q6-N6-D3
gggggaatcaaactgtttattctgaaaagcaaaattatacaaactcattttaactcaggccaaagcagaaatccggataagtcccaggagaagttacaaatccataaacataaagaaactctaacctcccttttgctcactgctgctattgatgaatcataagcaacaaaagaaattttgaatttgtttcttattaaagaaaacaaaacagaagagactgtcacaattggaacagctcttcagcgacatcttcaatcgaaaaccttaagtttccccaaaaactttgaaccaagcttaacaaagttctttggctgcagcaataacagcctctggagttaaaccaaattccttgtatattctccctgctggggcacttgccccaaaccgatcaattccgattgccttccctttggatccaactatcttcccccacccaaatgttgatccagcctcaatactcactctagctgttacagcagatgggaaaacactttcc

SEQ ID NO: 12885 - DNA, 519 bp, Gossypium hirsutum
  Clone ID: LIB3829-007-Q6-N6-D4
aaaaaatggggactttcaaatttgaaacataatttccatacaaacaattaaggcgacaaatgtgttttaagggagggattgggccagtacatagttggagagacagatcacacatactgtttcattgattcatacatattaaattgaggatcaaagccacatagaataaagccctcctattatatgcatattagcacactaacccatagcatacttctgggtccagctccgagcagttgtctcctacttagccctgtcggtcttgtacatgtgggcaatctctggcaccaagggatcatcggcatttgggtccgtcaaaagtgagcagattgagagcaataccttggatatggtgagggcagggctccactgctccttcaaaatatagaggcaaatgctgccattgctgttaatattagggtgaaagacctttgtcctgaatgcaaccttgggtggcttaaatggatagtccggagggaaatgaatggtgactacaaacactccaccggcatatggact

SEQ ID NO: 12886 - DNA, 528 bp, Gossypium hirsutum
  Clone ID: LIB3829-007-Q6-N6-D5
caaaaaactagaagtttcatttccattaaagtaacatacatcataatgagattctaacaatgcttccattttgcttaaagcagtctccccctgcactgtgaaaacaatccccccaaaggacatacaactaagaaaaataagccctgtggatctagttttgttaaatcaatttaagctttcttaggagacttggtggcctttgatggagatttgggttctttgccggcggccttttcagtcttcttcggcaaaagaactgggttaatgttcggcaacacaccaccgtgagcgatggttaccccggcgagaagcttccctaattcttcgtcgttcctcacggcaagtagcacgtgccttgggatgatcctgtttttcttgttgtcacgtgcagcgttcccagccaattccagaacctcagcggccaagtactcaagaactgcagccaagtaaaccggggctccggtcccgacccgctgtgaataccttcctttcttcaagtaacggccgatcctaccaactgggaactgg

SEQ ID NO: 12887 - DNA, 535 bp, Gossypium hirsutum
  Clone ID: LIB3829-007-Q6-N6-D6
gaaagatgaacttctaatgacaattccatcaaatcaataaaggggaaagcaaatccacttaaacacaagttgcagctgactactcagggccacttaatcaatcaagaaaaatagaaaataaaagtaaaacccaagctgcctgggggagaaactatggtatttctaagtcatcctctgtgcagcttcttttgcaagaagcttctcctttgccttggttctggcctgtgacttggaccccatgataccacctccccacttcttccggtactcatcgtatttgtcattgaagtttgccttgatagcctcaaggattttgctgaagtccaacttatcctcattcttgacagtagtcaagcataagacggaagcagttttcttgtggacaatcgatcccaaacgtgatttccccttcacaatgcagtatggaacctccatctttctgcacaatgcagggagccatactaccaactctatgggatccacatcatgagcaataactaccaattgtgctttgttctgctcaatgaggtaggta

SEQ ID NO: 12888 - DNA, 414 bp, Gossypium hirsutum
  Clone ID: LIB3829-007-Q6-N6-D7
agggcacggaaaaaggggggaaaataattggggaggggggggcggccccaaagggggaaaaaaaaccaaaaaaaaaaaaactaggggggagtactaaagcgtcgccggggtaaaaagaaaaaaacaatcctttataaaggggggggggcccaaaaaaaaaaaccccaataaaccccgagcaaaaaaaggggcccccaaaaaagcaaaaaagggggaaaaaaagccgttttggaaaaaccaattaaaaaagaccctttgaaaaacgggggggaaaaaaccccaaaaaaaaaattcaaaaaaaactgaaaaattgaggggcaaaccccaaagaaataaaggacccctaaaaaaaaaaggggccccgggaaaaaaaaaagggggggagattccaaggatctttttcccccaaggggg

SEQ ID NO: 12889 - DNA, 530 bp, Gossypium hirsutum
  unsure (1)..(530): unsure at all n locations; Clone ID: LIB3829-007-Q6-N6-D8
aaaacatagnaactatatcttcttaataaaacataaatagagaatttcaaatccaacatctcagaacattaaaacttaattgtaatgttaccttaatcaaaactgaaaacagcaacctataaataaaacctgacatgcaaaaaggtaccagaaatataaaaaggtaaaattaagaacatattccatcacttaaagcacttggcatccaagagaggctctccctcaaatggctcgcagtcttcaatcatctgattcacccgttccttctgggctgcatctgagaggtcgaccttcttccactcgtagagttccatgtcatagcactcgtcaatcacaaattgaggaatctcttgcccacggaaaagccatagtcctttcaccttgaatggagggttagcaccgatcaccaacatcttcccaaatgcatacttgcgggccaaatccattctctgcaggaatcctccaaccttgttcattgtgacaaatgaaactgtattctcctcattgtacttgtagtcacaaaaccacag

SEQ ID NO: 12890 - DNA, 530 bp, Gossypium hirsutum
  Clone ID: LIB3829-007-Q6-N6-D9
aagagtaatagtacacataagcatttagcagatacggctgctccttttacttgttccgactcattgtttccctgtcatgaccaaaaagacaaaaaagaacttggggtttgggttcagaattttataccataacattattatatatgcatactagtgggagtagatgttgaagtgggaaatcacttttaaggatgttgatggagagcatatgtcaggctgtcgcactatatagatttgatcgccaggactatcctccttgtatgtatcctgatttctgtgccaactccacaatgcgtatgtcgaattcaaaacctcaaggattccatgcccgaagctgctttctctatatgcactccactctggttgtctgtcccaacaaaagttgcctttagccggaccagatgagaaattcaagtggcacacacctccaatctctggcatattgtctccttgtgaagggcattttcctggttcatctgcatgatcaacatctactttctcgatgttcccgccatctccgactgttatgt

SEQ ID NO: 12891 - DNA, 470 bp, Gossypium hirsutum
  Clone ID: LIB3829-007-Q6-N6-E1
ctattcaaaccttttttttttttttttgtttttaacggaatctgtgtttgaatacgctcttttatctctacttacccttcgggggggaacgcaaccacaagcatctcacggggtaagcatgaaatattattgagacccttaagtgaggggtggaaaagccttttgcccctcctaacaaagggataactcaagttatgtgccaggctcccagaagccaacacctcctttttgttaaaaaacggtgcaattctgactggactaaaactgcctgaattgacggaataacccaacaatgccataacagttggtgtcccacgttttccctagaaccccgcaaagggtataatttccaacaaattgcccataaccccctttgatttaacatgcataccccctttgcctgcttctgtaaagggaaaaaaagccaactgccttttagtataaaaacctccgtcaggcttataccgcta

SEQ ID NO: 12892 - DNA, 190 bp, Gossypium hirsutum
  Clone ID: LIB3829-007-Q6-N6-E10
gaaaggaagcgttggacttgattggatgtgatggggtgaagatcggtggcgggaggggaagggggtggggtgggaaggagggcggtggggggggggggaggggggggggggggggagggggggggaggggcgtgggggggctgggggggggtgagcggggggcgggggggggggggggggaggggggggg

SEQ ID NO: 12893 - DNA, 342 bp, Gossypium hirsutum
  Clone ID: LIB3829-007-Q6-N6-E11
ggggggggggtttttgtatcaaatttcaaaatatttgaggagactcctccgatacaagaatagctaaaccatcacaaaaacagaggcgcaaaacagatcagttccagggggacaaactgagagaaacccttcaccctgcataatatcggggggggggggcatgacaatgactgcggccctggcatttgagaaggggctgagaaattgcgtggcacctgccatttgtggggaacctgaggactgcgctccacccatctcagcatgtgcggagggggaccgtggtgactggccaaagggggagggggacgcccaggggaatctccacctattttcatttaaaac

SEQ ID NO: 12894 - DNA, 444 bp, Gossypium hirsutum
  Clone ID: LIB3829-007-Q6-N6-E2
atcaaaataggatgcaagaattactctctaatcatataaattatctaagaaagctctcaaggcatgtacatggacaagaaaagaaaaccaggatacagccatacaattctagctctgcttaagcaactttggctggcagtgcaaaatattcttttggcactgaattcatatccaaaactgcctcaccaatattcaacatttcatcaatgctgcgcccattgaatctgcttaatatcaataccttccttcaccatctcataaaggggactcatttccctcaatttctcaacctgtttcacaggaagctcaactgccctatctatctcttcctcagtagtaaaccttccaatcccaaacctaatcgaagtatgtgccatatcctcatccacacccaaggctctcagcacatatgatggctccaaactagcactagtacaagcactc

SEQ ID NO: 12895 - DNA, 525 bp, Gossypium hirsutum
  Clone ID: LIB3829-007-Q6-N6-E3
gaacctccgcaacttgaagaaatgttgcaatttcatgaaaccgttaaaattccatagaatttcattaatgatttgcagagactgcaaatacaacaaaatgaacaaaaagtacagatttctaattctaggaatcaatcaactaaaaactaacagacctaagctctctctcctctaatcctcctagcaagttggatatctttaggcataatggtaaccctcttagcatgaatagcacatagattagtatcctcgaacagtccgacaaggtaagcttcagcagcctcttgaagagcagcaacggcactgctttggaacctcaaatcagtcttaaaatcttgagcgatttctctcacaagcctctggaacggaagctttcggatcaagagttcggtgctcttctggtacttcctgatttccctaagagctacagttcctggcctgaaacggtgaggcttcttcactcctccggtcgccggtgctgacttccgagcagctttagtggccagctgcttacgcggagcctta

SEQ ID NO: 12896 - DNA, 439 bp, Gossypium hirsutum
  Clone ID: LIB3829-007-Q6-N6-E4
aaaacgtagcagggggggggaaaaaaaaaaaaaaaaaaaaaaaaaaaaaaaaaaaacaaaggtcaagggggcagggaccaaaaaaaaaaaaaaggggaggggggggggggggaaaccggaaaaccgggaccgggaccggcaggggaaccacctaacccaaaagggaggaaaaaaaaaggggggggaaaaaaaggggaaagccgggcccggggggaaaagggtaaccggtgaaaaaaccaaaaaaaaaaggaggcggaagcaaaaagggaaaaggcgggggggccaaaagagaaaccaaaccaaaaggagggggggggggggcacgggccccgttaaaaaaggaaaacgggaagggccaacaaaaaaaaagaaaccgccaacgcggggggagaggggggatgggaaacgggggccaagggggggtttccttggaaaaggg

SEQ ID NO: 12897 - DNA, 497 bp, Gossypium hirsutum
  Clone ID: LIB3829-007-Q6-N6-E5
gaaggttctaatgagcaaactattttataagcaatcagaaaagatagtacaggaaattcttaatatcctacttgggagaaagatcggaaaaatacagaggatgagaatgagtacaagggaagcatctttaagttgaaccattcttgatgtcaggttccttgcctgtctcagggagaaaacacttgcacacaacaaagacatgatgtacctttctccatttgacttaatcacccacattctctcataccctttctgccaacagcaattgttcaagttcttctcttattatctctagatcttgaactgcttgttcccttgtaatttccttttgctggcgagaacgtttgagaaagccaatgcataagattccctcagcagcttccgaacttgaagacaggtactgataatagtaatggcacaaggcatcaggcacagatgctagcgagtttgcccaaacatcaaggttctgatctgtaacctttaccgcaagaacctca

SEQ ID NO: 12898 - DNA, 507 bp, Gossypium hirsutum
  Clone ID: LIB3829-007-Q6-N6-E6
aagagagtaataactcctcccttacaatggggaattctaaaatagttaaaagttccatattaagtgggcaatctaaccacatgtaaatcacaacataaaatccttccgtaaaaccaacgagttccaacttacaagcatctaaactgcacacattcgctacttttacctggaggatgggtctgccttgccactttaacggaccagtctgattcagaattccaacattcaccagccaaccaaatgtatataacttcttcatacccttcaagaaccggatcttcagacaagagaaggggagtatccaaatcaacaaatttgaaacatccaaggccagcagcaagatgaccagcaaagcccatggccaacctggtttccaccataccaccaatcatgagatccagtcccgatgccctagccaaatcaataatttcaagagcaccaaggactccaactttagcaagcttaatgttaacaacatccgcaagttctcccttcactattttctta

SEQ ID NO: 12899 - DNA, 203 bp, Gossypium hirsutum
  Clone ID: LIB3829-007-Q6-N6-E7
atggttatatagatttgggagaaacaattcaccaacaacttcaaattcacataccaaatcaggcatcttatttcacatgccaaatcagactccttaatatccagaaattggaatctaaatttaatatactttttaagaggtgaacacaaaagatagagctaatgctacctttcccattcagagtgtcccatcctagaaaaacc

SEQ ID NO: 12900 - DNA, 519 bp, Gossypium hirsutum
  Clone ID: LIB3829-007-Q6-N6-E8
aatataagataactcgggacctttaaacaggggtgacatgaagggggcttgagtatgaaagttttacagtgacaagtgaataaaggggcaaacaattcaatgagattacatcatcactcacgatattacctctttcaaacactgggaacaaacaggcatcctccaaacatgcacggaaaatatgggaaaacaatttatatccttggcaataggcgcgataactaggtttcatttacctgagtgggattatataatacaagtgaaagggtgttcacaatatggaaggtactccaactgagttatctgccgatccggacaagaaaataggcaagcttgggtgccaatccacggttgtgatggctgcactatggggaagagttttgaacccatttgagagggcttgtacctgatatatgggggctcttacggaaccagatgttgctaacagctgcctaccgctggcatccaatgcgcatttcgtgtctacaatattttgacgactggggttcacaaaaccag

SEQ ID NO: 12901 - DNA, 430 bp, Gossypium hirsutum
  Clone ID: LIB3829-007-Q6-N6-F10
aaaataaaaatagggagcgacttcattcatgcggggggcacagagataaccagggggctaaatgggcaaacaaatcttaatcctatggggcgaccaaacataaaacagcgatttaaacaaccaaggggggggggggggttgcgcacaaggagcggaagaagctcacaatgagaaaaaacccttcctcaacatgagattttatcaggaaccagggtgtctgcggggcaaaggcttccaaaactcatcttctcggggtatggtccttgctttcttcttcgactccatcgggctttagggctttcaattttctgtgacccttgggaggaccgagtatccaggccatggaaacaaatgtggatgagtaggtgccagattttgtgtaaagcaaacgaggaggagaggcatgaaaatcagcacccccatataaagg

SEQ ID NO: 12902 - DNA, 492 bp, Gossypium hirsutum
  Clone ID: LIB3829-007-Q6-N6-F11
aatgagatattttcattaaatttattgggcgtgcataatgggtattactatgggggagcatcatttagaaaacctttgtggaaaaatgagatctaaaatttcaaaggcaggagcccaaattttgttacaagagaaagggagctaccaaaatctcatatttacaagcttagccaagaaatgtttcccctttttttccatttcccttgggtccggacaaggccaactacctttgacattcgaaatactctcaattcaacggccaatctaagctctcattatcatcggttacaggccaagcaccttccctaatctcctgattcaggtggggccagccccaacccgtgtaaccaaagaaaaaccagtagtcactcatcggctgatttccggcctttagcttttcgatattagcaaccggggcaaattgggcaaggaagtagatacctggaagtacttcaacgtactggacttcactaactctcctacttaaaggaa

SEQ ID NO: 12903 - DNA, 569 bp, Gossypium hirsutum
  unsure (1)..(569): unsure at all n locations; Clone ID: LIB3829-007-Q6-N6-F12
ggggggggggggggggttttttttaaacaaacgcactatgatttattattattacttgtgaaaagacaacatgcaaactgcctcttctaataaaaacatacaagcacaaacactaaatttaaacgacctgcttggggaccccaggaacccacccattgaggtnagancggagggaancatgaaaaatgcccccccccccccaaaatgcctgcttgaaccttctctaaactctctctccctgccatatgccaattgcatgttagtttagccaataggcaagctatcattggtgggtcatttccatgccccagtcccaagcctcatccaccttaatactatcacatccttattcaactagaattgaaactaattgatttcaacatgcaaacttagctaacagtaagcccactacacaagcttccattgattccccatcttacaagcttatttactcggtagtagtattctcagcttgagcttcagctgggttctcttcttcctttgcagcttcctctttgggtgcttccactggggcgggttcggcttctgcttttacttctgctgctgct

SEQ ID NO: 12904 - DNA, 526 bp, Gossypium hirsutum
  Clone ID: LIB3829-007-Q6-N6-F2
agaaaatggggactttcaaatttgaaacataatttccatacaaacaattaaggcaacaaatgtgttttaaggagggattggtccagtacatagttggagagacagatcacacatactgtttcattgattcatacatattaaattgaagatcaaagccacatagaataaagccctcctattatatgcatattagcacactaacccatagcatacttctgggtccagctccgagcagttgtctcgtacttagccctgtcggtcttgtacatgtgggcaatctctggcaccaagggatcatcgggatttgggtccgtcaaaagtgagcagattgagagcaataccttggatatggtgagggcagggctccactgctccttcaaaatatcgaggcaaatgctgccattgctgttaatattagggtgaaagacctttgtcctgaatgcaaccttgggtggcttaaatggatagtccggagggaaatgaatggtgactagaaacactccaccggcatatggactgtcaggtg

SEQ ID NO: 12905 - DNA, 541 bp, Gossypium hirsutum
  Clone ID: LIB3829-007-Q6-N6-F3
ataatctaaatagtgatttaattaaattaaatgttattcaacaaagatgacattgtctcaatatgctaatagtttacagaggcaaataattacagaggaaagggattctacatatgtttagttgcatccaattctcacagttatttaacatgagaggaatcagatgtagtaagctctacattcatatttgaaattgctttggcaaaatacgcctttgcttcggctctcttaatcttaaatgtaggagtaaggagaccattttccatggtaaagggttcgagcaccaacgtcacggattttgcaaattcgaagcctctcaactgagcatctcttccaacggcatccatctcagcctgtacggcagctcttgcccttgggtcattgcacaactgttctaaatctttgtacttaatgccttgagatgaagcccatgctttaagagcatcttggtccaccgacacaattgctactaatgaagaattaaggctgtctccatatataaaacattgggctataaatttgcatttagcatatacatttt

SEQ ID NO: 12906 - DNA, 523 bp, Gossypium hirsutum
  Clone ID: LIB3829-007-Q6-N6-F4
caatgcaaaatactaaatgctacccatattacatatgacaaagaagatacacacaagtcagatactatttaagagtcaactaaatagaagacaaaatctcatcagccatggatagatatatataagcatttaaaagggggcctaaaccttttatttaagtaataaaccctaaactaaaacacacaatctagtttgttcttggtgtagcccattcaactctcaggatgagattatcataaccatagccattgagtttgtttatagctctctgggcatcatccttgttcacaaaattaacgaaaccaaaaccccgactcatgccagtcttctggtcaatggcaacataaactcgacttactgcaccaaatggccggaaaagctcgtgcaagtcagcttcccgggtgtcctccgaaagattagtgacccggacagagttctcgtcgtttctgcgtctcatatcagttccgcttctatcagctccggctctcatacctggaggaacataagtattcttccctgatcc

SEQ ID NO: 12907 - DNA, 525 bp, Gossypium hirsutum
  Clone ID: LIB3829-007-Q6-N6-F5
gatggtctctacattcaacaatatgactataattgtgtaccgaagtgaaaaagttaaaaaacaagaaatatcatcatgttcataatcaatatccaactaaagaactcacaattgggatgatatcgatcctgttactgagaacttaatcggtccccttattggctcggaaaggtaaggactactgctttagatagatagttccattttcgagataagaatgccgtcactatcggcatacaaccattcgccatcacggattaaggttccggcaatgctgatcggggcatgcttttcaccaattgcctttttatttgatttcaagggattagatcccaatgctcggacgccgatatcgcatgcattaatctcatccacatctcgaatgcacccgttcactacaataccagaccaacccatgttttgagccgactgcgccaagtttcctccgaccaaagcacaccttttgcttcccccaccatctatgactagaactcttccttcaccccgggtttcaagaagctgcct

SEQ ID NO: 12908 - DNA, 415 bp, Gossypium hirsutum
  Clone ID: LIB3829-007-Q6-N6-F6
ggggaaaccgggggggggacccccccccccccggggggtcccccaaaaaaaaaaaggcccccggggaccccccccggaagagaggccctaccccccccccgggggggccaaaaaccccaccccgggggccccccggggaagggaaccccccccccccccccagaccccttggggcccgggccaaccccccggccccggggggggggccaagcccccccaatcccccgaccccaaaccccccccccccggggccggacccccccctttccccccaaggggggccccccccccccgaaaacctggcccccggggccaaaaatttctgggccccccccccaaagcccaatttccccccccccggccccaacccgaaaaaaaagggggaccccccccaagggtgtcccccccaaacccc

SEQ ID NO: 12909 - DNA, 527 bp, Gossypium hirsutum
  Clone ID: LIB3829-007-Q6-N6-F7
atagccaaaattactatcagcaatcaaaattcattgcaaattagagtaaggtcgtgaagggaaaaaagcagaacatgacaccttaaatagataaaagacgttccctaagaaataataaagcagtaaactagaaaaaaaaggggaactgattcttcattcttcctcctccccttcattctcggcaatattgaagtagcggagttcgtaaacagatctgtccttgttggaagcaatcactcgaagccaatcccggacattgtgcttcttcaagtacttcttggtcaagtacttaagataacgcttggagaagttggagtcagacgtgacggtgattttggtcttgtcgcgggtgacggtgacggagtccccaagagcaccggctttgccgcctaccttgatccgttcctggaggaacttttcgagtgaggcaatgtccatgatcttatcttcaaccggcttagcacagtcgatagtaaaggtcgctcctttcttcttccccttgggtcccactgctgcaccacgactca

SEQ ID NO: 12910 - DNA, 526 bp, Gossypium hirsutum
  Clone ID: LIB3829-007-Q6-N6-F8
ctattccattcatcctctattccattcagcgaaccaaacatgctgttacatttatagtgcatttgtaaaaggggcagtcccaaacacttctatgttcatctaaatgcgtacaaaaggagaaatttgaactgtgaaaattctaaatgttgaaatatagtaaagaaattatatatctcaaaatcacaatagatgcctgtgctggaaaacacagtttgcacttggggatatgcatatattctttctctttgtcttcaacatggagaatcctgtcctgcattagcagtccaaagtagagccttggaatgggtgtggaaaattacattacttgtccccaccacctccaaacatccccatcatgtctttggtagaacccatttgcttcatcaagttctgcaacccacccatacccccaatttgctttaacatctgcgggaggaaggaccttgctcatgtgctgtgcattcatgtgccgagacaacgcactcatttcacccttctttggaattttcagccccttcatcttgct

SEQ ID NO: 12911 - DNA, 507 bp, Gossypium hirsutum
  Clone ID: LIB3829-007-Q6-N6-F9
aaacaaacgaaaatattaaacctccattggaaaacacctccgtttacataaagattttgccgagaaagcaaattccagaaactaaatccaagatctagatctttctaaattttataatcaatcaagtaaatacaggcaacctaagctctctcacctttaatcctcctagcaaggtggatatccttaggcatgattggaactctcttagcatgaattgcacacaaattaggggcttcaaacaggccgacaagataagcctccgccgcttcttgaaaagcagcgacggcgctgctttggaacctcagatcggtcttgaaatcttgcgcgatttccctcaccaacctctggaaaggaagcttcctgatcaacagttcagggctcttctgatacttacggatctctctcaaagcaacagttcctggcctgaaacggggaggcttcttcactccaccggtcgccggagcggacttacccgcggcctttgtagctagctgcttcctcggagct

SEQ ID NO: 12912 - DNA, 521 bp, Gossypium hirsutum
  Clone ID: LIB3829-007-Q6-N6-G1
aataggaatttatttcattaacaaagcaagcttttacaagataatttattctctcatcacataatataaaactccatataaagaactctcttttttttttttagagagagagagttctatatgggcactcttgataaccgggaaaggtagcttaagtaggcacataaatataacacatagtaggacaaaacattagagttttgatccttggttgggcaaatatacagcagcaacactctcttaagcatccaaatgaatcatgcatctcagacctataccctggagcatgtagtccaatgccttgtttatatcggcaaaaggcacagagtgtgtgatgaacttgtccatatccagccccagctccttgttcaaatatttgtcgacaaccataggaatatcagtgcgtggtttatagttgccataaaaagcacccttaagggtcctctcacttagtagattcattggatgagttttgaatgcatcgtctttctttggcacacccaccagcacacaaacacccc

SEQ ID NO: 12913 - DNA, 531 bp, Gossypium hirsutum
  Clone ID: LIB3829-007-Q6-N6-G2
actaatgaacatatgtatgtatatatatatgaacacattggtcacatagtttaagaacactaattatattaaaaatgacaacagtaaaacttttttaacaacaaataacaagatcaaaaccctggaatccaacatatataagaaaattttcttctccaagtaaactttcttgtctatttcctatttacactatttttttttccattttccttgacctaaacctataccggaaaccccattcctccttacatgatagcacaagcattggtgttctcatcgttaaacatctggtgaggtggattaacatacaccgggtaacctggcacatacccggggtaaccatgcccgtgtgggtgcggatacgggtttccatacgcgtaagctgggtgcccgtatccgggataacccggaatgtaactaggcatgtgcccaaattggggtggaagcatgaactccattcggttcccttccatcttgccaccattagcttggttcccaccatcttcaccaccacctttggtgttcttcttc

SEQ ID NO: 12914 - DNA, 529 bp, Gossypium hirsutum
  Clone ID: LIB3829-007-Q6-N6-G3
aggaccataagcgtaaaacttatagtatatgagactttatttcagttatggcacacagatcaaaaggatcaacaataagtttatgcttccgaaacaactagatgatggcctttctacatttcagtcctttactcatcctccgcaactccatgtctaaatgctgggtctcacattgaggcgagatgctaacttctgacccactgatttatcagcctgagaccagtatgagatccatatgctgcgaatttcatgagtcacacgtggatcagacaaggcatcaacccagcggcagatgaatcgttcttgcctgtctgctgcccaggaccggtatctctctccgggctgtttgaagttgttctccttctcaatgatgcacttctctcgccttccagtgcaaacagcaggtgggatagggaacatctctgcatgacgaacaggatcgtaccttgaagggaagtaatttatctcctcatccctgtgcatgaaattcataaaaccttcgtggtgattgttgtgatgagcacacttg

SEQ ID NO: 12915 - DNA, 527 bp, Gossypium hirsutum
  unsure (1)..(527): unsure at all n locations; Clone ID: LIB3829-007-Q6-N6-G4
caagaaaaccagcaatggcaactcgaagctgccgttaaacaaaatgcagtaacaacatttcatcgaacaaaagttataagcatggtcaacgaaaaaggaaatttatggaatcagaactcagtaattagaaacagcttatattcagatataattgtgtcattgtatggcgttcaaattcaccaggtaggtgaagaattactaaaagatgtagaacaattggcagctccagcacagatcagctggataaaagcttttcaagggccaggttttcatcacccccaactgcttctagagtacttctcaccaaaccatcaggaaaacccatttccacgagtcgttgtaccttttcctcaacccctaaagaagaggccttggcaaaactttctgtccagtaacgagctgtaccaacaaatgtctgatactctctaagatactgttgtgctactacagcatcttgaggatcatcaggttcaggagctgaaagcaaagcttgaacagaaagaanagctgtcttaagagtgagtgca

SEQ ID NO: 12916 - DNA, 529 bp, Gossypium hirsutum
  Clone ID: LIB3829-007-Q6-N6-G5
gaagaccaaacgtaaatctttattataaaacggaaaataaataccaaaccccttatcatgactaaggggatacatccatggtataaatagatatcgttctaacattaaacactggttggagacttaatacaagcaatgggatcaccatttattgcatacttaaacttcgttggaggagcaattcaccctttttcatgacaggtttccacagctccgacaaacatgacttccaagctggacttaaatagaaaccctaaatccaacagcttcttggaattgaaaaccacattttccaagatttcatctgaatctttgaactcagtaggaatattgtagaatgggtattattttcttatcattttggcaagctaaacaatggtggcctcatgggaggagcaaatggatctgccttcagctttagggttttcaaacaagaatatgtgagacatgcacagatcattcaagtgcacaaactgcccttgcctaatgataccataatgagcttcattcccaattaagtgtgaaaggc

SEQ ID NO: 12917 - DNA, 440 bp, Gossypium hirsutum
  Clone ID: LIB3829-007-Q6-N6-G6
accaaaaagggccttttccatggcgggatcaaagggcaaacaaccctccccactatttccctaacacaggccccggactaacatccaggggttcacaaagggggggggggggggaccaaaaaaacccaaaggggccgcctacccagtcgttctaagcagccgccttctgggccctttaagccgcgggggacttgagggatttaggctgcttcgggttcgggggaggtgatttcttctgggccccgactctttttgggggggtcttgggggccccaactttcttcgggtcaaaagcggggttagccctcgggcccatcttagcttgcggaacagggggcctctcttttaggccgggttccgaaagcttgtaacaggccctgatctttatcaacgggcctcaggcaacagagttttaaagctgaaaaccaaaaatttcccgg

SEQ ID NO: 12918 - DNA, 519 bp, Gossypium hirsutum
  Clone ID: LIB3829-007-Q6-N6-G8
aaccccttaacatcccgtaccttttattaaaaaacaaaaatatctcccaagaaattacaaattacagttaggcgtaaagattacccatcaaagcgattaaaaaaaaacaaaaggggaaaaagggtgagcttttgggttcagttttgggataattaaaagaaaaagaaaaagcaaaattcttgacttccagattctgctttccatcattgacttaaacaggggatcgtgggcaaaagaatgactccaaaagcttgcttatatattgccaactgtttacaggtcactttttcagataccatttttcaattgactccaacaggtgcttgttgatttcagagccgcacagtaattattcaaccacatgggtgcagatttcaggacacgaagttcaccggttaggagatcatgagccatttgcctcccaagagtgaaagtgttactcattgagggggaattgagaggaagagacttaatgggtgtatcatatttctgcattaactgagtgatgtgagatgataa

SEQ ID NO: 12919 - DNA, 511 bp, Gossypium hirsutum
  Clone ID: LIB3829-007-Q6-N6-G9
atgctaagcaatatatatatatcgcccaagcctaaagggaaattgtgctaacaaacgcctccaaaaaaaaaaacattttgttaatgagggggggaattgggaagaaaatttcgagacagtggggggcctattttctacgtatcctcatcgaatgggacagggggaatatagcttaaaacccaagccgccaaaaaaaagggatgttctaatcctagccaagaattgacttgattttcgccttctgatcctccccaagggagggggggaacaaaacctcataggggacaaagaggtctcctttcttgtggctaaaatgcaatggcattccttctcctttgaactttctcacctccttcggcttgggaatacccttagagccaatctccactaaatggtcatcaaggggtttaatgggcttatcaaaaccaacaagagcttgaacaagtgttatggtgacggtggtgtgcaagtcattgccttccctcctgaatcgggcatggggtgctgtatg

SEQ ID NO: 12920 - DNA, 511 bp, Gossypium hirsutum
  Clone ID: LIB3829-007-Q6-N6-H1
cgagctacactcaaatagatagattatgaaggcaagtgtttaatttacatcctaaatctcattattcaattaccattacaaagaaattgtcttgccttgtgttcctcggattcatcatggacattcactaattctttcataatttaaaaatgtaaagctcatatttgtttcttctttcccagcctactggaaccttcattctagatgctattaacagtctcagctctacattttaatgtagtttttccttgcatatataaacctctaaattccatggcgtttcttccatctctgccggaaccattaaaattctataaaataaattataatggttatgaacgggaacaattttgcactaggttcaccattttcctcgcattgtagcaaattagcgatgttaccttgaaagataactgctgacagctgaatatcacatcatcttttccgctttcccaccaagcttctccgctcagcttccctttccgcaaccaaaacatgaaactctgagcct

SEQ ID NO: 12921 - DNA, 525 bp, Gossypium hirsutum
  Clone ID: LIB3829-007-Q6-N6-H2
gacaaatgaaggggagaacatttgcattaaccaagatcaatattcaagctatagggtgaaatttcctacactcggaagtgatagaaatctgaaaaacttcccaggagctttcccgggaaagatttgccgatcaatacaggcaaagcttagattagacaacaatagaagctatgagagtgctaaatggatccgactttacaaaaacaaattaaataaattacaaattctctacaggcccttattagattatccaaccaactcagtcagagggtataaccttgctggaagggtgaggccacagccaataattttgacgaactgggagattaggctgcaatgatgcgattgcaaacccagcagattgtggaactccaattggtggatgctgaatcgaactaaatgagagagacaaggaggattcaactggtgtgtgaattccattttgatcaggagtaagcaatgaccaaaaaactgattgctctggatgatctttcagactaggacaaaacagtatatcctcttcca

SEQ ID NO: 12922 - DNA, 508 bp, Gossypium hirsutum
  Clone ID: LIB3829-007-Q6-N6-H3
aaatatcatcaaatcattaaatatagtgtcttgagtagtaaaaaaaactggggtaatagatataaatcccaccagcaacattcaacactgttaagaagcttaaacaagcacaagcattggcaaataccatgcttcaggggaattattcttcagcagcactagcagcactcaaatccacactgaggtcaagaacctttccagttatcatgggatacatgttaagtacatcactgacaggtgattcaaaatgtgttgtagcatcataacttgttgatatgaaacaattgtcaagagaaggttcgttgactggttcatatctgtcatagatatcaaagaatatctcatcaacgggacctaaaaggtcaattccaggctttagttcactctcagggtgatctgtctcggcctctgttgaaacaaatgcaatgaatttgccctttggagcaacattgtgagaatatgaacaacagaagacatacatatccgatttacgacccaactgcttttg

SEQ ID NO: 12923 - DNA, 496 bp, Gossypium hirsutum
  Clone ID: LIB3829-007-Q6-N6-H4
gaccgcgcaaactggcactaacttttttttaaaaaaactcgtacaataatagctattaacattaatgttctcaaaacccttgaatattaaataaataaaacaagcggcacaatccagtctccagctccaaacatccatttaagcagcatggttcaaagatggattgtaaggaaggaattaagcaccaattgtccgtccaccgccatctccttagggcccatcatcttaatgggggtgatacggtgaaaggctaaaataataatacgtcaatatcaagtacaccgtcctacaatgatcgctaacttcccccacataaaccagacttttgagttcacttgacacggcacaccaaaaaaagccaactaaatgcaaaatgtagatcaccatcaaaagcaattacaaaacttagaagcacttcctgtggacaatggatggaccggactcatcatactcacccttggaaatccacatctgctggaaggtgctgagtgatgcc

SEQ ID NO: 12924 - DNA, 525 bp, Gossypium hirsutum
  Clone ID: LIB3829-007-Q6-N6-H5
accaaaattcatattatcatatctatttccacaaaaggggggcttgggtcaagagtgagctacaaacatgagcgccatcggaaaataaatgagaaaaaaagaagctaatataccaaagcataaaccatcatacaaccgtgacaatctgtgactacagtaaccacagcttttatgaataccacagagaaaggggaaaatgggcctaaagttctaagaaccaaagctttgttccacttttctctcctcaacttcttcacttgtattccaaaatcatgttgttttcaggagccaagccaatgctggcccttagtatgttctccagcattgcacgctgcttggacagtgcgttcaccaccggtgtgcctgggggaacaagaggggctttggtgaggtaactgaggattgtagccacaggatggaaagagtggaacttgccctctccatcagccttgaactggatcctggtgctaagctcagcaaggagaaccaaatctaggataatgggagcagccaacagggaatcct

SEQ ID NO: 12925 - DNA, 527 bp, Gossypium hirsutum
  Clone ID: LIB3829-007-Q6-N6-H6
gccctgtgtgcataatccagtgtgctcaaggggtcctcaagacatgggcagcgggagaaactgtggctataatgcaagtgtttgtccgtcccccgagtgagatcacgaagtaatcgagtaagcttgctatccctgtgcggagatatgcccaagatgtgccacaagggcatttataactcgtgcctaaagtcagtaaacttttattaatttcaccggcttctcttgcgcgaccatctctagcaccagaacgagatatattttctgagcctgctaaatcaaccaaattcagcttcccacactttataagctcttcaccttcgggcgtagcttccttaatatgaattgtgatagaaaatagagaatgcgaccgacttgattgcttattcaacaaagtctcagcagttctgcgcttagcagaccctctttcaagcaaagtaaatatctcactagcacttgtgacaatttcttcgtctagccctctcacaagaactccccctttgccatcttccatcaatggcaactgcttc

SEQ ID NO: 12926 - DNA, 517 bp, Gossypium hirsutum
  Clone ID: LIB3829-007-Q6-N6-H7
gaaaggggtcacgtgaaaagattaaaaaccttccaaaaacctttaaagagtaaatttcagcctcccactaaaaaaaccaccttgggaaccccccaaattctaataactcactcctaataataatgaggagggggggggacaaatctcagcagacattgcaaagagaaggctttttaaaaatcgaaaacaacacagccttttcttatcagcctaccaaaagatagaggtgggtatctcatctcaggctccttagaaaatagggcttgtaactgcttatacctaacaactaacttctggccgcgtatatataaaatcataaaatgactcaccctgctaatcttttatgcggcactcggagtctccggtttgtgcagtttccattgggtctaccgatgctggaggtgcctcaccacttcctgccggcacattttcactggggtcaccattgcggttagggcttgctttccggctgtttgcaccctgtggttgagcctcacttccaggatgtggtggggtt

SEQ ID NO: 12927 - DNA, 535 bp, Gossypium hirsutum
  unsure (1)..(535): unsure at all n locations; Clone ID: LIB3829-007-Q6-N6-H8
tttttgaacaaanagggggttcattttcagaaagagagagagagagagatgtcacacaatatgcaagtgcatgaaattcgggctattgtgtctatcctagttccacattgagagttatatgccaccagnattcttgacagggggagggggggaaaagctagagtgaaacattgttggaatttttatctgggtgggcttgcgggaaaaggagaaaatcaaagcagacaatagagggcaatttgcgggtgaattatacaacccatgggaagctcaagtgtttatgacgtgcatttgcgcattcagcgagcttgctaaagctagacacaccgtggggaaaaaggtttgcccaacatacccgccagacattgccctcctcacattggattcaaacatctttggattatccctcaacactgcggcagcttcatgagtgaggggatcctcataattcggttccgtgaaaagaggatataaaccatagattatagtgtgtatattgagcaccggtttccaatcttcacgtaagatgttaagg

SEQ ID NO: 12928 - DNA, 534 bp, Gossypium hirsutum
  Clone ID: LIB3829-007-Q6-N6-H9
aagccctccccaccggggggagcccttttcattctatacattaatattatttaatataatgaggatgagagcctcgactaataggatacatcctcaacaagggagagggagtggggagcctcttattaggggggttcactcttgtgagggttaaaacaagtgaataaacaacatggggtctaaccgtggcctggggtgtccactgggaactctgggcgaggaactgagtgcaccatttcatggtgtgtcccaaaggtatggggatgcctgcgttatggggtgaatgcgttctaatgcgtaatctgctcctttcagggtcagcacagtgagagaaacaacccattttcctacttcggtgtggcggacactatcatcaaaaaacaaaggtctctgaggggtgattccagcaatcttaagagcctggtctatgggggattcttaaggggttccaaacaatgggtgtgcagagtcataatgagcgctcttggccctggctttagcgtggctaaatgggcaattatgtgaaaaatttca

SEQ ID NO: 12929 - DNA, 572 bp, Gossypium hirsutum
  Clone ID: LIB3829-008-Q6-K6-A1
gttttcttcaacggaaaacagaaactgagctttcccttctcaatggcaccgagggagaaacggcggccgtcaagggtactgggaataataacgaggttcattttagaggataaggaagctcctgggggcgttacgctgctgagatcagagatccagggaagaagagccgtgtttggctaggaacctttgatacggccgaggaagcagccagagcctacgacgccgccgctagggaatttcgcggcgccaaggccaagactaattttccggtcccttgtgagaatctcagcaaaggtaataactgtaaaagtaatggtaacaacaaccaacatagccctagccagagtagcaccgtggaatcctcgagccgtgagccggcgctcatggttgactcttcgcctttagatctcaacctcgtacaaggtgaggcggttaccggttacgtgcctacggctgttagatttcctttccagcaagcttcaccggtgccatatattgcgggccgcaaagttttctactttgaaccattcgttcggcctggtgcagtgaaaggacacccatttgaacggttt

SEQ ID NO: 12930 - DNA, 581 bp, Gossypium hirsutum
  Clone ID: LIB3829-008-Q6-K6-A10
ttctctttgaaaaaccgaaagtaattttccaaagggaaacttttgctcgtaatattctcagatctgctctcaaatcgtcacattttgaatagccaatatgggaggcgggttcagagtacttcatttggttagaccatttctttcgtttctgcctgaagttcagagtgctgataggaaaatcccttttagagagaaggtcatctatactgtgatatccctctttattttcctggtttgcagtcagcttcccctttatggaatacattctacgacgggcgctgatccgttttattggatgcgtgttatccttgcatccaaccgtggaaccgttatggaacttgggattacccccattgttacttccggtttggtgatgcaactcttggctggttcaaagatcatcgaggttgacaacagtgttcgtgaggatcgtgcactcttaaatggggctcaaaagctgttggggatcctaattgctgttggtgaggcagtggcgtacgttctgtctggtatgtacggaagtgttggtcagctcggtgttggaaatgccattcttattattattcaactttgctttgctg

SEQ ID NO: 12931 - DNA, 592 bp, Gossypium hirsutum
  Clone ID: LIB3829-008-Q6-K6-A11
gtcgacccagcgttttgtttactgcagactgttcttgcctttggagtgtaagattaggtctagcatcaaagcaaagactggcttcccggaatcggcggtgcctaattatccgaagtgcagcaacaaagcctgcaaaatcaccagctgaagaagactggaaggtcaagagggaacttctcttggaaaaagggtgggagggggggatgcaaaggaagcttttcgccttcaaaaagagaataactttgtgattctcgatgtacgtcctgaagcagaatttaaagaggctcatccagcaggggctgttaatattcagatatataggcttataaaggagtggacggcatgggatatcgccaggcgtgcagcatttgcattttttggcatattttccggcacagaagagaaccctgagtttatgcaaagtagaacaacgtgtagaatcaaattttggcaaggacgcaaagataatagtggcatgcacaactgggggtacaatgaagccatcccaaaatctacctgaaggtcaacaatccagatcactcatagcggctttcttgcttgtgctcaatgggtacaaaaatgttttccattt

SEQ ID NO: 12932 - DNA, 583 bp, Gossypium hirsutum
  unsure (1)..(583): unsure at all n locations; Clone ID: LIB3829-008-Q6-K6-A12
cggtcgcgtgggcggccgcgtgggcttttngaattaggggacttttctggaactggtttaagatctcatctcagtgaacaatggctagtctttacagaggggcatcaagggaaagacaagcagnaaggggaagacaccatggattaagccagcagaagaggcaagagattaaggaagcatttgaactgtttgacactgatggctcaggtaccattgatgccaaagagctgaatgttgctatgagggctcttggtttcgaaatgacagaagagcaaatcaatcaaatgattgcggatgttgacaaggatggcagtggtgccattgactttgatgaatttgttcacatgatgactgccaagatcggggagagggacactaaagaagagcttatgaaagcattccaaatcattgatcaagataacaatggaaagatatctgctgacgacgttaaacgcattgcaaaggagcttggtgaacacttctccgaaaaagaattcaggacatgattgaagaagcagaccgagatcatgacggggaggtaagtattgaagagttcatgaggatgatgaagaaaactacatat

SEQ ID NO: 12933 - DNA, 583 bp, Gossypium hirsutum
  unsure (1)..(583): unsure at all n locations; Clone ID: LIB3829-008-Q6-K6-A2
ngaaagcttagcctatttgcatgaagggctagaacccaagttgtgcatcgtgatgtaaaatcaagcaatattctactggacaagaagtggaacccgaaagttccgatttcggattagccaagttattaggatctgaatcgagctatgtgaccacgcgtgtaatggggacgttcggttatgtttcaccagaatatgcaagcacaggcatgttgaatgagggaagcgatgtctatagttttggagtattgctgatggagataattacggggagaagcccgatcgattattccagggcaccaggagagatgaacttagttgaatggttcaaaggcatggtagcaagtcgtcgcggtgaagagctcgtggacccgttgatcgaagttcaaccttcacctagagctttgaaacgagcattgctcgtttgtctccggtgtatagatttggatgccaataaacgaccaaaaatggggcaaatcgttcatatgctcgaggcagatgatttcccttttcgctcggagcatcgaccggcacaggagagatactctgttccatcctccgtgccaacatccgccaaatttccgca

SEQ ID NO: 12934 - DNA, 575 bp, Gossypium hirsutum
  unsure (1)..(575): unsure at all n locations; Clone ID: LIB3829-008-Q6-K6-A3
gngtctttngatctatctctagctttaccacgagtctctctctctctaactgcatcgaatgctttgcaaaatggtgatccttcgcaacatcggtctaggcctagtaggagtgtacagtccttggcaccatcaaccaataacacgcaaaccacttgctctaatgatttcactgctgcttcattgtcatactcttattctgtgccgtattcacacaatcctagctgctccttaacacggaattctactgagaattatgagttttctgtggggaaagatgatcaaatttggtgtggtggtgaaggtactaatggatccgtgcatagtcgttttaggccaattggtgatggagttgctttggccggtgccggtgctggtgctgggttttccatgatgcaggttaaccgtcatgtgaataaagattcatgcactagtcttcataggacttctagttcagataatcattcatttttcccatcagaattgcttgccaagcctcgcatagataatcattcaggggattcaaggagaaaggattcagagaattggagagttttggagagtatggatggagggag

SEQ ID NO: 12935 - DNA, 583 bp, Gossypium hirsutum
  unsure (1)..(583): unsure at all n locations; Clone ID: LIB3829-008-Q6-K6-A5
gttttggnatatgaaattcaccggttcgagccaactggatgaatgaatttagtggggtaatgaagaacgtatacgggcctgtaacagcagcngaaaacaatatatgaagatgatgaaagctttttgatcattgtcagcttgcccttttcagatcttccaaggtgaaagttgcttggagaaatactccctcacatggaattgtaaagatatcatgtgtgagtacagcctgcatgccattcattaagagacaagataggacgtttaagttaacagatccagcacctgagcactgccctccgggggaatttattcgagaaattcccctaccgaaccgcattccggaaaatgctaaactggaagcataccatgatgagacaggaacaatgcttgagataatcgtgcccaagcatcgcgtaggacctgaagagcatgaggtacgtgtctgctttcggccctcgccgtggagtgaacgaccattcatggacctggaggaatctatattgtgatacatgtaaggatgttagtggttggtgcttcattgtttactaacctcattccatgaggaaatctatgaaattataac

SEQ ID NO: 12936 - DNA, 575 bp, Gossypium hirsutum
  Clone ID: LIB3829-008-Q6-K6-A6
gtctgcaaacatcttgactgaggaacatgcagggaattgaagagggatcttatctcggagttgctgcagcatctgcaaatcctcctcattttattcatttatgctacaaaccaccaagcggacctgttaaaaccaagttagcattagttggaaaaggattgactttcgacagtggtggctacaatatcaagactggacctggttgctcgatcgaaaccatgaaagcagacatgggaggttcggcagctgtttttggtgcggcaaaagcccttggacaaatcaaaccttctggagtagaggttcattttattgttgcatcttgtgaaaacatgataagtggaaagggtatgaggcctggagatattgtcacagcttcaaatggaaagacaattgaggttaataacactgatgcagaaggtaggcttacactagcagatgctttggtttatgcttgcaaccaaggtgttgagaagatagttgacctggcaacactaaccggggcttgtgttgttgctcttggaccctcaattgcaggcgtcttcacacccaatgatgatctagcaaaggagttattt

SEQ ID NO: 12937 - DNA, 587 bp, Gossypium hirsutum
  unsure (1)..(587): unsure at all n locations; Clone ID: LIB3829-008-Q6-K6-A7
ttccagnaaaacttaaatgaccccggtgagccacatggggtcatcgtctgtgctgtttcttccgtttggttgcctgtctctccgactcttttatttgatttcttgagagacgaatctcgtcgcagtgagtgggatatcatgtcaaacggaggtcctgtacaatccattgcaaacttggccaaaggaaaggatcggggaaatgcagtaacaattcaagcaatgaagtcaaaagagaatagcatgtgggtgctccaagatagttgcactaatgcttttgaatccatggtggtctttgctcatgtggatgtaactggaatacaatcagtgatcacaggatgtgactctagcaacatggccatattaccttcaggcttctccattcttcctgacggactcgagtcaaggccattagtgatttcttctaggcacgagaaaagcaatgataccgaaggaggatcattgcttactgtagctttccaaatcctaacaacctccccgactgccaaactaaccatggaatctgtggaatctgtcaacacaatagtatcttgcacattacgaaacattaagacaagcttgcaatgtga

SEQ ID NO: 12938 - DNA, 582 bp, Gossypium hirsutum
  Clone ID: LIB3829-008-Q6-K6-A8
tgttttcattttccttttgtcctttttctctttcctaggttttcggttttctcagccaaggctttcgtttagcttcatcaatggcacaggaggaggttcagaacggaggaccggagaaagtagcggaggtgagcttcacggcgctgaaaccgcagctcatggtcgaagcacccaaggcagctgatgcggtgcagttctacaagaccgcgtttggcgctgttgaggctggccgtaccgtgtaccctaagcgcaaggctgagcaggagcagcctcacgtcctctccgctcaacttgagcttgctggctctaccattctcgtttctgacatcgctgataactctactccggtgaaaaccgaggggactggatgtgtgctctgcctggagactgaggacgtcgaagctgcaattgccaaggctgtcagcgctggaggcgttgcggagggtgaggtaactgagggcgatggcgcgtgctgtggtggtcgcgtgggcaaggtgaaggatccatatggatacgtttggcttatctgctctcctgcgaagaagtgcggtgacgcggaggcttagatgccgttcgatcttt

SEQ ID NO: 12939 - DNA, 577 bp, Gossypium hirsutum
  Clone ID: LIB3829-008-Q6-K6-A9
caacaatcagttcatcgccgctaaaaactgttaagtaacaaaaaatatcttgaaacccggagatgtcggacgaggagcaccatttcgaatccaaggccgacgccggcgcctctaaaacctatcctcagcaggccggtactatccgcaagaacggctatatcgtcatataaaaaccgcccatgcaaggttgttgaagtttccacctccaagactgggaagcatggtcatgctaagtgtcactttgtcggaatcgacatcttcactggcaagaaactggaagatattgttccatcttcccacaactgtgatgttccacatgtcaatcgtactgattaccagttgattgacatttctgaggacggatttgtgagtttgctgactgacagtggagacaccaaagatgatttgaggcttccaactgatgacaacttgttgaaacagataaaggacggttttgctgaggggaaagacctagttgtgtctgtaatgtcggcaatgggtgaagaacagatctgtgctctcaaggacattggtccaaagtaggctttgagatataaatggaaatggttcttataag

SEQ ID NO: 12940 - DNA, 588 bp, Gossypium hirsutum
  Clone ID: LIB3829-008-Q6-K6-B1
accctacaaagtcctgcaaattacatttttttctaaaatctgtgatgtttacatactgttgattgaattgtgcaagagccctatacttttcttagttcattggcagggaagaggaaagcaaagttctataaatactggagcaatgcaatttagctttggcagtatcatctatatcttacatcccccaactgtcgaagctcactgaattgatatgcacacaagattggctgcagatgcaatcggatggtttgattgtggcatgtttatgttaaaatatatcgacttctatagcagaggcttaagtctttgttttgagcaggaacacatgccctattttcgtttaaggaccgccaagaaaattctgaaactgaaagctgattgatcggatgtgtatgctggctttcatcaactactttcgagggccttactaggaattgaaatggtgtgcaaagagattgcttctcctgatttgatttttcaatataaatactggacaaagagattgctgttagtaaaataggattctcttcttaggatcttagtttcttcacttgtattagactcaacaatggcttgcattgcattgca

SEQ ID NO: 12941 - DNA, 596 bp, Gossypium hirsutum
  Clone ID: LIB3829-008-Q6-K6-B10
cggtcgcgtgggcggccgcgtgggcggtcgcgtgggcggacgcgtgggggcggagatggatggtgacgaccgttctccttctgtagttacttacaatattttgattggttctcttgccctccatggcaggacttaccatgctatggatgttttagatgaaatgattagaggacgttttaaagtcagtgctacaagttataacccaataatcgctcaactttgccaagaggagaaggtggatcttgtggttaagtgtctagaccagatgatctatagacgctgtaaacctaatgaaggaacatataatgctattgctgtgctgtgtgagcagggaatggtgcaagaggcattctccatatttcaaagccttgcgagcaaacaaagttcctctcctaatgatttctacaagagtgtaatttctagtttatgcagaaaagggaacacatatccagcatttcagcttttatatgaaatgaccaagtctggcttcactccggactcgtacacttattcctcactaatcagaggattgtgcttggagggaatgctgcaagcagcaatgcagattttcatagtaatggaagaaagtaacttta

SEQ ID NO: 12942 - DNA, 580 bp, Gossypium hirsutum
  unsure (1)..(580): unsure at all n locations; Clone ID: LIB3829-008-Q6-K6-B11
ggnacacgttctcttattgtcgagnatatcaatgttgccgcaattgagacgacactatggtcgatcgagtggggcattgcggagctggtgaaccaccctgaaatccagaagaagctgcggcatgaacttgacactgttctaggacctggtaaccagatcactgaacctgacacccacaaacttccctaccttcaggctgtgatcaaggagactttgaggttacgaatggcaattcctctactcgtgccccacatgaacctgcatgatgcgaaattgggtggctatgatatccctgctgagagcaaaatcttggtaaatgcatggtggcttgccaacaaccctgctaactggaaaaatcccgaagaatttaggcctgaaaggttctttgaagaggaagccaaggttgaggccaacggcaatgatttccgctacctccccttgcgtggggagaagaagttgcccaggaattattcttgcattgcccatccttggtattactttgggtcgtttggtacagaattttgagctcttgcctccccctgggcaatctcaaattgataccacggagaaaggtggacag

SEQ ID NO: 12943 - DNA, 572 bp, Gossypium hirsutum
  Clone ID: LIB3829-008-Q6-K6-B12
gtcaagttcctcctccacacccaatcttatggtgggaattatccacctgctcctatacatatggtgggaatgcaaattatggaatggattcagtccctccacctacaagctatactggtggacctacatcataccctccatcttatggtggccctgcgggtggctatgctggtgagggtttgagtgatgcacggactggtggtcgtggtggacctcctggtggatatgacggtgggtatggttctggtggtcctcgaaatcagggaggtggttatggtggtcctcctgttgaagcaccagctaagatcaagcagtgtgacggcaactgtggggattcttgcgacaactcaagaatatacataacaaatttgccacctgatgttactattgaagaattaagagacctttttggcggcattggacaagttggaagaattaagcagaagcgtggctataaagatcaatggccatggaatattaaaatatacacagatgagaaaggaaaccagaaaggtgatgcagttttgtcttatgaagatcctcaggctgcccactctgctggcggtttcttt

SEQ ID NO: 12944 - DNA, 576 bp, Gossypium hirsutum
  unsure (1)..(576): unsure at all n locations; Clone ID: LIB3829-008-Q6-K6-B2
gnatttctatttagttttctcttcctccaattaagatgcagatcttcgttaagaccctgaccggcaagaccatcaccctcgaagtcgagagttccgacacgatcgacaacgttaaggcgaaaatccaagacaaggaagggatcccaccagaccaacaacgtctcatcttcgccggaaaacagctcgaagatggccggaccttggccgattacaacatccagaaggagtccaccctccatctcgtcctccgtctacgtggtggcatgcagatcttcgtcaaaaccctgaccggcaagaccataactttggaagtcgaaagctctgacaccattgacaacgtcaaggccaagatccaagacaaggaaggcatcccaccagaccagcaaaggctcatctttgccgggaaacaactcgaggacggtcgcaccttggccgattacaacatccagaaggagtcgaccctccatttggtattgaggcttcgtggtgggatgcagattttcgtcaagacgttgactgggaaaaccataactttggaggtggagagttccgatacgatcgacaatgttaaggcga

SEQ ID NO: 12945 - DNA, 593 bp, Gossypium hirsutum
  Clone ID: LIB3829-008-Q6-K6-B3
atataacaaaaataaatactcacagtgcactgctggctcatgttataagttgcaaagctgcggtgtgatggggagtcggggaatccactatagttggaagagaggaagtggcaccaccccgaaaggctgaatgcacgccttaaggattgtctagactgatgattgatacactgttgtatgctacggggagtgtaaaggttacactcactcagatacctctgctactaggtgatcaaaccgaaatgatactggatagtgtgggaaacggtgccaacgatatggaaacctggcagatcatgtggctatactatcttaaccggaaatggcaaatgatgtcgccactggcgtgaaagtaaaaaagcaataacatgtgcgatcagcttaggatcaactgcaacacgagtgttactgctcgctgattagaaaaccattatctacatccatgggaatcctatgtaccagttatgcgtgaacctaaacctttagccaatatactgtcacacatgttggccagaacaacacaagatcatcttcaaccaacacttttgataaactctgtcccataaggctgtgggatatgtacaggttttggg

SEQ ID NO: 12946 - DNA, 559 bp, Gossypium hirsutum
  Clone ID: LIB3829-008-Q6-K6-B4
gcaattgaaaaacattcaaaggctacaccacaagggaggatattgcaattattttgatcagtcaatatgttgcaaacatgataaggtttctagttgatagctacaataagccggttactgcaattctggaaatcccttccaaagatcatccttatgaccctgctcatgattccgttctctcccgtgtgaagtatctcttttctgctgaatcagttgcatcaggaaggcgttaatgatgatgtcccaccggtatgcttactcaaatccccattatagtaatagcacaatcaatgtatctccaaatgctctggcatatcatcatacaccatcatgactgtactttcgctgtgattgatcttttcctctcgtgcagctcgagttatcttgttgtttaagtgtttatttacctcttgtgtttcttgtacttattgggtgccaaaatcccagaagaagctgactgttcttttataaaaaaaaaaaaaaaaaaaaaaaaaaaaaaaaaaaaaaaaaaaaaaaaaaaaaaaaaaaaaaaaaaaaaaaaaaaaaaaggggcggccgt

SEQ ID NO: 12947 - DNA, 111 bp, Gossypium hirsutum
  Clone ID: LIB3829-008-Q6-K6-B5
ctcctgaccacttttagtacctgggatagggatctgctttatctacttgctggatagagagcacagcggaccgcatttccgtattccccgttctctgaaagaaataaagag

SEQ ID NO: 12948 - DNA, 582 bp, Gossypium hirsutum
  unsure (1)..(582): unsure at all n locations; Clone ID: LIB3829-008-Q6-K6-B6
ggagtgtaagggttacactcctctgtttcctcgtatacttggtcatgaagcctcaggnatcgtggagagtgtgggtgagggtgtgaatgatttgaaacctggagatcatgtgctccctatcttcaccggagaatgcaaagaatgtcgccactgtctgtcagaagaaagcaataacatgtgcgaactgcttaggatcaactgcgaccgaggtgttatgcttgctgatgggaaaaccagattttccatcaacggcaagcctatctaccactttgttggaacctcgacctttagccaatatactgtcgtccatgttggccaggttgccaagatcagtccaaccgcccctcttgataaagtctgtcccattagctgtgggatatgtacaggttttggggccactgtgaatgttgctaaacccaaaaagggtcaaactgttgcagtttttggactgggtgccgttggtcttgccgccgctgaaggtgcaagggtttgtggggcttctcggatcatcgctgttgatgtgaaccccagaagatttgaagaagctaagaggtttgggattacagaatttgtgaatccaaa

SEQ ID NO: 12949 - DNA, 594 bp, Gossypium hirsutum
  unsure (1)..(594): unsure at all n locations; Clone ID: LIB3829-008-Q6-K6-B7
ggnaaagctggtatgaaggcctttcagaaaaattctatcttctcctgttccaaagctcttgcttttagctggcaccgatagactggacagagcgctcacaataggtcaaatgcaaggcaagtttcaaatggtggttgttagacatacagggcatgctatacaggaggatgtacccgatgaatttgctaccttgataatcaattttatatctcgtaaccgcattgggcctcatggagttgagatcccaggacttgctcggccgaacccagcacaagcccaaggccaatcacccgcacaaacaaaatcatgaaacagtcgcaatgatgaatgttattagctgctgacaaacttcgttctatggtcttggctagctttaaactcgtgcactttcttttgtttacttgcattgcatgggactattttaaagctagagtagcggaaaaggaaaaagtggagttatcacgttttgataataatgggtattaatattatgtgataaccaaaaacacctaatcaagtgagatctctgctatatataaaatagtctatgtatgttatctggttgaggagaaaaaaaaaaaaaaaaggcggccg

SEQ ID NO: 12950 - DNA, 491 bp, Gossypium hirsutum
  unsure (1)..(491): unsure at all n locations; Clone ID: LIB3829-008-Q6-K6-B8
gnaacattgtcctcagtggtggaactaccatgttccctggtattgcagatagaatgagcaaggagatcactgcattggccccgagcagcatgaaaattaaggtggtggctccactgaaagaaatacagtgtctggattggaggctctatcttagcatccctcagtactttccagcagatgtggattgctaaggcagagtatgatgaatctggcccatctattgtgcacaggaagtgcttctagttcttcacaacgcatgaggtcctacaagcaaagcttaagagagaatggagatgatgataagagcttcaacattcattcgtttttatttttatttcttccattttagcagatgtttcaacgatttccattccatgaaacggcagcgaatttgtgatttattatttctctagcttttctccgttttgttatgtacccctcagggacatttggaactctcctatcaatgttattcttttgttttccttttc

SEQ ID NO: 12951 - DNA, 586 bp, Gossypium hirsutum
  unsure (1)..(586): unsure at all n locations; Clone ID: LIB3829-008-Q6-K6-B9
gnacaaaggnaataagtaaactnaagcaggagcacatggcttcttttcttgctgctattgagaaaggcatcagcaagaagcttagggagaaagattggaactagagactatgaataacaagaatagggaactggttgagagaataaagcaggtgactgcagaagcacataattggcattatagagcaaaatacaacgagtcggttgttaatgtgttgaagagccaccttcagcaagtaatctcacaaggtgctcaacacgggaaagaaggttttggagatagtgaagttgatgatgcagcctcctatattgatccgaacaactttctcagtattcctcttggggctgcaaaatgtgtttccaagggcatgaaggaacacattatttgcagagcatgcaacgcaaaggaggtgtccattttgttgatgccatgtaggcacctctgcttatgtaaagactgtgatttatcaatcaatgtttgccctgtatgccaggtaacgaaaactgctggtgtccaagtgtacttatcctaaacctgtgaagcaaattcttgaaaaaagatgaaaaatttatacccttacgtgtgt

SEQ ID NO: 12952 - DNA, 604 bp, Gossypium hirsutum
  Clone ID: LIB3829-008-Q6-K6-C1
gcccgtcaaaagtcgtaaggagttcgatgcttccctcgctattgaagaagaagaggaggaggaagaagaagaagaagatgaagaacatcacgagggacacgaagtgcgtgccggtaataataagggaagatttgagaaaagattcacgagggtcccatagggaggagataactccaccaaggactcctgagaacaacaatgtggaccaccagacgcctccgatgcccgaagctaaaaacgtggcttgggattacttcttcatggtcgacgataacatgccgggtccgagcttggatttgcacgacgacaatgacgaagaatctactaatccgaatgtcgatgctttagagaacaatgtcagtggtgtaggccacgtcgaagttgatagtgagattgagccaaagacgccggagaggccggataaggttgcgatggcagctgaggctgatgataagcaagaggtacatatcgagcactcgaaaacggctccggcagatttcagaagaatggtgaaggctgtttccggtgtgaatttaatgcaggttttgaatgagattgatgaccatttcttgaaaggctcagagagtgctcaagaggtttctaa

SEQ ID NO: 12953 - DNA, 599 bp, Gossypium hirsutum
  Clone ID: LIB3829-008-Q6-K6-C10
gttttatctctctttggcacctctgctggaaccgcttgggcaattgttcatctcgcgcatttctttgtcacatatcacttctttcactggaagaagggaacaccgtttgctgatgaccaaagtctctacaacggttctgactcggtgggagcaaatatacaatggcaagcactctgacacggaacaggacgttcttgactgttgtacctgttgtgctgcaccttatcgtctcacatacaacagattatcaaaacccaatgctcttcttcaatacgttgaccgtatttgtgctggtggttgcaatagttccccaacatgcacaaggtccgcttattcggaatcaatggtgagcattgaacaactgccaaggaattcatgtctggtttttcaagtactaagtttcattattctggggtgatcccaatttccaaatataaatgtaatatccctgtacagataatgaaaactgaaaagggcattctcatttctctttaatcatgataagaaaatataccttaccttcctttaagccaaggaaaaatacattcatatatactattgactttctctctttgcaagctatatagatcatcttcttg

SEQ ID NO: 12954 - DNA, 569 bp, Gossypium hirsutum
  unsure (1)..(569): unsure at all n locations; Clone ID: LIB3829-008-Q6-K6-C11
ggnagatcctggnagataatccagatcatccgattattaaagacttgaatgctgcttgcaagatgcgcctgaaagcagtgaagccaagagagcagttgacttgttgtatgatacagcattgatctccagtggtttttctcccgacagccccgctgagttaggtaacaagatatatgagatgatggcaatggcacttggaggaagatggggtagatatgaggacgatgatgaagtggaagcatcagaagttagtgctgctgaaactgatacgagtgccagtgaagcttcagagaaccaagtgatcgaaccatcggaagtaaggacagagagtgatccttggcaagattaaagtgtcgtgtaatttaaataaaaattttcctgtattatctgattgctattaacaaaataatccagaaggaaagaaaagttgtgggttcggtttgggaagatgaggaggttagtgataatggctgttcctatggtggattaaagttacttatacgtgatgattttaatttttaaagcatccaaggaaagttgtcttttgaaaaaaaaaaaaaaaggcggcc

SEQ ID NO: 12955 - DNA, 580 bp, Gossypium hirsutum
  unsure (1)..(580): unsure at all n locations; Clone ID: LIB3829-008-Q6-K6-C12
tccgcggccgcgtgggctcaagtgatcgtcggggtggatatggagggggtgcagctaaatttggcgtctcacgacattctgaatatcgagttattgtccgtgggctcccctcttctgcttcctggcaagatttgaaggatcacatngcgaaaagctggtgatgtgtgttttgccgaaatttcgcgtgacagtgatggaacttttggtattgttgattataccaattatgatgacatgaaatatgccatccgcaaacttgatgacaccgagtttagaaatccttgggcaagggcttatattcgggtgaagagatatgagagcagtccatccaggagccgaagtagaagccgcagcgttagaagagatcggagtagatcaagggaacggtctgcatccaaatctccagttaaatccagatctgcctcccctgtgaagtcacccagagcaagatcgagatcaaagtcaaggtcaaggtcaaggtcaggatctcctgaaaaggcccaaccggttagcgactgatgcacatacaacaatatacgtccaaaatccagcttggctaagctgaattgagtataagggg

SEQ ID NO: 12956 - DNA, 562 bp, Gossypium hirsutum
  unsure (1)..(562): unsure at all n locations; Clone ID: LIB3829-008-Q6-K6-C2
gcttcccaagcaaatagaagacagaagctgcagnaaggaaattaagctagcttttaaatcaagaaaatggacaagtttttagcatggaacgagggactggagaggaaagctatgccactaactcaaaattacagtctacttgtctatccctgtcaatgccggtgttaaagcaagcagtgttgagtttctgctgcaccgacttaccggaaaccatcaccatcgcggacctcggatgtgcgtcgggaccgaacactttcattgcagtttccgagatcataagcatcatgtataaaaactgctgtgaactcggtcgatcaccactagaatttcgagtgttttttaatgaccttcccggaaatgatttcaacactattttccagtctttgccagcttttcaggagaaattacagcaagagaatggaccaaagttcgggccgtttttcacagcgggtgtccctggctcattttacgggaggcttttcccatccaaaaccttgcatatcgtgcactcatcttcttccattcattggctttctcaggtgcccccggaattggtcgacaa

SEQ ID NO: 12957 - DNA, 571 bp, Gossypium hirsutum
  Clone ID: LIB3829-008-Q6-K6-C3
ataaccatcaggttcgcctctatgatatttctgcccacgaagacagttgtatcatttgacttcagggagacccctataaaagcagttgcagaagacctagatggtcatgcagtttatatagggaatggatctggtgaccttgcttctgtggatatacgcacaggtaaattgttaggatgctttttggggaagtgctctggaagcatccgatccattgcccggcaccctgaacttcctgttatagcatcttgcggcttggacagttatttgcgcatttgggacattggaacaaggcaacttctatcatcggttttcctgaagcagcatcttacaaaagttgttttcgatactaattttaccgaagaagggattggtggacatgaataagcccccagaaatgatttctggcaacatgacatcagcgatgtgtgtctattctgcattattcatgaggtttgcatggatggtacaaccacgaaactatctactgttggcgtgccatgcttcaaatgagacagtacagatctaccaactctcccgttgggcaagagctcaagggtatttgtcggaa

SEQ ID NO: 12958 - DNA, 597 bp, Gossypium hirsutum
  Clone ID: LIB3829-008-Q6-K6-C4
ctttggttccgtggccattgtttctttcactttttgcttcaccattttcatttgttctcgcagagctcacccagcggcacacatgacttttaccagaatttcccatttctctctctttttctcctctttctttttcctatcatcaaccctttcttctcatctttatcctgcttctgcaactactcctgaaaaagatggcaaaacgagatctttgtattcagaaatattaaggaacgaggcagctgcaaggcttaatgatcttggaaaggtgagtgatgctgatggctaccttgagagaacatttatgagcccagcttctgtgagggcaggctttcttattcgtgagtggatggaggatgctggtttgagaacgtgggtggattctatgggcaatttacatggtcgagttgagggaatgaatgcgagtgctcaagctctgttaattggctctcatttggatactgttgttgacgctgggatgtttgatgggtcattaggtataatttctgctatatcagcattgaaagtcttgaaaagcattggcaagttgggagaactaaaacgaccagtcgaggttattgcatttagcgatgagga

SEQ ID NO: 12959 - DNA, 563 bp, Gossypium hirsutum
  unsure (1)..(563): unsure at all n locations; Clone ID: LIB3829-008-Q6-K6-C5
gtcctttctctgntatctccattctttagctttgcttttctttctcatggcgcaggttttagacgacgctgagttttgtcttccacctcagtttttaaccgacgacgacttggtcatggacaatagtaaggctaagagcaatcccaagtatgttgatggtggttttggattagagcttggcggttctaagtctttgtttccctacgagttcccttatgggtttggatctttgggtttctcttcggatccaagttctccggttgagtcagtggtgggttctactgagacagagagtgacgaagaagattatcttgctgggttaactcgtcaaatggctcactctaccctcgaagacggtattcgcagaaacggccgtgccttttcttctgaaaaccctaagggtcgggtcatgtccagttcgccgcaatcaaccttatgtgtgtcaaggagcgggtgcagttgcatgcaagggtgtagccgtggaagccctacttgccaatcccgagttccgccaccgccgggaacatgggatttgctgtatgcggcggcagaggaagttgcaa

SEQ ID NO: 12960 - DNA, 572 bp, Gossypium hirsutum
  Clone ID: LIB3829-008-Q6-K6-C6
gctgctctgggaccgggttagccggtgtcgttaatgcgaccatccgatgaacgacctacggctctcttttctgccgtattcactcggtaagtgaggacactccgcttttcggggctagtgcgtgccctgcccttagcttgcaagatcaacatgtagtgctaatacgatgtccacgaaccgggcgtgggctcatgctatagacctttcaccgcacctctgctgctgatgccatcggagtcgttggctcagactatgattcctcttcctacaccgattcccgctgttctaatggatgtatagggctgaaacagctatagagcttgggacgaaaatggctcgcagattatgcttggaacataaggaagcattttacaatcacacctctaaagagcctatttgttacaagatgatcggggctcagctcaactatacactggcaaacagatgctccacattctgtaccatactcctgtttgcaaagaactacatacttgtgcaaggcctgaaattgacgcacccatgcgactctatgtgaaacatcgatgataccgggatcatgatcacatctgtgg

SEQ ID NO: 12961 - DNA, 601 bp, Gossypium hirsutum
  unsure (1)..(601): unsure at all n locations; Clone ID: LIB3829-008-Q6-K6-C7
gcactttctaatctttanaaatcacaactagtttccaatggcacccaaagccgagaagaagccagcatgagaaaatagccagccgagggagaaaaaagccgagaaagccccagctggagaaaaaaccaagagccgagaagaagctccctaaagaagcgggggacaagaagaagaagcgaagcaagaagagcatcgaaacctacaagatctacatcttcaaggtgctgaagcaagtccatcctgatatcggcatttccggcaaagccatgggtattatgaacagcttcatcaacgacatcttcgagaagctggctcaagaatcttcgaggctcgcacgctataacaagaagcccaccatcacctcccgtgagatccagactgccgtaagattggtcctgcctggggagttggccaagcacgctgtttccgaagggactaaggctgttactaagttcactagttcttagtttccgtaagtctaaaatgtcaaagaattgtagttttgtataatttattttatttgagagttgcatttagttagtttaagatatatttttcatgcctttttgattagtagaaaaggttggtctcaaagaaatga

SEQ ID NO: 12962 - DNA, 565 bp, Gossypium hirsutum
  unsure (1)..(565): unsure at all n locations; Clone ID: LIB3829-008-Q6-K6-C8
ctggaccaattatcattgccganaggttctaagcttgccagattgccaaaaccagagatgtgttggaagtcctcttaattaattttcctcgtggtgtaatatatggttgtggtgacttgattttttcatcacacatgatcttcaccttggtctttgtgctcacctatcaaaaatatggcactcgaagcttcataaagcactttgcgtggttggtagctattgttcaaagtctcttgattgtggcatcccgcaaacattacatggttgatgtagttgtggcatggtacactgttaatttagtggtattcttcatagacaagaaactgccagaattgcctgacagaagcagtggaagctcaccaatgttgctaccattgagcaccaaagacaaggatagtaaaaccaaagaagagaaccacaagctcttgaatgggaattctgtagatcctgcagattggaggccgagaactcaagtaaatggcaagattcaggaagatggcaatggaatccatgatactgcaatgaacggagcataggtgatggaaattacatgctgtcactataa

SEQ ID NO: 12963 - DNA, 575 bp, Gossypium hirsutum
  unsure (1)..(575): unsure at all n locations; Clone ID: LIB3829-008-Q6-K6-C9
ngacatctgcaggcagtttngatgatagtttcaaacagttgactggttcagagacatctgagttggagtcaactgcaacatctagtgtcaagaggccaagaattgaggcaaatcatgcccttttggaagaaataagggaaataaatcaacggcttatagatacagtggttgatatcagtgatgaagatgttgatccgggtgcagcagctgcaactgctgaagggggtgaaggaaccattgtcaagtgctctttcagtgctgtggctctcagtgcaaacttgaaatcacagtacatgtcggcacaaatgtcaccaattcagcccttgcatttgctagtccccacaaattatccaaattgctctccaatcctattagacaagttcccagttgaagtcagcaaggagaatgaagacctttcagtgaaagcgaagtctaggtttagtatatcactgcgcaccctttcgcagcctatgtcacttggtgagatagcaaggacttgggatgtttgtgcccgagcagttatttctgatcacgcaaaactgagtgggggaggcagctttagttcaaaatatggg

SEQ ID NO: 12964 - DNA, 573 bp, Gossypium hirsutum
  unsure (1)..(573): unsure at all n locations; Clone ID: LIB3829-008-Q6-K6-D1
gnaaggaattagtgggaaccccanacattgaggaggttgaggactgcttgtgagagagcaaagaggactctttcatcgactgctcaaactaccatcgagatcgattcattgtacgagggtattgacttttacaccacgataactcgtgcaaggtttgaggagcttaacatggatctttttaggaagtgtatggagccagttgagaagtgtttgagggatgctaagatggataagagcagtgtccatgatgttgttcttgttggtggttccactcgtattcctaaagtgcagcagttgttgcaagacttcttcaacgggaaggagctctgcaagagcattaatcctgatgaggccgttgcttatggtgctgcggttcaggctgctatcttgagtggtgaaggaaatgagaaggttcaggatctattgcttttggatgtcactcctttgtcccttggactcgaaatgctggtggtgttatgactgttttgattccgagaaacactaccattcccaccaagaaggagcaggtgttttcaacttactctgataaccaacccggtgtcttgatccaag

SEQ ID NO: 12965 - DNA, 523 bp, Gossypium hirsutum
  unsure (1)..(523): unsure at all n locations; Clone ID: LIB3829-008-Q6-K6-D10
aaaccttggggaatatatagcgataaacattccgcaaaaaactctgacacgtccttaatggattcttgttcatttgcttcacaagacattagcttgtcaagcatcggctctctatcccttgcagacaaggacaagttggaagagatgaaatcggagcttgatgcaatagattcacagtaccagcaatgtttccaagagctcttaaggatgagagaagaagcaatggaaagcgccaggaagaggtggatatcaaagaagaaagtatctgtgatgtgatgtacaatatcttttacttgctaaccatcaagttttttctcctcttcccttagcttatgatagttgctttttttttttcggctgttgtttgcattggaagatcattttctttgacaaaatttcatttatttggtttattttcagatatgggattgaatctatgattttagttcattggttaaaaaaaaaaaaaaaaaaaaaaaaaaataaaaggaaagnncgacctgaaaaactaacactaaatata

SEQ ID NO: 12966 - DNA, 562 bp, Gossypium hirsutum
  Clone ID: LIB3829-008-Q6-K6-D11
gtcagtacagcgacatgtaacactcaggatacatgcctctgaagaacagctctcctagaccttcttagttttatgtatagcaacaccttatcaacgaccacgcctactgccttgttagatgtgttgatggctgctgacaaattcgaggttgcatcttgcatgagatattgtagccgattgttacggaacctgcctatgacctgtgaatctgctttactatatttggaccttccgtctagtgttttaatggctgatgctgttcagccactgacagatgctgcaaagcagtttcttgctgtgagatacaaggatataaccaagttccaggaggaggtactcaacttgcctcttactggtatagaggcagtattttctagtgacgatctccaggtagcttcagaggatgctgtttatgactttgtgctgaaatgggctcgtacacattacccaaaactggaggagcgacgtggaatttttgcaacacgacttagtcgcgtaatgcgttttccatatatgacttgcagaaagctgaaaaaggttttaacctgcattgactttgatc

SEQ ID NO: 12967 - DNA, 447 bp, Gossypium hirsutum
  unsure (1)..(447): unsure at all n locations; Clone ID: LIB3829-008-Q6-K6-D12
ngatgggtgtaactagctagggcaaatctttaaaacagacgaagaagaaaaagagtattagccgagcaggatgataatcccagtccgttgcttcacatgcgggaaggttattggtaacaaatgggacacctaccttgatcttctccaggccgactatactgaaggcgatgctcttgatgctttgggcttggttcgatattgctgtaggagaatgcttatgactcatgtcgatctaatcgagaagcttctgaactacaacacattggagaaatcagagaccagttgaggaaacaagtagcgcttacctgcaatgttccgtttcagttatgcgagtgcctgtttaggattctcagttttttgtgtaacgaggaccatggttttaaactctgaactttgtaggcagacaagttgaagggtttaaatagaactagttctgcatgttttttt

SEQ ID NO: 12968 - DNA, 561 bp, Gossypium hirsutum
  Clone ID: LIB3829-008-Q6-K6-D3
gccaatcaaagcttgatgatttcacttcaagcctccctgctgatgaatgtcggtatgctgtctatgattttgactttgtgactgctgagaattgccaaaaaagcagattttcttcattgcatggtctcctgacacctatgggtgagaagcaagatgatttatgcaagctcaaaggacaggttcaagagagagttggacggtattcaaatagagctgcaggcaactgacccgactgagatgggacttgatgttattcgaagccgtgccaactaaattggcatctccaaatggcaggaataatggagatggtaaaatgctttctgcttttgtttcaagtgaaatgttaatagtttggtggggtggtatgattttggtttgttgttcagatgttatatccaagtctttgtctagaacaagtttagcaatttccatttgaatcttatgattctgttatgcatgtctcaaagttatcggacggagtgtcttacagctgagtcgataaacaaaagtctcatcttcttgaagagtatatgaagcactcttttttgagggttttcttcc

SEQ ID NO: 12969 - DNA, 579 bp, Gossypium hirsutum
  Clone ID: LIB3829-008-Q6-K6-D4
cctgttcataataccttttacatgaaaaactgtacgcaagttcttaaggagggacacttatttttcaggttggtaattggtgtagatggctgactgatatgtttggcatggatagtgatgataatttaaatgaagatcaatgttccagtcaagatgatttcagaaaaaatggagacggagaatctaaatctttcctttttcttaattccctgagtgatcttctaatgcttccaaaggacatgctaatggaccgttcaatcagagaggagctgtgcccatcaatagatcttccgttggttaaacgcattctctgcaacttcactccagatgaattttgtccagatcctgttccaggagctgtattggaagccttgaatgctgagactattgttgagcggaggttatcaggggacccagccagaagtttcccttatacagctgccctcgttgtctatactcctccatcctcagcagatgtggctgaaaaagttgtggaggcaggagggaagtcgccactgtctaggaatgcgtcagtggtacagaggaaagggtataccagtgacgaggaactggaggaat

SEQ ID NO: 12970 - DNA, 564 bp, Gossypium hirsutum
  unsure (1)..(564): unsure at all n locations; Clone ID: LIB3829-008-Q6-K6-D5
gnaataccatcgctttgcatttgcaaagcctttcactgactcaaaataacaatgacgtcctcttcatcgtccaccgccggcggttacgacgtgccttgggtagaaaatacaggccgagcaaagtctcggacatcgtcggcaacgaagatgccgtgtctcgactccaagtcattgctcgcgatggcaacatgcccaatctcatcttatccggtcctcctggaactggtaaaacaactagtattttggctcttgcacatgagcttttggggccagtctataaggaggctgttttggagcttaatgcatcagatgacaggggtatagatgtcgttcggaacaagattaagatgtttgctcaaaagaaagtaactttacctcctggacggcacaagataattattttggatgaagctgacagcatgacatctggtgcacaacaagccttgaggaggacgatnggaaatatactcaaactctactcgttttgctcttgcttgcaatacatcatcaaaaatcattgaacctattcagagtagatgtgcccttgttcgattttcaaggtta

SEQ ID NO: 12971 - DNA, 564 bp, Gossypium hirsutum
  Clone ID: LIB3829-008-Q6-K6-D6
gagcgccgccctttttttttttttttttttttttttttttttttttttttttttttttttttcggcagtccatgctttgctggcttttaagtttaaaacagatgggatatggctgacaattttcatcaagggaaaacaagtagtctgttctacccaaaatttctcaagagttttaaacaaaaggaagtttgttagatgtaaacaccccttttctgaaacctacaaatggcaatggcttgttcttaattacaagcaggatcatcctcctcgcatatgggcccctagttcaccaaactgatcataagcttccacagtatcctcagacaggcgaactgcatccagcttctgtttcaggatttctatagcattaaaaaccaactgagaagctttgatcgcaccaggggattcaactgtaaaaatgaaactatcttttttggcatatatctccacaagacctggcttgcccatagcttaaactttctttagcacctcatcgtcataggtatacccctttggatcaaccaccacaacctgttgggtatttgggtcaatggcaaaaacttt

SEQ ID NO: 12972 - DNA, 572 bp, Gossypium hirsutum
  Clone ID: LIB3829-008-Q6-K6-D7
cggccgcgtgggcgcgacgaaggagaagggactccgacggtgtattttcgaggtaaacccttcctccttgtttttttgcgaaacaaaaattacaggacaaaaaaaaggcaaatcgcaaaaactaaagaaaaaaaatcaccttctaatttttttggattgcttttcttgtatttcgtttgcctattttcaatgtgtgtgtaaaaaatttacaatggcagtattcttggctttatagccgaaacagagtaaaaaccgaaaaaagaaaatacaaatcgattggttctgcctctttgctgtgctgttgttgtctgtttctttgcaggtacggagccccgttggagcggtggtacgtggcgcttgacgtggggcgtacgggggctgtgtgctggaggctgctgaagcgttagaggctaagggctgcggcgctaggaaaccctaggtttccgtttggctgaacctaggtctaggttttgggccattgggccttttaggcattgggttatttgattgggctaggttgttttgtaaatgggcttgtaactgggctattgggtctgatatgtaatggactg

SEQ ID NO: 12973 - DNA, 563 bp, Gossypium hirsutum
  unsure (1)..(563): unsure at all n locations; Clone ID: LIB3829-008-Q6-K6-D8
cccacgccgtccgaaatatctcaaatctcctcctcctcctcggnaaatcttagtatcatcaccatggcctcaaatcccaagtcttctttgacatgactatcggtggtcagcccgctggtcggattgtgatggagcttttcgcagattgcactcctcgcactgctgagaacttccgtgccctctgtaccggcgagaaaggcgtcggccgcagcggtaagcccctccactacaaaggctcctctttccatcgtgtgatccctaactttatgtgccaaggaggtgacttcaccgccggaaacggtaccggaggtgaatccatctacggatccaagttcgctgacgagaacttcatcaagaagcacactggtcccggtattctctcaatggctaacgctggtcccggaactaacggatctcagttcttcatttgcacggctaagactgagtggctcgacggaaagcacgttgtgtttggacaagttgttgaaggcatggatgtggtgaaagccattgagaaagttgggtctagcagtggaagaacttccaagcccgttgttgttgct

SEQ ID NO: 12974 - DNA, 575 bp, Gossypium hirsutum
  Clone ID: LIB3829-008-Q6-K6-D9
agcttcgggaccgtgggcagaccgacttgaaccccatacttggaagaactcgccaaatatgcccacagtggtggaaatagtagtgtgttgacaaatcttgatcccacaacacctgatggtttcgacaataactacttcaccaatctacaagttaatcgaggcttgcttcgaagtgatcagaatttattttcgactgagggtgctgatacaattgaaattgtgaataggtttagtagtaatcaaacagccttctttgaaagctttgtggaatctatgatcagaatgggaaatataagccctttaactggtacggaaggagaaattagatcaaattgccgcgccgtgaattcagcaactatcagatccaactcagatgctgctctcgtcagctcaatataatatttgctgagctcaaggctaagaaaaatgggcagaagagaagctattttcctactcaaaatcaaaacgaataatatattgtaactctttgatgcctacaataaaaccctacgacttttgtttcatacaagatgatttacaaaaataattttctgtaactttttgtgtttattact

SEQ ID NO: 12975 - DNA, 588 bp, Gossypium hirsutum
  Clone ID: LIB3829-008-Q6-K6-E1
caagtagctggtcgagccctcttttactggctcactgagtctcccaattccccttcctctaagcctcttgtcatctggcttaatggaggtcctggttgctcctcagtggcatatggtgcatcagaagagattgggccattcagaattaacaagtcagcctcagggttgtatctcaacaagttctcttggaacaatgtggctaacctcttgttcttggagactcctgctggtgtaggcttctcttacaccaatcgcagttccgatttgttggataccggcgaccgtcgaactgctatggactctttggaattcttgatcagatggctcgaccggttcccacgatataagaatcgtgaggtatacatcaccggagagagctatgccggccattatgtgcctcagttggctagacagatcatggtttacaacaagaaatccaagcacccaataaatctaaaaggaataatggtgggaaatgcagtgacagacaactattatgataaccttgggacagtgacatactggtggagccatgccatgatttctgataaaacgtatcagcaactcatcaacacatgcgatttccga

SEQ ID NO: 12976 - DNA, 533 bp, Gossypium hirsutum
  Clone ID: LIB3829-008-Q6-K6-E10
gaggggtatataaaagcaggatatctatgggatttcaacttcggaacaattagatgttgatgatcttttggatttgtccaacgatgagttttttccctctgcttcggccgccaccagccatgatcagttccctccttctgagacccctttcagcgacgcttccgccgcttcctcctcctctgccgccctcactccctctttctccttagactttaaccacgatatttgccttcctagtgatgacgtggctgagctggagtggttgtcgcagttcgttgaagattccttcaccgacttcccctcatactcgctccccggaatccttaaccctagaaatgataactcgtcgttttcaagcaaagctcggagcaagcgttccagagcggtaacaacattgaacggcacaaactggacgacgacgacgtctggagcggcaggtaccttaacgggaaaaacaaagacaaaaagggaaatccaacgtcaagcatccccggcagcggtagaagggatgaagcgatgctcacactgcgcgt

SEQ ID NO: 12977 - DNA, 566 bp, Gossypium hirsutum
  unsure (1)..(566): unsure at all n locations; Clone ID: LIB3829-008-Q6-K6-E11
gnatactcccggtatggtatgggaagtgaaaacctatgcgctctgcacgaactccattacatccgtacatgactcctatgagagatcctggagcaacacctatccatgatggcatgaggacacctatgcgtgacagggcctggaatccttatgcaccaatgagtccacctagggataattgggaagaaggaaaccctgcctcttgggggaccagtccacagtatcagccaggaagtcctccttcaagggcatatgaagcacctacacctggttcgggttgggccagcactcctggcggtagttacagtgaggctggaacaccgagagacagcggttcagcttatggcaatgctccaagtccctatatgccatcaacaccaagtggtcagcctatgacaccaagctcgggaccctatattccgggtacacctggagggcagccaatgacaccaggaactggtggtcttgatgctatgtctcctgtaataggtcctgagagtgaaggaccatggttcgtgccatatattttggtcaatgtgcacaaatctggggatgagactcttggc

SEQ ID NO: 12978 - DNA, 437 bp, Gossypium hirsutum
  unsure (1)..(437): unsure at all n locations; Clone ID: LIB3829-008-Q6-K6-E12
gccaatatgctgagnacgagaggaagcagcagagcatgaatttgatgcccggaggttcaagtgctaacttcgaggccctacattctcaaccatatgactctcggaactacttccaagtcgatgctttacaacccgccaccaattattataaccctcagctgcagcaagaccagatagctcttcaactagtctaatgttatgggggcgtgcatggttcattgctgctgtttcagttttagtgaagaacatcttagcattgtgtcagatgaaagctactatataaggcaggaatattatgttaactttccttaaatggaggaccctagatctgatcgtctgccatgtttaagatgcgtagagtgtgtaagaatgataagtttgattttcagacaagaatgtcctcttccatttgcttagaacatgcattaagatcctac

SEQ ID NO: 12979 - DNA, 567 bp, Gossypium hirsutum
  Clone ID: LIB3829-008-Q6-K6-E2
aaaaatacctcagttctaccagcaagagacaaccaaactccgacgacaaattcgtgatgttcagaacatgaacaggtctcctatcaatttctcttcttcttcctacactctatatctatatctatatacgaatgatgtttgttgcaggcatatccttggagaggctctgagctcattgacctttaaggaactcaagaaccttgaaggcaggctggagaaaggcatttgtagaatcagatccaaaaggtttttgttttggtgtatattaaaatctttcattctttccttccatcttaatctctttgtttgtttattatatggaataaaatatcgttattcactcaccacattctccaactctaccagaacgaattactgtttgcagaaattggattcatgcaaaagagggtaaactttcatccctacttggtctatttatttataggctagttaactcaaaacccggtgtatagctggtttagaagcaatcttgagtatgttaattcatccatcattagcttgaaaaagaaaaaagaggattgtataaattgatatcctcaaacccca

SEQ ID NO: 12980 - DNA, 568 bp, Gossypium hirsutum
  unsure (1)..(568): unsure at all n locations; Clone ID: LIB3829-008-Q6-K6-E3
cggccgcgtgggngaaaatggccatcaaatttcacatattatcctggtctaaagtctcgaaacctgtaaattcaaatgaatcttcaactggttgtggttgccatggtggatgtctagctggaaactccagctgcccttgcattcaaagaatggtggtaatcttccatatactacaaatggggttcttgtcagccaaaaaccgttgatacatgagtgtggttcttcatgcatatgccctcctaattgcaagaatagggtatgtcagagtggtctgaaaattcgtttagaagtgtttaaaactaaagataaaggttggggtctaaggtcatgggatcctatccgctccggggcttttatttgtgaatatggaggggaggtaactgatattactagtgcagaggagctcagatgcgtaaacgatgatgattatattttttatgcaacccgtactaatcagtcgggggaaggtttcttgaatgcatctaatgagactctgaagatcccgtttcctctaattataaatgcaaaacatgccggtaatgtagctcggtttatgaaccacagctgc

SEQ ID NO: 12981 - DNA, 471 bp, Gossypium hirsutum
  Clone ID: LIB3829-008-Q6-K6-E4
cgcgtctattcctgcctcttgggcatataattcatagcagtagatatctcttgctgcatgaggaaacctttggctgcaggctagaggctgaacgtcaagcaggcgagactgcaaactttgaggctggggcgatcatgagtcggggagcaaatggattcggactgctgactctagcaggctagtccgcccctgcgatcaggcacggagatgattgatgcgcattgcgttgaagccacacacccttgccttttctgtctatatgatatcgggcgtgtgcacccacgcaagcaacaaatttccagagtccttgggggtcagtgtgcacatactgattcacgagtggtcaaaaacccatgcacctgacactcgtatgagataataacaacttgtatcaacaaagagtgtatatgtcggaaacttattctaatggatgataaaggcgatctaaaaaaaaaaaaatcaggcggacaa

SEQ ID NO: 12982 - DNA, 563 bp, Gossypium hirsutum
  Clone ID: LIB3829-008-Q6-K6-E5
gtttacatatgagccccgcgacggccaaacccaaatcattagtttctgcaataattcctcttcagagggatgctgaggttccttctcatgtattaatgggcatacgtgctggtgctgatgctgtgccgctatcaccgcttggggaatcctgtgtaaggatggatttgactgccattcatgaggtcttagaaaaccttggatataaagatgatgagggtactgctactgagctttcattccaaatgtggacaaaccagatgcaagaaacattgacatcgaagaaaaaggtgatgttgcttttaggcataaagattttactgctgccattgaatgctattcccagttcattgatgttggaaccatggtttccccaaccgtttatgctcgacgtagtttgtcgtacctcatgagtgacatgccccaagaagccctgaatgatgccatgcaagcacaaatagtatccccagtttggcatattgcatcctacttgcaagctgctgctctatttgccctaggaaagaatgacgaggcacagacatctctcagggagggtactgagcttg

SEQ ID NO: 12983 - DNA, 562 bp, Gossypium hirsutum
  Clone ID: LIB3829-008-Q6-K6-E6
gcaaacctattcgaacgttgtaaaagaaaaaaacagcgaagaacaaaaatcagcgaaatctcaacagaaaataaaggaaagaagaaagagaacgcgatgtcgtgttcggtcgctgtatgtaactcccctgtgttttctccgtcgtcgtctcttttctgtagcaaaacttcgatcatctctcagtcgccggaagcgttgaacttgtcgttgactcacctcaagccctcctcttcttctcctgcttctccgtctccttcctcgccgtcttcgccttttcggcttcggctacaaaagcccacgtctgggtctcttttgtcaacgccatcgtcttcttcggtttcgggttcgacgatattgaagaggaagaggccatccaggctggatataccggtgtccacgacggctttgtgttttggggttccggctactccctgtgaagtggcgagagaggtagagagagaaggagatggttattctgtttattgtaaaagaggcaggagagaagctatggaagataggttttcagcttctgttgaactccaaggagattcaaagcaggcat

SEQ ID NO: 12984 - DNA, 592 bp, Gossypium hirsutum
  Clone ID: LIB3829-008-Q6-K6-E7
cccagcgtccgcttgctggcttcaactagtgactataaagttcttgagagattgaaagcaaggtatgggaacttatatactgaacagaatgttgctatcagtggtattcacacccacgcaggtcctggtggttatctccaatatgtggtgtatattgttacatctcttggatttgttcgtcagtcatttgatgccctggtagatggcatcgagaaaagtattgtacaagctcatgaaaatctccaacctggatcaattttcgtgaacaagggagagctattagatgccggagtaaaccgtagtccgagtgcctatctcaataaccctgcatcagagaggagcaaatataagtacaatgttgataaagaaatgacccttttaaagtttgtagatgaccaatggggcccagtgggtagcttcaactggtttgcaactcatggaacatcaatgagtcgtacaaactctctgatcagtggcgataacaagggtgcagcagcacgatttatggaagattggtttgagcagaacagtgctaaaagtgatgaattggatactgatgaaatacctcgaagagtttcgagcatcatttcta

SEQ ID NO: 12985 - DNA, 560 bp, Gossypium hirsutum
  Clone ID: LIB3829-008-Q6-K6-E8
gaaaacctaattatgcacataataaagagagccatggggttgagttggtaaggttcaaatacttcgttagtaaggcttaagtttgaatcctatgcaagtcccaattgagatccttcacttaaaacattatgcacctaaaaaaaagaggagagggagatcaggttggaaataatgctaatataagctaagatggcacatgctatatcccactatcactaaatataagtttcagattttggtcctggattatttgataatattcatatctgttctacagtttaactatccttcacatattctggggttgtaaataaacttgagattccttcccttctgtggcagttcctgggcaacttgaggaatctgcgagattcacatgctgctcttgcggtcggatcatctgaaacggttgctggtgaaccctctcctgtaacaagaattatttccgagtgtgagtctgcgttgacatccttaaactgtgatcttgggattctctcagcttcaattgctcgtgagaaagccatgcaaggccagcaagtaaatttctgatgattgtagct

SEQ ID NO: 12986 - DNA, 480 bp, Gossypium hirsutum
  Clone ID: LIB3829-008-Q6-K6-E9
cgggtgtgatatgtgcgatcaatacccaatccagattggcgccactgtttttcgaagctattgaaacactcctgaaggcatgatgttcttttaccctttgttatttttgaactcggttataaaaatgttaaaatgcatgtaaaattcatcttcgagcaacccagtttttggcttcaaaaaaaaaaaaaaaaaaaaaaaaaaaaaaaaaaaaaaaaaaaaaaaaaaaaaaacaaaaaaaaaacaaaaaaaataaaaaaaaaaaaaaaaaaaaaaaaaacaaaaaaaaaaaaaatacaaaaatagaaaaaacaatggagggcgggcccccttaaaaaagaacaagttttatgccccggcaggtctgaaggaaacaccttttttttgggacccccaattgaaatacctgggccactctttttaaaagcatttctgggaaaaacccttggcgtcccaaaattaataagtgcgagagaaaaaccc

SEQ ID NO: 12987 - DNA, 562 bp, Gossypium hirsutum
  Clone ID: LIB3829-008-Q6-K6-F1
acacctcctcgtcttccgggtattcgttcattacttcctttacctagtggtgatctgttgactgggggcactgacttaagaattcgccgctgggaccatttcagccctgatagaagttactgtatatgtggcccgaattttaagggagttggaaatgatgatttctatgaagcaagatcaagttttggtgcacaagttgtacaggagacaaagagacgacctctaacaacaaagctgacagcaaaagcagttcttgttgctgctgccactgattctgctggatgccaccatgattctgtcctctctttggcttcagtgaaattaaaccagagactcttaatctcaagcagtagagatggggctattaaggtttggaagtgaataacccaaaagttttagtgctttaatatacatattcagttacagaagtagtaaaattgtacatgatatacattcaaattcagatcctaaattctgcagcctaaccacttactttctttggtttgtagttttgtacagtttgtaagcgtgtaggtttatatgggattgttattattattat

SEQ ID NO: 12988 - DNA, 562 bp, Gossypium hirsutum
  unsure (1)..(562): unsure at all n locations; Clone ID: LIB3829-008-Q6-K6-F10
atcggnatcagctcanaggcaaaggagggaaagtatgctatgtggaagatgatgccagaatatggtgccggtcattggtagtgngaaagtacattactagaccaattattactgacgatggccaaccgatagaaggtgaagattgtcatgtgacaagtgctgtttcagacaacaagaaagtggcacactggatgcttttcctgcatcaaattggtttggatgtttttcgaaccgatcgagcacttgtgttctacgaggatgaagctaatcaagcaaaactttgggatattcttgctatatattcatgggtagatgatgatattggttatgttcaaggaatgaatgacatttgctctccaatggtaattcttcttgaaaatgaagccgatgcattttggtgttttgagcatgcaatgcgcagactgagggaaaactttaggtgcagtacaagttcaataggtgtgcaatcccaacttggtatactttcacaagtaattaaaactgttgaccctaagcttcatcaacaccttgaggatctagatggtggggagtatttgtttgc

SEQ ID NO: 12989 - DNA, 571 bp, Gossypium hirsutum
  Clone ID: LIB3829-008-Q6-K6-F11
cttttatgtaaaatgaaaaattaaattgctcaaaacgaaaaaaattaaggaccaattgtataatttaacctaaatttttgtttgaaatgatgatttaacatgccacgtcagcttacagttacaccgttaacgacaattaacgctcagtgactaaaatgttataacatggtaacgtaaataactaaaacgtaacatttcagacataaatgactaaaatgtaacctgaaataaataaaaatacttatttcaatagtttaccctatatatatatatatataacacccatattcgacatttatatcaaaatctcaataatataatatcttaatttccatttttttttctctaaaagaaaattttcctttgattgcagcttatagtaattgcatctaccctggcgggagcacttagaaaagtagataaaatatgtgggtcttattttagaaatacaaagtagctttgactgtaaagttattctcctttgatatgggtttgctgtggtctgtgttcttttttgggtaaattatttgatgtaataaagttagggttggaatgttgatgaacttttgtg

SEQ ID NO: 12990 - DNA, 275 bp, Gossypium hirsutum
  Clone ID: LIB3829-008-Q6-K6-F12
gcgttcgcggtcgcgtgggcggacgcgtgggcggacgcgtgggcttcaccttaggaaaagacacttacactgttattttcctaaggttatttattatcatatccttgcttccatattaacaaagcaatttagagtgaaacctggttctttagttcctacttattttgagaacagcttggtgttatgctaataatctctgcaaattggttctcttgtttagagattttgtttgatcaataaaacgaccaattcgtaattttcatattttaattttt

SEQ ID NO: 12991 - DNA, 574 bp, Gossypium hirsutum
  unsure (1)..(574): unsure at all n locations; Clone ID: LIB3829-008-Q6-K6-F2
gtacccaagcacacaactctttcttttcctgctctcaagnagacaacttttcatcattaaagctcaaggccttactttgataaatgagtttcggtcccatctcttgagctgtgaagcagattttcaaatctgggtacttctcattttttctacaaaacccgacaaacatttgtttttgtatgtattaacttgtaggtttttaccccagatcttgcaatggtctgaaactcttgagtaaagctgttttttcttttgttgggggngggggtctttataaagggtagaaaatggcttatagcttagagcaaaggttttggtgtcagcgagttttaaggtttgggtttgcatttgtatgtgtgtgtttgggtgggtacattgttggtccgacatcactgttgtggcgtttgaaggacaagtcaagacctaaggtctcatgtcttccttgtgtttgtgattgctcctcccatacagatgacttttttctaacaccaggttgtggccaaaacgatcctgatttaaaccaagaactggagaaggatactgtggccttactctccgaggagattgcattaca

SEQ ID NO: 12992 - DNA, 575 bp, Gossypium hirsutum
  unsure (1)..(575): unsure at all n locations; Clone ID: LIB3829-008-Q6-K6-F3
ggnatagctggtatgaaggcctttcataaaatttctatcttctcctgttccaaagctcttgcttttagctggcaccgatagactggacagagcgctcacaataggtcaaatgcaaggcaagtttcaaatggtggttgttagacatacagggcatgctatacaggaggatgtacccgatgaatttgctaccttgataatcaattttatatctcgtaaccgcattgggcctcatggagttgagatcccaggacttgctcggccgaacccagcacaagcccaaggccaatcacccgcacaaacaaaatcatgaaacagtcgcaatgatgaatgttattagctgctgacaaacttcgttctatggtcttggctagctttaaactcgtgcactttcttttgtttacttgcattgcatgggactattttaaagctagagtagcggaaaaggaaaaagtggagttatcacgttttgataataatgggtattaatattatgtgataaccaaaaacacctaatcaagtgagatctctgctatatataaaatagtctatgtatgttatctggttgaggagaaaaa

SEQ ID NO: 12993 - DNA, 548 bp, Gossypium hirsutum
  Clone ID: LIB3829-008-Q6-K6-F4
gttttcatgcgttttaggttgtcccagatccttcttccctgttttaccctcccaagccgaaagccacctccacctccaccctctccctcccgatttcttccggcctcatcgttttcgagcaggaactagggctctgtcaaggttattgatctccaaattccggcctcccgattcctttctgggtattggattgttagctaccgatttgctccagacataaatcgttcacaagctgaagctctagttgcaattcaagagtgtgatattgcttcctactgaagcggcttgtttgattgcttcctccatccacagttgaccgtcttcttttcacacaatcacttaatggctcgtctgcctttaattgcacaaagtgtgaggcgtaaaagaattggtattgcattgacaatatggttggaaatctgtagaattgcgatttggttcttatttacaatgggtgccagccttagcctacatacttatagacgaaggattaggtcctctgctcttagcctacatacttatagacgaaggattaggtcctctgctac

SEQ ID NO: 12994 - DNA, 573 bp, Gossypium hirsutum
  unsure (1)..(573): unsure at all n locations; Clone ID: LIB3829-008-Q6-K6-F5
cagctggcttccattactacccgagatatcgtccgagcttcccgtcttcttgataacgagattcgtattctcaaggaggagatgcaaaggacaaatctcgagttggattcatacaaggnaaaagattaagggagaatcaagagaaaattaagcttaacaagcagttgccttacttagtcggcaacattgttgagatattggagatgaaccctgaagatgaggcagaggaggatggtgccaacatagatctagactcacaaaggaagggtaaatgtgttgtgctgaaaacctctactcgtcagaccatctttctacctgtggttggacttgtagaccctgataaattgaaacctggtgatttggttggtgtcaacaaagacagctacttgatattggatactttgccatctgagtacgactccagagtaaaggctatggaggttgatgagaagccaactgaggactacaatgatattggtggcttggagaagcagatccaagaactagttgaggccattgtgttgcccatgactcataaanaaaggtttcaaaagttaggcattcgtccaccta

SEQ ID NO: 12995 - DNA, 584 bp, Gossypium hirsutum
  unsure (1)..(584): unsure at all n locations; Clone ID: LIB3829-008-Q6-K6-F6
gtgatcattgactctcatatttctcgatcagccttggcatttggaggacttgcagggnaatcaccatattcaaacaaaggggtatattaaaatatatgaaacttgataaagtttagaggttttcatgtgtaaacttgcattagcatgaggtacaaggttatccactattatgtttctcgtttttggtaaaataatgatttgttctgagaaaaaaaaaaaaaaaaaaaaaaaaaaaaaaaaaaaaaaaaaaaaaaaaaaaaaaaaaaaaaaaaaaaaaaaaaaaaaaaaaaaaaaaaaaaaaaaaaaaaaaaaaaaaaaaaaaaaaggggggccctttttaaagaaccaaattttactacccggggatggaaaagaaaaattttttttttggggcccccaaattaaatttactggcccggtttttaaaaacgggggaagggaaaaaccctggggttccccaaattaattcccttggaaaaaattccctttttcccaaggggggttataaaaaaaaagccccaaccaattcccctttccaaaatttgccccaccctattgggaaatgggaccccccctttaagggg

SEQ ID NO: 12996 - DNA, 561 bp, Gossypium hirsutum
  unsure (1)..(561): unsure at all n locations; Clone ID: LIB3829-008-Q6-K6-F7
ctggnatgttgtctatcaacttacctccaaatcatgccactctcttcattttggttttcttgatgtgcattctgctgatatcccaaaagaatttaataaaatcaggacccatggctcggttgggcagcacacaagaaacactgagaaagaatcaatgagtgatgatgagtatgtcaaagaaacacatttgctccttcgcgatgttcatcaatcaatcttcaatgatcaggtatttgatatgttgaattgcgaagcattcaaccaatctgttggagtcaatgtaactggaatgagagaaaattatctacaattgagcataggtcaaggaacctctctattcatatcacttgtgccatctagtgagagtaacaatcaggctgttgacactgccaatacgcagaatgtagattctgcaattgtagctttggactcgtttgatgaagtgaaatttggagaacgagaacatgatactcctacaatgaaaaagaaatggggtttccctcatcgtatcagttgtgaaatttatctgcagcaaattgttcatgaacatgcatttctaaa

SEQ ID NO: 12997 - DNA, 572 bp, Gossypium hirsutum
  Clone ID: LIB3829-008-Q6-K6-F8
ataacatatcatctgatccaatatttgatgtaagattatgaagactaggaagggaaagcgttttgaggccttttggccatccattgtgatgaagaatggttgaatataaagccaaagtgtatgattttagcgaagatgaggtcgagactgaaaccgaaaccgagagtgaagatgatgcttattccattaaagattcaagattgaatggtggtgacgattatatccacagcacactgcaaaaccaagattgcagcagccaaatttcagattcgtcatctaaggtttatcggttaaggcaccggaggggaaaatcagaaactctgcgcgtacagtacataaacacaaaggatgtgagggtgacaataggcacttggaatgttgctggaagacttccatgtgatgatcttatcattgatgactggctttgcaccgaacagctagcagatatttacattatcgggttccaggaggtggtccctttgaatgctggaaatgtactgggggctgaggataacaggccaattcctaaatgggaagcaataattagaagaactctgaacaaatctttgaaa

SEQ ID NO: 12998 - DNA, 605 bp, Gossypium hirsutum
  unsure (1)..(605): unsure at all n locations; Clone ID: LIB3829-008-Q6-K6-F9
cccgggttcgacccacgccgtccggnatgtttcctgccccagncatgggnaactaatgcacagacaatggcatggattttggatgagtattctaagtttcatggacactccccggctgttgttacaggaaagccgatagatctaggtggatcgctaggcagggaagctgcaacaggtcgaggtgttgtatatgcaactgaagctttacttgctgaatattggaaggcagttaagggtttgaccttcattatccagggtttcggtaatgttgggtcttgggtagcaaggcttatacatgagaggggtggtaaggttattgcggtgagtgacgtcactggtgctgttaagaatcaaaatggaatcgatatacctcagctgctaaagcataaagaagctactggaagtttgacaggcttcagtggcggagattccctggatccaagtgaactgctggtacacgaatgtgatgttcttgtcccatgtgctttaggtggagtgctgaacagggaaaacgccgcacatgtgaaggcaaagttcataatagaggctgcaaaccatcccagtgacccggaagcagatgagattctatcaaagaaaggagtaat

SEQ ID NO: 12999 - DNA, 586 bp, Gossypium hirsutum
  Clone ID: LIB3829-008-Q6-K6-G1
acaaatctccctttttcttctccctaagcgcttcgccccataacccatctaacatggtggcctcaaaattctgttttgctttttctcttgctattctttcaatcttggccgttgatgctgcccaacaccatgctctggcgccctctccttcttcccccgtggactgctcctctctgattctcaacatggcggattgtttgtcctttgtgtcgagcgggagcaaaacgtcgaagccggaaggaacctgttgttctggcttgaaaactgtgttgaaagctggaccccaatgcttgtgtgaggcttttaagagcagtgcttctctgggtgtcactttgaatgtcaccaaggccatgactttgcctgctgcttgcaaagtctctgctccttctgccactcaatgtgcattgtctctcagtcctactggtgcaccaggtatggcaccgtcagcaatagcaggtgcgccggcagcattctcaggaggagcaaatgaggcagcaccggcaccatctcccggcagctcaggctctcaagttgtttctgcttcaatgggatctcttatcttaggcttcataattatgttaacctc

SEQ ID NO: 13000 - DNA, 599 bp, Gossypium hirsutum
  Clone ID: LIB3829-008-Q6-K6-G10
ctctttggcattgcttgctaagtagctattgtccttcgcatttcctaattcgtacgcaacgcatcccgtttttcagtttggggcttcgctcactcactctctgctttattgaaagctcacaaatctttcttgcgctcaccctcttaagctcaaatcacccacgaatctgatggccatgcaggaaggaagtcctgctgacactcatactcccagtgctcaagttgttggaaatgcttttgtggagcagtattaccatattcttcaccaatcacccaatctggtgcacagattttatcaagattcaagttgtttaagtcggccagatatggtcggcaacatggctacagtaacaacaatgcaagcaattaatgagaaggtactatcgctgaattaccaggactatacagcagagataaaaactgcagatgctcaggactcttttgagaaaggggtcattgtagtggtaactggatgcttaacagggaaagataatattagaaggaagttcactcaaaccttctttctagctccacaagacaaaggctactttgtcttaaatgatattttcaggtacattgaagacaacgagttgcaaaaca

SEQ ID NO: 13001 - DNA, 583 bp, Gossypium hirsutum
  Clone ID: LIB3829-008-Q6-K6-G11
aaaacttaatcatggctcggttgacgttggtgtcctccatcatccttctgctatgctccgtcgccgccggatcaactttcgaggactccaaccccatccagatggtatccgatggcctcagcggcttcgaatcctccgttcttcgtgtcatcggtcacactcgtcatgctctctccttcgcccgttttgcatacaagcatgggaagaggtatgaaaacgtggaggagatgaagctacggtttcagattttcaaaggcaacttggatttaatcagatccactaacaagaagggactgccttacactcttgctgtcaatcagtttgctgattggagctgggaagagttccagaaacacagattgggggctgctcaaaactgctctgctaccacaaagggcaatcaccagctcactgatgtcgtccttcctgattcgaaagactggaggcgagtgggcatagttagcccagtcaaagatcaaggctcttgtggatcttgctggacattcagtaccactggagctcttgaggcagcttaccatcaggcatttgggaaagggatctccctatctgagcagcagcttga

SEQ ID NO: 13002 - DNA, 580 bp, Gossypium hirsutum
  unsure (1)..(580): unsure at all n locations; Clone ID: LIB3829-008-Q6-K6-G12
nggcttatggagcacattaagttgttctctactcgtctcaatattcccaagctgataagagcatgtgatgagcagcagcactggaaggaacttacctacttatatatccaatatgatgagtttgataatgctgcaactactgtgatgaaccactctcctgaggcatgggatcatatgcagttcaaagatatcatagtcaaagttgctagtgttgagctatattacaaggctgtccacttttacttgcaagagcatcctgatctcatcaatgatatgctaaatgtgcttgcgcttcgtgtggatcatactcgtgttgttgacattatgagaaaggcgggtcatctgcgtctggtgaagccatatatggttgctattcagagcaacaatgtatcagcagtaaatgaagcgttgaatgagatttatgtagaggaagaagattatgatagattgagagaatctattgacttgcatgataactttgatcagattggccttgctcaaaagattgagaaacatgaactacttgagatgagacgtgttgccgcatacatatacaaaaaggcgggcagatggaagcagt

SEQ ID NO: 13003 - DNA, 578 bp, Gossypium hirsutum
  unsure (1)..(578): unsure at all n locations; Clone ID: LIB3829-008-Q6-K6-G2
cggtcgcgtgggttccagacanagntgaaatatggagctgttgtggcaaaacggacaagttgttatgcagagccaaaatcaacgatctatgaagaaattgccgtcgttcaaacttctcgacgccgatcattcggctcccagggagatccggtcatcatcaccatctcacaagcatcgtcgtcatcatcatcaagagcaacagcaattggttaccgatcatctcttcatgcaagaagatgaaatggcttcgtggcttcactatcctatcagcgacgcaaatttcgaccacgatttctgcactgatctcctctatcctccctcctcctcccccaccgctgccgtcgcaccttgcgtgagctccattgtggcaacttccactcctcctatacttaaaagagtttctcaagtttcggtttctgcttcagctaaggaatcagttcctaggcccccggtaccgccggctaggaggaatgagttggagccggcaaggatccacaacttctctcacttctcgaggcatataacggcgaggacggagcaatctgaactctcgaattcgaagaatgtaatgggggaat

SEQ ID NO: 13004 - DNA, 577 bp, Gossypium hirsutum
  Clone ID: LIB3829-008-Q6-K6-G3
cggccgcgtgggtttgcattcaactggagggagaggtcaacctagtactttttggtctttgttcggagtctcgcattgaggaggattgcatacctgatgctgcccttaaacttgataaattgcttaagtccgaacatcccgagataagccagagcatcacagatgcagcaaagaagctcaaacgtttaaagtgaagactgtttgataacaaagtttcccctttaatgtattctcaagtaactcgagagcaagcttttgcagattttgaagcaaatgacattgaaactgggtgactgaagattgcgccacagaacatgaaaaatctgaggttggtttttatttcttttctttgaatggtatgcattctgcatcatctccagtttggttgttcgatgtcttaatacttccgtcttgcatcgtttttgcatacattttaagcattacagtcagaggcccgaattcaaaatataccctcttcaatatgtaatagtattaacctgtaaatcacaccattgggtgtacgaatttagacaggatttttatttgacttaatcgattcattgagatttgagaccaa

SEQ ID NO: 13005 - DNA, 597 bp, Gossypium hirsutum
  Clone ID: LIB3829-008-Q6-K6-G4
ccccgcgtccggcctcatctggctaccttcttcttccgcctccacccctacttctgcctcagccatccctcttgctgccatttcccacatcttctcttccaaaaaatctctcaagtccgtcttccactcccctaggatccgcttccaagtcctcgtctcgtccgatggtcgggtcttcgatccaagttccgggtctggttccagttcaggttcgggctcgagatcagtcgtagtaacggcagtgattagagggaagggggattgtgatgggtttttggtgaagttttgggacagttggcgggcgagagcttgggagactactaagacttcaagttccggctcaggttctgcttcgggttcaggggcagccacaggaatcggtggagggttgtactcgagtgatgggtcggtgaggatggttggggtggcgggtattttaaggaaggagcaagaaatgtgggagagtactgataaaagtttgcaggatgcttttcaggacttaaatgctctcatgagtaaagctaaagagatggtgatgctagcagaaaaaatgagacaaaagcttttgtccggaacgagttctcaaacaagtggaac

SEQ ID NO: 13006 - DNA, 580 bp, Gossypium hirsutum
  Clone ID: LIB3829-008-Q6-K6-G5
caagtagctggtcgagccctcttttactggctcactgagtctcccaattccccttcctctaagcctcttgtcatctggcttaatggaggtcctggttgctcctcagtggcatatggtgcatcagaagagattgggccattcagaattaacaagtcagcctcagggttgtatctcaacaagttctcttggaacaatgtggctaacctcttgttcttggagactcctgctggtgtaggcttctcttacaccaatcgcagttccgatttgttggataccggcgaccgtcgaactgctatggactctttggaattcttgatcagatggctcgaccggttcccacgatataagaatcgtgaggtatacatcaccggagagagctatgccggccattatgtgcctcagttggctagacagatcatggtttacaacaagaaatccaagcacccaataaatctaaaaggaataatggtgggaaatgcagtgacagacaactattatgataaccttgggacagtgacatactggtggagccatgccatgatttctgataaaacgtatcagcaactcatcaacacatgcg

SEQ ID NO: 13007 - DNA, 591 bp, Gossypium hirsutum
  unsure (1)..(591): unsure at all n locations; Clone ID: LIB3829-008-Q6-K6-G6
cccagcgtccggcgaccaatatgagattcgccagttatgtatgaataacaagtcattccaatagccgattcatcaaataaatagcttcaaagtcgggaaactattgcaatggcagctagtatgatttctttgtgattgttgcttttcatagttagctatgaagcaacgttgctcctgctgtgagtgttagatataggtattttcatgcattcgagtacacacatggctttgaagtcatcctgtgattgaaccaagcatccaatttgaatgagaggaaaaatgaagcaaagaaaagaaaacttgtgcatatcagttatgattgaatgattgttatggaattggttttcacttgtatttctaaagttctgtatatacttattattatgtaaaagaatgtgggtcttctttgcttgcatatcanaaaaaaaaaaaaaaaaaaaaaaaaaaaaaaaaaaaaaaaaaaaaaaaaaaaaaaaaaaaaaaaaaaaaaaaaaaaaaaaaaaaaaaaaaaaaaaaaaaaaaaaaaaaaaaaaaaaaaaaaaaaaaaaaaaaaaaaagggggggccccttttaaagaaaccaaattttccg

SEQ ID NO: 13008 - DNA, 603 bp, Gossypium hirsutum
  Clone ID: LIB3829-008-Q6-K6-G7
ctcatctctctcctttgttttcccttttgtctctctctctctttttccaaccctaaccctacctcaccaaccaggattcaacatgaagggaggaaaatccaagtcagatactaagagtgccaagctatccgtgaaatccaaagctggaaagaaatcggggaaggctgccaaggatccaaacaagccaaagaggcctgctagtgccttctttgttttcatggaggagttccgtgagcaatacaagaaggatcaccctaaaaacaaatccgttgcggctgtcggcaaagctggtggagataaatggaagagcttgtctgaagctgaaaaggcaccttatgtagctaaggcagaaaagcggaaggttgagtatgaaaagaacatgaaggcctacaataagagacaggctgagggtcccaaagacgaagatgttgagtctgacaaatcagtgtctgaggtgaatgatgaggatgatgatgaagaaggcagcggagacgaggaagatgatgagtaggaaggtccgtggtggatagcataatcaatgtaggctgtgatagtgtttgatcaaaaccttatgttaatgctttagatgtttccatgttattc

SEQ ID NO: 13009 - DNA, 583 bp, Gossypium hirsutum
  Clone ID: LIB3829-008-Q6-K6-G8
caggcctggtctcttatcagagatctcggctgtccttgccaaccttcacttcaatgttactgttgcggaagtatggacacataatagacgaatagcatgtgtgctctatgtcaatgataataccacgagtgggtctgtggatgatcccaacagactgtctattatggaggagcagcttaagcacatcatgcgtggttgtgaggacgatgacaatgtggctcgtaccagcttctccatgggattcactcatattgatcgccggcttcatcaaatgctgtttgctgatagggattacgaaggtggtggagtgacaactgaggttgactatcctccatccttcaaaccaaagatcacagttgagcgctgtgaggagaaaggatactcggttgttactgtccggtgcaaagatcgagctaagctcatgtttgacattgtctgcacgctcacggacatgcaatatgtagtttttcatgctaacatctcatccaatggtccttatgcttcacaggaatattttattcgccacatggatggctgcacacttgatactgaaggagagaaagaaagggttgttaaatgtctc

SEQ ID NO: 13010 - DNA, 570 bp, Gossypium hirsutum
  Clone ID: LIB3829-008-Q6-K6-G9
ggcatttttcctcatcaccatcgtctgctttcttcacaaaaaaaaaaaaaattacagtgaaatggcaacccttaaagttccagctcatgtacctgccccttctgaggatgctgagcaacttcgtaaagcttttgaaggatggggtacaaatgagcaattgattatcgacattttggctcacaggaatgcagctcagcgcaatttgattcgtaaaacttatcgtgaagcttatggggaagatctccttaagtctttggatgaggaactttcaagtgactttgagcgagctgtggtgctgtttactttggaccctgcagagcgtgatgcatttctggctcatgaagctacaaagaggttcacatcaagccattgggttctcatggaaattgcttgcactaggtcttcacatgaactgttcaatgtgaggaaggcgtatcacgatctttacaagaaatcccttgaagaagatgttgcgcaccataccaagggagactaccgcaagcttttggtcccacttgttagtgcattccgataccagggagaggaggtgaacatgacactggcaaggtc

SEQ ID NO: 13011 - DNA, 572 bp, Gossypium hirsutum
  Clone ID: LIB3829-008-Q6-K6-H1
gtttggggattcagaagacccctgagaaccatgttcggtttggtgttagggaacacggaatgggagctatctgcaatggcattgcccttcacagccctggcctgattccatactgtgctactttctttgtcttcactgactacatgagggccgccattaggatttctgccttgagtcaggctagagttatctacgttatgacccatgattccattggtcttggggaagatggaccaactcaccagccaattgagcacttggcaagcttccgtgcaatgcctaatgttttgatgctccgtccagctgatggaaatgaaacggctggagcatacaaggttgctgtcctcaagaggaagacaccctcaattcttgccctttccagacaaaagctaccccaattagctggaacttccattgagggggttgaaaaaggtggctacatcatttcagacaattcttcaggcaacaatcctgatgtaattctgattggaactggttctgagttagagatcgctgttaaagctgctgatgaactaaggaaggaagggaaggctataagggttgtctccctt

SEQ ID NO: 13012 - DNA, 362 bp, Gossypium hirsutum
  Clone ID: LIB3829-008-Q6-K6-H10
accaagcagaaaacgaaggtcgagtatgaaaagaacatgaagcctacaataagagacaggctgagggtcctaaagacgaagatgttgagtctgacaaatcagtgtctgaggtgaatgatgaggatgatgatgaagaaggcagcggagacgaagaagatgatgagtaggaaggtccgtggtggatagcataatcaatgtaggctgtgatagtgtttgatcaaaaccatatgttaatgctttcgatgtttccatgttattcttttagatgcgcatgccatctaagggagaaatgtacctctgaatcctgttggttccttttgaccttctgaaattaatagttgtagatgggataatctgcttct

SEQ ID NO: 13013 - DNA, 571 bp, Gossypium hirsutum
  Clone ID: LIB3829-008-Q6-K6-H11
attcgacatggtgacaatccctttctttgtcctaaacatcctccttttcctctccatctccgcggctacaccaaagagcggtgcagatcacgacctggtccgttcatcatgtgtccacgccagctatccaagcctctgttttcgcaccctttcttcctactccggcccagccaacaccccacgtgagttagcccaagccgccgtaaaagtcagcctgtcccgtgcccgtaaagtgtcgaactacttgtcgacgagtgtgacggggtacaacaagagggaacgagtcgcactgagtgactgcgtggagcaaatagatgagtcgatggaggagttgagcaagacattaggggagttgaagcacttgagaggggagacgttcgagtttcagatgagtaatgcgcggacatgggtgagtgcggcgctgacgaatgaggacacgtgtcttgatgggttcgaaggagttgacggcaaggttaaatctaatgtgaagaggaagatcacgaatgtggctaaagttaccagtaatgctctgtacatgatcaataggctcaatgaaagtcgtggtaggcac

SEQ ID NO: 13014 - DNA, 574 bp, Gossypium hirsutum
  Clone ID: LIB3829-008-Q6-K6-H12
gttgatacagatgctgatgtacgtctggctagaagaataaggcgtgatactgttgacaaaggaagagatatcggtgcagtccttgatcagtattcaaagtttgtgaagcctgcctttgatgactttatacttccaacaaagaagtatgcagatattatcattccccgtgggggagataatcatgtagcaattgatttgattgtgcaacatatcaggacaaagcttggacagcatgatctttgtaaaatctacccaaatttatatgtcattcaatcaacttttcagatgcggggcatgcataccctcattcgtgattctctaacaacaaaacatgacttcgttttttactctgatcggttgattcgtctggttgttgaacatgggctgggacatctgccttttacagaaaagcaagtgatcactccaactgggtctgtatatacaggtgtggatttctgtaagaggttatgtggtgtttcggttattaggagtggtgagagtatggagaatgcgttgcgagcatgctgcaaaggtatcaagattggcaaaattcttattcacagggaaggtgaca

SEQ ID NO: 13015 - DNA, 561 bp, Gossypium hirsutum
  Clone ID: LIB3829-008-Q6-K6-H2
cggccgcgtgggaatttctttctttatcaacctccccattcatctgtagctataacaccaaaaagcctgcaaaccctatctctatttgtagatctgagcccagctatttagcctttgcattgtacgaggagaaataaagacagtgggtcgtatagagagagttgttagtcttggttttttatgtgagggtgcattgttctctgatgattgtatgacagtcaagggtatatggttttgagaaggaccctggattttgatacttcagagcgaaaaagtaaagagggatgcaatatttgtggatacttgattttgattacatatgttacgtcgtattgcgtggttaattggtttcaataataaagtcgaacaagcgaagaagttatccaatgcaaaaccgcaaccggctaaagtacagccggctgtcatgttggatactatccaagagattgcaatttacatccataggtttcataaccttgatcttttccagcaaggatggtatcgacttaagattactatgagatgggaaaatgatcagcaaacttctataggagcgccttc

SEQ ID NO: 13016 - DNA, 569 bp, Gossypium hirsutum
  Clone ID: LIB3829-008-Q6-K6-H3
aaactaaaatatctttcatttcttcttcaatggaggtgaagcaggtgggtccgtctcgtgtgggtcatggatccgtcgacccgaaacgtcaattgggttgtcttggcccggataatgacccgacccacttcttcttcttcttcttcagttattgagattttcccttttgatcccaacaccacttctctctcttcgtctccgttggctaggcatgagcttgaagaaagtgatggtgatccaataaccattgcagtgcacccaagtggagattgttttgtttgctctaccactaatggaggctgcaagttgtttgagttgtatggtcatagaaacacatttacagctgtccaccaaagaattacctcctctcctagatgcgggcccgcaaaaatgcctagctttcagtgttgatggttctagatttgctgctggtggggtggatggacggcttagaatcttggaatggccaactctacgcatcattgtagatgaagtaagagcgcataaatcctttcgagatatggattttagcctagattctgagttcttagcttcaacatcaactgatg

SEQ ID NO: 13017 - DNA, 583 bp, Gossypium hirsutum
  unsure (1)..(583): unsure at all n locations; Clone ID: LIB3829-008-Q6-K6-H4
ggnaaaaaaaatattcctctctttctctccatcggaagctcaccaatttctgcaaaatggcgacgatggtgcctgacaatctaagccgtgaccagtacgtttacttagccaagttagcggaacaagccgaacgctacgaggagatggttcaattcatgcaaaagctcgtcctcggctctactcctgcctccgagctcaccgtcgaggaacggaaccttctctcggtcgcttacaaaaacgtgatcggatctctacgcgccgcgtggaggatcgtttcttccatcgagcagaaagaagaaggtcggaagaacgaggaacatgtggtgctcgtcaaggagtatagatcgaaggttgaatctgagttgtcggatgtttgcgctagtatcttgactttgttggactcgaatctgatcccatctgctgctgcgagtgaatcgaaggttttctatttgaagatgaaaggggattatcatcggtatttagcagagtttaaggttggtgatgagaggaaagctgctgctgaggatactatgctgtcttacaaggctgctcaggatatcgcactgacggatctagcaccaac

SEQ ID NO: 13018 - DNA, 567 bp, Gossypium hirsutum
  Clone ID: LIB3829-008-Q6-K6-H5
gcaacgtctcatcttcgccggaaacacttgaagaggccgtaccttggccgactacaacatccagaaggagtcaacgctccatcttgtccttcgtttgcgtggcgggatgcaaatcttcgttaagacgcttacgggaaagacgatcactctcgaggtcgagagctctgacacgatcgacaacgtgaaagccaaaatccaagacaaggaaggcatcccgccagaccagcaacgtctcatcttcgccggaaagcaactcgaggacgggcggactttagccgattacaatatccagaaggaatcgactcttcatctggtcctgcgtcttcgaggtgggatgcagatcttcgtcaagactttgaccggtaagacgattactttagaagtggagagctcggatacgattgataacgtgaaagcgaagattcaggacaaagaaggaattccaccagatcagcaaaggttgatttttgctgggaaacaactggaagacggaaggactttggctgattacaatattcaaaaggagtccactcttcaccttgttcttcgtcttcgtggtgggttcta

SEQ ID NO: 13019 - DNA, 575 bp, Gossypium hirsutum
  unsure (1)..(575): unsure at all n locations; Clone ID: LIB3829-008-Q6-K6-H6
atagtcatgacttcaatatcacttggntgaatttactgatctttgcaatgccattggtctaagatttcaaaaggagtgatgttccatttctttgtttgaaagatttcaaatctatcgttcgcctttctctgaaaatttgaaagcctttgttcggggtcccaaatttggatacataatatccttcattctcatattgaatctgtttgcagttatcattgagacaacgcttgatattgcaaacaactctggtcagaaggtgtggcaggaggttgagtttgtctttggctggatatatgtactggaaatggcactgaaagtatattcatttggctttgaaaattattggagggatggtcagaatcgcttcgattttcttatcacatggataatagttataggagaaactgtaacttttgcatctcctgatgaattttactttttctcaaatggagaatggattcgctaccttcttcttgccagactgctaagattgataaggcttctcatgcatgtccgaagttatagagctttcgttgccacattcttaaccctaataccaagtttaatgccatatc

SEQ ID NO: 13020 - DNA, 583 bp, Gossypium hirsutum
  unsure (1)..(583): unsure at all n locations; Clone ID: LIB3829-008-Q6-K6-H7
gggattgttgttcggctacctgtttgaggaaccggnatgttgaggcgcttgctactgctgctcttgttcaggccattagggaagctcaagagcctcgaaccctccaggaaatctctattgctgccaatgtaccacagnaaagagattggcaagtacatcaagatcctgggagaagctttacaattaagtcaacctatcaatagtaattctatatcagttcatatgccgagattttgcactctccttcagctcaataaatctgcacaggagctggcaactcatatcggagaagttgtgatcaacaaatgcttttgcactcgccgaaatccgattagtatatctgcagctgctatatatctggcatgccaattagaagacaaacggaagacgcaggctgagatatgtaaggtgacaggtctcacagaagtcaccctccgaaaagtctacaaggaactattagagaattgggatgatctacttccgtctaattatactccagctgtccctcccgagaaagcatttcctacaactacaattgccacgggccgatcttcagtgcctagagttgattcaattgatctga

SEQ ID NO: 13021 - DNA, 576 bp, Gossypium hirsutum
  Clone ID: LIB3829-008-Q6-K6-H8
agcgtccggaaattcagtgcgcacattgcagcttgacttccaacttcctgagcgcttcaagttggagtactcggcagaggatgaagccaagagggagaaacctgttatgatacatagagctatcctggggtctgttgagcgaatgtttgctatattgttggagcactataagggcaaatggcctttctggcttagtccccgtcaagcaattgtttgccctgtgtcagaaaagtctcagcaatatgcaatgcaggtccgggattggattcatgaagctggttattatgtagatgttgacatgacagatcgaaagattcagaaaaagattcgagaagctcagttggcacagtacaactttatattagttgttggtgaagaggaaatgaacactaagaaggtgagtgtgcgggtgagggatagtggagatttcagtggaatgagcatagaagatctactcaatcacttccaggcagaaactgaggtttttcattaggatgatgcgactctatcaacttaacatgtggaacatcaatggtgggattggcttcttcccttgtattatttacatctctgctg

SEQ ID NO: 13022 - DNA, 418 bp, Gossypium hirsutum
  Clone ID: LIB3829-008-Q6-K6-H9
aaaaaaataaaaaaataaaaatttttttaaaaaaatgtgaatttttaaaaaaaaaaaaaaaaaaaaaaaaaagggggggggggccaaaaaggccaaacgttactaaaaaaaaaaaaaaagggtaaaaattttcccaaggggaaaaaaaatgggcgaaaaaaaaaaaagggggggggggggaaagcgggggaaaacccgggggaaccccggtgaaagggcgggccaaataaacgcgggggcgttttggggtgatgggagagaagggggccccccccaggggtgggcaaaatgaggggggcgtgggagggaaccggggggggggcgaaaagggcccttaaagggggggggatggggggggggtccccccaaaggccccccccccggggggggccccgagggggggggggaaaaaaaatta

SEQ ID NO: 13023 - DNA, 491 bp, Gossypium hirsutum
  Clone ID: LIB3829-008-Q6-N6-A1
cctctaaaactaccttcgatatttccttgggactgctaaaaaaaattgtttaaacaacgaaaatttaaaaaactcgtttttttgacctttcctctttgacgatctgcgaatattaaaaaaaaaacaggcaatttccggaacggcaggttggttgagatcgatattgagaagcgggcgcgacttgacctcatggtggttcaaatcaacgacggatgatgagtcagagtcgctttgtacaccattaaacgtcgcatgaagatcatgatgatcgaatccaaaccgttcaaatgggtgtcctttcactgcaccaggccgaacgaatggttcaaagtagaaaactttgcggcccgcaatatatggcaccggtgaagcttgctggaaaggaaatctaacagccgtaggcacgtaaccggtaaccgcctcaccttgtacgaggttgagatctaaaggcgaagagtcaaccatgagcgccggctcacggctcgaggatt

SEQ ID NO: 13024 - DNA, 500 bp, Gossypium hirsutum
  Clone ID: LIB3829-008-Q6-N6-A10
caaggaaaaaagttaggattcgatggggtttgtattctgaaaaggccaaatctacaagttcagttttttttttaaagggaggtaaattaaagggctaaaaaagcttaaaacaacatcgggggtggcaattaaagacctcattttcttctatccaaagcatgtttaaccaaagggggaacctacctatcaagtatctgaatttttaatcaaatcaaaatttgaccatggctctccaccccctctaccattttgtttttttcactaaacccgacttttatcaaaacttagagaccgaaaaagccgagttcactggctctctccttctcaaaagtttcaaaatactgatatatgattgttacggctagcaatattccggtacctgaaccgattgctcccatgaaatcggctaaaacagttaatgcaccgatgcacattccgccaaatgcagctgcggtcggtatgtaacggtttagttctttttgtagatttgaatctctatg

SEQ ID NO: 13025 - DNA, 240 bp, Gossypium hirsutum
  unsure (1)..(240): unsure at all n locations; Clone ID: LIB3829-008-Q6-N6-A11
gaaaaaaataaaacttntcatgattcattgatatagtgagaaacttagaccttagaccttagaagacattcaagatcttaacatgcaattattacatttattgcttnatttnaatataaacccatcatctaaaccaaagggggggggaccaaacaccaacttccataaacccatcttcagtagcacaacccctaaacataccagtagtattaaacccacaagccattttcccctattctt

SEQ ID NO: 13026 - DNA, 492 bp, Gossypium hirsutum
  Clone ID: LIB3829-008-Q6-N6-A2
ggcgtatatcaacagacaatggcatattcattattcactggccacatcaatagttcaacacgacatcgggggcccaaagcaacatattccattaaagccactgcctgcctgcctgccttgtcatgttggggaaaccaacaggataccaagttaggtactagcaaccaaattttcaagcatttccactttcggtaactcgaaattactgtctgcctgaacgattttgatctcccggagcatttactcattgacttacccaatttatcttaaaagatgacatccaacagatttaaacttcgaagtttatatatatacaaagcaaaaatggggataatatatatgtatgtagatatgcccatccaaggggttttttagcattcttcatgtggaactaatggaaaacttattctacaacatataatctgaccttggtaaattataatgccttctaaaaaaaccaattatttccctcttgatttcgcggcatcaact

SEQ ID NO: 13027 - DNA, 537 bp, Gossypium hirsutum
  Clone ID: LIB3829-008-Q6-N6-A3
ggaacaaaccacacgttttgcattaattaattgttaaccataaattaagaaaaagaagaaaacaaacaaaaaagaaaagagttaaacccattgctgctttgtagcttccattctctccaacaaactggcaatctctgcttgcattcttagtttcattttgtagtaatcacactgtgaatgttccaaaaccttaagttcttccattttattccttcgcctttcctccgtctcctgtaagcaaagtcgggatagcttctcagcatattcctcttccaacttttcggacttggcccggatcatcctcatgtaactctccacttctctccgtgcttcatcggccttgctttggaacaatattgcttctgcttccttaattcttaccatgctttctaagctgtcaaatccatcattgtttgatgaccttccaaatcggtattcatcttcactctttaggtcattcatgagagaagctttgaggtccttccgatggggttcgttcggaagtaaatcatgcccacttgccgagcttgtgctgta

SEQ ID NO: 13028 - DNA, 79 bp, Gossypium hirsutum
  Clone ID: LIB3829-008-Q6-N6-A4
gcagttttcttgtgaaaaaaaaaaaaaaaaaaaaaaaaaaaaaaaaaaaaaaaaaaaaaaaaaaagggggggcgttccc

SEQ ID NO: 13029 - DNA, 522 bp, Gossypium hirsutum
  Clone ID: LIB3829-008-Q6-N6-A5
catgatccataaataaaaaattagattaaatgcaaggttctacatgtatgaaatcaatgattatgtcaacaaagatgaattcttaataatatcaaactacgcacggcaagaccaaaaataaccatataatctaaaacgattgcggttataatttcatagatttcctcatggaatgaggttagtaaacaatgaagcaccaaccactaacatccttacatgtatcacaatatagattcctccaggtccatgaatggtcgttcactccacggcgagggccgaaagcagacacgtacctcatgctcttcaggtcctacgcgatgcttgggcacgattatctcaagcattgttcctgtctcatcatggtatgcttccagtttagcattttccggaatgcggttcggtaggggaatttctcgaataaattcccccggagggcagtgctcaggtgctggatctgttaacttaaacgtcctatcttgtctcttaatgaatggcatgcaggctgtactcacacatgatatc

SEQ ID NO: 13030 - DNA, 542 bp, Gossypium hirsutum
  unsure (1)..(542): unsure at all n locations; Clone ID: LIB3829-008-Q6-N6-A6
ggagaaggaaanagnattattggtaaaaaagcttttatgtagttataacattgtaggaacaagctacaaaaagcaaaagaaaacagagcagtattcgaacaacaagcttcttatttatcggacagatattacagaacccaacaacctcgaacaggttgttctcctttttcggtctgccaccgtcacaacagagcatgttccaagctttcatttaagaagaagagttcttcagaacccattccaccaaagttgagatgccaaatccagttgccacatgcttcttatcattcaagacaggcccagccatgtcaatgtgcatccactttactttttcatcaacaaattgtttcaagaacagagctgcattgatagcaccgccttgacgaccgccggtatttaccatatcagcaactcctgatttcattgattcccaatagctttcctctaatggcatcctccaaaatttctcaccactggcctctgatgcttgaaataactcctttgctagatcatcattgggtgtgaagacgcctgcaattgag

SEQ ID NO: 13031 - DNA, 507 bp, Gossypium hirsutum
  Clone ID: LIB3829-008-Q6-N6-A7
aacaaaatagggcattgcttaaacctgcaagttgtggggggaaagaaaaaaaaagactatgagttttacagtgaatgtgtacctaatcaagaagggggtttgatcacccatcttcacattgcaagcttgtgttaatgtgtcgtaatgggcaagatactattgtgttgacagattccacagattccatgggtagtttggcagtgcggggaggttgttaggatttggaaagctacagtaagcaatgatcctccttcgggatcattgcttttctcgtgcctagaagaaatcactaatggccttgactcgagtccctcaggaagaatggagaagcctgaaggtaatatggccatgttgctagagtcacatcctgtgatcactgattgtattccagttacatccacatgagcaaagaccaccatggattcaaaagcattagtgcaactatcttggagcacccacatgctattctcttttgacttcattgcttgaattgttactgcatttccc

SEQ ID NO: 13032 - DNA, 519 bp, Gossypium hirsutum
  Clone ID: LIB3829-008-Q6-N6-A8
aactgcaactgacaactgtaggttcatgaagaaacagtatcaaaagagtcaataccaaagagtctatcactgttgatcacctaatcctaccggctagaagccattttttttactgacaaattaaagctcagagattaacagaaagtagatcaaagatcgaacggcatctaagcctccgcgtcaccgcacttcttcgcaggagagcagataagccaaacgtatccatatggatccttcaccttgcccacgcgaccaccacagcacgcgccatcgccctcagttacctcaccctccgcaacgcctccagcgctgacagccttggcaattgcagcttcgacgtcctcagtctccaggcagagcacacatccagtcccctcggttttcaccggagtagagttatcagcgatgtcagaaacgagaatggtagagccagcaagctcaagttgagcggagaggacgtgaggctgctcctgctcagccttgcgcttagggtacacggtacggccagcctcaacagcg

SEQ ID NO: 13033 - DNA, 546 bp, Gossypium hirsutum
  Clone ID: LIB3829-008-Q6-N6-A9
gggtttgttttttttttttttttttttttttttttttttttttttttttttttttttttttttttttttttttttttttttttttttttttttttttttttttttttttttaaaaaaatttggggggcccaaccctgggccccaaaaagggggggggggggaaaatttcccccccctttttttcccctgggccaaaaaaacaacttgaaaaacccaacccctacccaatttttccccaaaattttaaaatttgggcccttttcccaaaaaaattaaaaaaatcttgggaatgggggggggaaaaccccttaaaaagaaaaaaaatttctttcccaaaaaaaaaaggggcccaaccttgggggaatttcataaaaagggaaaaacctttttaaaaaaaacccaaaaacccccgaggggccctaaaaaaagggaaaaaccctttaaaaaagggggaaaaaaaaaaggttttaaggggcaaaaaattttgggtttcggggccctttgaaaaaaggggttttttccccaaaaaaaaaaaaaccccccggg

SEQ ID NO: 13034 - DNA, 515 bp, Gossypium hirsutum
  Clone ID: LIB3829-008-Q6-N6-B1
ggaaaaacgtaaataattaataaaaattaaaaattgtaaaatcaacaccaatgcaatgcaatgcaagccattgttgagtctaatacaagtgagagaaactaagatcctaagaagagaatcctattttactaacagcaatctctttgtccagtatttatattgaaaaatcaaatcaggagaagcaatctctttgcacaccatttcaattcctagtaaggccctcgaaagtagttgatgaaagccagcatacacatccgatcaatcagctttcagtttcagaattttcttggcggtccttaaacgaaaatagggcatgtgttcctgctcaaaacaaagacttaagcctctgctatagaagtcgatatattttaacataaacatgccacaatcaaaccatccgattgcatctgcagccaatcttgtgtgcatatcaattcagtgagcttcgacagttgggggatgtaagatatagatgatactgccaaagctaaattgcattgctccagtatttatag

SEQ ID NO: 13035 - DNA, 520 bp, Gossypium hirsutum
  Clone ID: LIB3829-008-Q6-N6-B10
caaaatgagtcctttgttccatgcttgtggaagaggggggtaataaataatgtgatatcagccattaatacataattaaaagtgtgctacatgtgataaagggagttacaacaaaaacaataaccagcttattcaaataaaagtgccacaaatttgagtccttgtgcttgagactaaattcatcttcattccaccttccaaataattgggccactgccaaatgagctcaaagccatttcttcataacaaaatttatatttatcaggcagatcagaatcaaaatcacagatcgagaatctttcgatttcttccattttcctacgtgttttgcactcccaaaatcaaaagttatcaatgggaaaaagggggtactgcattataagcctttctacatgtggactaacaacttctctcatatgcagctccttcaatacttgtgctgccagctccatttgtgcttcatgagcaatcccttccacaagtatgggatacgtggtctccttaggggtatagcctttct

SEQ ID NO: 13036 - DNA, 498 bp, Gossypium hirsutum
  unsure (1)..(498): unsure at all n locations; Clone ID: LIB3829-008-Q6-N6-B11
aatcttattgcgaatcttgagtgagtcatgggtttacattgtgacacctcacaaatattttcaactgagtaatgggtcatactgggtttcaagagtgcactaaaatggggagaggagaacaaggtaaaattgccttgggttaccaacaatgggggggtgcgtcaaaatatgaggactgagctgtgcacctttctccctggggtcaatttnagattgcccaggggggggcgagagctcaaaattctgtgccaaaccacccaaagtaataccaaggggggggaatgcgagaataattcctggggaacttcttctccccacccgaggggggggagcggaaatcattggccgtgggctcaaccttgggttcctcttcaaagaacctttcaggcctaaattcttcgggatttttccaggtagcaggggtgtgggggagccaccctgcgtttaccaagattttgctctcagcgggggtatcatagccacccaatttcccatcat

SEQ ID NO: 13037 - DNA, 446 bp, Gossypium hirsutum
  Clone ID: LIB3829-008-Q6-N6-B2
aaaaaaacgaaaaggggggaatccacttattggcttaaacatcatccccattccataggggccaaaaccaccccccaaaacaaataaaacccccgccaggggccaaccgaaaaaaaattcaaggccaagccaaaccctttccaacatagggcaaacccttgtaaaaaaaaaaagtttttaaaacatccaaaaacccaagggtgagttccccacttcgttgccccccctttttacaggccaactgaaccacagttttgaagcccattgcccatgccgcccaccccaggaaagaggcccatgaacccatgttccccaacctgaaaacccccattgttggtggccccccttgaaatgcccgaacagcttgaacttaaactggtgcacccccccacaagcaaagggctctaaagttctgaccccctgttctttcggccaaaacagcgggc

SEQ ID NO: 13038 - DNA, 421 bp, Gossypium hirsutum
  Clone ID: LIB3829-008-Q6-N6-B3
aagggaaaaaaatttcattaacaaggatgcttttacaagataagaaaatgtgtcagcagataatagacaactccgtataacgaactgtttcgtatctttgtgtcttgcgtgagagagagagttgtatctaggggctattgataaccgggtaagggacctaaagtaggctcttacatttgcacatcgtaggacaaaataccacagctctgaaccttggatgggcaactagacagcaaaagcatttgcttaagcctacaaacgaattatgctgccttatagctaaaccctggtagacatggggacggaatgcctagaaaatatagggccaatggcacacagggcgggaggaactagctctttttgaataccagctaattgtttaaagaaccggcgataaccatgggaatataagagcgtggtt

SEQ ID NO: 13039 - DNA, 450 bp, Gossypium hirsutum
  Clone ID: LIB3829-008-Q6-N6-B4
aaaaaaggaacaggccgcttcttcggggggttgggccccccataaggcccaagaaccccgggggggaataaacccttaaacaacaagataacccgggccgccccggggggaaaagacaatccccgggaagggcccgccctgaggggggatgaggaaatgcccaagcatttggggaaaccttgggggggccattactaaaagggggatttgaggaagcataccggggggacatcatcattaacgccttcctggggcccctggttcagcaaaaaaaaaaacttcccccgggagagaacgggatcatgagccggggcataagggggatctttggagggggtttccagaattgcgggaaccgggttattggggctatcaactaaaaaccttatcaggggtgcaacatattggcggggcaaaataatggcaatatccccccttgggggggagccc

SEQ ID NO: 13040 - DNA, 96 bp, Gossypium hirsutum
  Clone ID: LIB3829-008-Q6-N6-B5
agtacctggggtagggatctggtttattacttggtggatgagagtacagcggaccgtatttttgctattcccatttctgaaagtggtcaggagggt

SEQ ID NO: 13041 - DNA, 535 bp, Gossypium hirsutum
  Clone ID: LIB3829-008-Q6-N6-B6
gggcaatcatagtaatagagaattatttcattaacaaagcaagcttttacaagataatttattctctcagcatataatataaaactccatataaagaactcttttctcttttttttttttttgagagagagaaagttctatataggcactcttgataaccgggaaaggtagcttaagtaggcacataatataacacatagtaggacaaaacattagagttttgatccttggatgggcaaatatacagcagcaacatttccttaagcatccaaatgaatcatgcatctcagacctataccctggagcatgtagtcgaatgccttgttaatatcggcaaaaggcacagagtgtgtgatgaacttgtccatatccagccccagctccttgttcaaatatttgtcgacaaccatgggaatatcagtgcgtggtttatagttgccataaaaagcacccttaagggtcctctcacttagtagattcattggatgagttttgaatgcatcgtctttctttggcacacccaccagcacacaaa

SEQ ID NO: 13042 - DNA, 506 bp, Gossypium hirsutum
  unsure (1)..(506): unsure at all n locations; Clone ID: LIB3829-008-Q6-N6-B7
ctcctcaaccagnaaacatacatagactattttatatatagcagagatctcacttgattaggggtttttgggtatcacataatattaatacccattattatcaaaacgtgataactccactttttccttttccgctactctagctttaaaatagtcccatgcaatgcaagtaaacaaaagaagtgcacgagtttaaagctagccaagaccatagaacgaagtttgtcagcagctaataacattcatcattgcgactgtttcatgattttgtttgtgcgggtgattggccttgggcttgtgctgggttcggccgagcaaggcctgggatctcaactccatgaggcccaatgcggttacgagatataaaattgattatcaaggtagcaaattcatcgggtacatcctcctgtatagcatgccctgtatgtctaacaaccaccatttgaaacttgccttgcatttgacctattgtgagcgctctgtccagtctatcggtgccagctaaa

SEQ ID NO: 13043 - DNA, 491 bp, Gossypium hirsutum
  Clone ID: LIB3829-008-Q6-N6-B8
gaaaaggaaacaaaagataacattgataggagagttccaaatgtccctgaggggtacataacaaaacggagaaaagctagagaaataataaatcacaaattcgctgccgtttcatggaatggaaatcgttgaaacatctgctaaaatggaagaaataaaaataaaaacgaatgaatgtggaagctcttatcatcatctccattctctcttaagctttgcttgtaggacctcatgcgttgtgaagaactagaagcacttcctgtgcacaatagatgggccagattcatcatactctgccttagcaatccacatctgctggaaagtactgagggatgctaagatagagcctccaatccagacactggatttcctttcaggtggagccaccaccttaattttcatgctgctcggggccaatgcagtgatctccttgctcattctatctgcaataccagggaacatggtagttccaccactgaggacaatgtttc

SEQ ID NO: 13044 - DNA, 531 bp, Gossypium hirsutum
  Clone ID: LIB3829-008-Q6-N6-B9
gaacaaaggagcttttgcatactccatttcatgagaaaggtttacttttcatacattgtctctattaggagaaaagggggggggaatgctggatgtctctcacacacacgtaagggtataaatttttcatcttttttcaagaatttgcttcacaggtttaggataagtacacttggacaccagcagttttcgttacctggcatacagggcaaacattgattgataaatcacagtctttacataagcagaggtgcctacatggcatcaacaaaatggacacctcctttgcgttgcatgctctgcaaataatgtgttccttcatgcccttggaaacacattttgcagccccaagaggaatactgagaaagttgttcggatcaatataggaggctgcatcatcaacttcactatctccaaaaccttctttcccgtgttgagcaccttgtgagattacttgctgaaggtggctcttcaacacattaacaaccgactcgttgtattttgctctataatgccaattatgtgcttctg

SEQ ID NO: 13045 - DNA, 516 bp, Gossypium hirsutum
  Clone ID: LIB3829-008-Q6-N6-C1
aaataacacattgctctattgcattgcctaaagctgcagttaactgagatgatacaagttaataggagaatactagcaaaacagagctgattctattttgagggagcagtatttggtttttgtgactgggataacagtccttaacttctcataagcatcagagcaggcgtgagaatagtccgacatagcccggaatagctcaggcagtcggattttaaggcttcccaaagatttctctctcacttgaatgcaatgcttttcgtgagcttcgacttcctcttccaacctctttttcaagctctcaaccgcaaactgcctctctgatacaggatcctttgcgtttgcatcttcccctctttcagcatccatctcatctgatccagatctccgttgcctatacttatgataccattcctcgaaagcctgactctttcgcagaaattccttccgggtttcctcacacttttcttttagtttcatctcttcctcttgatggatgattatggtttttatcac

SEQ ID NO: 13046 - DNA, 515 bp, Gossypium hirsutum
  Clone ID: LIB3829-008-Q6-N6-C10
aaggcaaaaagagatcttatagcttgcaaagggaaaaaagtaaatagtatatatgaatgtatttttccctggcttaaagggaggggaggggtattttcttaacctgattaaacagaaatgagaatgcccttttcgggggtgcgtgggggtgtacctggatattacctttatatttggaaattgggatcacccgcagaataatgagaacttagtacttgtaaaaaccagacatgaattccttggcaggtgttcaatgctcaccattgattccgaatatacggaccttgtgcatgttggggaactttgcaaccaccatcacaaatacggccaacggattgaagaagagcattgggttttgataatctgttgtatgtgaggcgataaggtaccccacaacaggtacaacagtcaaaaacttcctgttccgtgtcagttgcttgccattgtctatttggtcccaccaagtcaaaccgttgtagataccttggtcatcaacaaacggtgttcccttcttc

SEQ ID NO: 13047 - DNA, 426 bp, Gossypium hirsutum
  Clone ID: LIB3829-008-Q6-N6-C11
caaaaaagaactttccttgggtgcgttaaaaataaaacatcacgtgtaagtgactttaatccaccatagggagcagcgcattatcactaacctcctcatcttcccaaaccgagacccacaacttttctttccttctggggtattttgtgaatagcgatcagataatacagggagaatttttatttaaattacacgacactttaatcttgccaaggggcactctctgggcttacttccgagggggcgagcacttggggctctgaggcttcactggggcctcggtcaggttcaggaggactaacttctgaggcgtccacttcatcatcggcctcatatctaccccatcttcctccaagggccattgcgctcatctcatatatcttgggacctaactcagcggggctggccgggagaaaaaccactggg

SEQ ID NO: 13048 - DNA, 527 bp, Gossypium hirsutum
  Clone ID: LIB3829-008-Q6-N6-C2
ggaatggaagttgaagatccacatcttatattctccagaaatcagagtacaagaacctactcatgagaacttcaatatcatattaatcaagcatttctgattaaagaaacaaccaagctaacatgctccacttccatggtatctgcagccatgatttccataaacctatgaaacaaacggtccatgatatctgctccaaagtgactcccaatcatagactcattgactgctctcatagccttcgccatttctttagctgtcaatgctctgtcatagttgatccctccattgacataatcccatggtaatgctaccacctcgagacgatcaacagcgaaagacccctctttctctacctcggcttgaatctcttccgggcaaggttcgtaatacggggtgtagtagccatctaacatttcctcttcaaccaccccctttgcaaccaaatcctgaaatgcttgacctaggtagtcccaaagtaaacagctttggtctgaggtgggatctggtgttgttctgccccttaa

SEQ ID NO: 13049 - DNA, 522 bp, Gossypium hirsutum
  Clone ID: LIB3829-008-Q6-N6-C3
gggtataatatgcttctaacaacagaaaaatacaaagtcctctaatggttgaatgtgcagatcagttgaaatggagtttatagtgacataaatgagtaaacaatgcagatcatcccaacacgaagtgtagctttgctaagactgaaaattgaccaatatggagcctattgggaaagcataacagttgattccagtaaagccaatcggtttttggttaaattaatcttctgttctgattctgctgctttttcctgaaccccacagacaacatccttgggagctttctctatgaatttaggagagttgagacgagctttaagtccctcatactctgtttgcatctttgatagccgcttggtaaggcgttgcacttcagcagaaatatcaaccatatcagcaaggggaagatatgcctccagtcctccacttgcaataaggtgaactgattgttttgcatcctctggaggagaatcagcgaaatgaatattgtctaaatctagcttggataagagagccaaaacc

SEQ ID NO: 13050 - DNA, 534 bp, Gossypium hirsutum
  Clone ID: LIB3829-008-Q6-N6-C4
gttttatttaattacaaatgagcggatgtgactctgttcaataaaaagtatatgagaattcccaaaacgaatacatttattacccattgtcactttgactggtggctagcttataaagcgcgaaacaccaccgctctttttttactgattttgctcggtatgatgctgctcctatcattttttaaaagctgctagccggtatatggagtcagtgagtttcggactaagccgtttgaggcgcttcatggtatggaggacatcagtgatctgtcgaggtgcgctctgtgggcgctcaaggggcaatctgcaagagcagaggggtagggaaccgctagattttggaaaaccttaagctgtttggggtaaaaaaaccctaaggtattgggttttaggtctgttgggagaatgaataacggactctatataaattggtttcgggtatttaaacccaggccaaagttgacctgttacaaaccttatattgactgaatttatgagattatatcgattcagattcttcaaggaatgtggcga

SEQ ID NO: 13051 - DNA, 517 bp, Gossypium hirsutum
  Clone ID: LIB3829-008-Q6-N6-C5
aagtaaataaatgtgtacaagctcagtgaagtgaaacaataatagttcagtagagaaagagagaccacctatgtgggtagaatagtggggctcatattctgccaaatacttattgacccaattcccagatttacaaaacaaaataaccctttctcagcccccacccacattcaacaaaacctgcttactacctacacattcttccttcttattttcacccaaataaccatttcatttcatcttcttaaccctatacttctatactacaatttcatcactatagcaaactaacatctttttctcctacaactacccaaaaagagatcatgaaaacccaaccacccaaagctgctcaatatggccattcctgaggtgacgcaacttcatggtttattccttgatgtggcctgaaattcccctgcttctgggtccaaccacttccaagtttcaaagcagcatcaatttcggcggtgacattagcgttcaaccgaggattaagctggggttgagcaccaag

SEQ ID NO: 13052 - DNA, 538 bp, Gossypium hirsutum
  Clone ID: LIB3829-008-Q6-N6-C6
attattaaaattctatttttcaactgacgtacctgaggtagtcctctggattatcatcgcacaaaccacaagggttccatactacccacttgaacgagatcacgtgtgaaggcatagctcttactctcaggatccgggaaaattgaaaagagattgattattccacattaattgccaatttcaacagggcaaaaacctttctaagtggaagcctttgacaagaacccaaaaccgggtgggtattcctgatgatccgttgcctcttaatatccagatgctctcccttggttttaatgtacggaaccaggaaccctaacttccttaaaaaggagcttactgccgcaaaatgacaggaaacgaattctcgatcaaaaaccaggtgacaaactgcaacgagttcgttgtatcaaatttattgggtggcagaataattagacccctgctaaaggccaggaatgtcgaataccgacatgtgcccgtgccatgtaacatctatagtgccgatgttcactggctagactacccaatcacgtacaac

SEQ ID NO: 13053 - DNA, 521 bp, Gossypium hirsutum
  Clone ID: LIB3829-008-Q6-N6-C7
aagggccaaatggggtttaatattaataataaaatccacctttcatttctttgagaccaaccttttctactaatcaaaaggggtgaaaaaatatcttaaactaactaaatgcaactctcaaataaaataaattatacaaaactacaattctttgacattttagacttacggaaactaagaactagtgagacttagtaacagccttagtcccttcggaaacagggtgcttggccaactccccaggcaggaccaatcttacggcggtctggatctcacgggaggtgagggggggcttcttgtgatagcgtgcgagcctcgaagattcttgagccagcttctccaagatgtcgttgatgaagctgttcataatacccatggctttgccggaaatgccgatatcaggagggacttgcttcagcaccttgaagatgtagatcttgtaggtgtcgatgctcttcttgcttcgcttcttcttcttgtgccccgcttctttagggagcttcttctcggctcttgggttt

SEQ ID NO: 13054 - DNA, 530 bp, Gossypium hirsutum
  Clone ID: LIB3829-008-Q6-N6-C8
caattgaaaagcttcttatctcaatggccttcggcattgagggagaccaacaaattatatttcaccaattcgacatttgtttagagagaatagggaaattccatgatacatgttgatgctgatgatggttttaacaaacacactttaggaggactgcacaatttacaactgcactaaggttcagttttcttatgattacaaattcaaatttaccagccttggaagaaacataaaggattcaagcaggcagccccattatagggacagcatgtaatttccatcacctatgctccgttcattgcagtatcatggattccattgccatcttcctgaatcttgccatttacttgagttctcggcctccaatctgcaggatctacagaattcccattcaagagcttggggttctcttctttggttttactatccttgtctttggggctcaatggtagcaacattggtgagcttccactgcttctgtcaggcaattctggcagtttcttgtctatgaagaataccactaaattaac

SEQ ID NO: 13055 - DNA, 522 bp, Gossypium hirsutum
  unsure (1)..(522): unsure at all n locations; Clone ID: LIB3829-008-Q6-N6-C9
gtcgtgaatctgcgctttttatttattaaccacaaacagagacaaacttgtgttgagaactatcataattcgagtgcgcatttctccagaaatatgagaatgtgtgtggccttgtgttgagcagaggaattgagcaaaatgcgaagcgatgtgccagaccctacaaggctataacattatattacctaatgagacaaggtatgaactctccttgggaggtctctcaaggcggcaaacatcacctgaggggtggcccttgaaccgactttattataaatatatgcgatccgaaaactggttatgcgcaaaacaaaggtgagctaggtgtgttactagaggctgtgtagaggagtatgcagcactcaagcaattctcccaaggcccatattttgaactaaaggtgcctcccccactcaggtttgcgtgagcagaaataactgcgcgggcacaaacatcccaaggccttgctatctcaccaagtgacataggctgcgaaagggggcgcantgatatactaaacct

SEQ ID NO: 13056 - DNA, 505 bp, Gossypium hirsutum
  Clone ID: LIB3829-008-Q6-N6-D1
aaaactaaactattaatatagagaattgatataattcttaaaacggggaacattagttacctaagatggtaatgttcccaaaaataaaccagattttttcaatacatcaaaacataggttgctgaaaacataaaatatagcaccagcagaagctgttaaacatcggcaaaatactatcttaatatttgatttagtcgacttcttctatcttaggtccagcaccgctgccaccggtaggtggggcatcctcgtccatgccaccacccatgtcagcccctgcaccttggtacatcttggcaatgataggattgcagatgctctcgagctccttcatcttatcctcgaattcatcagcctcggctagctggttgccatccaaccattggattgctccatcaatggcatcttcaatcttcttcttgtcagccgggtcaagctttgaaccaatcttctcatccttgatagtattcctcatgttgtaggcatagttctccaatgaattctt

SEQ ID NO: 13057 - DNA, 508 bp, Gossypium hirsutum
  Clone ID: LIB3829-008-Q6-N6-D10
gctgggttttttttttttttttttttttttttttttttttttttttaaattttttttttttatttttttttttgtatgttttttataaatttaaattaaattaaataaaaaaagagataaagagtaaactaatgagtgaaaaaaaaaaaaagggggggggggggggaaaaaaaaagaaaaaaaaaaaaaaaaaagagaaaaaaaaaaaaaaaaaaaaaaaaaagagaagggaaggggaaaaaaaaatggggggttaaaaagaaaaaggattttaaaaaaaaaaaaaaaaatgtattagaaaaaaaaaaaaaaaaaagaggggggaaaaaaaagagaaaaaaaaaaaaaaaaaaaaaaaggaaaaatttaagaaaaaagaaagtaaaaggagagaaaaaaaaaaatttataagggaaaagaagaaaagggaaaaaaaaaaaaaaaggatattttaaagaaaggaatggggatgaaaaataaaaaaaagggaaaagggggggggggggga

SEQ ID NO: 13058 - DNA, 521 bp, Gossypium hirsutum
  unsure (1)..(521): unsure at all n locations; Clone ID: LIB3829-008-Q6-N6-D11
gagtgccaaatagattttatatacatacataatatttttatgcgtaagatataattattcaaaattttacaagggattcanaaggagtttgcggggggggataaagcaaagggaggggtaaaatactagcttctcacaaattcattgtgtaatagtgagttcagccctgagatggggggaggccgtgtataaaggaaatgctatcatctgacatgaatgccgtccagggggtaccaaacagggtacgataaccgacagccttgcctccagtgagaaggtaattccctttatacttgcttacataatcctcggttgggtttgaccttgccgcaaactcatagtcaacagcaaatgtgacagatcccctctcttgcattcccaaaaacagcccaaaacaatggaatgagctttgctgatccatgttgcagtgagcggacaaaaaaaacccttgtcctccaagatgaaatgcctgggaataaacccttcctgctggaaacagatgtgtacactcctcacgtttc

SEQ ID NO: 13059 - DNA, 528 bp, Gossypium hirsutum
  Clone ID: LIB3829-008-Q6-N6-D3
ggaagaaaccctcaaaaaagatgcttcatatactcttcaagaagagagacttttgtttatcgactcagctgtaagacactccgtccgataactttgagacatgcataacagaatcataagattcaaatggaaattgctaaacttgttctagacaaagacttggatataacatctgaacaacaaaccaaaatcataccaccccaccaaactattaacatttcacttgaaacaaaagcagaaagcattttaccatctccattattcctgccatttggagatgccaatttagttggcacggcttcgaataacatcaagtcccatctcagtcgggtcagttgcctgcagctctatttgaataccgtccaactctctcttgaacctgtcctttgagcttgcataaatcatcttgcttctcacccttgaggtgtcaggagaccatgcaatgaagaaaatcctgcttttttggcaattctcagcagtcacaaagtcaaaatcatagacagcataccgacattcatcagcagggag

SEQ ID NO: 13060 - DNA, 492 bp, Gossypium hirsutum
  Clone ID: LIB3829-008-Q6-N6-D4
aaaaaacagtatgaatttattctgtatatccgaagactaattgcagttgatttcaagctctccgcattcaacaaaaagaaaccaagttcttccaactgtgcaatcaagccaataaacgatgtttgagaatttcctgtaactttgatcatctaaacatttcaccttgagttttttcaccttcaccctcacttttccatggctacaaaacatgagagatatacacaacgatctaacataaacactcacacggaccatacctcgtgaaggagtttgtatcttgcatttataccaccatagcctgcatgttcatggtttccattcactcctccattggtaacaattggtggggacaatggaaatttctcaattattgatgaaagtggagaattcaattcctccagttcctcgtcactggtataccctttcctctgtaccactgacgcattcctagacagtggcgacttccctcctgcctccacaactttttcagcc

SEQ ID NO: 13061 - DNA, 498 bp, Gossypium hirsutum
  Clone ID: LIB3829-008-Q6-N6-D5
aaataaaaccttgattttgttatacaactcgttatggtattcatgagggaaaaggcatctaaaccgaaatgatcaaaagatcgccatcgccattcactaccattacacacaggaggccatgaaggagaaaccaattaaaaggcaataagctcaggaatgggtagcaactagcaagtgcccatataaaagcaacttcagcaatcaaatgaacaaaataggtttctatgcatgtaacctaagacatctaatgctaaaatctgcttatcatcacataaaaaggttctcgtaagaagacaccagcaggctctaattttactagccatcttaagttatgttgctttagcagtttcgcaaactcgagaaaactttgccagaagaccgcacaactgaagatatgaaccaactccatcacagatcctcatatgagcaaacccagtttccttcatgaattccagttttaagtactcggccatatcataattttttattattctgaaa

SEQ ID NO: 13062 - DNA, 479 bp, Gossypium hirsutum
  Clone ID: LIB3829-008-Q6-N6-D6
ggagagcagggctaaaacccatttaaagaaaacaaaggggaacagcaaccattctaagcaggccccaaagataaggccccgataaaaagaggggtaaatatcccagaaacagaacagcaattatcattaaaaactttctccataatcactaacaaaaccccccaaaagaggcccgttcccggcgatttcaccgaaaacgcgggctacgattccactgggcctagggggattattattgggaagttacggggggggcaaaaactggggctgggggcaattgctaggaaagggatagggaaagaccaccccaaaggggcacctgctgcgacggggacttttatgtatgaacctgggattcatatcaatgaaaatttgagggaaagcttgacccttgaaaaaaagctaagctttgttgagagcagcccaactaaaggctttgacattgacccaaatacccaacagggtggggggggggaccc

SEQ ID NO: 13063 - DNA, 492 bp, Gossypium hirsutum
  Clone ID: LIB3829-008-Q6-N6-D7
aaaaaaaatctttcagtttaaattgatgtcatttatttttagaatacaataaaataataattgtaatgggccatttttgcctaggcccaaagaagaaaaaaatacaaaatataaaaaaaaccaaataataaaaaatctaattatcagtccattacatatcagacccaatagcccagttacaagcccatttacaaaacaacctagcccaatcaaataacccaatgcctaaaaggcccaatggcccaaaacctagacctaggttcagccaaacggaaacctagggtttcctagcgccgcagcccttagcctctaacgcttcagcagcctccagcacacagcccccgtacgccccacgtcaagcgccacgtaccaccgctccaacggggctccgtacctgcaaagaaacagacaacaacagcacagcaaagaggcagaaccaatcgatttgtattttcttttttcggtttttactctgtttcggctataaagcca

SEQ ID NO: 13064 - DNA, 477 bp, Gossypium hirsutum
  Clone ID: LIB3829-008-Q6-N6-D8
gaggacgaaaaaaatatcttatttaaggggagttaatcgtaaaaactacataaagcaagttcctgaaaaccaccaaacccagggacgataaaaacagccccataaaaggagtctaaatgacagacattaaatattctagacattagacaacatcccaacttaacacatagttctctttttcttctctaaaagagctgtccgcagtcagcaacaacaacgggcttggaagttcttccactgctaaacccaactttctaaatggctttaaccacatccatgccttaaacaacttggccaaacacaacgggctttccgtcgagccactcagtcttagccgggcaaatgaaaaactgaaatccgttagttccgggaccagcgttagccattgagagaataccgggaccagggggcttcttgatgaagttctcgtcagcgaacttggatccgtaaatggattcacctccggtaccgtttccg

SEQ ID NO: 13065 - DNA, 529 bp, Gossypium hirsutum
  Clone ID: LIB3829-008-Q6-N6-D9
caactcttaaacttattttatattaacttgtgagtgataaacacaaaagtgtcagagaaatatttttgtgaatcatcttgtgtgaaacaaaagtgcgtggggggttattgtgggcgtcaaagagttacaatatattattcgttttgattttgagtaggaaaatagcttctcttctgcccatttttcttagccttgagctcagcaaatattatattgagctgaccagagcagcatctgagttggatctgataggtgctgaattcacggggcgggaatttgatctaatttctccttccgtgaccagttaaagggcttatatttcccattctgagcatagattccacaaagctttcaaagaaggcgtggtgattactactaaacctattcacaatttcaattgtatcagcaccctcaggcgaaaataaattctgatcacttcgaagcaagcctcgattaacttgtagattggtgaagtagttattgtcgaaaccatcaggtgttgtgggatcaagatttgtcaacacactac

SEQ ID NO: 13066 - DNA, 486 bp, Gossypium hirsutum
  Clone ID: LIB3829-008-Q6-N6-E1
aaacaatcaagcttctttttttcattgattttttcaatggttaaaatgacatttttgtcttaaaaaagcaagattacaatgcagaactaggtaactaagttgtgggaaacatcaagtttttggttgtcatgctttaggaaggggttccccactcaaaaatgatttgaaaagctgaagagctgctcttggcttgaacaatggtacttcatgtcctgcccctctcactgttgcaaatgttagcccttcatacacctaaatccatcccccgaccttcacaaacacatcaaaattcccaatttttttttcttatgtcagcatcatttcagtttggatgatcgtactcgaccggtcgggctttgtctaatccgaaaaaagagacaatttatagatatatgggggggcttaagcttacctgtttcttaacataccaaggataccagggaattttggtactcaatttcagttgtgcaagtgagtaccttgttg

SEQ ID NO: 13067 - DNA, 517 bp, Gossypium hirsutum
  Clone ID: LIB3829-008-Q6-N6-E10
gaaacccaaaatttaatgggtttttctttttcttggtttattaaaaataaaattcctaaagattaaactaaacagaaacgccaaaaacggacgtttgatggggaaagtgaaacacactgagtcaaaggggggggggcgggagcacccctattcgacgtgattaccctcacttttacacctcagcacacctgttgtcggggctgctgacgacacacttgctcttgctgccgtgtcgtcgactgctcctccttctgccgccgcagctccaacaccttccggtgggagttcgagtgttgagtcagcacaaatgtgggactcgctgcgggtctgtattcgggcactagccgacccgatttataccggaccccacacgcgttgcacaatgtgttcggtcctaatggccccgtccgccactgtggggtcttctccgacgcgcagtgtgagcatcgcctcatcccttctaccggtgccggggatgcttgacgttggatttccctttttgtctttgtttttcccg

SEQ ID NO: 13068 - DNA, 515 bp, Gossypium hirsutum
  Clone ID: LIB3829-008-Q6-N6-E11
acgacaacgtgaattccaaacaaaatttactcaaaaactacttaccagtcatatacattgctagtgatcattattggggtggtgattattatcaggggaattttgctagtgtaactaagtccaatatcttcacatcaaggctgggatctatccttacaatgcgatccgtgccatctaccccgattagcgttgccaggcagaccgcgtagtgagccacccatgagtttgatcttgtctgagttcttcgggggggtgagttccatctcactaggcgtggggagtactgtatccccactgccacttgagccaagggccaccttacatgacccatccggaagcacctcctggataacgccaagagtctcatccccagatttgggcacattgaccaaaatatctggcacgaaccatgggccttcactctcaggacctattacaggagacatagcatcaagacccccaggtcctggggtgattgggtgccctcccaggggccccccgatataggggccccc

SEQ ID NO: 13069 - DNA, 498 bp, Gossypium hirsutum
  Clone ID: LIB3829-008-Q6-N6-E2
aatacaaaaataaacctttcctgcaatataacagttaaaaaggagtccagtactgaaacctaagttccttacattcatcacaatcaacaactacgctttcaactgtttataaaccatatataaatatatatatatacttgcatggcttataagatatatatatatgcttaaccagagataaagttggtagaaaattagaggctgctgcttgcatgtcagcttgaatagatggaggtggaagaaaaaagcttatacaagttgaagaggagtttggtcttggttggagtaatcattattactgggttccagcaggtttactggcaaaaagttgcaattgtaggaggaggctgcttgtatcaactggtttgattgttgttgcgctctttcattttcagctatctgcatccatatatccatgcatctattttaatcatgatcaacacccaacatctccatttatagttgaaattcattaggcagagaggcttattcattagg

SEQ ID NO: 13070 - DNA, 401 bp, Gossypium hirsutum
  Clone ID: LIB3829-008-Q6-N6-E3
cgggggggaaaaaaaattttttttgtgaggggggggaaaaaaaaccccctaaaaaaaaaaaaaaaaaagggggggttttaaaggggggaaaaaaaaaatttccttaaaaaaaaggggagaaaaaaaaattttgttgaaggggcctttggaaaaaggataaaaaaaatttttaaaaaaaaaaaattttgggggggggggggccctttattaaaaaaaaaaaaaggggggggaaaaaaaacatttttttgaaaaattaaatgaagccaaaaaaaaaaaaattaagggccctaaaaatttaaaaaaaaaaaaacggggtaaaaaaaaacaggggggggacccctaaaaaaagaggctcaaaaatttttgggaacaaaagaaaagactttttttttcacaggggg

SEQ ID NO: 13071 - DNA, 498 bp, Gossypium hirsutum
  Clone ID: LIB3829-008-Q6-N6-E4
aaagcaaatataaaatccattaaactaagtttgcaacataaacacactttgaaaatacaggttgttattatgtcatacgagagggaggggcatgggtttttgacagcttgagaatcagtgtggacatacaaacccaaaggactatgggaactgggtgctgacgtggatgcacacggacggtatgatatctacagaaaagccaagggtttgtggctaaaacacaatgggcatcaacatcggcggccaaatgttaagggccgactttactgatacagtaattaaccctaatccattaactaccctactacataatcaaccatcctcaaattatgaagtaatacttgcgtttactttaagattctagcctgcaaccaaaacttgatcatgcaaaaagatatctggtgctcgaattatatgccccaaggaggaaaacgcgcaccattataacccttttccacataagaagaaaaagcagaagatctttggacgcgagggaaa

SEQ ID NO: 13072 - DNA, 527 bp, Gossypium hirsutum
  Clone ID: LIB3829-008-Q6-N6-E5
gaaagtaatccaatcttctaataaaaataataaacatacaaaaacaatcagtttcatctccagatgagcagccataatcattgggtactgtacataaattacaagcatgaaaaaacttctattcacgcttttctctacaaatattataatatatatagataaatagatagatagatagatataaaatgtgttccctatttattactccaaagatcattgtattgggaaatgtaagcaagagtgaaaacaagggcaggtttatggagttgccccacagccccgtccaactcacaccaaaaccaacctacatccaggatcttgtaaaacaaatgtttcaagcttgactatgacctgaaccgaactgaaccaaaccagtcgtgcacagagatgatcgacattatgtgttcttcgtattgcatgggtttcttttgaggtttaagaaaatgttcactttcttacctgcaataatttgagagcctttttaatggatggtcatcatccggtcgattggagaggtgacttatttg

SEQ ID NO: 13073 - DNA, 554 bp, Gossypium hirsutum
  Clone ID: LIB3829-008-Q6-N6-E6
ataaattagggaattaaagatagcaccccagttgaaccagcatcacgctaacatcgtccgacgagcctcgtgaaactgaaagctcaacaagctttttacaggcacccaatggattcactttattgatgcctagacatgatggacgagcaatgtcaactgcttcttggttagaaaccttatcccataagccatctgaagctaatatcaagaactcgcattcaggtttgatgccaattatctttgtctccggctcggatattacccactgtttaaggggctgatctccaatccctctggagacagcaagagaaccctgaattctccaaacaccacggcataagtccacatagccacccgaagtctcgattctgctcttttcatcctcccttgaaggtcggtgatcagaggtaagaggttcagcgacaccgcctctgctcataacagcacgacaatcacccgcgttggatacaataaggttcccattctggatcaaagctgtcacacaacatgtgccgccagagacgtcttccttaagaaactcagcatctgttttc

SEQ ID NO: 13074 - DNA, 525 bp, Gossypium hirsutum
  Clone ID: LIB3829-008-Q6-N6-E7
cgtaaatgaaccatcaaagacagattttaattcatcgggaatttcatgtgctgaagtgggaatcaaatgagctagaagagtgtcagcattacagattcgacgtgttataatctaatgggaactcgttacatataaagcgcgacaaaaatgaaacatctaagctgccatacgtatatacatataggttgagctatttcatcatgctaccaccaaagcactgggatgtacccgtgaaatgctgaatcgatcccataagccgtttcgcagcaccaaaatgtcttattctgtaaactcctagtgaggcagatggagggattgtccattcgatggttgcttgacttcgggggcttagtttcgaaggtcttgaccacttaaaccgagggcggaaatcgtcatcatcataagtgggaacccatgaatccttcccttggagtatctcaacaagagcgaatgtgccttctgtcatgagatcggtcctggggcaagctgaccaaaagaccacagtcaccgtgctacctctcttaa

SEQ ID NO: 13075 - DNA, 522 bp, Gossypium hirsutum
  Clone ID: LIB3829-008-Q6-N6-E8
gcataaccagccaactatgcattgcttcaaactaataaacagtgaaattacagcattctgatcgtagatgatatgtatcaccttgcttcaaacaattgagccaaaagaatccaatatcactctttatgaatgggagattcacacctttgcaaatgacattgatgaatcaacacttgcaacttacaactacatctacatgaacccaaagtatcaattcaaactccatcctttgatgatcaccatgcttttaaaccaaaacaaattttatcatatgagccagctctcaacacccaggtcttaatccaaatccgaatagatgctcatatattgaataaatgacaatggtgcatcttctagggaacatacacacagtgagatactcggtcagtactttcttactgtctagctacaatcatcagaaatttacttgctggccttgcatggctttctcacgagcaattgaagctgagagaatcccaagatcacagtttaaggatgtcaacgcagactcacactcggaaa

SEQ ID NO: 13076 - DNA, 392 bp, Gossypium hirsutum
  Clone ID: LIB3829-008-Q6-N6-E9
aaaaaaaaaaaaagggggggggggaaaaaaaaatttaaaagcggttaaaaaattttaaaaacgggggaaaaaaaaaaaaaggggggaaaaaaaccccccgcgccggggggggggaaaaaacttaaaaaaaaaaggggggcccttttgggggggggggggttaaaaccaaaaataaaaaccggggggggggggggggcccccggaaattcccgagccgggccccgggggggaaaaacttttcctaaaggggggggaaaaaaaaggggggggaaaaaaagggaaaagggggtcccgggggaaaatatttttccccaaaaaatcccaaaaaaaaaaagggggggagaaaaaaagggaaaagccgggggggcccaagggggggcccaccccaaaaa

SEQ ID NO: 13077 - DNA, 518 bp, Gossypium hirsutum
  Clone ID: LIB3829-008-Q6-N6-F1
gggacatcaaggggttcaaatttagttaatataaatgaactttgcacataaatgaaaatgtctggagatacacgttctttcctgttaaacatgaataagacctatggtattttctcttttcactaataaatagggcatggtattgataataataataataacaatcccatataaacctacacgcttacaaactgtacaaaactacaaaccaaagaaagtaagtggttaggctgcagaatttaggatctgaatttgaatgtatatcatgtacaattttactacttctgtaactgaatatgtatattaaagcactaaaacttttgggttattcacttccaaaccttaatagccccatctctactgcttgagattaagagtctctggtttaatttcactgaagccaaagagaggacagaatcatggtggcatccagcagaatcagtggcagcagcaacaagaactgcttttgctgtcagctttgttgttagaggtcgtctctttgtctcctgtacaacttg

SEQ ID NO: 13078 - DNA, 522 bp, Gossypium hirsutum
  Clone ID: LIB3829-008-Q6-N6-F10
acaagaaaaaaaattccatttattttttaaattatatatatacatacatacatatatatatgaaaggggaaagtgcaaaaatattgggaagaaaaaaagggcacaaaaatgtgtgagggacaaaaattgaggtgtgaggacattccacctatgatttcttagcctttttcaggggcttgtgctgaatcttcagtgcgtgttgacatgctttcttagcatccaaatttccaggaatctcacccaatatcggcacaacatcatcgagacccttagcgtgctttagaatctggctattcttggtctcgaggacgcttgcgacaaggaaaaccgagagcgcacagtttttatccgtgtgtgcattctgcagattttttctttgaaatttaccggaccggtttagctcctttgcatgcaatgtgtgtgtactgttgctatctagagctgcatcgggttgctcggacaacaagagagaattaggggtgtattccattgcccacataacctcccaaagatacagggcat

SEQ ID NO: 13079 - DNA, 551 bp, Gossypium hirsutum
  Clone ID: LIB3829-008-Q6-N6-F11
gggggggtgttttttctaatatacatggactaattttcttattttttaagtaaaaataagtaaaatacaatccaatccataatacaaaagctaatgtgagttttaccctttgcaaaaatgagtttgagtagtattcaatcctcaaacattcagggggagataataagcatttgaacaagtaaagaaccagcagaaacttggacatgaaacctatattttaggcataagaacaggccaaaattcattgactatatataaaacaatagatttagagaagatatggtaagcgaaatatgattttattttttttaataattggggaagaaaaataaatgcttcggattgaatctaaactttcataccttcgtcatactgattttgatattatgtttaagagattataagcatgacccattttttttaaccacaaaagttcatcaacattccaaccctaactttattacatcaaataatttacccaaaaaagaacacagaccacagcaaacccatatcaaaggagaataactttacaggcaaagctactttgtatt

SEQ ID NO: 13080 - DNA, 530 bp, Gossypium hirsutum
  Clone ID: LIB3829-008-Q6-N6-F2
aaataaatatctagaatgctttcactgcctttgtttaattaaaaaaccaacaacattgaatgcaagtggaagaggatgaagcatttgcatttctaatagaaaatgaacaaaaaatgagtttgtacatatatatagacagtcaagtatatgccctttttcgatctttccagccgagttgccgagctcgttgctcccataaggcagtccgcttgagctcctctctgagttgagcttcagcccattccctggcttcctcacatgtttctacacctgcattgcacttttcagcttctttctggtagtgtgaggaggctcttttggcatccattgttagtgccgaggtgcggtccatggtttctttgcttacgatcttctgtaatgcaatctcctcggagagtaaggccacagtatccttctccagttcttggtttaaatcaggatcgttttggccacaacctggtgttagaaaaaatcatctgtatgggaggagcaatcacaaacacaaggaagacatgagaaccttagtcttg

SEQ ID NO: 13081 - DNA, 525 bp, Gossypium hirsutum
  unsure (1)..(525): unsure at all n locations; Clone ID: LIB3829-008-Q6-N6-F3
ctcctcaaccagnaaacatacatagactattttatatatagcagagatctcacttgattaggtgtttttggttatcacataatattaatacccattattatcaaaacgtgataactccactttttccttttccgctactctagctttaaaatagtcccatgcaatgcaagtaaacaaaagaaagtgcacgagtttaaagctagccaagaccatagaacgaagtttgtcagcagctaataacattcatcattgcgactgtttcatgattttgtttgtgcgggtgattggccttgggcttgtgctgggttcggccgagcaagtcctgggatctcaactccatgaggcccaatgcggttacgagatataaaattgattatcaaggtagcaaattcatcgggtacatcctcctgtatagcatgccctgtatgtctaacaaccaccatttgaaacttgccttgcatttgacctattgtgagcgctctgtccagtctatcggtgccagctaaaagcaagagctttggaaca

SEQ ID NO: 13082 - DNA, 503 bp, Gossypium hirsutum
  Clone ID: LIB3829-008-Q6-N6-F4
agatgaaaatgagattctacatcataatccatatgttatatagttttataacatcaaaaagtttgaacattgatttttaatggttagaaagaaacttctgacccattccaaccggacctcagaaggtaaactaaagaaaacgagcatttgagttggatgatctggaattttactcaaagctcgataccgctcatccacagataaaccttctacttcacataaggttgaatataaatttgtagctttttcttggatgatttggaattcttctgacttctgttgcactaccacatcggaggcaatactcctactgatttgtttgccaatgatccgcatgttttcggccaataaagtgactgcgtcattaaatgaagaagaaatttatcacctgcagcaaaattcttctttttcttccttgaagatgaggaacccccttggtttctatctggtctcgggtccgtagcagaggacctaatccttcgtctataagtatgtaggctaag

SEQ ID NO: 13083 - DNA, 531 bp, Gossypium hirsutum
  Clone ID: LIB3829-008-Q6-N6-F5
gcattgtgtaaacgtataaacatttacaactaaacttgttattataaagttatctcattatcatctttccattaaacagaccattttatataaagaaaaactagttcacctaattctttctttttcatttcctattcaaatacaaaattttcagattaaactctttttcccctctcaatcttaatctgttgctgaactacctgattcaaataaaaagatgggagtcttttaaatagaacaatccatttgtaaatggttttcttatataaaattaagtgcaaaccaagtaaaacctaacacaatataattgggcagagagtcaaatatgtatatcaacctactctcaacacaaccaccttcacattcttgcactgaaatgctctcccattatgcatagtaatttaggcttgccttcttcttagcttgcacctgaatgatgccttcattaaaatcttcatggttcacctcagttgcatcgcggcgaagagctagcatgcctgcctccacacaaacagctttcagctgtgctcc

SEQ ID NO: 13084 - DNA, 427 bp, Gossypium hirsutum
  Clone ID: LIB3829-008-Q6-N6-F6
caaaaaaaaaaaatttttttcccaaaaacgggaaaggggggggggggaaaccctggcccccagggcaagggggggttaccaaaaaaaaccccaaaaccttaaaaagggtaaaaaatttaaaaaaccccccttgggaaaaaagggggaacccccgggaggcccccaaaagcccagggggggcgaaaaaaaaggagagtaatggtcccccggcccggggggcccccccggaaatccgggccgggccccggggggggacccatttttcctaaaggggggggaaaaaaaagggggggaaaaaaagggaaaaaggggttcccggggaaaaatggtttccccccaaaaatcccaaaaaaaaaaaaggcggaaaaaaaaaagggaaaacccggggggcccaaagggggggccaaccccaaataagggggggggg

SEQ ID NO: 13085 - DNA, 523 bp, Gossypium hirsutum
  Clone ID: LIB3829-008-Q6-N6-F7
gagtgtgaaggagtgttgatgaaactttaacagagtcactgggttccacctccgtggcacaaggggaccaagtccatcattgtggagtataatacatccaaatttaaatgacccaaaaattttctatactcaggggtgccatcatacatttccatttgaaggttccaatcctctgcaaacccatattccattactaaccaccaagagatgccgccttgtatgtgttctggatccacatgggccaccaggctaacactctccccctgtgctagatcaaaaggcaaactcagaaaatctcggtttgtgtttattcccaccataagagcttcctcatgaagccaacgaataacttggcttgcaacctgctgaagtaatataacaggaagagcaaccaagtcgcaggcatatttgtttacagaacatatgtcctcagagcttcttttgagcaggccagcaacattaggagcaccttccccttcaacatttatacgggcatcactcagcaccaccttggtatgaaatt

SEQ ID NO: 13086 - DNA, 535 bp, Gossypium hirsutum
  unsure (1)..(535): unsure at all n locations; Clone ID: LIB3829-008-Q6-N6-F8
atctgcaagctatactttattttatgcttttggagggcaattgatgagtcaatgaatgaagtcctacatttatgttagaggtgatgatccacagcgaggcaaagatggcaaagcgacatggaacacagcaacgggtagtgtgagaatgcaaatgtggtgacagaacaggaaaagaagggagtctcgacacttgctggacgcagagcagaacagtcaaggcgcttgtttgcttagtaactctttgattcttgaggttgattgcctggtttatgctaaagctctaagtcttcattttcatcaaagaaaatctcaggatggacggcagctgtgctaacattgagagccctctgcaacttccgatggtccaagacttcaacttcgagtaaaaacattgaactgacaggtcgatgatcggagagtcttatttctgctcgttgataacaaagttgttttatgcctttaccataccagagtatacgatcacaccatgccggnagatctcttcttctccccttctttagggttctcgccaaca

SEQ ID NO: 13087 - DNA, 520 bp, Gossypium hirsutum
  Clone ID: LIB3829-008-Q6-N6-G1
gatcaaaaacttccatacataaatttaagcatagaaaaatcgacatacattatggtatattagtatagaatacgagttgcaaatatcagactaatatataatctaatatgctcacaaggatggtccaaagctcacaaaatcaatgccacctactccaccttcatcatcaatacaaaaggggaagtaaatcaacacgagagggtagcctagtacatagaggttaacataattatgaagcctaagataagagatcccattgaagcagaaacaacttgagagcctgagctgccgggagatggtgccggtgctgcctcatttgctcctcctgagaatgctgccggcgcacctgctattgctgacggtgccatacctggtgcaccagtaggactgagagacaatgcacattgagtggcagaaggagcagagactttgcaagcagcaggcaaagtcatggccttggtgacattcaaagtgacacccagagaagcactgctcttaaaagcctcacacaagcattggg

SEQ ID NO: 13088 - DNA, 449 bp, Gossypium hirsutum
  Clone ID: LIB3829-008-Q6-N6-G11
acaccaaaggggcctgtgtgttgtgattaaaacccctattggggtccaatgtggacaagctattacacaacaagcgttacaacataaaaatttacacctttgttgtgtgcatcagatttgcgtcttacatgtgtttggggccttatgtgcatgagacccatgggtttcaactagagcataaccctgaacaactacaacatttgtagaccataactagaggccttctataacacaaaggagtgagctgatccaacacgggtcatcgactgggtcaaggaacaattgggtatgaggcgcaagttcccacaccgcacatgtgtttgcccatctccatcttgagaggagccattgggaccccattctgcaccccatgagttcttaatgagccaatatcgaaccccattttccactccatacccaactacaacaacaccctgggtcacatccat

SEQ ID NO: 13089 - DNA, 489 bp, Gossypium hirsutum
  Clone ID: LIB3829-008-Q6-N6-G2
atagatatgattagaatgggtacggcatgtgctctgtcttatcatttcgcatatgcatatcaacaacttgtgatgatatggaactagaaactaatggacctacctgttgggtgattctcaactttctcagctccccttctgctacttggctgggccattgcttgaccctgtggatggggtatttgcatagtttggtgaagaccaatatactgctgggcctggtttaggttttgcatgacaagcgggtttgggatggggtctgattgattgcttggttggaatcttgatgagtcaggagctggaactgatggtggcatatgaaaggctggcataggaatccttggacccaaatgagctgcagctgccgatgttggtaatgctgaaccagccacaacgttgggaaatgacatcattggccgaattattcccatatccatgcccatactcatcccaattcccattggggatatatactgctgaacacctgga

SEQ ID NO: 13090 - DNA, 532 bp, Gossypium hirsutum
  Clone ID: LIB3829-008-Q6-N6-G3
ggtctcaaatctcaatgaatcgattaagtcaaataaaaatcctgtctaaattcgtacacccaatggtgtgatttacaggttaatactattacatattgaagagggtatattttgaattcgggcctctgactgtaatgcttaaaatgtatgcaaaaacgatgcaagacggaagtattaagacatcgaacaaccaaactggagatgatgcagaatgcataccattcaaagaaaagaaataaaaaccaacctcagatttttcatgttctgtggcgcaatcttcagtcacccagtttcaatgtcatttgcttcaaaatctgcaaaagcttgctctcgagttacttgagaatacattaaaggggaaactttgttatcaaacagtcttcactttaaacgtttgagcttctttgctgcatctgtgatgctctggcttatctcgggatgttcggacttaagcaatttatcaagtttaagggcagcatcaggtatgcaatcctcctcaatgcgagactccgaacaaagaccaaaaagtact

SEQ ID NO: 13091 - DNA, 521 bp, Gossypium hirsutum
  Clone ID: LIB3829-008-Q6-N6-G4
gaaggatggattggaatgaatgaatgagatgatttcttttaatgggattttgtaggggttgaagatgtaatgatggattgcaagactcacaaataggtggtgaaaggggagaaagcggatcctttgaaagttcttgaaagagttcaaaggaagagtcaccggaaagttgagcttctctcgccgataccggtagtagaaactgccttgatccaagtactgcagatcccataatccttcacaaaatacatattacatgggtcgatttcaggaaacaggttaatataaaaccgaaagccatcggggcttatatctctgcatagcaaacctttgctctctgcagttagaagatgctccttggccatagccggagcaatccctaatgtcattgcagcatcagttgggcttataccagttcgaagcgcttcaggcttagtcacaaggcttttgattctagcaaaaacctcctcatcactatgggacttgttttggatcaccataactccgctatcaaactttctaag

SEQ ID NO: 13092 - DNA, 494 bp, Gossypium hirsutum
  Clone ID: LIB3829-008-Q6-N6-G5
aaacaatcaagcttctttttttcattgattttttcaatgggtaaaatgacatttttgtcttaaaaaagcaagattacaatgcagaactaggtaactaagttgtgggaaacatcaagtttttggttgtcatgctttaggaaggggttccccactcaaaaatgatttgaaaagctgaagagctgctcttggcttgaacaatggtacttcatgtcctgcccctctcactggtgcaaatgttagcccttcatacacctcagtccatcccccgaccttcacaaacacatcaaaattcccaatttttttttcttatgtcagcatcatttcagtttggatgatcgtactcgaccggacgggctttgtctaatccgaaaaaagagacaatttatagatatatgggggggcttaagcttacctgtttcttaacataccaaggataccagggaattttggtactcaatttcagttgtgcaagggagtaccttgttgctgtcact

SEQ ID NO: 13093 - DNA, 414 bp, Gossypium hirsutum
  Clone ID: LIB3829-008-Q6-N6-G6
gggggggcaaggaagagagagagagccccatttttttaaaaaaaaaaaaaggaaaaccaaaacttaaaaaaaaaaggggaaaaccaatccaaaaaaaaaaataaaaaaaaaaggggggggcaaaagtttttttttttggggtaaattttcccccaaaaaaaaagggggggggggggcaaaaaaaggggggactaaaaagccgggggggcccccaagggggaaaaaaaccctaattaaaaaccccaaggggggggcacgggggttttaaggctacctggaaaaggcccccccccaaaaaaaactttcccgggggccagggaaaaagtccccccctttgaaggcttttttttgaaaaaaagggttttggaaaaaaattgtttttaaaaaaaagggggaaaatcaatttttggcccc

SEQ ID NO: 13094 - DNA, 541 bp, Gossypium hirsutum
  Clone ID: LIB3829-008-Q6-N6-G7
ggttgttttttttacaaaagggatgttatctaagccattcaactttaaatcaaaagtgcatatagaagcagattatcccatctaccaactattaatgttcctgaaggggcaaaagggaaccaacaggattcagaggggcatttctcccttagagggggggggcggctaaaagaataacatgggaaacatctaaagcattaacataaggggttgatcaaacactatcacagcctacattgattatgctatccaccacggaccttcctactcatcatcttcctcgtgtccggtgccttcttcatcatcatcctcatcattcacctcagacactgatttggcagactcaacatcttcgtctttgggaccctcagcctgtctcttattgtaggccttcatgttcttttcatactcaaccttccgcttttctgccttagctacataaggtgccttttcagcttcagacaagctcttccatttatctccaccagctttgccgacagccgcaacggatttgtttttagggggagccttcttgtattgc

SEQ ID NO: 13095 - DNA, 450 bp, Gossypium hirsutum
  Clone ID: LIB3829-008-Q6-N6-G8
aggggcacaagcttcacaattcgcaagcgatttatttttaaacaaactaggggtaacaaggtcttcccatgggggatatgcaatagctagcattattctatacatgggcattgattttcttctttcaagccaagaacttttccaataaattcccaaaaaagaagcttggtttagcccatccggtgggctctgcctcccgggctttcgtacttgagggggccttctttacgttaagcatcattggctggcccatttctttgcgaagggcttccattgggtttgcatctacaggagtaccggaagcatctctaacatagaaaacattcactggtttctccccaactggtgacacccctgcccttttaacggacaatccgttctctcggagaatccttggtacttcggacaacaacccaactctggcctttgcgcaaagctccaggcttaaac

SEQ ID NO: 13096 - DNA, 472 bp, Gossypium hirsutum
  Clone ID: LIB3829-008-Q6-N6-G9
accgcggcaacccttatctttcgtgttatgggggaaaatatccacaaacccatcatttttgaacgtgctaacccgggggcggggggatacaaaagccatggggggggggcccaaccaaacaaacataactcacacctcaaattgcaaactaaattttcatacccaccactcaatataggaaagcgggtcaaacgtctccagctccaatcaacgcaggcgggattttctcataggctccagaggggtctccagcaatcgctttttccaggggcacactggttcttcgctgagattcccccttaataccccccatgtctacctccgcccgaggggggacccctctagtaagagcccattcatctgtgtcccagcttattgattgcttgacgtaccaccttttcaaaatatttctcagggacaggcaagcccttgattgcggctctcaacaatttgaggaattcgtcttcagggg

SEQ ID NO: 13097 - DNA, 498 bp, Gossypium hirsutum
  Clone ID: LIB3829-008-Q6-N6-H1
gggggaatcaaactgtttattctgaaaagcaaaattatacaaactcattttaactcaggccaaagcagaaatccggataagtcccaggagaagttacaaatccataaacataaagaaactctaacctcccttttgctcactgctgctattgatgaatcataagcaacaaaagaaatttgaatttgtttcttattaaagaaaacaaaacagaagagactgtcacaattggaacagctcttcagcgacatcttcaatcgaaaaccttaagtttccgcagagactttgaaccaagcttagcaaagttctttggctgcagcaataacagcctctggagttaaaccaaattccttgtatattctccctgctggtgcacttgccccaaaccgatcaattccgattgccttccctttggatccaactatcttcccccacccaaatgttgatccagcctcaatactcactctagctgttacagcagatgggaaaacactttccttg

SEQ ID NO: 13098 - DNA, 529 bp, Gossypium hirsutum
  Clone ID: LIB3829-008-Q6-N6-H2
atagctctaaactgattcactgctgagttcattcaaatgcttcttcggcatgtttacatacataaacatgatcattctgtgtgatgggaaaaaatcgagtcatttgctaaaacccaaaacaacaaactaacctactggatttttttacattgctagcttttttttttctaaacaatatctattgtaaaaaacttggtcattttactcagcgtaaaatatgctgagccgacaaaaactccgtcgtaatggcaaaaattaaaacatcgagctacttcaaacatacatacaaccttccaacataagcatcttcgacatcataatttacagctgctaccatctcccaatgcatctacccatccgcccattgtgcaagaatgcggttgctagacacacccactagaaccaaaattgcagtgaatcttgctcttttctgatgcttgagaacttaaaacactgatcacgggctctgcaattagcgatcaatctggataccatgcatgagaaggtggatcaatttcaagctcctgaa

SEQ ID NO: 13099 - DNA, 526 bp, Gossypium hirsutum
  Clone ID: LIB3829-008-Q6-N6-H3
ccgaagcaatctaatatcatacatttagcatggaactgagaataatgtgaacactttattttctagttctgatggtattttccaaataaataaaaatgatcacatatcaagcggtccaaacacatttggatcatcggactgtgcatccccctaaaaacgagtctatgttccgtctcgtttgttctctcgcgatagggaagttccaaaatgaatccgatttctcgaagaatatgtaaaacacaactgccgatgccaaaaatagtcctaaaagcagcaaatagatctgccactctttccagtcggcagggacgtttagttttgttaccattgctccccactgactagaagttgtaagtacaaccctttgactagggcagaactctagtgatgcaatggatgtacccaagtgtagcctcttgttccaatggctgatctccatcttctttacttcaaccacacagatgtctccatctttgcttccgagagcaagatattttccatccaggctaacagacataacagaagc

SEQ ID NO: 13100 - DNA, 518 bp, Gossypium hirsutum
  Clone ID: LIB3829-008-Q6-N6-H4
aaacaaaactatcatggaattactactgtgcagtaaatataactaactaattggaaaatgccacctatccaagtcgcttccaaattcagaaatctagtcgggggtagagtatagcatcatgccatggattacttcccattttaaattacacactttaatcaacataaacaaatgacattcaaagcccacctcctccggaagaagactaggaccaacacgggttacaccaccttctatggctcgtgtaactggtcctgaacatccgaagtccagagagtaaggttatcccttaggagttgcataatgagagtgctgtccttgtaagactcttctcccagcgtgtcaagctcagcaatggcttcctcaaatgcctgtttagccatgctacaagccttatcggactgattcagaatctcatagtaaaacaccgagtaattcagcgcaagtcccagcctgatcgggtgcgttggtgctagatccgtcagtgcgatatcctgagcagccttgtaagacagcat

SEQ ID NO: 13101 - DNA, 532 bp, Gossypium hirsutum
  Clone ID: LIB3829-008-Q6-N6-H5
aggtaaatatgcaaattccattcaaagagaaaccatacatagatgcaaccgggaaacaaagactagaaattatttaaaaggccattacagggcacagtccttcacgtaaaaccagaaaacccacattaagggagaccttaaggcttagaacccaccacgaagacgaagaacaaggggaagagtggactccttttgaatattgtaatcagccaaaggccttccgtcttccaggtgtttcccagcaaaaatcaacctttgctgatctgggggaattccttctttgtcctgaatcttcgctttcacgttatcaatcgtatccgagctctccacttctaaagtaatcggcttaccggtcaaaggcttgacgaagatctgcatcccacctcgaagacccaggaccagatgaagagtcgattccttctgggatattgtaatcggctaaagtccgcccgtcctcgagttgctttccggcgaagatgagacgttgctggtctggcgggatgccttccttgtcttggattttggctttcac

SEQ ID NO: 13102 - DNA, 532 bp, Gossypium hirsutum
  Clone ID: LIB3829-008-Q6-N6-H6
gggaggaggggcaattttatttatcaatcatataataatatttatatcactatcacaatctcagagcttaatacacaaccttgggttcgatctaaaagaaaggctttgcgagcggacttgggggtgcatcggccaagtggagacacttgaaacaagtgaggcgccagaagagagagaaggggtcaagtgtaggcgtcggaggaggcggaggagtggcttttatccagctccgcactcaacatgtgaggtggaaggagatcaactctttgactacgaggctttgtgccagcaaggctttttcgaccttttcctgagccagcatccttgtgatcttcttcactattccctgaggcctcaagatccatttcagcaaagaatgcctccaagacaaaagctacgaccaaattcagaagtaacagaacaggaactaggtggaagctgataaaatatacaagggtccaagaaggtccaggtaattctttgtggctctgcgtccacacttgccaatttcccatcaccagcgaggtaaaaa

SEQ ID NO: 13103 - DNA, 524 bp, Gossypium hirsutum
  Clone ID: LIB3829-008-Q6-N6-H7
gggtttttggaataaattcttagctttgccaccaaggagatttaaattgcaacccccgaacgtggcgctcatcgcccaaagcgcaaatgatgctaccactgtccacactgaatatcgatgtaaaccatgaaataactatcgcggggggggagtaccagtgttttttttaatcctgcaaaactcgtgaaagtgtaagcaggggtgtataacaggagtaaatgtgtcggtattaattatgaggtgcgacaacaattcaagccaggaccaggtctaaattatcacttggaatctccactcggattgggaactttacttccattttgagtcccggatcctttaagctcagcaaaacctgggggcaactttggaggaggcacaataggcatatttggcgaaggccctgatgagactggcgaacgaaatggccaagtgatggtactcacatttgcagcaggagagcttgagaattggctgggccttagggaactactagcacccttgggatctatctttggcatatctac

SEQ ID NO: 13104 - DNA, 515 bp, Gossypium hirsutum
  Clone ID: LIB3829-008-Q6-N6-H8
aaagtaaaacaggatgtatgtgtaatttctccaaacaaaatgcttacaagtccaaaaagccaatcaagaggcggcagagatgtaaataatacaagggaagaagccaatcccaccattgatgttccacatgttaagtggaggggaggcgcatcatcctaatgaaaaacctcagtttctgcctgggaagtgattgagtagatcttctatgctcattccactgaaatctccactatccctcacccgcacactcaccttcttagtgttcatttcctcttcaccaacaactaatataaagttgtactgtgccaactgagcttctcgaatctttttctgaatctttcgatctgtcatgtcaacatctacataataaccagcttcatgaatccaatccccgacctgcattgcatattgctgagacttttctgacacagggcaaacaattgcttgacggggactaagccagaaagccatttgcccttatagtgctccaacaatatagcaaacattcgctcaac

SEQ ID NO: 13105 - DNA, 89 bp, Gossypium hirsutum
  Clone ID: LIB3829-008-Q6-N6-H9
ttttttttttatttttttttttttgggaaattattaaaaaccacttttactttttaaatcaattcattgaagctttattaaccggcgcg

SEQ ID NO: 13106 - DNA, 500 bp, Gossypium hirsutum
  unsure (1)..(500): unsure at all n locations; Clone ID: LIB3829-009-Q6-K6-A10
tnataagtggntacaaaagcctcagcaactgctgctaaagttgctgcacctgcatcctcagtcggcgttgctagtgccgctgctgcaccagcagcgccagctgcagcagctcagccttctacagcagagcctacaacagaggccaaacatgaagaatacccaggctggtctctttcggatatggacaagatagctatcgatcctcttcaacttgctcggcttggtggaaggttagacgaggatgaagaagattatgatgaggaagggtgagtagctcgaaactggactcctagaagaagtagcggttgagatcagattagaaacccagtaggaaaacccgaaaatagtcgggatgacctcattggagtatggaagtatatcccatgtaggtctctcaaggactcaaatggatttctcttctctatctctttatttatctgtcacggttcgttttctgttatagcatttgctaacataactttaaaatggtagattctcac

SEQ ID NO: 13107 - DNA, 587 bp, Gossypium hirsutum
  Clone ID: LIB3829-009-Q6-K6-A11
tctgccgttcgtagctgtttctcagttttcgttatttttcttctttgttctttacattcttttcgtctacacaacaaatagttagtaatggccggtaaaggagaaggtccagctatcggtatcgatctcggtacaacttattcttgcgtcggtgtttggcaacatgaccgtgttgaaatcatcgctaacgatcaaggtaacagaacgacgccgtcttatgttggttttactgataccgagcgtttgatcggagatgcagcaaagaaccaggttgcaatgaacccgattaacaccgtgttcgatgctaagaggttgattggtcgtagattcactgattcttcagttcaaagtgatatcaaattgtggccattcaaggtcatagcaggacctggtgacaaaccaatgattgtcgtcaattacaagggcgaggagaagcaatttgctgctgaggaaatctcttctatggtcctcattaagatgcgtgaaatcgctgaggcttaccttggttttacagttaagaatgccgtggttaccgtccctgcatacttcaatgattctcagcgtcaagcgacaaaagatgctggtgt

SEQ ID NO: 13108 - DNA, 117 bp, Gossypium hirsutum
  Clone ID: LIB3829-009-Q6-K6-A12
gcgttctggccgccctttttttttttttttagaggaactggggaaataaataaatacataacagtgggaaacttatactcaagggtccaacaaattagagagattctttgggggctt

SEQ ID NO: 13109 - DNA, 391 bp, Gossypium hirsutum
  Clone ID: LIB3829-009-Q6-K6-A2
tttggtggtaagttcaagcttggaagaaagatggcagtggctcttttggagagctttatttaggtatggtatccccaaagccctgtgatggctttcttcccttttcttattaatggaaaattgtattgtttctttaattctttgtcagccttgtgcttttcttttcctaatctttttgggggtttctgttgaaggggtaaatgtgcaaactaaagaggaagttgctgtcaaactggaatctgcaaagaccaagcatccacagcttcattacgagtcaaagttgtatatgcttcttcaaggaggaagtaagtctatgtttgtgcttcactctcctaacttgactatggtcttctctggtagccttgtccactgcagttccattaatgccatt

SEQ ID NO: 13110 - DNA, 565 bp, Gossypium hirsutum
  Clone ID: LIB3829-009-Q6-K6-A3
gacaataactcctttggaaggtgggctccgtcggtaaatcgtgaacggtcaatgcaggtaacacatttatccttacgccgtggaccaagctttaccacatgccgtcgactggtacacgaacgcagaagacactggtgcgactggaccaaatgctgttacggagtggataatcgaactgctcagaagccacatgtgtacatcactatgcgtgccaattgactccgaacgacagtgtactgaatcaaaaagcatgtcccaaacctataccgactggacagccgtcaaaaccttgagcatgtattacgcccttaaaggccttaagttggccgacattaaaccctgggcctatgaataaccattactggtggacgaagaaatattagtgagggagctccgaaaggttgagagtactatgaggtgtgaaggattatcgatacaacacacttgttttctctgctccaacatgacacaaaaactatgttcatgctttggggaattgactcaacatctgatagtataccccatcaattctgataaagtgaacatggaagcaggtgcttaaaaa

SEQ ID NO: 13111 - DNA, 585 bp, Gossypium hirsutum
  unsure (1)..(585): unsure at all n locations; Clone ID: LIB3829-009-Q6-K6-A4
gcgttcggccgtttcgtcattggnagtccccaggtgatgctggtctcactggtcgcaagattatcattgatacttatggaggatggggtgctcatggtggtggggctttctctggtaaagaccctaccaaggtggatagaagcggggcttacattgtgaggcaggctgcgaagagcattgttgctaatggactagctagtaggtgcatcgtgcaagtctcctacgccattggtgtacctgagccattgtctgtatttgtggacacttacggtactggaaagatcccagacaaggaaattctcaagattgtgaaggagacctttgacttcagaccaggaatgattgccatcaatcttgatcttaagagagggggcaatagcaggttcttgaagactgctgcgtatggtcattttggtcgggatgacacagatttcacttgggaggttgtcaagccactgaagtgggacaaggtccatgcttaattggagcttcttcacattgattctatgtctggtttatcttatctgctgtctgctaccatatgagtctgcttttcttacaatttcctttaatttctttttttgg

SEQ ID NO: 13112 - DNA, 583 bp, Gossypium hirsutum
  unsure (1)..(583): unsure at all n locations; Clone ID: LIB3829-009-Q6-K6-A5
ccgnatataacacaaagttccagtaatggtggcggtctcctgcgtatgtttaagcttttccctatgctaacctcaggttgcaaggatgggaaaaccccgccggaagcctttcttgaaccatactgctgcaacatgtacaatttttgggtatcgtaaaggccgagttttcttagcaatacaagctgatcccaattgtgtgccaatgtttgtgatcgagctaccgatgctcaccagcgtactgcaaaaggaaatggaatctgacatggtcaggatagcactagagagtgagaccaagactcataaaaagaaactgttggaggagtttgtatgggcagtgtactgtaatggaagaaagatgggttactctatcaggaagaaacatttgtgtgacgatgagcttcatgttacgcagcttttgcgaggggtgtcaaccggtgcaggcgtccttccaaccctaaatcacaaggaaagtagcgatggagaattaacctacatgagagcaagatttgagagggtggtgggttcaaaggactcggaagctctacacatgattaacccagatggtgcacctggtcctgaacta

SEQ ID NO: 13113 - DNA, 586 bp, Gossypium hirsutum
  Clone ID: LIB3829-009-Q6-K6-A6
gcgttcgcggcacgctgggcggtcgcgtgggtgtctgctcattacatgagtacaaccatggtctaatcacatccgttccctaatttcttatgctctattctactctctctagcaggcatcgtctctgatggaggtctcttctacgaacgcttcgctagatggatgaggaaagtcgtctgggtagaaatctgaacctggaagaaagatgagaacatggctgtgcgaatggaattacacttgtggcaaaaggaatggggatcctaatgactaatgcttcaaactattgaagcactacacgttgtatgctatttgagctgagttcccacatgtaacaacaagggcaagactgtagccttccaattttctgtgaagcacgagcagaagctcgactgcggtggtggctacatgaaggcgctcagggatgacattgaccagaagaaatttggtggcgacaccccggacagcatcatgtttggtacctgtatgttggcggatacagcaccaataaaggacatgccattcttacatacagtgggacaaatcactcaatcaaaaaggaagctccttgcgagactgaccaacttac

SEQ ID NO: 13114 - DNA, 576 bp, Gossypium hirsutum
  unsure (1)..(576): unsure at all n locations; Clone ID: LIB3829-009-Q6-K6-A8
agcgacacgtgttctcgccggccggccatttgttccaagttgaatatgccctcgaagccgtccgtaaggtaacgccgccgttggtgtccgcggcactgacatcgtcgtcctcggcgtcngaaaaaaaatctaccgccaagctccaggactccagatcggttaagaagattgtgaacttggataatcacattgcactggcatgtgctggcctcaaagccgatgctcgagtcctcataaatagggctcggattgaatgtcaaagccacaggctgactgttgaagatccagttactgttgagtatattactcgatacattgcgggtcttcagcagaagtacactcaaagtggaggtgttaggccgtttggtctctcaactctgattgtgggctttgatccatactccggtgtaccgtcactatatcagacggatccatcagggacattttcagcctggaaagctaatgccactggtagaaactctaactcaatcagagagttcctagagaagaactataaggaaacctctggacaagaaaccattaagcttgcaattcgtgctttgcttgaggttgttg

SEQ ID NO: 13115 - DNA, 548 bp, Gossypium hirsutum
  Clone ID: LIB3829-009-Q6-K6-A9
gcgttcgctggtgttttagggtttgatcacagtgagaaagaccatgggaggtggccatggagggagcacaacttacaaaggtgtaaatttgcaccacccaaagattggcacgtcgccaccggcaagggcttgtgcgctgtcatgtggttttgggtcctgtacagggctaagcaggatggtcccgtagtgttgggttggcgacacccttgggagggccatgatgaccattctcatggccatggagacaagcattagcctgaagaagcttatctgcttatgggtgcgtggcacagatgctgttctggaatgtcttctgtttattttcttcggtgtcaataaagtgatggtgaaatgggattgtaagcataatgaaatgaaaactgaaacttcatttatgcattatggttttcctgttaaagtgtggatttttatggccgaatgcatttggtttattgtgcacctctggtttggctgaacgtagattttggccgaattgaagttttcttgatatttgatctacagaataatagaaatttgcctgtttgatt

SEQ ID NO: 13116 - DNA, 590 bp, Gossypium hirsutum
  unsure (1)..(590): unsure at all n locations; Clone ID: LIB3829-009-Q6-K6-B1
aaaaaggtttattctcgaggntttccgaggactgtaggccaagcacagaagcttgatgacatngcttggnaaagcaaggagtcaaaattgataaggtgcttgattttgcgattgatgatgcagtcttggaggagcggattactggtcgttggatccaccctgctagtggtaggacctatcatacgaaatttgcacctcctaaagttcctggccttgatgatgtgaccggggaacctttggtgcagcgnaaaagatgatactgcagcagttctcaagtcaaggcttgatgcatttcacaagcaaacccaaccggtgattgattattattccgagaagggaatagtcgcaaagcttcacgcggaaaagcctcagaaagaggttacggatgaagttaagaaagtactttcatgacgaaactctcgttacggatgagattcgtataaggtgatttacacatgaacattggttcttttgcaaacagggacccccccaaaaattgagaaatttcatggatttttactcgtgtttcgagtacacattcggattcattgttatgccattgctttttttggcccaaatatcagctgttg

SEQ ID NO: 13117 - DNA, 589 bp, Gossypium hirsutum
  Clone ID: LIB3829-009-Q6-K6-B10
ctctctcttctctctctgacctaaagtctttagcttttcgcttcgagagagacatgttggtttaccaggatctcatctccggtgacgagcttctttctgactcattcccctacaaggaaatcgagaatgggatgctgtgggaagttgagggaaagtgggttgtgcaaggagctattgatgttgacattggtgccaatccttcagccgaagatgctgatgaggatgaaggtgttgatgaccaatctgtgaaggttgttgacattgttgacactttcaggcttcaggagcaaccccctttcgacaagaagcagtttgtcgtgttcatgaagaagttcatcaagaacttgacaccgaaactggatgcggaaaagcaagagtccttcaagaaaaacattgagggagcaaccaagtttttgctttcaaaattgaaggaccttcaatttttcatcggagagagcatgcacgatgatggatgtttggtatttgcttactacaaggatggtgctgttgacccgacatttttgtactttgcgtatgcattgaaggaggtcaagtgctgaggtttgaagcaaagaaaaaaaagtggttg

SEQ ID NO: 13118 - DNA, 577 bp, Gossypium hirsutum
  unsure (1)..(577): unsure at all n locations; Clone ID: LIB3829-009-Q6-K6-B11
ataaattctggnaaacagcattaagcgccgaaccgtgcccattagaaaacgctctgaaatctgtcaacccatcctttcatttccttttcagttttgacgatttcaatcccccaaaagcttatcttcccaaaagcatttctattttctatgaagctttccttttcctactgctttctttcccagcaaaactctcaatctggttcccgttcccattcacgcctctcttggtcttcagcataagtagggactttcatttccaggtatactttctctttcctctttagagtttcagttgcgatggtatgagcgagggtatttgtttgtctcggtgtgtgattgaatctgattatgttcgcttttttattctcctgctgtatatcatggatatatgtcgctatcaatgaccgatcctgatcttgggttctacattttctgattattgtgagggaatctccttctataatgattgaatgccagcccttctccacccctgtttgaactgctttccaacatgctattgcttcagcagcaaaagctgaggtaatcccgtgatgaagctctgagcgtgatactagga

SEQ ID NO: 13119 - DNA, 487 bp, Gossypium hirsutum
  Clone ID: LIB3829-009-Q6-K6-B12
ttaggctctaccatagctcatggcatggcatttggtactggaagtgctgtagctcacagggctgtggatgctgtgatgggtcctcgtactattcaacatgaaactgtggtttccgaggctgcagctgcccctgcaccagcaactacttccagtagtttagctggcactgattcatgcagcatccactacaaggcattccaggattgcctgaatagctatggaagcgaactcagcaagtgtcagttctacatggatatgttgactgagtgcaggaagaacacagggtccatgttgggtgcctaaaagtttattcaccattttccttgttatgctattgaaattgtcagcttcggacttgcgctgagatttacccttgtttttctttggttgattgatgaagctgaactcttccataaatctctatgaataaaaaacactctttgagtgatactgttttttaattgttgaacctttgttatcgctaatc

SEQ ID NO: 13120 - DNA, 578 bp, Gossypium hirsutum
  unsure (1)..(578): unsure at all n locations; Clone ID: LIB3829-009-Q6-K6-B2
ccccgcgtccgccccgcgtccgaaaaaatgatgcttgngagaaactcatcgtccaaatccaaccgtccacgtaccaccttggcctgatctcgacgatgatcagacggatgtagtttactctcctatccattacaatgcaaccgacaacaacttgaacagtaacggcaacccgttttacctccatgaagcgttatcagctttacaacgttatttgccatcgaacgggccagatgttgagttggattccgagtttccgggtttggatagtccggattcaccggtcgatgcttattcctgtgaccatttcaggatgtacgagttcaaaatccggaggtgtgctcgtgggcggtctcatgactggaccgagtgtccgtacgcccatcccggtgaaaaggctcgtcggagggatccgaggaagtatcattattcgggtactgcatgcccggattttcgtaaagggaactgccggaaaggagattcatgtgagttcgctcatggggtttttgagtgttggcttcacccggctcgttaccggactcaaccgtgtaaagatgggtcgggttgtcgtcgtcgggttt

SEQ ID NO: 13121 - DNA, 574 bp, Gossypium hirsutum
  unsure (1)..(574): unsure at all n locations; Clone ID: LIB3829-009-Q6-K6-B3
ggnatatagnataagagggtgatcaaattgtacctttgttaacagatttgtggaagaggattgagaaatctggttatatgggtggaagtggaagtggaagtaataatttggatttgcagaagattgatcagcgtgttgacagattagagtacagtgcagttatggagcttgttgcagatgtgcagttagtgttaaaaagtgcaatgcaattttatgggttttctctcgaggtcaggtctgaagcaaggaaagtacatgatctgttttttgatttgttgaagatcgcatttccggatactgatttccgagaagctagaaatgctctctccttctctagtctggtaactacctccaccatgggctcatctgccagacaggctgctgttgacaagaggcagaagctgataaatgaggtggaatctgattcaggactcactcaaaagtcattgcaacgccggtccagtcatgctggtgaggacacaagggttagagtgcacatgccccaaaaggaatcaagggttgggtgtgtaagtggcattaccaaggaactataccagcaagacgattctattct

SEQ ID NO: 13122 - DNA, 592 bp, Gossypium hirsutum
  Clone ID: LIB3829-009-Q6-K6-B4
gttcatagccccccaaaaggcaagtagttactattttatggtttagtttttcaacttggcttctctcgcccacaggggaaatactgtcagtgtacttggtcgcataattcttatcatctggctatttgtggttctcataatcaactctagctacacggccagccttacctccatccttacagtgcaacaacttagttctcccatcaagggcattgaaactttggtatcaagcaaggatcccattggctaccagcagggatcatttgctcgaaattatttaattgacgacctaaaaatcgatgcatcacggctggttgctcttaattccccggaagaatgtgctaaagctttgaaagatgggccccacaagggtggtgtggctgcaatggtggatgatcgtgcttatatagagctctttctctccaccagatgtgaattcagtatcgtaggccaagagttcaccaaaaatggatggggatttgcctttccacgggactctcctctagcagtggacatgtcaactgccattctcaaactttcagagaatggagatctccaaaggatccatgacaaatggctgttaagacgtgca

SEQ ID NO: 13123 - DNA, 581 bp, Gossypium hirsutum
  Clone ID: LIB3829-009-Q6-K6-B5
cgccgcctgcgtctctctcttcatctctctgaaccaaaagtctttagcttttcgcttcgagagagacatgttggtttaccaggatctcatctccggtgacgagcttctttctgactcattcccctacaaggaaatcgagaatgggatgctgtgggaagttgagggaaagtgggttgtgcaaggagctgtcgatgttgacattggtgccaatccttcagccgaaggtgctgatgaggatgaaggtgttgatgaccaagctgtgaaggttgttgacattgttgacactttcaggcttcaggagcaaccccctttcgacaagaagcagtttgtcgtgttcatcaagaagttcatcaagaacttgacaccaaaactggatgcggaaaagcaagagtccttcaagaaaaacattgagggagcaaccaagtttttgctttcaaaattgaaggaccttcaatttttcgtaggagagagcatgcatgatgatggatgcttggtgtttgcttactacaaggatggtgctgttgacccaacatttttgtactttgcatatgcattgaaggaggtcaagtgctgaggtttga

SEQ ID NO: 13124 - DNA, 572 bp, Gossypium hirsutum
  Clone ID: LIB3829-009-Q6-K6-B6
gcctcatttcttgcactagcgccaccgccgtggccacccattcccgttccttcagcttgatacccatggtgatcgagcactcttcccgcggcgagagggcttacgacattttctctcgtctcctcaaggaaaggatcgtctgcatcaacggacccatcaacgacgacaccgcccacgtcgttgtggctcagctcctcttcctcgaatccgaaaacccatccaagcctatcaacatgtacctcaactcccctggcggtcaagtcactgcaggtcttgcaatttatgatacgatgcagtacattaagtctccaatcaacacaatctgtttggggcaagctgcatccatggcttctctccttttagctgcgggagcaaagggtgaaaggcggtccctccccagtgccaccatcatgattcaccagccttctggtggatacagtgggcaggctaaagatatgaccattcacactaagcagattgttcgcgtttgggattcattgaatgctttgtattgcaagcatacaggacaatcaattgatataattcagaagaatatggatagggattatttt

SEQ ID NO: 13125 - DNA, 600 bp, Gossypium hirsutum
  Clone ID: LIB3829-009-Q6-K6-B7
tccggattacaattcttgactatacaatagttggaaagcacaagttcgcatgaacaaggggattgagagagtcattgtgaacttgcttcatcgaaaccaatgaacgtgtcaggactggcatatgggttggggactgtttcatttacaacagcacttcatggagacttaattactgtgttggtggagaggtgaccacaatgtttcatttggatcgtcccatgtacttgttgggatatcttgcaagccaaagtcggtgttatgggttatacattacttctcagcctgattgagtacaagacccttgtgatgcgaggagactttgaaagggccaatgaaatattaccttcaattcctaaggaacaccataatagtgtggctcatttcctggaatcacgaggtatgatagaggatgctctagaagttgctactgaccctgattacagatttgatcttgctatgcagcttgataaactagagattgctaatgaaatagccacagaagctcagagcgagtctaaatggaagcagttgggagaattggctatgtcaactggaaagttctattaatcatgctaaacttgtcattgcaacttgcaatgg

SEQ ID NO: 13126 - DNA, 578 bp, Gossypium hirsutum
  Clone ID: LIB3829-009-Q6-K6-B8
cagaacattatcctcctcccggttattcctctccttatcccccacgggctatccatcagcccctcctcccccatcttacgaaggctatcctcctccgccaactggatatcctgcctatcctcctccgccgcctcgccagccctacgacggttaccaaggctattttgctgaagggtatccacctcctccgccccctcaacctcatcctcaatatcaacactaccaccactatgacccttaccattaccagaaccagtctgattctggctgtttctctttcttgcaaggctgtttggctgctctatgttgctgctgtgtgttggaggactgctgcttcttcctatgatataattcatgaaggatgaattatttcatttacatttctggttctgctatgcttcgctgctactgtttgggaggggggagaaatgccgctaataatgagttctacccggcatttatggtagttgttactgttctataaacagttggttgtagcgattccctgcctaatccaatttgatagtttatctacttttgaactttgtaaacagaagcttgctttataaatacatttg

SEQ ID NO: 13127 - DNA, 361 bp, Gossypium hirsutum
  unsure (1)..(361): unsure at all n locations; Clone ID: LIB3829-009-Q6-K6-C1
cagcagtgattagtgaagtgaagtagatgacaacgtgcagaaggatagcaagcctgaagctaagaaaagggttggttttcttctatgttccagagtattgctggaaaggctaatttggagaaggaagacctagaaccagctttgaaggctctcaaagatgggcttatgaccaagaatgtggctgaagagatagctgagaagctttgtgaatcagtagctgctagtcttgaagggaaaaagctgngcnctncnnattcacaaggggtnnctcttcgacagttcgggcctgccatgggaagaatgcccttgttcgtatttttaactcccaggcgctcattgcatactgaggatgtacatgctg

SEQ ID NO: 13128 - DNA, 561 bp, Gossypium hirsutum
  Clone ID: LIB3829-009-Q6-K6-C10
cacaaattcttttttggttctccatcatactctgcgacccataaccatctaacatgggggcctcaaaacctgtcttgttgtagatgtagctcttctttaaaccttggccgcagatgctgatcataaccatgctgtggcgccctatacttcttcccccgcagtacctagctactctttatattatccaacaagctcgcaatcagttcgctccttctgtcattgattcggctagctacaacgtccacaaactgaaggaacctgtcgatctgtctagaaaactgcctacactagctgtgaccccattgcttgtgtgaggctcacaatagcaaagctattctgcgtgaccatctgaatggaaccaagaactgactgagcctgctccttgcactgtctatcatacttactgcactgactgtgcattgtctctcaatactactcgtgcaccattgttagcacctggagcaatataaggtgcgcctgcagcattctcaagatgagcaaactatgcatgccgactccatctcaccacaagctgaagctatctaatggtcgtctgcttca

SEQ ID NO: 13129 - DNA, 480 bp, Gossypium hirsutum
  unsure (1)..(480): unsure at all n locations; Clone ID: LIB3829-009-Q6-K6-C11
atcgcatatagttctaccatcttgatggaatgaatatttttttaatgcaattatgacagcaaggtctatcaatgttgngaaaaattattctcatggagatccatnngattgagctaaaaaaaagataagaagtatccactttccatcattgattacttcactttgcttaagggcccaagttaaatcaaaagcaaacctgaagggccaatatgttcaaggttgcatcacagcccatgatcttgaaaggttagtggagaatgtccatgagttgaacccagttgaaccgaatgaaccaaccgaaccagaaactgacgaaattgattatgtaattatcctagcctattcacgttattgattgttgaagttgtatttctgctgctaaattcattcatttattcattttagttaattatcatactttgtatttagattaatttgcattagggatcaattttgcatctagttaatttaacttttttt

SEQ ID NO: 13130 - DNA, 575 bp, Gossypium hirsutum
  Clone ID: LIB3829-009-Q6-K6-C12
aaatataagaaaaaaatcatacgcaatgagcactgctggtcaggttattcgttgcaaagctgcggtggcatgggaggcggggaagccactatcgatagaagaagtggaagtggcaccaccccaaaagcatgaagtccgtattaagattctcttcactgctttatgtcacactgatgtatactactgggagtgtaagggttacactcctctgtttcctcgtatacttggtcatgaagcctcagggatcgtggagagtgtgggtgagggtgtgaatgatttgaaacctggagatcatgtgctccctatcttcaccggagaatgcaaagaatgtcgccactgtctgtcagaagaaagcaataacatgtgcgaactgcttaggatcaactgcgaccgaggtgttatgcttgctgatgggaaaaccagattttccatcaacggcaagcctatctaccactttgttggaacctcgacctttagccaatatactgtcgtccatgttggccaggttgccaagatcagtccaaccgcccctcttgataaagtctgtcccattagctgtgggatatgtacaggtt

SEQ ID NO: 13131 - DNA, 584 bp, Gossypium hirsutum
  Clone ID: LIB3829-009-Q6-K6-C2
tcgttatatgcaggcaatacgtatatttgggagcttttgaagaaggcaatggcttctctgttcaaggacccagctaagctttcagcataccgagacagaagattcaatggttcgcaagaggaattcgagcaagcacttctcactgcgacaaccgtctacatcggaaacatgtctttttacactactgaagaacaagtttatgagcttttctctagagccggtgaaatcaagaaaattattatgggccttgacaagaactctaaaacgccttgcggcttttgctttgtcctgtattattctagggaagatgctgaggatgccgttaaatacattagtgggacaatccttgatgaccgcccgattcgtgtagattttgattggggatttgttgaaggaaggcaatggggccgtggtcgaagtggtggccaagtgcgagatgaatatcgaactgattacgatcctggcagaggtggttatggaaaattagttcaaaaagagttggaagcacaaagacagcttgtagattatggagctgggtcactgggctcattcccaccggttatggcccctcattatggtaggca

SEQ ID NO: 13132 - DNA, 576 bp, Gossypium hirsutum
  Clone ID: LIB3829-009-Q6-K6-C3
cctgattccagtaagctcgtactgagtgttcaactgcagtcatatttacatccaaattgctcccccaggcttcttcactttgtgccttgtttcttgttctacgttgttgaaaatgtcttctttcaggtttacagctcttatgattgctttacttgttaccatgtcagcggttgtatctgaaagccgggttgcgagaaaagacctcggcctggatcttggtggcataggacttggggttggagcagggataggccttggcttgggaggtggtagtggttcaggatcaggagctggggctggttccggttctggttcagggggttctagttcaagctcttcatctagttcagcatcatcctccagttcatctggtgggtctggtgcaggttctgaagctggttcatcctcaggttcttacgctgggtctcgagccgggtctggtgcaggttcagaagccggttcatctgccggttcctatgctggctctcgagctgggtcaggacgaggccgtgggagaggcaacggcaactaattaaattaagcactccttgctaaaaaaattgtatgcggggaatc

SEQ ID NO: 13133 - DNA, 586 bp, Gossypium hirsutum
  Clone ID: LIB3829-009-Q6-K6-C4
caaaaattaaatattctttctcttttgatcgatacttgataatatgtcaggaagaggaaagggaggcaaggggttgggcaagggcggagcaaagcgccaccgcaaggtcctccgtgataacatccagggaatcacgaaaccggcgatccggcgtctagctcgtaggggaggtgttaagcgtatcagtggcttgatctacgaggaaacccgtggagtgttgaagatcttcttggagaacgtgatccgcgacgccgtgacctacactgagcacgccaggagaaagacggtgaccgccatggatgtcgtttatgccctcaagaggcagggtaggactttgtacggtttcggtggttagattggtgtttactgttcaggattgctgaagttggctgcgatggcggcggcggcgatggtggtggggggatttgaagtcttgcggtcaagaatgtttgagcgtagtatcagcgttagggctttgtaattagtgactattagaaattagacattgggtactgtatgctttcgtttacgatttgtgattcttgtactggattacagattttaatgaagttttgagttcatttct

SEQ ID NO: 13134 - DNA, 585 bp, Gossypium hirsutum
  unsure (1)..(585): unsure at all n locations; Clone ID: LIB3829-009-Q6-K6-C5
gttctccttttccctttttctgtaaaaacctaaatctgaagttctntgaaatgacgataaggaaagggagttgtaagccctaatttgaagctctctcttcctcctccagccgagacctccgtctccaaatttctgaccgaaagcggcacattcaaagacggcgatcttctcgtcaacaaggacggtgttcgaattgtctctcaatccgagcctgaagctcatccgcccattaagccatcagaagctgacaatgacgatcagttgagtttagaggatttagatgccattaaagttatcggaaagggtaatggtggaattgtgcaattggtccaacacaaatggaccggccagttttttgcattgaaagttattcaaatgaatattgaggactcgtatcgcaagcagattgcaaaggagttgaaaataaaccagtcctctcagtgtccatatgttgttgtttgttatcagtctttctataacaatggtgccatttcaatcatcttggagtatatggatggtggatccttagcagactttctgaaaaagttaaatcaattcccgaaccctatcttgctgtgatatgta

SEQ ID NO: 13135 - DNA, 576 bp, Gossypium hirsutum
  Clone ID: LIB3829-009-Q6-K6-C6
cggtcgcgtgggcggccgcgtgggtttttctcttagatgagtacaaccatggcgaatcacaaaccgttccctaatttcttatctcttattctcctctctctcgtcgccatcgcctctgctgaagttttcttcgaagaacgcttcgaagatggatgggaaagtcgttgggtaaaatctgactggaagaaagatgagaacatggctggggaatggaattacacttctggaaaatggaatggagatcctaatgacaaaggtattcaaactagtgaagactacaggttttatgctatttcagctgagttcccagaagttaacaacaagggcaagactctagtcttccaattttctgtgaagcacgagcagaagcttgactgtggtggtggctacatgaagttgctcagtgataacattgaccagaagaaatttggtggcgacaccccgtacagcatcatgtttggacctgatatttgcggctacagcaccaagaaagtacatgccattcttacatacaatgggacaaatcacttaatcaaaaaggaagttccttgcgagactgaccaactcactcatgtt

SEQ ID NO: 13136 - DNA, 588 bp, Gossypium hirsutum
  Clone ID: LIB3829-009-Q6-K6-C7
attctataggaaaaatggggggaaaacatctaccgccacataaatatcctcattttgtataggggtcgaaactatgatccccaaaaccgaccagttatacctcttatgctatggaagccttatgctcctatatatccgaagcttgtgaaaaacattgctgatggcctgacgttcgaagaaaccaaggaaatgagaaatagaggactccactctcctgcacttatgaaactcacgaggaatggagtgtatgtaaatgtagtggccagggtccgggaggcattcgagactgaggaggtgattagactagactgcacccatgttggtactagtgactgcaaaaggatcggtgtaaagctaagggacttggttccttgtgtacctattttgttcaaggatgaacaaattatactctggagggggaagagagatcaggaacggaactctgacatttctgatgccaacgagaaatcttcgggtacttagtttagtttccgaaccggaaatctgatgcagtaatgtattgggctatcatttatttatgcttccaggccaaagaatgttggataggttgcttgttgattccgttgc

SEQ ID NO: 13137 - DNA, 578 bp, Gossypium hirsutum
  Clone ID: LIB3829-009-Q6-K6-C8
tgtaattccacaaaccacttcttttttacgtagaaaaagagaatatgaaggcatcatatattgcattgtgtgcagtgatggtgatcctcttggcagaagcagtaggggtgtcaacggcggtgacatgcagcccaacgcagctgagctcctgcgtgagcgccataacatcttcatctccaccatctcaactgtgctgtagcaagatcaaggagcagaagccatgcctttgccaatatcttaagaaccctaaccttaagaaatttattaacactggcaatgccaggaaggttgcttccacctgtggaactccttttccaaagtgctaagctagaccctttgcttaaggctttctttctctctattttcactgcagaatggatagagaggaagtactataattattaatattatgtagttgtggtgtgtggaatatatatatatatatcgttttgctgcttctagtatatattaagcactaagattagctctgtggaaaattaaaaaaatgttgggcgtcatggttcgttgactgtttgtgtgtgatctatcatgttcatgttgtactagatagtagtagt

SEQ ID NO: 13138 - DNA, 575 bp, Gossypium hirsutum
  Clone ID: LIB3829-009-Q6-K6-C9
ttttaatctcttcccttcatttctttcaccatttccattgatttttttaacaatggcagcaacttccttaaccctctcaagattcctctcaccggccgccgccatttcattatccagcaccaccaagctttcctctaaatcccttcctttaaagttctcctccgtttcttccctttccttcaacctccaccgccgccgcgtttcaaaacccatttccttttccaccaaaacaacccaaatctccgccgctatctccgtcggagataagcttcctgacgcaacactttcctacttcgattccgatggtgaactccaaaccacgacgatctcttcccttaccgccggcaaaaaaagccgtcatcttcgctgtccccggtgcttttacccccacttgttcccagaaacacctccctgggttcgttgagaaatctggggaactcaaagccaaaggggttaacaccatcgcctgtgtttcggtgaacgatgcgtttgtgatgcgagcttggaaggaaaatctaggtatcaaagatgaagtccttttgttatcggatggtaatggggaattcactaagaaa

SEQ ID NO: 13139 - DNA, 602 bp, Gossypium hirsutum
  unsure (1)..(602): unsure at all n locations; Clone ID: LIB3829-009-Q6-K6-D1
cggccgcgtgggttcgccacagnaatatcgcgcgcttgctgggattctgttccaataagaagacaattcactaatatgacgagtatcatgccgtaatggnaagacttaggtagatggttattctcatgtgcaataggcgtgagctggcataaccttcaggttgaggnattacttagaggcgtcaaaagatagcgcatgagtaacgctgaccataaggacctcgtgcgtaccatgcatccatgaatatgtatcctcctcctcatgactccatctgacatgtacaagtacaacaacattttactcaactccgattttgaggctcatgtggcaaattttggccttgccaatttcttgcaagacactggaacttcagagcgcatgtcggcgatcgctgattcatatggttatattgctccagagtacacatatacactgaaaagtagacgagaagagtgatgtatatatgttcccgagtggtacttttggagctaataacatggaggaggccagttggacatttcggacaaaaaggctagacattgctcagtggagcaagagagaaccaagttgaacaaagaagggtggtgaagatattggaccac

SEQ ID NO: 13140 - DNA, 527 bp, Gossypium hirsutum
  Clone ID: LIB3829-009-Q6-K6-D10
cggccgcgtgggctcagtttgtttggatgtcatcaatcaacttggagccctatgttcgatcttgttaatgtctttgaagtgtttcttcctcaactccttttgtatcccaatccatcagacccattgaatggagaagctgctgctcttatgatgcgtgatcgtactgcttatgaagaaaaagtgaaagaataccgtgagaaatatgccaaacctgacgatgttgcaggagcagaagaagtgaagtcaagtgacgaagaactgagtgaagatgaatatgctgcctcggatgatgaggaaatcgccggaaaaccagacctttaggcacatattatgccctgcatacttgctacgaaaatcgtcttgtgttgtacatgatattcagctctaggaaaattcgaacacaacaaaactggggaacatgtggaaaaattcctacttacccctttttgtcattactttccatggatgttagtgtaaattaatccactgttcaataattcaaatatttatccactgctgagactttg

SEQ ID NO: 13141 - DNA, 581 bp, Gossypium hirsutum
  Clone ID: LIB3829-009-Q6-K6-D11
gcgttcgaaaagtttcgatccgttgctagaacggccgccggtaagagcctcctccgacgaggatatgcaaccgccgtacctgaacggaaagtcgctgtcttgggcgcagctggagggatcggccaacccttggctctcctcatgaagcttaaccctcttgtttctcaactggctctctatgatatcgctaacactcccggtgttgccgctgatgtcagccacatcaactctagatctgaggttgccggatatgtaggtgaagagcagttggggaaagctttggagggatgtgatgttgtcatcattccagccggggtgcctagaaagcccggtatgactcgtgatgatcttttcaacattaatgccggaatcgtcaagggtctatgttctgcaattgctaaatattgccccaatgcacttgtcaatatgatcagcaaccctgtcaattcaactgttcctatcgcagctgaggttttcaagaaggcagggacatatgatgaaagaaagttgtttggtgtaaccacccttgatgtggttcgggctaagactttctatgctgggaaggctaaagtaaatgttgc

SEQ ID NO: 13142 - DNA, 581 bp, Gossypium hirsutum
  Clone ID: LIB3829-009-Q6-K6-D12
cgacgccattcgaatctcttatttctcttttttcttaagctcctgcttctctaattattcaattcgaaatatcctcttttatcatctatgcggtatttgccttgagttcgtagcttgaatcggtgttgcaaattcggaataaattctcttttgggtatttgtgtgaccatgggttccgcttgttgtgttgctgcaagggacagaaccattgcaaacagaacaggaggtgagacttcgcatagaaatttgaggtgttcaccatcatggagcttctgccgagataatcgaaggcgtgtagctggtgaaattgatgagccttcttatcaggtatctaatggaactagccgaaatgttagcatggagataaaagggacattaggctctgatagaggtaatttttctgatcaaggaagtcctcttgagattgagacctatggaacacccacctctcaaaaatcaccagtccatgaagaaatgggtgggaatatgatgacccctccttcagacatatcaagaggaagcaattattcggttgatataaagaatttggtagaattgcccgatatcattgattcatctac

SEQ ID NO: 13143 - DNA, 575 bp, Gossypium hirsutum
  Clone ID: LIB3829-009-Q6-K6-D2
gcagtccatcaaaacatcttggtttcccgatctcgtgactttgtagttacttctgatggaagtaaggtgccggtgtccgaacttgaggggaagactgtaggtatatatttctcagcgtcttcattcaagccatctgctgattttactcaaaaacttgctgaagtttatagtaagttgaaagaaaatggggagaaattcgaggttgttatgatatcgcttgatgatgatgaggaatccttcaagcaaagctttggggcaccatggttggcattgccttcgaaagacaagagctgtgagaaattggctaggtacttcgagctctcgacccttcccactgttgtcattatcgggccagatggaaaaactctccaccctaatgctgctgatgcgattgatgaacatgggattgtggcctaccccttcagccccgaaaaatttgcggagcttaaagaaatagagaaagcaagtgaggcaacacaaactctggaatcagttctggtttcagggggtttggattttgtcctagggaaggatggggctaaggtcaaggtggccgacttggtggggaagaccat

SEQ ID NO: 13144 - DNA, 497 bp, Gossypium hirsutum
  Clone ID: LIB3829-009-Q6-K6-D3
atagagtaagggtggcgatcgtgacatctctgggtgggttcgacacatgttactcggtcccaatcaatgcaccgaccataacatttatgttttcgggcatgaacgtgacattgccacaagagaacctactgctccacagcacagcaggcagcatcacatgtctggcgatggcaccggcaccagcgctgaatgtgatcgccaatatgcagcagcagaaccatagggtggttttcgatgtgccaaattcgagggtgggggtcgcccgtgagcgatgttcttaaaaagtgtggggtctttttcttctaacttttgggaaacagtgttggtgttgattaaaagcagaatatatctgattaataatgaaagtcaaatttttgtagttatatattactttgtactggaggctctggtcctagtcacgggctttcccttacttttattatgtcttgtttttaggttttaatatccaaaatttcgaatcctgttactattattat

SEQ ID NO: 13145 - DNA, 563 bp, Gossypium hirsutum
  unsure (1)..(563): unsure at all n locations; Clone ID: LIB3829-009-Q6-K6-D4
cggccgcgtgggttaaagttgactggaaactcccagnaccccanaaggaattgtatctcggattttgttgactattttgtctttcttcatgatgatttacactatcctccacacggcagcacgccgtataactaaaaagcttcctgacacagtttctgatcattgtcaaaatgttactaaacttacctctgatgcgactcaacaagctgagtctcgtccaccgtctccgatccctccttttacccaggctgatcttttatcctctgttctcaaaagattgggtgaacttgaggagaaagttaatatactacaagcaaagccatctgagatgccttacgagaaagaggaattgttgaatgctgccgtatgtcgtgttgatgccctagaagcagagctgattgctaccaagcaggcactttacaatgctttgatgagacatgaagaattgcttgctgaaattgaccgtcaagagaaagccaattttctgaaactgcagaaaaagaagttttgctggtgatgcttttgctgctgatggagagcttacaaaaaccactaatctatcg

SEQ ID NO: 13146 - DNA, 553 bp, Gossypium hirsutum
  unsure (1)..(553): unsure at all n locations; Clone ID: LIB3829-009-Q6-K6-D5
gngctttttcatacttcattcccattgcatttattcactaggttataaaggacaaaacaaatgggagcatttaagtccctagcattggtcgcctttctccttgctatgttgactattgtgtcggagagcagggttgtaaggaaagacttgggcatcgatcttggtggtgtaggagtagggattggagcaggtgtagggctgggtctcggaggtggtggttcagggtctggagctggggctggttctggttccggttctggttccagttccagttcaagttcaagctcttcctcttcatcctattcaaactcgggttcagggtcagatgcaggttcgtatgcggggtcttctgctgggtctcgagcaggatcaggatctggtggtaacaagggacggcaaggtggttcaggtcatggtgagggatatggggaggggtcaggcaggggaaatggttcaggcaatggtgaaggttatggcgagggacatggctatggagagggtcatggcagcggtggggacaattaaaatctaactttgagtgcatgcttgcttg

SEQ ID NO: 13147 - DNA, 584 bp, Gossypium hirsutum
  Clone ID: LIB3829-009-Q6-K6-D6
cggccgcgtgggttcggccagtctggtgctggcaacaactgggccaagggttattacacggagggagctgagctcattgattctgttcttgatgttgtcaggaaagtggctgagaattgtgattgcttacaagcatatagttgatttcaattttccaaggttagcagattttggagctgcaatatctggtgcaaacaaattgcaatgccagcaagttattgaagagttggatgtgcataagcggttgcaacttacactggaattagtaaaaaaggaaatggaaatcagcaagattcaggtctaaatcatttgaagcatacttttaggactcaattgcgaaagcaatcgaggaaaagataagtggtgaacaacgctgatacttgttgaatgagcagcttaaggcaataaagaaggaacttgggttagaaacagacgacaaaacatcaccttaagtaacatatactcgtacagttcaatcaattcagcgctgcaagaaaacagaagcgaatgtataataaccgtgtattgtagtactgatttttgttatatattaacgaaagaatatatgttcttttacttttatt

SEQ ID NO: 13148 - DNA, 564 bp, Gossypium hirsutum
  Clone ID: LIB3829-009-Q6-K6-D7
tgggagggtctgttttgggaaaggcttctggcttcgaggagtcaatgaagtataagaagctcactaatgctcagagatctggtcttaaccagattcctaaccgtaggtttactctttggtggtcacctacaatcaatcgggctaatgtttacgtgggttttcaagtgcaactagatctaactggaattttcatgcatgggaagattccaaccttgaaaatatctttgattcagattttccgtgcccatctgtggcaaaaaattcatgagagtgtggttatggatctttgccaagtcttagatcaggagttggatgctttagaaattgaaactgttcagaaggagacaatccatccaaggaagagttacaagatgaacagctcttgtgcggatattcttctctttgcagctcataggtggcctatgtcaaagcctagtcttgtggcagagtccaaggacatgtttgatcaaaaagcaagcaataaatattggatagatgtacagctccggtggggtgattatgactcgcatgatattgagcgttacactcgagccaaatttatgg

SEQ ID NO: 13149 - DNA, 579 bp, Gossypium hirsutum
  unsure (1)..(579): unsure at all n locations; Clone ID: LIB3829-009-Q6-K6-D8
tccggnaacaggggggcagtgcagaaggtattcttcaggtccgtgctgaccgcatacagtcagatcttgaggagctaatgaaggccctgactgaacgatgcaagaaacatggatatgatgttaagtcagctgcagtaattgagcttcccacgggttggcaaccaggagtttcagagggagcagcactctgggacgaagagtgggataagtttgaagatgaaggatttggcaatgagctcactattgatgtgaaaaaggggccgtctctcagagaggaaaagcttctccagatggtagcttgacccctgattccacttcctatgctgatgaaaaaactgcgaatctcttcagtgctagtgatcgtgccatcgagagcgagtctgcatatacacacagtgaagatgaatctgccagaagtcctcgtggtagtcctactgatagaaactctctagaaagcccatctaaaccattttctgatgacccttttggaaagagcactgaagcagaggcagaaagacaccaaagttttgatgaatcaggatgggggacctttgataatgatgatatggactctgtgtg

SEQ ID NO: 13150 - DNA, 581 bp, Gossypium hirsutum
  Clone ID: LIB3829-009-Q6-K6-D9
cgaaattgtggtgtctttagaccgagggtgtgataggaatgatctgtcattcccacaacatataatcaatgcattttattcatatataagcctgttggaatcacttgatgcagccgttaacgtaaattccgacgccataaacaagatcgagaggttccttattgtgcctaaaattgaaaccacagttttgggtcgtttgcattcactcgagaaaatgccaccatggaagtctctgtttgcttcagctggtttcacccctttaacgttcagtaacttcaccgaaacacaagcggaatgcgtcgtgaaaagggctcaggttcgaggttttcatatccaaaaatgccatgcttcactagttctttgttggcaacaaaaggaacttatctcagcttcagcttggaggtgttgaggaacaacagcatcgaaaccagcaggggaggttcgtttttttttaatttagcaactcacaatctttatatcgtctctagctcgtagtgcgaatttaactcgaatatcatttactaaactatgctatgcttttttttatgacttgatcaatacaatgtgatttgcctttgctt

SEQ ID NO: 13151 - DNA, 600 bp, Gossypium hirsutum
  unsure (1)..(600): unsure at all n locations; Clone ID: LIB3829-009-Q6-K6-E1
cgtcggacatttcattcgttacttcacanataaatgtcgaaaaacacaagtccagnatgaaaaagaagctgcttttgcacttgctgctctcatggagatccctttccaatacaaggcagtgatggaacttggtattcttggacaccgaactgggaaagcaaagaaagtggttccacgtcctccaccagctccgtaccgtgctgctgctcggtcggagcctgcaccgaccaccgtctcatcatcgcccgcattagatgatcgaacccaggcatgcccaatttgccttacgagtgctaaggacttggcctttggttgtggacatatgacttgtagagaatgtgggtcaagggtgtcaaactgtccgatatgccgtcaaaggattaccaatcgtctgaggttgtttgcttgatttccttatttacgactttttgtacatattctgtgaagggaaatttttttatgtgtttaacataactctcaatatcatgattccgattcgagtttcactagtaatcttagtaagtgatctgtgagaaagactttcatgtattccctcgctctatgtaccaaatgtaacttagtgctanagtaatttaaacc

SEQ ID NO: 13152 - DNA, 601 bp, Gossypium hirsutum
  Clone ID: LIB3829-009-Q6-K6-E10
gttttggcctgcttcttttaggggttgcttgcttgagtggaaagtagaagatggaaagaggattggaaaagtgaaaataaaataaattttcagtgtgcttggtagaaaagagaagtgagaggaaagaagattagggaggtggccattttccatcctaattcataaaaccaattaatcttaattggaatgatacgaggagagaaaatgagagagagatgcaagttagtccaaagttatgcatttttcaaaagctccattctatttcttttcattttcaacactaccaagcaatgaatggaaagaaaatcacttttcttttaattttttcatctttcctaccaagcacagcaatggaaacagaatatattttctttctatttttctactccaagttttcaactttccgattttctttcccctaccaagtaaaaccttaatgctttgttgaacattgtggatggaaatttattaagttttttaaattttttggcatgtgttatgaacttccaatgatacaggcatggacagaagctccgtcgttttcaagtgcacttatttccatgcttttgaggttgccaaaactaaaatttgtgattgtgac

SEQ ID NO: 13153 - DNA, 587 bp, Gossypium hirsutum
  unsure (1)..(587): unsure at all n locations; Clone ID: LIB3829-009-Q6-K6-E11
ngaaagaatgatgagatgtggcaagagagatttaaatcatagatcgctacgtcatccgaatataattcggttcaaagaggtggttttgactcctacacatcttgcaattgtgatggagtatgcagctggtggtgaactctttgagcgaatttgcaacgctggacgattcagcgaggatgaggctagatatttttttcagcagttgatctcaggagttagctactgtcatgccatgcaaatatgccatcgagatctgaagttagagaataccctgttggatgggagccctgctcctcgtctgaaaatctgtgattttggttattcaaagtcatctctactgcattcaagacccaagtcaactgttggaactccagcatatattgcaccagaagttctttctcggagagaatatgatggcaagatggcagatgtatggtcttgtggagcgactctttacgttatgttggttggtgcatacccatttgaggaccaagaggatcctaagaactttaggaaaactattagtaggataatgtcaattcaatacaaaatcccagactatgttcacatatcccaagattgcagac

SEQ ID NO: 13154 - DNA, 580 bp, Gossypium hirsutum
  Clone ID: LIB3829-009-Q6-K6-E12
gttaatggcatggatcttcgtgcacttagtgcgtgccttgttgcagttgtttgttcttcggagcaaccaccacttaggcctcttggaagccctgctggggatggtgcttcggtgatcataaaatcagttcttgaaagggccagtcaacttctaagtcatccatctggaaattgcagcatgcctaattatactctctggagggcttcattcgatgaattttttgcccttcttaccaagtactgtgttagtaaatatgagacaataatccaatcaatacataaccagcctcagccaaccacagaagtcatcggtttagaggctataaggcgtgaaatgccttgtgaacttctacgagctagtcttcctcacactaatgaatcccagaggaagcttttgatggacttttctcagcgttcggtgtccatgaacggatccagttcgcctgctggaagtactagccgaatcaactctgaatcggtaagggtctaataaagaagggaagggtagcatgcaaattttgtgaacaatgcagttgataggatgtagaatgagagaaccagaggggaagaggtatgcattc

SEQ ID NO: 13155 - DNA, 580 bp, Gossypium hirsutum
  Clone ID: LIB3829-009-Q6-K6-E2
cccagcgtccgaaaaaacaagtaaaaactacataaatgcttgaaaaatacaccccaaaaaagaaaaccacccaagaccaccgacacctccgccgatcatccaccgccgaccaccactacttccattcacttcccatactggaaagatctttgggttttatttttaaatgtgttttttaattgcaattaatcatcatatcattctttgattcctcagttttagggaatttttggggtatttaaaaagaccaaaaaggggttcatatttttaaaaaaagcttagatcaaatcttaaaaaaatggggattatacggtggatttaggattttgagggggcttttgggttttgtgagggttttttttaatgagagatgtctgatgcttcagggattaatgaatctgctctcggtttgttggaacccatttgggcatgaagtagaaagtcacgaaacaaacggcgtccttggcggcggcgatggcggtggtagtggtggctcaagggaaggtaaagatgggttgctttggtttcgtgatatagggaaatatgggtccggtgaattttccatggccgtgatccaagc

SEQ ID NO: 13156 - DNA, 575 bp, Gossypium hirsutum
  unsure (1)..(575): unsure at all n locations; Clone ID: LIB3829-009-Q6-K6-E3
gnaaaagtaaaaaacacacatagacgtaagggtcccccgatggagaccggaccaaccggcggtgcccttggtggcgacgatctatccccgtcgtctcccgcggcggtcatatcgcggtggactttcgaggtatcgcggcgataccagcacctcctggacaaaacggttccgcacgttctcaaccgttggatcggatgtcttgcggtggtgttgatctacgccgtacgcgtgtacttcgtgcaggggttttacatcgtcacctacggcctcggcatctacttgctgaatttgctgatggggttcctttcccctcaagtggaccccgagatggaggatggtccctcgcttcccgtcagtggatccgatgagtttcgccctttcgttcgtcgactccccgaattcaaattctggtactcgatcacaaaggccttttgcattgctttcgtgatgacattcttcagtgtgtttgatgtgcctgtcttttggccaatactccttttctattggataatgttattcatcctgactatgaggaaacagatactgcacatgatcaagtacaaatacgtcccttt

SEQ ID NO: 13157 - DNA, 397 bp, Gossypium hirsutum
  unsure (1)..(397): unsure at all n locations; Clone ID: LIB3829-009-Q6-K6-E4
gcagtttagaagttggtaacgcatcagctgtttcatacagctctcatcgcaattttttctgttttcccgcaaaacgactactttccttgcaatgaatccacaacaccattctcaatcggagccggaccttccggttccacccctcgcttctctccggatccaacccacgtcgccacgtgtcccgttgaccgttactcctaccactggtgcccaacgtcgcatcgccatcgccgtcgacttgagcgatgagagcgcttacgccgtccgatggtctgttcagaactaccttcgtcccggagacgacgtgatactcctccatgtccgtccgacgtccgtcctttacggagccgactggggttccgtccaagtccaaaccatccctaactccnacaactaa

SEQ ID NO: 13158 - DNA, 582 bp, Gossypium hirsutum
  Clone ID: LIB3829-009-Q6-K6-E5
gtgcttccaaatgaaacaattgatgaacataaggcagttgtacgggagtttctggctgtgttcttggtatcaatataaactgcttgcttgagcttgtttaacagtggtatcagctacaaatctgtgctctcttctgggttcaatctttagtaatttggaaggtgtgtgttttccctttttgtactcttattatttcgattcatgcttgtcatggagattggtaagtgtagataacagctgaatttatttgaaagttgatcaagttggggctctccatcttgtaatgatcttcacaacctggacatgtatatagaaaatccattttacaaagaacagattctgtcacttttatagcattagagattccaagaaatgtcaataactcttatcttctatggtttctgcaggttgtcagatatcatttgctagatcaaattgcgaataaactgatgaaaaaaggcaagctgagaattctggcatggtgacagtttatcaggaaatattgtcgaaatgtgctggcatgtcccttcaagagggaagttcttcaacatcacccgaagaatggctctcgacgctaatcgc

SEQ ID NO: 13159 - DNA, 576 bp, Gossypium hirsutum
  unsure (1)..(576): unsure at all n locations; Clone ID: LIB3829-009-Q6-K6-E6
gnaagtaaaagttcgttccagtgtttgtatatttggggagaaaagcgtttgccacttatgttcaagccaagagaattgtgaaattcattaccgatgttggagctacagttaatcatgatcctgatataggtgatttactgaaggttgtttttgttcctgactacaatgtgagtgtggctgaattgcttatccctgcaagtgaactatcacaacatatcagtactgctggaatggaagcaagtggaaccagcaatatgaagtttgcgatgaatggttgcattttaattgggaccttggatggtgccaatgttgaaatacgagaagaggttggagaagaaaactttttcctcttcggggctcaagcacacgagattgctgggcttcggaaagaaagagctgaggggaagttcgttccggatcctcggttcgaagaagttaagaagtttatcaaaagtggcgtattcggatcttccaactataatgaactcctgggatcattagagggaaatgaaggtttcggtcgtgcagactatttccttgttggcaaagacttccctagttacatagaatgccaag

SEQ ID NO: 13160 - DNA, 595 bp, Gossypium hirsutum
  unsure (1)..(595): unsure at all n locations; Clone ID: LIB3829-009-Q6-K6-E7
gtccacttgcagnatttattgtcctgttcttgattatgatgtaacagggtcaggtgaaattctgcgtattctggccaccatgaaactgagtacgcactgttgggacaatttcctgcttcaaacatgttgcaaaatgacagcttggaagaaacgaagaggtagtttcacccctggttgacctattacgttgtatcattgggtctgagtgagtagacccacactgcaatgtgaattcatgctggatttgttgttatggtcatctttgtcactaaacttattgactctcaattgttttactaactttaccaaaggtgggtctgtagtttctctctttgttaaacagggtattcttgcattcaaactgtggagaatcagtcatatagatagtgtcaaacaagcagagcttgtggtgaatcagcaccgtttgcttgggtgtcagtaatgttgatatgttgattctgcacaatgattgatcctcgactaatcgaaatgtgttatgcccttgtgatcctttggttcttctgtggatcacagaagctggtgaattgctgccacacacttgcatgttcaggccatgtggattgcacaaatgagc

SEQ ID NO: 13161 - DNA, 581 bp, Gossypium hirsutum
  unsure (1)..(581): unsure at all n locations; Clone ID: LIB3829-009-Q6-K6-E8
gtaagctcagnatcgaggcctggttcggtactaggaagaccagcgccgccatccgtaccgccctcagccacatcgagaatctcatcaccggtgtcaccaaaggttaccggtacaagatgaggttcgtctacgctcactttccgatcaacgcctcaatcactggcggcaacaagtccatcgagatccgtaacttccttggcgagaagaaggtgcgtaaggtggatatgttggaaggggtttccattactcgatccgagaaggttaaggatgagatcgttttggatggtaatgatattgaactcgtgtctcgctcagcagctttgataaaccagaaatgtcatgtgaagaacaaggatattagaaagtttcttgacggtatctatgttagcgaaaagggcaggatcgccgaagaggaatgattgttatctcaagtcatagttatgggtgccatgttatttttctgtcatagtaatttctttggtaccatggttttttgttgttttacctctttatttggattacagctgctgagtaaaaagatgtttatctttatttggtggtttaaaaaaatttgacttgct

SEQ ID NO: 13162 - DNA, 584 bp, Gossypium hirsutum
  Clone ID: LIB3829-009-Q6-K6-E9
ccaatctcatatctctcctttgtttccccttttctctctcttttttcaaccctaaccctacctcaccaaccaggattcaacatgaagggaggaaaatctaagtcagatactaagagtgccaagctatccgtgaaatccaaagctggaaagaaatcggggaaggctgccaaggatccaaacaagccaaagaggcctgctagtgccttcttcgttttcatggaggagttccgtgagcaatacaagaaggatcaccctaaaaacaaatccgttgccgctgtcggcaaagctggtggagataaatggaagagcttgtctgaagctgaaaaagcaccttatgtagccaaggcagaaaagcgaaaggtcgagtatgaaaagaacatgaaggcctacaataagagacaggctgagggtcctaaagacgaagatgttgagtctgacaaatcagtgtctgaggtgaatgatgaggatgatgatgaagaaggcagcggagacgaagaagatgatgagtaggaaggtccgtggtggatagcataatcaatgtaggctgtgatagtgtttgatcaaaaccatatgttaatgcttta

SEQ ID NO: 13163 - DNA, 572 bp, Gossypium hirsutum
  unsure (1)..(572): unsure at all n locations; Clone ID: LIB3829-009-Q6-K6-F1
ccgtaaaggctaccactgcttctccatggcgactcagctgaagagcagctttacgtcgtctgttacaagaggactggtagtccccagggcatttcgggatccccgttcaaagtatcnttccggnaaataccaggaccccttgcttcactgtcaaagctgttcaatccgacaagtcaacatttcaagtaatccaacccatcaacggcgaccccttcattggaagcctggagactccaatcacctcaagccccttaattgcatggtacctttccaacctcccagcctataggacggcagtgaacccacttctgaggggaatcgaagtgggtctggctcacggcttcctcctggtgggtccattcgttaaggccggccctctaaggaacactgcggtggcgggtcaagctgggtccttagccgctgccggtctggttgtgatcctcagcatttgcttgacgatgtatggcgttgcatcgttcaaagaaggtgagccatcgatagcaccgagcctaaccctgactgggaggaagaaagagccagaccagttgcaaacggcggatggatgggctaag

SEQ ID NO: 13164 - DNA, 574 bp, Gossypium hirsutum
  Clone ID: LIB3829-009-Q6-K6-F10
cttacttccatgaatttgatgttgaaggcgaaccctaaccctaaccctaaagagactctaaaaagagccgaactgtcgatcttggaaacggaagcagtgtaatttacgttcccaggtttttagcatatgatgtcgcctgggaattcttcaattacctcgacaatcacatcccttggaccagacccacccttcgcgtctttggccgatcttgcactcagcctagagacacatgttatgttgcaagtgcagggttgccggacttgatttacagtggatatcagcctcatgctcattcttgggataatttccccccacttaaggacattttggatgcggtccataaaatgcttcctggcagtacatttaacagcttgcttttaaatcggtataaagggggtaacgactatgtaggttggcatagtgatgatgagaagctctatggatcaaccccggaaattgcttctgtttcctttggatgcgaacgggattttatcctgaagaagaaaagtggcaaatcatcccaagagagaagatctgatgacaaacctccattgaagaggtctaggaagagcag

SEQ ID NO: 13165 - DNA, 575 bp, Gossypium hirsutum
  Clone ID: LIB3829-009-Q6-K6-F11
attttcactcttgaattccctgcaactatgtgttcttctcatggaaaacctggcggtcgctttgttattgatagagctgtggtttaccattgaatcttctgtagctcaccctgataaaattgttaagcttccaggcaaccccctcgcttgagctttcaacagttttcagggtacgttacggtggattacaagaagcataaagccctgttttactactttgttgaagctgaaactgatcctgcatctaagcctttagtcctttggttaaatggagggcctggctgttcttcacttggagttggggcattctctgaaaatggaccattcagaccaaatggagagtttctagttaaaaatgattacagctggaacagagaagccaatatgttatatttagagacaccaattggagtagggttttcttattccacaaacacctcttcttatgaagcagtggatgatgagatcactgccagggacaatcttgtgttcttgcaaaactggtataataaatttccaaattacaggcacagggatttgtatattacaggagaaagctatgcaggccattatat

SEQ ID NO: 13166 - DNA, 423 bp, Gossypium hirsutum
  Clone ID: LIB3829-009-Q6-K6-F12
caagacccctttttttaaccctttctgctagggtttcatccccaaaaacatgcagccgccgaaccaccaccgcacggtggcagatggtgcaccgatgatggctaattttgccaacggaagagagccccaactatgccgtcggaggtttggtatgacggacgtggctcggacgtggtacgggtttgggtagtgaacggtggagtggcgcatgacatgggcggcggttgaagcactcagagggctagggttttcccttcttgcttattttctgatttgttgtgggctaaattttggacctgtttaatttggatttgtttagtgtaattagtttgtattttgggctgggcaaaatttgagccctacaatagtcttgcttgaacaaagggataaattgtttatgagtggtttatgagttggggtcaa

SEQ ID NO: 13167 - DNA, 571 bp, Gossypium hirsutum
  Clone ID: LIB3829-009-Q6-K6-F2
gcaaaatccaatccagtattctacaattggaaccggcttaaggttaggtactgcgatggatcatcgttcaccggggatgctgttgatcgagctaataatctctttttcaaaggaaacagcatatgggaatttatcattgctgatctactagcaaaaggaatgagaaatgctaaaaatgctattctttctggctgttccgctggaggattggcttcgatattgcactgtgacaggtttcgagctctccttcccgcttctactaaagtaaagtgcatttcagatgctggcttcttcctccatgcgcaagatgtctcgggagggaagcacatagaagaattctatggcaaagtggctagactacacggatccgttaagaatttgccagcgtcttgcacttcaagaatgggagccagaccagagttgtgtttcttcccacagtacgtggtgcagactatgcaaacaccaatcttcttcgtaaattcagcttatgactcctggcagattaagaacattttggctcccagtgctgctgacaaaagtaaggagtggaaaagctgcaagcttgacttga

SEQ ID NO: 13168 - DNA, 266 bp, Gossypium hirsutum
  unsure (1)..(266): unsure at all n locations; Clone ID: LIB3829-009-Q6-K6-F3
cccgggttcgnacccacgccgtccggnattcatgnaatctatagcaattcatgaatttgttttacgatgctgtggttggttgggccacttgtatttggttgctgctacaaaaaattgtttaattgtttccgttacctacttgagaatgatatatgatgaacaaagatatggttccttcttgattttacataaagaaactttgattgtatacctatgtccttggactgctgaaaatcttaaataacaatccctttactttattcttc

SEQ ID NO: 13169 - DNA, 451 bp, Gossypium hirsutum
  unsure (1)..(451): unsure at all n locations; Clone ID: LIB3829-009-Q6-K6-F4
gnacgctcaaggntttgcaacatgggtctctcaaagcttctctaatccttgttctcgtcgctgtttgtgctcttatgggttcagccgtagctgctgaagccccagcaccgagtcccacctcaggaaccgcctccatctccccctcattcgtctctgttttctttgccgctgtcacggctctgcttttcggctctactctcaggatctgaagggtgttggctattgatggtgtagagagggtgtttgatttctcatttatatagatttaatttttgggaggggtgaattttatatggagttttagtatatctaggagtccctatatatataaatatgcgagagtcgagagaggtagttttgttatctaccgcacagattattcatggtggatgatgtttggacttatttgtttcagtattattatggattgatatcatttgcattagtacgc

SEQ ID NO: 13170 - DNA, 576 bp, Gossypium hirsutum
  Clone ID: LIB3829-009-Q6-K6-F5
gtccgttttccagattggcttattgcttagatttgcttagcttcttttagatcaaaacaccacttgaaacaccattttaatgagttaaaaatctttatcggaatgggcaaactcgttcccgatcgctcgtttttccttttatttttcctttttcttcactttctcctcttcgatttcgctctctctgagattttcttcgaagaacgcttcgaagatgggtggaagagccgatgggtgctgtcagattggaaaaggagtgagggaaaagccggcacctttaagcacaccgccggcaagtggtctggcgatcctgatgataaaggtattcagacttataatgatgccaaacattatgccatctctgctataccagagtttagcaacaaaaacagaactctagtggtccagtattctattaaacttgaacaagacattgaatgtggtggtggttacatcaagcttctctccggttacgtaaaccagaagaaatttggtggcgacactccttacagtttgatgtttggaccagatatttgtggcacacagaccaaaaagctccatgttatactatcctac

SEQ ID NO: 13171 - DNA, 580 bp, Gossypium hirsutum
  Clone ID: LIB3829-009-Q6-K6-F6
ctctttaatttctcatttcacttacaaactcaaccatctttgccctttcattgcttccttgcctgccttaaacctccttcaagcatagccatgactactgaaatggtaatggttgatgaagtcccttttcctccacaaatcacaactaccaagccactatctcttttgggtcatggaattaccgacattgagattcactttttgcaaatcaagttcacagcaattggggtttaccttgaaccagaagttgtaggacatttgcaacaatggaaggggaagcctgggaacgtgctagctgaagatgatgacttcttcgaggctcttattaatgctccagtggagaagtttctgagagttgtggtgattaaggagatcaaaggttcccaatatggagtgcagctagagagtgctgtgagggaccgattggcagctgacgacaaatacgaagaggaagaggaagaagccttggaaaaagttgttgaattcttccagtctaaatatttcaagaaggattcagtcatcacttaccattttccagcaaattcagccactgctgagattgcattcacgacggagggaa

SEQ ID NO: 13172 - DNA, 593 bp, Gossypium hirsutum
  Clone ID: LIB3829-009-Q6-K6-F7
ctttaaccgccctccggtagcggtggtgcaactcccgctacggcagcaacaaccatccactccttgctgctttgatcctcactacccttctcaatctgatcatgcgatcggccaaccactcaccaagcccaaccccagtgatggcaacatacacatggtgagaacaacttcacgaaagaaacataacaagtactatctgtggttttttgaagaactcggaggtagaagcaagaagtggagaacaataatgataccagggaaaaaaaatgttttgcgtgcaaaactaggaactgcgtctcctccacagtacgagttcttcccatcatcaagctgttgggagatggggtgagggagaaaaagcatttccattgaagaagagaagaggagcgttgaaacccaggggacgatgatgatacaataatggcgaaagatacaaataataagcggtcgatgaagagcagtaccagcaagatgaagactaagctgagcaagaaacttgtgcagcagcagcagcaaagcattggtgaagaacaagagagcaaagacattgcttgcactaatgttgattataataataacaattctagtggtgc

SEQ ID NO: 13173 - DNA, 576 bp, Gossypium hirsutum
  unsure (1)..(576): unsure at all n locations; Clone ID: LIB3829-009-Q6-K6-F8
cggccgcgtgggttttgatattttttttgtaagtaaaggaacagtngaaaagcaacaggaaatggcaaatatagatatcgatgggatcttgaaggagcttcccaatgatgggcgtatccctaaaaccaagatcgtttgtactttgggtccggcttcacggtccgtacctatgatagagaagctgttgagggccgggatgaacgttgctcgcttcaatttctctcatggcagtcatgagtatcatcaagagaccttggataatcttaggtctgctatgcacaacaccggcatcctttgcgctgtcatgcttgacaccaagggccctgagattcgaactggattcctgaaggatggaaaagctgttcagctgaaggaaggccaggaaattactgtaacaaccgattacgaaattaagggagatgagaagatgatctgcatgagctacaaaaagctggctgttgatctgaagcctgggaataccattttgtgtgcggatggtacaatcactctttcggtgttatcctgtgatcctgctgctgggactgtgagatgccgatgtgaaaacacagcgatgat

SEQ ID NO: 13174 - DNA, 580 bp, Gossypium hirsutum
  Clone ID: LIB3829-009-Q6-K6-F9
atatgcttgttgagcagttggctgaagtggatccatctcaaatgagttgcaacgaaaagctggcattttggattaacctgtatcatgctctgattatgcatgcatgtttagcatatggggttccgagaaacgttaacaagctattttccttaatgcagaaggcttcctatactgttggaggacaatcagtgagtgcagtagacattgaatgcactgttctaaaaatgaaccctgctacttatcatccacaaattgctgcagctgttgcacttcaaaaattcaactcttctaacgagcagaaaaagtatacaattgatcatgctgagcctcttctatattttgctttaagttgtgggctacattcttcgccggcggtgaggattttcagccctcaaaatgtgaatgagttgctaaaaaggtcaatgaaagattacattcaggcaactgttggtataagtaacaaagggaaactactggtacctaaattgctgcattgttttgccaaaggagttatcgaagactcacttttacctgaatggatttgtcgaatcttgacacctcagcaagcttccatggttag

SEQ ID NO: 13175 - DNA, 595 bp, Gossypium hirsutum
  Clone ID: LIB3829-009-Q6-K6-G1
ttaaatataaaaaaaaaatcatacgcaatgagcactgctggtcaggttattcgttgcaaagctgcggtggcatgggaggcggggaagccactatcgatagaagaagtggaagtggcaccaccccaaaagcatgaagtccgtattaagattctcttcactgctttatgtcacactgatgtatactactgggagtgtaagggttacactcctctgtttcctcgtatacttggtcatgaagcctcagggatcgtggagagtgtgggtgagggtgtgaatgatttgaaacctggagatcatgtgctccctatcttcaccggagaatgcaaagaatgtcgccactgtctgtcagaagaaagcaataacatgtgcgaactgcttaggatcaactgcgaccgaggtgttatgcttgctgatgggaaaaccagattttccatcaacggcaagcctatctaccactttgttggaacctcgacctttagccaatatactgtcgtccatgttggccaggttgccaagatcagtccaaccgcccctcttgataaagtctgtcccattagctgtgggatatgtacaggttttggggccactgtgaatg

SEQ ID NO: 13176 - DNA, 291 bp, Gossypium hirsutum
  unsure (1)..(291): unsure at all n locations; Clone ID: LIB3829-009-Q6-K6-G10
ctgcaaatgattctgtcatgtgcaccatggtttattgcttgagggttgttctatggaactggcttctgagttatcatctaggaaaagaaggatagttgggaggttgtccgagtccggggatttggtgttggacaagccctgttcagggaacatcccccacgccttctgccggggggcccgggggggagttctgctgccgcggccgcgtgcggcgccccgggtgttccggacgcggttcctgcgggcgtnccagcatttcctttngcgntgcccctttctggtgccccggtt

SEQ ID NO: 13177 - DNA, 577 bp, Gossypium hirsutum
  Clone ID: LIB3829-009-Q6-K6-G11
ccatcttcgtctcctttcacgtccacacagctggtctagtggttttcacagaggattcccttctacaaaaactcaatctcttgcaggatctccacctgcttatcgtacatctcccaagccgtatgatattgcatctacacctactgatttatatggtaatagaattcaaaatcaaagagtgtcaactctacaacaggttactgcttatgatgaatataagtcgtcacccccattctcaccatctgcttctccatcaactccgtcatacttatctggtgctaatcctttgcttactcgtcattgttctgagacggctccagtaaccattccacttccactaactggcagaagtactagatatctttctcccaactcttctgatccaagtaggcattcccttccccctttgtctcctagaagctcaaagcacgatgcctcatctcaggaatctccttctgggattcggtcatacaggaaaatagaagctctaagggcaggagagtctccttctggcttatcgaataattattctgcacaaaaagtggttagagatagtaaagatgactcgggtcgattc

SEQ ID NO: 13178 - DNA, 561 bp, Gossypium hirsutum
  Clone ID: LIB3829-009-Q6-K6-G12
cacaaatcttcttctccttctcataaatcttagtatcatcactatggcctcaatcccaagtcttctttgacatgacgatcggtggtcagcccgctggtcggattgtgatggagcttttcgcagattgcactcctcgcactgcggagaacttccgtgccctctgtactggcgagaaaggcgtcggccgcagcggtaagcccctccactacaaaagctcttctttccatcgtgtgatccctaactttatgtgccaaggaggtgacttcaccgccggaaacggtaccggaggtgaatccatctacggatcaaagttcgctgacgagaacttcatcaagaagcacactggtcccggtattctctcaatggctaacgctggaccgggaactaacggatctcagttcttcatttgcacggctaagactgagtggctcgacggaaagcacgttgtgtttggacaagttgttgaaggcatggatgtggtgaaagccattgagaaagttgggtctagcagtggaagaacttccaagcccgttgttgtcgctgactgcggacagctctctt

SEQ ID NO: 13179 - DNA, 588 bp, Gossypium hirsutum
  unsure (1)..(588): unsure at all n locations; Clone ID: LIB3829-009-Q6-K6-G2
gcaaaattcaaagtctccacttcgacccaacaatgggaaacaatctcactccaatgaccaagaagtctgcaatggacatantctgaaataaagagatcaacaccaaaatcaagtcacaagtcaatcaacttcacccatgcaaaagaattcagtaaatttacttccactatcatcagaaagattgatggttcaagaattgattcaaattctaaagcatctaaagaatgtcctacacctttaaggactccgaaccaggtgtctataagtggaaaactgaaaaaatcctcggccaccccttggtctgaaaaccgaagtgctagaacaccacttaattcctctgccagtgtcagcaaaacagctcgtggaaaatggaactttcttcctacagattgttcaaagattttgagtgcctgcagaaacaaatcacagtcacctggtatatttgcatctttcaacttgagaactgaagaaagagctgctagaagaaaacagaggcttgaagagaaattcaatgttattcaggagcaaaaagtacaacagcaaacaacactcaaggaaaaagcagggactgaattcaagaaactacga

SEQ ID NO: 13180 - DNA, 571 bp, Gossypium hirsutum
  Clone ID: LIB3829-009-Q6-K6-G3
ggattcaaacccaacccaaccaaacagtgctaaacctaatgctgataggcaaagtggtacgagttatcagcagcatagtctcccacttgaagcaactgattggcaatgtcggggatttaggtctatgcaggaatctcgtagaattgatgaagctggccatggatatagtgaggaagaaacaatgcagttgttgagccaaactcacattcactctccagctgtctcagttaagtgtaatgaaatgcaaagatatggacagatgaggagacctggaggcaacagtaacatgtttcacattgttcctcaacacattaatccatcaccttatcagattcatattccaagaagcagcaatggagggcgaattgggagtgatctttcattatcaactagtgatcaacagtggcaatcaggtcctcaccaccagttgtttggaaattctgcagcatcatcaggattcccatcgcagatcagaccttcccaaacatggcttcaccaaaatggcttccattcactcatctaattcttcactaattaaaattctttacatgcctttctcatatatcatcct

SEQ ID NO: 13181 - DNA, 428 bp, Gossypium hirsutum
  Clone ID: LIB3829-009-Q6-K6-G4
gaaaaagtcttgctgtggtggaaactgcggttgcggctccggttgcaagtgcggcagcggctgcggcggttgcaagatgtaccctgagatgaactttgctgagcaaaccacaaccgggacacttgttcttggcgtggcaccccggaaagtgcactttgatggagctgaaatggaaactggggctgaaaatggctgcaaatgtggagataactgcacttgcaacccttgcaattgtaaatgagaaaaaaaagctaagcatattatggaagctgatctaaataatatatgatgtatttgggtttttactattagaataaagcagctatggttcattaggtgttttgcttcttgtatccatggttgcttggtttgtgtatgtgtgtgtgtatatagtgaaatgaaattattttaactagctttgttgtgtt

SEQ ID NO: 13182 - DNA, 580 bp, Gossypium hirsutum
  Clone ID: LIB3829-009-Q6-K6-G5
cttcttcaagtctcccttctatctttgcaaactgtcctcaaagtcatatgtttgaaccgggtgcttttaccttaatcaaccgtttcgggacttttgtctataaaggaactgtgtttgctgctgttggactggctgctggacttgtcgggactgcaatctcaaacgggttgatcacgatgatggaaaaaaatggatcccacctttgaaacacccaacaagcctcctcctaccttgttgaatgccatcacctgggccattcacatgggtgttagcagcaattttaggtatcaaaccttgaatgggatcgagtttgtgttggaaaagggacttcccccccttgcatttaagtcatcagtggtggtcctgagatgcttaaataacgtaattggaggaatgtcatttgtaatactagcaaggatgactgggtctcagagtgttgaacagaagccagcaaacatagacaaggagaaggagatgttgatggatggtggtgtcaatatggagaacaatcagtcgacttttaagtgatttttaccctttttttgtttttttctcgtccttggctgttttttggcatttt

SEQ ID NO: 13183 - DNA, 576 bp, Gossypium hirsutum
  unsure (1)..(576): unsure at all n locations; Clone ID: LIB3829-009-Q6-K6-G6
cgnacatctaaanaaaatactattgaagaattagtaatgcttcaaaggctgtngaagtaaggaccatcagctgngaaaagcagccatcgggggtccatttagtcttgtaaatcatgacggtaaacgtgttactgagaaagactttaaggggaagtggactttggtttattttggcttcactcactgtccagatatctgcccagatgagctgctaaagctagctgctgctattgacaaaataaaggaaaaggctggaatagacattgtgcccgtatttatctctgttgatcctgaaagagatactgttgagcaagtacgtgaatatgtgaaagagtttcatccaaaattagtaggtttaactggtacaccggacgagataaagaaagttgctcgtgcatatcgagtttattatatgaagacggcagaggaagattcagattaccttgttgatcattccatagtcatgtacttgatggatccaaaaatggaatttgtgaagtttttcgggaagaataatgatgtcaattcactaaccgacggtgtaatcaaagagataagtcaacaaaaaaaatagag

SEQ ID NO: 13184 - DNA, 585 bp, Gossypium hirsutum
  Clone ID: LIB3829-009-Q6-K6-G7
cacagcagtcttgatttggtttccagttagactctgagaagaagagaggcagtgaactagacggcggcgttgaaggacggagcaaatgtctaaggacaacgagaggcagcaatttcttccgtcggatcttgagttcgtttccaacaaggcacggaactgtaacgccatgggatctggctcgggtcacccggagttccagtcgacgtactcggaccaggttctggagaacgtgttggagaacatttttagggtttaagaaacttgttctcgtttgctgcgatgggtttggaattggaactagtggccttgctattttcgttaacaagtgcagcaattaattggggacaaatattggaattagcccttaaacaacttagttgacagagtggtggcctgggtgtgtgtgctctatcatcatctcttttataccatccattgaagcctctcgtctaatctgcatagaagccacaaccaaataaagacaaagcaggttgcaggttactgttaaatagtagaaagtccagagggaatagtgctttgaggattcgtgaaaccaatgttagttcgtggtaactgactcttcaa

SEQ ID NO: 13185 - DNA, 572 bp, Gossypium hirsutum
  Clone ID: LIB3829-009-Q6-K6-G9
ccaaaactctcatgtcgtgtctctcccttctatggcaacaagagttctctcatcatcaccgaagctcctcaacaacctccgctccttcatcaagcctctcaactccgcctctgctgcttccgcctcacccctcaatttcgacgaaaaacctgagctttccaccgtcgagaaacagcacccaattgcaacaactcttcatcaaccaaccacaacccttgaccttgatgaccaccagaagcttttcgcttcggttccgacgttgaagcttttacgttcgtcggtcaatctcgggttggcttccaatgagacgttcgtcgatttcgggatgtgggttatgaattccaggcttatggaaacgcctctgctacgtgacatcgtattgaaaaccgtcaaacacaccttcttcgaacatttctgcgccggtgaaacaacgacggaggccggcgagtgcgtgaggaaaatccaggaggctggtctgcgagggatgcttgtttacgccgtcgaacacaccagcgataacgccggatgtgaccggaatttggagggcttttcacagagtgtcgagttcgcca

SEQ ID NO: 13186 - DNA, 553 bp, Gossypium hirsutum
  Clone ID: LIB3829-009-Q6-K6-H1
cttttgcatgaggagttcaaacaagtcaattaccttgaatagatgcaagaagtgaagcatctgtcctcgacctgtcccacttcattcctaaagcgcccgcatccccttctatctccaatgttattaacattggacaactcttgcaatcggcactcgaggtggctggtcaagttgcagcaacatcagtctctacatcacctctcccgtacgataccatggctagccaatgtgaagcattcggcacaggtacaaggaagaagctctccaactggttggcccatgaaaatcatcaaaatgaagctgctgataaaactatactgacaaccgctgctgctgatagacacacgatgatgctgaagaagagttcaaacgggaatgcttttaacggtgctgtctcgcagctcgacccatgcttgtcaatgaggttgcctcctgctagcccgttcgacaatttccttaaagcagccagacattaaacaaggatattgtagttgtttttatgttgtaaagttgtaggaagtaactagattgtagtaacccttaggttttgaaa

SEQ ID NO: 13187 - DNA, 557 bp, Gossypium hirsutum
  unsure (1)..(557): unsure at all n locations; Clone ID: LIB3829-009-Q6-K6-H10
tttggtcacacacctgtcttgaatcttttccaaagaatccaaactgtctctcaagtttaaattgaagaaacctgatcttgataatcagaattctaaggttcatcctgtggaagaaaaaattctataaagggccaaaggtcaaaaaggcagagaccatcaacctttgtgngaaaaatcgttgtttaatgtagatgaagatcttgatgtcacacacacgcatcaaaacagcataatggatggcatgatggatgctaattggatattaaagaagttgggtaaagatgcaattggaaagaaagttgagattcatcacgcctctgacaattcatggcataaaggagctgttcatgacatcattgaaggcacatccacagtatctgtgatgctagatgatggtagagtaaaaagcttggaacttgggaagcaaggcattcgttttgttcttcaaaaacaaaagagaagcaaattttgaaactgaacggtctaatctaattctttgtgagtggattgtggagatttttccatttctggatgtggcggtgctcaggcagttgctg

SEQ ID NO: 13188 - DNA, 570 bp, Gossypium hirsutum
  Clone ID: LIB3829-009-Q6-K6-H11
cgactgctccgttctttgtagcaaagcaaatttgtgaagcatggccgtcgggaagaacagagatttccagggaaagaaggaggaaagaagaagcagcggatccttttgctaagaaggattggtacgatatcaaggctccttcagttttcactaccagaatgtggggaaaactctcgtctcccgtactcagggtaccaagattgcttctgaaggactcaaacaccgtgtgtttgaggttttccttgctgatcttcaaggtggtgatgaggatcatgcttacagaaagattcgtttgagagctgaagatgttcataggaaaaaatgttttgaccaacttttggggaatgaattttacaactgacaggctgaggtctttggtccgtaaatggcaaaccctgattgaagctcatgttgatgtgaagacaactgacaattacactttgagattgttctgcattggattcactaagagacgcccgaaccaggttaaaaggacttgttatgctcagtccagccagattagacagatacgccgaaagatgagggaaataatgacttcccaggcaacat

SEQ ID NO: 13189 - DNA, 571 bp, Gossypium hirsutum
  Clone ID: LIB3829-009-Q6-K6-H12
ctttttcctttgttctttcctcaaaatttttaatttttttttgccctactttgtggggtttcagtattctttcttctcaacaagttctgatgcattcaagctttcaaggattatacttggtctgcgtttttctagcgttttctattgttgggttttgcgttttggggttaaaggcttttgagaaacgttttttctttcaaattcaaccatgcctgctcttgttaattacagtggtgatgatgatttctataatggagggtccttttatacaaattctacagacttgggtagattgtgttcaatcagttcccaagttgatgtgtactgcccgcctcgtaaaagaacgcgtattagtgccccatttcacttcggagaagctgaggttgagcagaataagcaaccatcgatcgatgtcctccctgatgaatgccttgttgagatctttaaacgcatttctgggggtaaagaaaggagctcctgtgcttgtgtctctaagcactggcttatgcttctgaccagcattcgcaagggtgaatatgagtcatcaaaggtggtcaaggagaactttggt

SEQ ID NO: 13190 - DNA, 579 bp, Gossypium hirsutum
  unsure (1)..(579): unsure at all n locations; Clone ID: LIB3829-009-Q6-K6-H2
tgnaaaaccaaccaaatcaaaaaaaaaaaaaactttcttcgatttgattgatccatagatctacatgaagtttctagcttttttcaattcccagatctttctttcaagtatgaactgaagtggtcaaatttaaaagcaaggagcaggtacggtggtacggttatgactttttaagacaatgctgagaaaaacaagtgtttttagtgttgtgttgaagcaaaaaaggaggatattcggttcggttttcggttttttagggtctagtttttaaatgagaatttggaggtttttgtggatgaaatgagggatgttatcagggttaatgaatttgttgatggcttgttttttaccgagatctgatagacacgttcacacgagttccgaaaccggaggtcgacaagatggtcttttatggtacaaagattcagggcagcatttcaatgggtgagttctcatatggcagtggttcaagccaacaatttgcttgaagaccaaagccagctcgagtccggttgtttgagtttacacgagtcaggtccgtatggtacttttgttgggtgtatatgatgggacacgttg

SEQ ID NO: 13191 - DNA, 566 bp, Gossypium hirsutum
  Clone ID: LIB3829-009-Q6-K6-H3
tccgtgggaatgtaggcaaaaagttggaacatcattgaataatatcgacctgccgtgtcggtgttgagaagttactcatctgctgcaaaacagatgactgtaagagaggcattaaactctgctctcgatgaggagatgtcagctgattcgaaagtctttttgatgggtgaagaggtcggagaatatcagggtgcatacaagataaccaagggcttcttgataagtacggacccgagagggttcttgatactccgattactgaggctggttttaccggaattgcggttggtgctgcttactatggtgtaaagcctgttgtggagttcatgacatttaacttctccatgcaggcaatcgaccacattattaactctgccgcaaagacaaattacatgtcttctggccggatatccgtacccattgtttttagaggtcctaatggtgctgcagccggtgtcggtgcccaacactctcagtgttatgccgcatggtacgcttcttgtcctgggttgaaagtgctggcaccgtacagttctgaagatgctcgtggacttctcaaagctggt

SEQ ID NO: 13192 - DNA, 552 bp, Gossypium hirsutum
  Clone ID: LIB3829-009-Q6-K6-H4
ggcttcttcccaaatgtagatttggaaaccatggcagagacgacaaagcaaagtatattggaagacaattatgctactgcgtacttccacaagacttctgtttttgaaaaccatggtgaaggtgacaaattaaagagtttggaagacaaatattccacggcttactttcacaaaacaatatcttccaaaatgatgaaggatcacaacatggaacatcaccacctttaccataaccatgttgaaagtgcagagataggcttgttcaccattgatgaactacatacctttcacgtagggaagaaattacccatctttttccctgtaaaaaaccactctctttaccctcctctattgcctaaacaaattgctgacaccatccctttttcatcttcccaagcttctaatattctacgattcttctcagtttctccggactcccccaaaggcaaagctgttcaagatacactcacaaaatgcgaactcggagcagctcaaggggagaccaaaatctgtgctacctcttttgaatctttacacggttttctaagcaat

SEQ ID NO: 13193 - DNA, 569 bp, Gossypium hirsutum
  Clone ID: LIB3829-009-Q6-K6-H5
gttttgggtttctttgtgggtcttatgatgctgggtttggctagctcagctgagtttcatgagctttttcaacctggttgggcaaacgatcatttcatctatgaaggagagcttcttaagctcaaacttgataacttttctggtgctgggtttgcatcaaaaagcaggtatttgtttggaaaagtatccatgcagattaaacttgtagagggtgactctgctgggactgtcactgcttactatatgtcatcggagggtccataccacaatgagttcgacttcgagttcctgggcaataccacaggtgaaccttaccttctccagaccaatgtgtacgtgaatggtgtagggaacagagagcaaagaatgaacctttggtttgaccccaccaaggacttccactcttacactctcctttggaaccagcgccaagttgtatttctagtggatgagacaccaataagagtgcacaccaacatggaacacaaaggaattccttttcccaaagaccaagccatgggtgtatatagctcaatctggaatgctgatgattgggccacacagggtgg

SEQ ID NO: 13194 - DNA, 572 bp, Gossypium hirsutum
  unsure (1)..(572): unsure at all n locations; Clone ID: LIB3829-009-Q6-K6-H6
ctggnagtggcaatggcgacagtgaggtacagagaacaatgttggagcttctcaaccagcttgatggatttgaagcatctaacagatcaggttctgatggccaccaatcggattgatatcttggatcaagctcttcttaggccaggacgaattgacaggaagattgaatttccaaatcctaatgaggagtctcgtttcgacatcttaaaaatacattctagaagaatgaatttgatgagagggattgatctaaagaagattgctgagaagatgaacggtgcttctggtgcagagcttaaggctgtgtgcacagaatcaggaatgtttgctttgagggaaaggagagtccacgtaacacaagaagattttgagatggcggtggcgaaagtaatgaagaaggagagcgagaagaacatgtccttacggaagctatggaagtgattatgttttattatttattgtgctttcgcggttttggggtaaattcaaacatggaaacccgatttaatatatgaacaatgtatagaatattatattatttgcctggctagtactacacacgtctactttta

SEQ ID NO: 13195 - DNA, 559 bp, Gossypium hirsutum
  Clone ID: LIB3829-009-Q6-K6-H7
gtttacatttcaaattttgtttagattgagctgccctttgtcaaattacttctcgcattactccgttaagaatattatcttttcgctcgttcgtaactgcgacaactaatcgctgaatccttctcttatacgttggaaagttaatatggaaaaccaacacccttgcggtacccgaacagaaactaaaggaatagaccaaaggttggagaggttagagcagatgcaaatacagatgctagagcaattgaccaaatttcaacaagatatgaaggatcagatgctaaaagtccaaagaaatctgatgagccagttaacccagttattggataaagggttagaaaaaggaaaaaaccaaacggtctactttagagatgataatgaagaccctgctcattttccaaactttaccccaacaaacatccaagcacaaccgaatacatatccacaaagggtaactgttaacattcgaccacaataccagactagtacctcgacatcggtgaatttcgcgacaggctcaggttccaaccttaagggcaatttaactaatcccgttgtc

SEQ ID NO: 13196 - DNA, 469 bp, Gossypium hirsutum
  Clone ID: LIB3829-009-Q6-K6-H8
ggcttaaagcaacagcattaggtttctgtttgtttgggccttgtttgggtttatttttgggcctgtgttttagatgtaaatgggtcttgggtttgggagctttgggcccaggcataaatttggtcctacagcccttttttgtaagagtttgaattcagcacactaacttcattcttgaaaaaaaaaaaaaaaaaaaaaaaaaaaaaaaaaaaaaaaaaaaaaaaaaaaaaaaaaaaaaaaaaaaaaaaaaaaaaaaaaaaaaaaaaaaaaaaaaaaaaaatataaaaaaaaacaaaattaaattaaatagcccattgaattaacaaagccaatgattgaaaaaaacgctggggttaccaaacttaattgcctggcaaaaacatttggctttcccaagttggtttactagcaaagaggcccgctttgatcgcccttccaaacagttgacctgcctgaatggagaatggta

SEQ ID NO: 13197 - DNA, 462 bp, Gossypium hirsutum
  unsure (1)..(462): unsure at all n locations; Clone ID: LIB3829-009-Q6-K6-H9
cgcaatggnagccgtagacagtcatagtgaaatccaatccacgaaataatttgatctatggacagcatcgttgtggtaaaggtcgtaatgccagaggaatcattaccgcaaggcatagagggggaggtcataagcgtctataccgtaaaattgattttcgacgaaatgaaaaagacatatatggtagaatcgtaaccatagaatacgaccctaatcgaaatgcatacatttgtctcatacactatggggatggtgagaagagatatattttacatcccagaggggctataattggagataccattgtttctggtacagaagttcctataaaaatgggaaatgccctacctttgagtgcggtttgaactattgatttacgtaattggaaggaaccaattaggtttacgaccaaacctaaaaatcgatcactgatccaatttgagtacctctacaggatagacc

SEQ ID NO: 13198 - DNA, 393 bp, Gossypium hirsutum
  Clone ID: LIB3829-009-Q6-N6-A2
aatggcattaatggaactgcagtggacaaggctaccaggagaagacctagtcaagttaggagagtgaagcacaaacatagacttacttcctccttgaagaacatatacaactttgactcgtaatgaagctgtggatgcttggtctttgcagattccagtttgacagcaacttcctctttagtttgcacatttaccccttcaacagaaacccccaaaaagattagggaaaagaaaagcacaaggctgacaaagaattaaagaaacaatacatattttccattaataagaaaagggaagaaagccatcacagggctttggggataccatacctaaataaagctctccaaaagagccactgccaatctttcttccaagcttgaacttaccaccaat

SEQ ID NO: 13199 - DNA, 512 bp, Gossypium hirsutum
  Clone ID: LIB3829-009-Q6-N6-A4
ctgttattatatttcaaattgtaataataataacatggcagtacatcctttctcattgctatttcattcattacctctcatatcatatgcatatgcatatatataaatttaatcaaatttcaaacccaaaaaaagaaattaaaggaaattgtaagaaaagcagactcatatggtagcagacagcagataagataaaccagacatagaatcaatgtgaagaagctccaattaagcatggaccttgtcccacttcagtggcttgacaacctcccaagtgaaatctgtgtcatcccgaccaaaatgaccatacgcagcagtcttcaagaacctgctattgccccctctcttaagatcaagattgatggcaatcattcctggtctgaagtcaaaggtctccttcacaatcttgagaatttccttgtctgggatctttccagtaccgtaagtgtccacaaatacagacaatggctcaggtacaccaatggcgtaggagacttgcacgatgcacctac

SEQ ID NO: 13200 - DNA, 507 bp, Gossypium hirsutum
  unsure (1)..(507): unsure at all n locations; Clone ID: LIB3829-009-Q6-N6-A5
aacctcaaggcagnaaacaggagagatattggctttcaacaacatgaaagtaacagaccaactaatgcagtatgatgagctagcttgactcacaatacgtaaacatgtaatgatcttacattaaatgaaaataggtaagtaaaatttgaagctttctaataagatcttaaaaagaaaatacttagttcaggaccaggtgcaccatctgggttaatcatgtgtagagcttccgagtcctttgaacccaccaccctctcaaatcttgctctcatgtaggttaattctccatcgctactttccttgtgatttagggttggaaggacgcctgcaccggttgacacccctcgcaaaagctgcgtaacatgaagctcatcgtcacacaaatgtttcttcctgatagagtaacccatctttcttccattacagtacactgcccatacaaactcctccaacagtttctttttatgagtcttggtctcactctctagtgctatcctgaccatgtca

SEQ ID NO: 13201 - DNA, 447 bp, Gossypium hirsutum
  Clone ID: LIB3829-009-Q6-N6-A6
caacaaaaaaaaaggctttcctttgttcatccgctaataccatattaagaaagctttagtgtacgatcttttgccttgaaccttcaatatctttttcctatctcaggaaactgctagggctgggacttttttttataaacaaaaaggtggcggagcgaagagagggctaaccaagacgcccatagtactgcgcacgatatttggcaaggcttcaaatgctcatttagtgagcattcttatctcttagataatatgtcctgaggttgcgtgtctggccatcaaaaatcttgcccttcactattagctggcttaactggaggctcccaatagggactaaaccgggacatcctttgatagctgcaatctatttatgctctgtctccagaaacccttcctttgaaatactcttatgttacccccaaaccaactgagctcattaattggaat

SEQ ID NO: 13202 - DNA, 538 bp, Gossypium hirsutum
  Clone ID: LIB3829-009-Q6-N6-A7
ggccgccctggggggggggtttttttttttttttttttttttttttttttttttttttttttttttttttttggggataaattccccgcccaatttgagaaaagaagttgagataaattttgaaaaaaaaatcatagttgtagccctttgtaccatgggggggggggccgattttattacccctattggggggggtccgaaaagtaccgctaaaataatattaaacttttagttttttggcgatcttgaacccttcaggggggaaagaaccccccatgtcaaccctttcataaggatgggccccaaaataatctcgttgagcttgaaccaaattagcccggactccttcccccctataagggtccaaataggcaaaactggctgacctgcccggagggctaatacccgagttgatagcaagacaaacaacttttttccaaacaaattgcctgtcaaagatttcctttgcaaattctgggtccacaaaaagggttgcaagggcaaaatttctatcataagccttcttgattctgtccac

SEQ ID NO: 13203 - DNA, 499 bp, Gossypium hirsutum
  Clone ID: LIB3829-009-Q6-N6-A8
ggggtctgagctgggtggactattttgcgttcattttagcaaccaaacacctttagaaatagctttaacctctagggggtgtcccacttcatgggtgagaattaacaaacgagaaatgaggcaggccaacggggaataatgaagctccaatgggggaatgagaaggtgaggggcagtacatcaactgtgaactaaaagagacccagacaacaaccctttaaaaggacaaaggggagataaggtaaaagagagctcaaacagaggaggtgttatttttcctttgggggggggttctttgcgggctcagcccgttccttctctgcgtcaatctcagcggcgatggggtcaatttcagcttcttcaagcggcgcgggaccatgcgtccttctcatcacagcaacttcaatattctttcccccactctcaacaacctcaagcaaagccccaattgcgagcttaatgggttcttgggcagaggggtccttatagggcttctcta

SEQ ID NO: 13204 - DNA, 538 bp, Gossypium hirsutum
  Clone ID: LIB3829-009-Q6-N6-A9
gctgggggggggggtgtttttttttttttttttttctttttaatcaaacaggcgaatttctattattctggggatcaaatatcaagaaaacttcaattcgggcaaaatctaccttcagccaaaccagaggggcccaataaaccaaatgccttcggggggggggagtccacactttaacaggaaaaccataatgcgtaaatgagggttcaggtttcatttcattatgcttacaatcccatttcaccatcactttattgaccccgaggaaaataaacagaggacattccagaacagcatctgggccccccccccataagcggagaagcttcttcaggctaatgcttgtctccatgggcctgagaatgggcatcatggccctcccaagggggtggccaacccaacactacgggaccatcctgcttagccctgtgcaggacccaaaaccacatgacagcgcacaagcccttgccgggggggacctgccatctctttggggggggcaaatttacacctttgtaaggtgtgctccctccatggc

SEQ ID NO: 13205 - DNA, 530 bp, Gossypium hirsutum
  Clone ID: LIB3829-009-Q6-N6-B1
gcaacttcagtgataatacaccaagtataaatcagttgttgtcaatctataagtatatcattatttcaagtatcataatcatcaccagtacttgaacaaacaacagctgatatttgggccaaaaaagcaatggcataacaatgaatccgaatgtgtactcgaaacacgagtaaaaatccatgaaatttctcaatttttgggggggtccctgtttgcaaaagaaccaatgttcatgtgtaaatcaccttatacgaatctcatccgtaacgagagtttcgtcatgaaagtactttcttaacttcatccgtaacctctttctgaggcttttccgcgtgaagctttgcgactattcccttctcggaataataatcaatcaccggttgggtttgcttgtgaaatgcatcaagccttgacttgagaactgctgcagtatcatcttttcgctgcaccaaaggttccccggtcacatcatcaaggccaggaactttaggaggtgcaaatttcgtatgataggtcctaccactagcagg

SEQ ID NO: 13206 - DNA, 443 bp, Gossypium hirsutum
  unsure (1)..(443): unsure at all n locations; Clone ID: LIB3829-009-Q6-N6-B10
ttaaatcaaaaacatgcaaaaaccataaataatttatgtgtttagcggagtactggagaaataagagacaaaagcgataataaaaggggtaaattcttcagcaaccactttttttttctttgcgtcaaacctcagcactgggggggggtcaatgcgtacccaaaggacaaaaatgtgggggcaacaggaccatccttgtggtaaggaaataccaaacatccatcatggggcgtgcgctctccgatgaaaaattgagggggcttcaattttgaaaggaaaaacttggttgcgccctcaatgtgtttgttgagggagtcttgcgtttccggatccagtgtcggggtgaaggtcttgaggaacttcttcatgagacacgagaaactggtttttgtggaaagggggtgggtnctgaaggctgagagtgtgaacaatgtgaacaacct

SEQ ID NO: 13207 - DNA, 510 bp, Gossypium hirsutum
  unsure (1)..(510): unsure at all n locations; Clone ID: LIB3829-009-Q6-N6-B11
aattcaaaaaccttctcagaaaagaaggctgcaggagtccttcctgttctattggggcagatacctcaccaggatttttttatttggggggggcaggggtcangcgagattctcagtgcccagtgcctataaactattacaagtgtatgagggggattcctagagcttatgctttacagaccatctataggagatttttataaaaaaactctgggtccttcatataccagagagagataaagattacagtgttgggaaattttcaaggagctatctgcctacaaagacaaatatgcgaagcagaaaccttgcaaattgcacaaattggcctccatgtgggaaagggggtnagactattgaccatttattcccagagtgccctgtgtcaatgggggtgtggacagcgttatccattcagaataatattagtgggtcaaaacatggattttataaagtgggttacatgggggttttgagcaggtcaatccttgcgaaatgtgcatcttttct

SEQ ID NO: 13208 - DNA, 525 bp, Gossypium hirsutum
  Clone ID: LIB3829-009-Q6-N6-B2
ggcaaaaatagattgcattaacttgcaaggaccataaaagagcatacataagctctaaaattttacaatatttaattactattttttttagtacaaataagaaagattagcaacttggataatcataattcaaaatacttaataaaaaacacaatatcaaccattacaataacccccttgcttgcttaccctatacaaaaaaaaaaagagcttaagcttctttttttttttagaattttcagatttcttcttcttcctttttaacctttttagaggctatattcacaatgaagaaatctcaaaatagattaaaagttaattaaataaaaaaaaaaattttagtttcacttttagtttaccaagtccgaaacccaattcaaatccggacctccggaagattgatccgggttaacccgctccaatgaattttctttactcagtttctcgaacatctttgcacgtaaatcacgtccggattccacccgttccattaccggttcttcttcacacactttatcccatgaa

SEQ ID NO: 13209 - DNA, 518 bp, Gossypium hirsutum
  Clone ID: LIB3829-009-Q6-N6-B3
cagttaaaaatttacttatgatgatgaacacgaagtataatttacacgtctcagctatcaaatactctagataataatacccgcaaggtgcagatatggaaaccattgtattgaaaccacgaaagcctgggatcgaggaacatacactacgttaatggtaaatctaattgcaattgtacaaaacgaaccgccccagaataaactcaatggcagcacacatttcccattagctgatcctctacaaggtcataaatggctcggtctccttttacctgcatctgttctcaactttttcacaggattggcccaactaacactcgcaccgttcggcagatgagcaggctggtgccaactttgctgatgggcagtctgctgggtcaatctagcagcatccttagaaaatgatcctgttgttggactcttgatgctgcgtgctatacttgggggtgaaacagggccagccaatcctgtcctgggcttcaccatagacttttccctgtctttcctcttcttcttgc

SEQ ID NO: 13210 - DNA, 510 bp, Gossypium hirsutum
  Clone ID: LIB3829-009-Q6-N6-B4
aaataacccaccttggaaagtcaaattttatgaaaaaaaaaaaggaaaaataagcctatacaagcaggacatatacccttagcctttatgtgctgaggctgattgattcttacataatatgcctccactgcttctataaattgattcccttttctcaatatctatttttttaaaaataaaatcatgcggggggaacaaacattacctagacttcacccctattaggggaagctccaaggcttttgtttgaagcaaattcactatttcttctgagggagtagctagggctatttgatccatcatcagtacttcgattagaggttctctccatttgccttcttttggaccgacttttaacctccttttccttttcatcaacaaaggaaaggaatgtctgaatgcgtgcaaatcgagagctttggcctgaaagatcggattcctcaaagtagtgacggttgaactgccttaccattttcaagaaatacagaaagagagctatcaagcaagcta

SEQ ID NO: 13211 - DNA, 520 bp, Gossypium hirsutum
  Clone ID: LIB3829-009-Q6-N6-B5
aaaacaaaacatcaaaaccacaaataatttatgtctttagcagagtactgaaaacaagagacaaaagcaataataaaaaggactaaattcttcagcaaccactttttttttctttgcttcaaacctcagcacttgacctccttcaatgcatatgcaaagtacaaaaatgttgggtcaacagcaccatccttgtagtaagcaaacaccaagcatccatcatcatgcatgctctctcctacgaaaaattgaaggtccttcaattttgaaagcaaaaacttggttgctccctcaatgtttttcttgaaggactcttgcttttccgcatccagttttggtgtcaagttcttgatgaacttcttgatgaacacgacaaactgcttcttgtcgaaagggggttgctcctgaagcctgaaagtgtcaacaatgtcaacaaccttcacagcttggtcatcaacaccttcatcctcatcagcaccttcggctgaaggattggcaccaatgtcaacatcgacagctcctt

SEQ ID NO: 13212 - DNA, 510 bp, Gossypium hirsutum
  Clone ID: LIB3829-009-Q6-N6-B6
caaaaaagaaaagtctgattgaaaaattagctagcaagctacctaaatctcagaaattaattccagaagcataacatcaatcaacagctaaaagagagttaaccataagattgaagaacagtaacaattaatcaagaaagagcttactgcctctaatcctaattggagcctttatctttgctgtctttgctatctttgggttcattagcaacagcatcagtgaccaaagccattggcctttgatcaattacttcatcaatcaacccaaactctttagcctcttcaggggtcataaaataatccctatccatattcttctgaattatatcaattgattgtcctgtatgcttgcaatacaaagcattcaatgaatcccaaacgcgaacaatctgcttagtgtgaatggtcatatctttagcctgcccactgtatccaccagaaggctggtgaatcatgatggtggcactggggagggaccgcctttcaccctttgctcccgcagctaaaagg

SEQ ID NO: 13213 - DNA, 511 bp, Gossypium hirsutum
  Clone ID: LIB3829-009-Q6-N6-B7
ggacagaatcgggtaaaatcatcactaattctaaggtttctttccacatatcaaagtggcactcgcctcaaaaaaacaatctgtgataatgcctccaaaaaactgctccaaagttacgagagagagggtaaaattgtcagcacttgaatgttcaaacaatgcgcctgacagatccaaatcaccgggaatgcaaagattaatcggtccctcagaaaaaactttctagcttctaattcaaaatcttaaaatccaagctgaatggcgcccaaattaaatggcttcctggaacctaatgagccaattccaaagactcaagagagaaacaagtttgaaaaactctccaggatttagctggcaccctgtgttatgaatagtgcttgcgattaatgaaatcacaaaaatgaagttcgagaagctcaaaagctaaaggggttaaagatggcatcttataaacagttcatcaccctagacaaaagtttcggttttacactgcatcaaccaactgcttttg

SEQ ID NO: 13214 - DNA, 526 bp, Gossypium hirsutum
  Clone ID: LIB3829-009-Q6-N6-B8
gtacagataatcgatacacccagcaaatgtatttataaagcaagcttctgtttacaaagttcaaaagtagataaactatcaaattggattaggcagggaatcgctacaaccaactgtttatagaacagtaacaactaccatagatgccgggtagaactcattattagcggcatttctcccccctcccaaacagtagcagcgaagcatagcagaaccagaaatgtaaatgaaataattcatccttcatgaattatatcataggaagaagcagcagtcctccaacacacagcagcaacatagagcagccaaacagccttgcaagaaagagaaacagccagaatcagactggttctggtaatggtaagggtcatagtggtggtagtgttgatattgaggatgaggttgagggggcggaggaggtggatacccttcagcaaaatagccttggtaaccgtcgtagggctggcgaggcggcggaggaggataggcaggatatccagttggcggaggaggatagccttcgtaa

SEQ ID NO: 13215 - DNA, 523 bp, Gossypium hirsutum
  Clone ID: LIB3829-009-Q6-N6-C1
aaaacgtgtaatttaataagggattgaagcacctccattgaaataacactcaaactcgcaatcaaagaaaacaaagtcataaaagagtggagcattgaaaatgcatttatgagtttttctttttcgttcttttatcccacaccgtgcattcactcatttcagcagtgtcttgactattgatttgacgttaagcttcttcaggtctgtatatgactggccacacccgacaaacatcaccggtgctcccgatatgtacaccattgacaacgccgctccaaccttatcatcaatagtgtcaaatttggtgagcagaatcccatctatcaatctaggagtaggagaagtagagaggtcagccaatttctgattgaattttgataactggtcaacagcatcatttccaactagtgcctctcccacaaataagactagatctggattgttgaggtatataagctttgagagggctctcattagtggttcattatcctgcatccgaccagcagtatcgacgagaacaaca

SEQ ID NO: 13216 - DNA, 518 bp, Gossypium hirsutum
  unsure (1)..(518): unsure at all n locations; Clone ID: LIB3829-009-Q6-N6-C10
aagcgtataaaaattcccatacattatggggtattagtgatagaaaccagtggcgaatatcagactaatatataatctaatatgcgcacaagggagggggcaaagcgcacaaaatcaatgcgccctactccaccttcatcatcaatacaaaaggggggattaaatcaacacgaggggggggcgctattacataagagggtaacataattatcaagcctaagagaagagagcccattgaagcataaacaacttcagagcctnagctacccggagagggggcctttacttcctcatttgctcctcctgagagagcggccggggcacctgcgattgcggacggggccatacctggggcaccangaggactgaaagacaatgcgcattaagtgggcaaaaggagcanagactttccaagcatcaggcgaaaggatggggcttngggacattcaaagtgacacccagagaaggactggtcttaaaagcctcacacaaggattggggggccagctttcaacaca

SEQ ID NO: 13217 - DNA, 306 bp, Gossypium hirsutum
  unsure (1)..(306): unsure at all n locations; Clone ID: LIB3829-009-Q6-N6-C11
aaaaaaatgaaattaactagaggcgaaattgagccctaatgcgaattaatctaaatacaaagtgtgagaattaactaaaatgagataaatgagatgagtttagcagcggaaatacaacttcaacaatcaataacgtgagataggcgagggagaattacataatcaatttcctgagtttctggggcggggggggcattcggggcaactgggggcaactcatgggcattctccactaacctttcaagatcatggggtgtgatgcaaccttnagcatattggggccttcagggtgcttttgagttaact

SEQ ID NO: 13218 - DNA, 505 bp, Gossypium hirsutum
  Clone ID: LIB3829-009-Q6-N6-C2
agttgtcaaaaaaaaaattttaaaaaaaaatacaatgcttcacctttaaacatgcaacaaatgcccaaaaccaacatctaatctaaaagacagctgcagcatactgccctacataacaactgaagcgctaaagcagcatttggtgtcctaccaattgtaccaagaaaactcctcattgttctgcgtctcgagcccctcttaacaaatgcataaaaacaccaaaaacttacttcacatattacacttaataatgtatctattaagatcgtcgtttacgatcatcatcttcttcttcatcagaatcaccgctctctcggaaacgtggattcttctccggtctagcgtcatggtcagaggctctcctggattcatgatccgagtttctctttgaggactcacgtgcatagtggtcatcatctcggtgtcgcttccgatggtaatctctcccatgacgataagaaccaccatgaccatgggcccccaccatgcctaccataatgagggg

SEQ ID NO: 13219 - DNA, 536 bp, Gossypium hirsutum
  Clone ID: LIB3829-009-Q6-N6-C3
ataatgactattcaaattcttatataattacaaataatacaacattatttatagcaactcgacaattacggataagtacaattatttaacattgcaagagatgattaaatgagccttttcttcacccattccacttgtatctaatacatcaccacatacgttgggcgggaatcagcaaccatatttctcaatagcttgattttaacccccttaaaatatcgtaggtatatccaacactgcaaattacaaacacgtttctcaatgtcatgtgttgattttggcaataacaaaaatctaggaatcaaatttattttaatcttgaactcttgaacactctgttaggaaaaaggaagttgaagaccagctactggattgatacaatgataggtgaaatggagactgtactttacgggttaagttcatagcaaaaagaaaagaaaaagagagaagaaattccaattaaccaagtgtacaattctgtttgatggaagcgaagactacttgctgtgctatagaacagcgaacaaacgattcat

SEQ ID NO: 13220 - DNA, 407 bp, Gossypium hirsutum
  Clone ID: LIB3829-009-Q6-N6-C4
aaaaaggaacccaaaactttattaaaaattggaatccaaaaaaaaaaacaaaaatgggaaacaaaaggatacaagcccccaagggaaattttaaaaaggcaaaaaaaaaaaagccctaaaggtgaaactaccctaaaaaatttttgaccggaaaaattaaaaaccccccaccaaaaatggcggcggcgccattggagccaaattaaaaaatcctgaaaaggaaaaaccaatttaacccccgaaaccggaaaaaagcctaccctgccttttggggggaaaaaaaaaatccatggggggaaccgtttttttcctggggggccaaagggagggaacggggtccgggatcaagttttcaaaaaaaaattaaaacccccacgggcttccccgaaaaaaaaagcactgaaacc

SEQ ID NO: 13221 - DNA, 525 bp, Gossypium hirsutum
  Clone ID: LIB3829-009-Q6-N6-C5
aactcaaataggcaaatcaatattgtttactttccattatctatttcagcaagtatataatatttttcttaatatatgacagcattaccttttcaattatgaaaaattaaaacacagcaataagctgtaactcacgctcagagtcctcagccaagaatatctttgatggttaacttccggcatcttcatcacaatagctactcaactcccacactgaagtcgcaacgataactagaaatcatccatgcttcttcatcacaatagctactcaactctcacactgaagttgcaacgataactagaaatcatccacgcttctaaaactttggcttttactgacttctttgagcgtgaccgattatttattcagtctgaactcacataaattctaaagtgttgcgagcggtgatccagcatcattgaagtaagatgaaagatcagcatctgagtcattatacatgttcaagaaaggcaaatccagcagttcctgtgctgactttctctcgtttgggtctttctttaaac

SEQ ID NO: 13222 - DNA, 509 bp, Gossypium hirsutum
  Clone ID: LIB3829-009-Q6-N6-C6
aaaaaaaaaaaagacatgcctttgttcagacagttaaaatcatattaagaaagcatcagtgaaagttcttttgcctgaagcattcaattcctttttcctctaacaggaaactcctaaaactggaactttttttttaaaataaagggtagggaaaaatttataccaaaccgaattgtctgcgagatattgcagtgcttaaagctcatcatgagcatcttccttggcatcatcgtctgatttggtatcggaatcagactcgtgcccttcagtatcatcggcatcatcttcatcctcagcatcggaatcaactgggtcatcctttgattcctcctctctctttttctctgcctcctcaaacgctgccttttcagcatccttctgcttgccccatgtttcttcagctagtttcttggcatactctacatcatcggcaactaagatgttatcaaacattgttccagattttacctgccacaattcaataccgacatacttcaagttggggaaaa

SEQ ID NO: 13223 - DNA, 493 bp, Gossypium hirsutum
  Clone ID: LIB3829-009-Q6-N6-C7
agcgcttaagacaattcttttatagaacaaagggctacagtagctacaaatataaagggattagggcaaaacattctttcattccattgtttcagttaatgaaagatatctttgcaacaaacttcccaaaaaggaccttctatttttatattatgaagagggggtttttttcctgaaaaagaatactgattttaaatttcaggacaattacaaacttgtaaacagactagctgacgtctgaaatgaaacacgatggatgcaccaatgcaaacaggggacgacaattaggttgcttaaacgaactggtacattgattttcatcaaaacgacgggttttccaggcaacggaatcaacaagcaacctatccaacattctttggcctggaagcataaataaatgatagcccaatacattactgcatcaaatttccggttcggaaactaaactaagtacccgcaaatttctcgttggcatcaaaaatgtcagagttcc

SEQ ID NO: 13224 - DNA, 537 bp, Gossypium hirsutum
  Clone ID: LIB3829-009-Q6-N6-C8
gtgataataatccaacactggagaattctattaaaaactagtgcttggggcgacaataactactactatctagtacaacatgagacatgagagatcacacacaaacaggcaacgagaccatgaggcccaacatttttttaattttccacagagctaatcttagggcgtaatatatactagaagcgagcgaaaacgagatatatatatatattccacacaccacaactacataatattaataattataggacttcctctctatccattctgcggggaaaatagagaggaagagaggcttaagcaaaggggctagcttagcactttggaaaaggaggtccacaggggggggcgaccttcctgggattgccagggtgaataaatttcttaaggtgaggggtcttaagagattggcaaaggggtggggttctgcgccttgagcttgctacagcacagttgagatggtggagatgaagatgttatggcgctcacgcaggagctcagctgcgttgggctgcatgtgaccggcggtgacacccc

SEQ ID NO: 13225 - DNA, 531 bp, Gossypium hirsutum
  unsure (1)..(531): unsure at all n locations; Clone ID: LIB3829-009-Q6-N6-C9
caaaggggaaatatatcattcattcataagagagtgctcagattttgggcaattttattacaaaagtgaactaaaaactagccaaacaaaagaggtggccgaggtgtattaatctctcgaaaatcacaggctttgagaatatcttcagctccactgagaaggaaagcaccaccttcttctaaattaagagagcttaacgacaccatcttcaggcaagagagcgataccttctagaacgaacaccaaggccaacagggttatcgggcaaatccaattcacacccaattttcttagtgaattccccattaccatccgataacaaaaggacttcatctttgatacctagattttccttccaaggtcgcatcacaaacgcatcgttcaccgaaacacaggcgagggtgtgaacccctttgggtttgagttccccagatttctcaacgaacccaggggggtgtgtctgggaacaagggggggtaaaagcaccggggaccagcganatgacggctttttttgcccggcgggaaggga

SEQ ID NO: 13226 - DNA, 523 bp, Gossypium hirsutum
  Clone ID: LIB3829-009-Q6-N6-D1
gaaatagtacgtaatgactatatttatatatatatgcctcaattggcatgcgtttcaaagccttccaaatacaaactcatttggagactaaggtatcaaaaaaggaaaaaagagaattgtgagcccgcagctgcaaccatgcaaacgataagaacataataatattaatagagggtagagaagttgaaaagtgacaaagtcattgcatgtgaaatgtgttaggttgcttggcctgagcaagcatttgaacaacttctctcattgtaggtcgctccacgctgtgctcctcaacgcacaacattgccacaaagaaaacctgcatgacttcctccttaggaattgtattgcttactcggtggtccaatatcttcaccaccccttctttcttcaacttggtctctctcttgctccactgaacaatgtctagcccttcttctccgaaatctccaactggcctcctccctgttattagctccaaaagtaccactccgaaactatatacatcactcttctcgtctacttt

SEQ ID NO: 13227 - DNA, 523 bp, Gossypium hirsutum
  unsure (1)..(523): unsure at all n locations; Clone ID: LIB3829-009-Q6-N6-D10
ttttcaaagtctcagcagggggtaaatatttgaattattgagcagtgggttaatttacactaacatccatgggaagtgatgacaaaagggggaagtgggagtttttccacatgttcccccattttnttgtgttcgagggggggggggctgaatatcatgtacaacacaagacgattttcgtagcaagtatgcagggcataatatgtgcctaaaggtgtgggtttccggcgatttcctcatcatccgaggcggcatattcatcttcactcagttcttcgtcacttgacttcacttcttctgctcctgcaacatcgtcagggttggcatatttctcacgggattctttcactttttcttcataagcagtacgatcacccatcataagagcagcagcttctccattcaatggggtctgatggattgggatacaaaaggagttgaggaagaaacacttcaaagacattaacaagatcgaacatagggctccaagtttgattgatgacatccaaacaaactgagccca

SEQ ID NO: 13228 - DNA, 552 bp, Gossypium hirsutum
  unsure (1)..(552): unsure at all n locations; Clone ID: LIB3829-009-Q6-N6-D11
ccgctgggggaggtgtggcacaatgccacctcgaaccctctgagatcactagaagttcatgaacaaaccagtgagaattttgggtaagcgtgatgagctcaccctccaggggatcaagcagttttatgtgaatgttgnaaaaggaggaatggaagctgggagcggggtgtgatctctatgagacccttgccatcacccagagtgtgattttcgtgaacacaaggcgcaagggggactggctaactgacaagatgcgaagccgtgaccacaccgtttctgccacccatgggagacatggaccagaacactcgtgacatcatcatgcgtgaattccggtctgggtcttctcgtgtgctcatcacaactgagctccttgcgtctgggattgatgtgcagcaagtgtctctagtcataaactatgatctggcgactcaaccagaaaactacctccaccgtatcggaccaagtggaaggtttggaaggaaaggtgttgccattaactttgtgactaatgatgaccagagaatgctgtatgacatccagaagttctac

SEQ ID NO: 13229 - DNA, 522 bp, Gossypium hirsutum
  Clone ID: LIB3829-009-Q6-N6-D2
agaaaacaaagtctttcaacactgcatctcaagattttattacatagcacacacatgatccaagctgcatcaacaggacagccaactagtgtgttggtgtatacatggacataattcatgaagctctagtgcagacctccccatcacagacccaaccttcttttgcatcagctttggtttctttctccagggcacatttgggatgtagatcaaagtcacattcctcacagtagaatgaccagacttgtcccatttcgtcgcatacattacagacataattactgcgacgagtgagcaccagctcatgctcctcatgccgttcatctttcagtttctccggccacccttttgccatctcctcaatctgtgcctcaatctccttcaacctctcctcagtgaaaggataagcatccgccccatgagccatgaccagactccttgcctcttttgtaatagtttttccagttggtccgagtgctataagcatagggatgccttggaccttgaatttgcgactcaatg

SEQ ID NO: 13230 - DNA, 498 bp, Gossypium hirsutum
  Clone ID: LIB3829-009-Q6-N6-D3
ataataatagtaacaggattcgaaattttggatattaaaacctaaaaacaagacataataaaagtaagggaaagcccgtgactaggaccagagcctccagtacaaagtaatatataactacaaaaatttgactttcattattaatcagatatattctgcttttaatcaacaccaacactgtttcccaaaagttagaagaaaaagaccccacactttttaagaacatcgctcacgggcgacccccaccctcgaatttggcacatcgaaaaccaccctatggttctgctgctgcatattggcgatcacattcagcgctggtgccggtgccatcgccagacatgtgatgctgcctgctgtgctgtggagcagtaggttctcttgtggcaatgtcacgttcatgcccgaaaacataaatgttatggtcggtgcattgattgggaccgagtaacatgtgtcgaacccacccagagatgtcacgttcgccacccttactcgtct

SEQ ID NO: 13231 - DNA, 531 bp, Gossypium hirsutum
  Clone ID: LIB3829-009-Q6-N6-D4
aagcatcatatgaaacacccttaatatttaagaagtgcagcaaatcaaacattacacctgaaaaagaagaagggaatttaaataagttaacagagttcgattacagtttttgtgcatttctgtgcagaatgatttgtactcggaatggcaaatacgttggttaaagacttataacctccacaagatcgatatagggagttgtatgttaaccagtgaagtggaaacagattgacgatagattagtggtttttgtaagctctccatcagcagcaaaagcatcaccagcaaaacttctttttctgcagtttcagaaaattggctttctcttgacggtcaatttcagcaagcaattcttcatgtctcatcaaagcattgtaaagtgcctgcttggtagcaatcagctctgcttctagggcatcaacacgacatacggcagcattcaacaattcctctttctcgtaaggcatctcagatggctttgcttgtagtatattaactttctcctcaagttcacccaatcttttgagaaca

SEQ ID NO: 13232 - DNA, 520 bp, Gossypium hirsutum
  Clone ID: LIB3829-009-Q6-N6-D5
atcaaaagcattggggactgacatttagttataggaaaccatatgaacatccattactcgatgcattacacgggtaaataacatgctacttcatttatttatggatatatattttttttctcttttcaagcaagcatgcactcaaagttagattttaattgtccccaccgctgccatgaccctctccatagccatgtccctcgccataaccttcaccattgcctgaaccatttcccctgcctgacccctccccatatccctcaccatgacctgaaccaccttgccgtcccttgttaccaccagatcctgatcctgctcgagacccagcagaagaccccgcatacgaacctgcatctgaccctgaacccgagtttgaataggatgaagaggaagagcttgaacttgaactggaactggaaccagaaccggaaccagaaccagccccagctccagaccctgaaccaccacctccgagacccagccctacacctgctccaatccctactcctacaccaccaag

SEQ ID NO: 13233 - DNA, 527 bp, Gossypium hirsutum
  Clone ID: LIB3829-009-Q6-N6-D6
gaagtattacttttcattaacaataaaagtaaaataaattatagtaataaatttcaacattcacctataatatggcaataaaagtaaaagaacatatattctttcgttaatatataacaaaaatcagtactacaatacacggttattatacattcgcttctgttttcttgcagcgctgaattgattgaactgtacgagtatatgttacttaaggtgatgttttgtcgtctgtttctaacccaagttccttctttattgccttaagctgctcattcaacaagtatcagcgttgttcaccacttatcttttcctcgattgctttcgcaattgagtcctaaaagtatgcttcaaatgatttagacctgaatcttgctgatttccatttccttttttactaattccagtgtaagttgcaaccgcttatgcacatccaactcttcaataacttgctggcattgcaatttgtttgcaccagatattgcagctccaaaatctgctaaccttggaaaattgaaatcaactatatg

SEQ ID NO: 13234 - DNA, 528 bp, Gossypium hirsutum
  Clone ID: LIB3829-009-Q6-N6-D7
attcaaatcctagttcttactcatatttacaactccaaaaagcattcttacaattgggatttagtacatgcaactattcaacaaacaagctttaagcctcctctatccatgttgcgggttcagcactaaaacgaggatgcggggcaaatattctttttccttcatttcatacattgtaggatttggagtctttggtaaaaacagatttagggatttaagtaaaagtatcctcccgatctccttccgcagtatcaccttcttccaagttgctgaactccaggaaatgtgtcggcctatgctcctcattgtagtactctttcggtgtccccagcttcaccccgtatttcatgctcactgtatgcttcactcccatgaaattgtaattccacggaccattgtcaggtatcatataaaatccaaggaaccgatcacttaggagcatctgcaccttctcataatgcgttgggaggtaaccatgagggttgcttcctgtatctttgttaacccgtgcccactcataaccacttg

SEQ ID NO: 13235 - DNA, 505 bp, Gossypium hirsutum
  Clone ID: LIB3829-009-Q6-N6-D8
ccaatcactattctggcatgccaacacccctcaaaaaaagtcgccatataacaaaaaaacagcacaactttacaacaatccaattccatgctgcagaatattaaacacaacagcacatagtaaaaaggtaggcaacccaacaaaacctcaacaaaaacaggaaaaggtgtataagagcccgagggaaaattacttatcttttttcttatcattttaacttttggattaccaattagaaagcacgccaattatcagaacttttcttcggactctgctgatctgatgagactttaaatggaccgctggagccaaatggatctgagtcgtcaaaagagaacccatggccaaagtctttgctgctacttatggagtcgaacctcgtgagtgtctcaggttgtggggaaaatctgctgccaaagtcttcgctattgtttacggagtcaaaccttgaaaacccgctgccaaaatccttgctactgtttatggagtcaaatcttgtaagcct

SEQ ID NO: 13236 - DNA, 550 bp, Gossypium hirsutum
  unsure (1)..(550): unsure at all n locations; Clone ID: LIB3829-009-Q6-N6-D9
tcgcggactggtattattagaccaagggtcaagggcatccaactggtaactctacaccatattttggtccttcattgaagctagattttgaacttgaaatgggtactgtagttggtccaggaaatgaattagngaaaaactatagatgttaatgaggctgcagatcatatctttggtgttgtcttgatgaacgattggagcgctcgagatattcaggcatgggaatatgttcctcttggaccctttcttggaaagagttttggtactacaatatcaccttggattgtgaccctagatgctctacagcctttcgcatgtgatgctcctaagcaggatccccctccactgccatatttggctgagaagacatccaaaaattatgatattgcattggaggttcaaattaaaccttctggacaaaaggattcaagtgtggttacaagaagtaatctcaagaacctatattggacattgactcaacagctagcacaccatacaatcaatggttgcaacctgaggcctggtgatctgcttggaactgggaccatta

SEQ ID NO: 13237 - DNA, 498 bp, Gossypium hirsutum
  Clone ID: LIB3829-009-Q6-N6-E1
attcaaacctagtctttttcttcacattttaatttgtacaatttaataggtttaaattaccttagcactaagttacatttggtacatagagcgagggaatacatgaaagtctttctcacagatcacttactaagattactagtgaaactcgaatcggaatcatgatattgagagttatgttaaacacataaaaaaatttcccttcacagaatatgtacaaaaagtcgtaaataaggaaatcaagcaaacaacctcagacgattggtaatcctttgacggcatatcggacagtttgacacccttgacccacattctctacaagtcatatgtccacaaccaaaggccaagtccttagcactcgtaaggcaaattgggcatgcctgggttcgatcatctaatgcgggcgatgatgagacggtggtcggtgcaggctccgaccgagcagcagcacggtacggagctggtggaggacgtggaaccactttctttgctttccca

SEQ ID NO: 13238 - DNA, 484 bp, Gossypium hirsutum
  Clone ID: LIB3829-009-Q6-N6-E10
cagcgttaaatttctaatttatttatttatatttgggtttggggggggtaaaacggggaattaagggggggctaggggtcattttatcactgggaacgtgtgagataacaaacttctcctacaacaggggggggccttgccttgggggggactttctataggagggtcactaaacgtgggatctgtgcggggaggaagtccattacgggcccctaaagccctacagccagttgcagccacttgagctgcaaatgggaacatcttctttggggggatacctgcccacagagcatataatactgctccaataaatgcatctcctgcgccagtggggtcaacaaggtctgagggggggatcttctcaggtgttcccacaaataacgggccagttattggccctatcccatctgcgctcaacttggtttccacctataaagaccccaaacacaattttcaaattaaaagaaaaatgctcccaccatct

SEQ ID NO: 13239 - DNA, 55 bp, Gossypium hirsutum
  unsure (1)..(55): unsure at all n locations; Clone ID: LIB3829-009-Q6-N6-E12
tttttttttttttttttnttttttttttatattttttttgtgtttttgttttttt

SEQ ID NO: 13240 - DNA, 520 bp, Gossypium hirsutum
  Clone ID: LIB3829-009-Q6-N6-E2
taccacaagcattcaattagatatacactgatgagttaacaaagttattgcagtaaatgttggccaaactttttttaatcattttacagatgtgaattctctccctataatcagtatacgagccggagcatcggggaatggtcgtctgttggtacagtttcatgtgtatgtagggggggaaacccggacgaagtagaaatctattcggccatatgaatttaattgtgttctaatgcacttcgaattgacaccggagggccttgaacggcacctctggagataagatcgtgattaaagaataacacaataacagttatatcgtcgtgaaaatggcgtcgaacctttttgtcgatcttacgaagatccgaatatctcatttctcgttttctcgctgcttcttgtagggcagccttgactagccttttggcactgcccgcacgtggatgactatggacaatagccacagctttttcgttgctcaagtgttcccatagaccgtcagaagcaaatataaggaaag

SEQ ID NO: 13241 - DNA, 543 bp, Gossypium hirsutum
  Clone ID: LIB3829-009-Q6-N6-E3
aagttgcaaggctggattttttgtcattcattccaaagtaaacagctaatgaaatcataataacagggttgacataagatctcacaatcttctttaatctaaataacaacgtgaatgttatgagttaataaatagggtatatttgtttaagattaaaaagtaccatccacatctaaaatttttaatataaaccaactgcactacttgattgagtattatcagaagtaaaaaatacatgttaccggcagaagttacaggcgacggcaaatgttgcatgttccatcaatacaaagtgttctttgtctggtaactttggttttcttatctaggctaaactttcccagatgcacctgaggaacttaatccctgggaaggtttgtgttttctgttggagatgccttcttgctgtcgtatcgctgtttcccgaatgagaaagggacgtatttgtacttgatcatgtgcagtatctgtttcctcatagtcaggatgaataacattatccaatagaaaaggagtattggccaaaagacaggcacatcaaac

SEQ ID NO: 13242 - DNA, 477 bp, Gossypium hirsutum
  Clone ID: LIB3829-009-Q6-N6-E4
gggcgcaaacattatgattgaaaatgatcacaaaagggggggcggccctaattgcaaactaataccaagagttggttatccacaaaaaggctaataacgaggggacacgggaaccagaaaccggacccaagaaaagagaagacaaagggggggggccccccaaaaaagaggaaaaaccactggaaagggaaaagagagaacaaaaacggacaggcctaggccaattgcggtccggccggccaaaaaaaggaaaacccccctccacacaaacacgagagaataaaaggttcttccctaccccattcccaatccgttatacaaagcattaacctcggaggccacccaaacgctccttctccaaaccttaatagccaccaccctttaccggtaccgggagcagcccccccccttggccggaaatcttgtgtttcccggccccctcaaaatacgggaaccccactaccggcaccggacaaa

SEQ ID NO: 13243 - DNA, 526 bp, Gossypium hirsutum
  Clone ID: LIB3829-009-Q6-N6-E5
cttatcaatgcacacatagattctgaataaggtctacatcagttatggttttacataaaaaataaataaaagtgtgaagcagcaaagagcctttggatattcttcaggagtgaatctgccgtcgggcaaaaaacataaatacaaaacatctcaatttcattcaactaatgaacagctgaactttaattttgcattttgggaaaacagaaaaagaaagaggttgcagcactaggtcgacttttggtaactatatttttatcaaagtaatttgtacaaacatctgctgataatgctctcaaaacaagtttagcatatatgtgctgaatttgcgattagcgtcgagagccattcttcgggtgatgttgaagaacttccctcttgaagggacatgccagcacatttcgacaatatttcctgataaactgtcaccatgccagaattctcagcttgccttttttcatcagtttattcgcaatttgatctagcaaatgatatctgacaacctgcagaaaccatagaagataag

SEQ ID NO: 13244 - DNA, 537 bp, Gossypium hirsutum
  Clone ID: LIB3829-009-Q6-N6-E6
attctaaaagcgattcttattcaaaattttattgcatttatagaagtttgacttgttacaatatggatgttttccttgcattataacaaagagggcagttattaacaggcaaaagggcagtccccatgggtgaaaaagtctgaccaaaattatggtaattcaacaggctttatgttccatatttctcgagcatattcatgaattgttctgtcactgctgaaattgtaagaacctgctgtattcatgatcgacattcttgtccataccttttgggctttatatgtttcgtcgaccttttcttggcattctatgtaactagggaagtctttgccaacaaggaaatagtctgcacgaccgaaaccttcatttccctctaatgatcccaggagttcattatagttggaagatccgaatacgccacttttgataaacttcttaacttcttcgaaccgaggatccggaacgaacttcccctcagctctttctttccgaagcccagcaatctcctgtgcttgagccccgaagaggaaaaatttt

SEQ ID NO: 13245 - DNA, 511 bp, Gossypium hirsutum
  Clone ID: LIB3829-009-Q6-N6-E7
gacagtaaaacgaacgtagccatacaaataatgacaaatgagatattgttgaactgaaaggagttgccttgtccaacgtacaaggtcatgttccggtcccaattattttcttattctaacaaagaatacaaatggcaaaagttaaaacatgttatggatcactgctcactggatcgtctccttcctatttgttctgctttcacctcacccaccaccaatctcatcacttgggaaccacacccattatccgacctttcacacacatatatgtaaaacatactgaaactgatgactgaccctttcaaaacttttatcatccaaccatcagatagggagaggaatctctgggaaaaagcttgaccttttacttcatatttgctttcaactcatattatctctcccattgctctagaaaccagcggagtcccacaaggtgactgtaattgttgatcctccatagccatggcacatccattttttccacatcccagcgtgtaaaaaatatgcgcca

SEQ ID NO: 13246 - DNA, 537 bp, Gossypium hirsutum
  Clone ID: LIB3829-009-Q6-N6-E8
gtgtttgttttttttgaattgtaaacttcacccatttcatttagtactaaagacaaacagcagtcaaaatttctaaaacaacaaataaagataaacatccttctactcagcagctgtaatccaaataaagaggtaaaacaacaaaaaaccagggggccaaagaaatactatgacatgaaaaataacatggcacccataactatgacttgagataacaatcattcctcttcggcgatcctgcccttttcgctaacatagataccggcaagaaactttctaatatccttgttcttcacatgacatttctggtttatcaaagctgctgagcgagacacgagttcaatatcattaccatccaaaacgatctcatccttaaccttctcggatcgagtaatggaaaccccttccaacatatccaccttacgcaccttcttctcgccaaggaagttacggatctcgatggacttgttgccgccagtgattgaggcgttgatcggaaagtgagcgtagacgaacctcatcttgtaccggtaacct

SEQ ID NO: 13247 - DNA, 531 bp, Gossypium hirsutum
  Clone ID: LIB3829-009-Q6-N6-E9
agaagcgagatatcccatctacaactattaatttcagaaggggaaaaggagccaacagggagtcagaggggcatttctcccttagatggggtgcgcatctaaaagaaaacatgggaaacatcgaaagcgttaacatatgggtttgatcaaacactatcacaggctacattgattatgctatccaccacggaccttcctactcatcatcttcttcgtctccgctgccttcttcatcatcatcctcatcattcacctcagacactgatttgtcagactcaacatcttcgtctttaggaccctcagcctgtctcttattgtaggccttcatgtgcttttcatactcgacctttcgcttttctgccttggctacataaggtgctttttcagcttcagacaagctcttccatttatctccaccagctttgccgacagcggcaacggatttgtttttagggtgatccttcttgtattgctcacggaactcctccatgaaaaccaaggaagcgctagcaggcctctttggcttgtttg

SEQ ID NO: 13248 - DNA, 518 bp, Gossypium hirsutum
  Clone ID: LIB3829-009-Q6-N6-F1
aaataacttaaaattagagtgacaatcacttgatataattgatattcgttcccaaaggatcgtcctggatacaaagatttacattaaaaaagggaccaagtaaaacatagatcaaatgatgctctacttaaagtagtaaggaaggtcgaggacatacaggaggaagtaagcccaagtgacaccagagattccaccaaagaagaaccctccagtgaacttagcccatccatccgccgtttgcaactggtctggctctttcttcctcccagtcagggttaggctcggtgctatcgatggctcaccttctttgaacgatgcaacgccatacatcgtcaagcaaatgctgaggatcacaaccagaccggcagcggctaaggacccagcttgacccgccaccgcagtgttccttagagggccggccttaacgaatggacccaccaggaggaagccgtgagccagacccacttcgattcccctcagaagtgggttcactgccgtccatgtagctgggaggttgg

SEQ ID NO: 13249 - DNA, 499 bp, Gossypium hirsutum
  unsure (1)..(499): unsure at all n locations; Clone ID: LIB3829-009-Q6-N6-F10
acacaaaatttaatttaatatacaaaatagcttacagctttgagaatttatcccttaaatattgagattcaataaattgagaaatacagtgaaactatagtgcaagctagcttacttgcgacaaatgcgtagctaaggtgggagcaggacatccattattgaggcgtcatcaatgcgtgggtgtgcacaaaattggggtctaagatccaacaacacggggattcagaccttccaaaccaaaatccagggcgaaccaattcatacatattcactcctgcggaacaaggctaaaggggagattaattcgaggcggctctgcctttgcgcgcttaggggcagagtgtgaccaggcacgctgagggtgccctttcattaccaacagagatccgggcttgagcatgagcgagtgtggagcatnttgggtgcgcttcctagacctcttcaatgggagggtggcatcagatcttgtgtcttggggagagttgccacttttcttctt

SEQ ID NO: 13250 - DNA, 392 bp, Gossypium hirsutum
  Clone ID: LIB3829-009-Q6-N6-F11
gagaggggaaatgcgctcaactttcattttttcaggggtatgcgaatttgagacaaacagagtttgtgctttttctcaaacaaattatgaggagcatgagcttattgagtcaaaaaacttctggggaaggcgttccttcaagggagatgagttaaataacatgagtgagctttcacgctgtgagaaaggagcttcatgagaagcgacctcttattgtggcaaatgacaggatattaccatgaacttgagtccatccaccaacctgtgtcccttcaaaccaaactctgtaaggcgcccgtgtttcaagtgtctaactcctttgccaggcagcttaccaggggagcaggttcccggcaatggtgtaacagaatcttgatctcccctgtaaacca

SEQ ID NO: 13251 - DNA, 514 bp, Gossypium hirsutum
  Clone ID: LIB3829-009-Q6-N6-F2
ggcaaaatcttaacttattcactgggaattgaatattacggaacatctcataaataaaaaaccagtacaatctagtggtaatgatacaagctcaaactactttatttgtttccaagatcatacgcttctttattaaaataaaacaacaagagagattcatagatggataaatagacatgaacaattgactaatatccatctaataaataaactgcagtccataattatatgtatagatttatgaatcagagtcaacttttgggcaggtagggttgcaaggataagggcagtcaagctttttgatggggctccgctcataataccagtctccaacagccttggcaattttcatgttactcactaccggagaactatcgcttgaccattgtatctgctttcctacttgacagtgggcatagcacgaatctatgaacattcctttagatggagagttgatcaccccggctctgttcagggcacttaagaattgcgtcctgaaatcttggatgatttt

SEQ ID NO: 13252 - DNA, 419 bp, Gossypium hirsutum
  Clone ID: LIB3829-009-Q6-N6-F3
aaaattaaaaaggtaatatttttggggggggggggttttatttttatgtagaaaaaaaaaaaaaaaagaattttttttaaaaaaaaaaccaaaaaagggggcgaaaaaaaaaaaaaattttaaaaaaaaaaaaaaaagggcctctattttagaaaaaaaaaaaaagggtaaaaaggggaaaaaaaaaaacaaaaactgtttgtttgcaagaaaaaaaaaaaaaaagggggaaaaaaacaggggggaaaaaaaaaaaaaagtgggtggggggaaaaaaaaaaaaccgcacaaagagggagaaaaaaaaaaaaccggaagcaaaaagggaaaaaacaggggtttttaaagaggggggaaacaaaaaaaaggggggaaaaaaaaaaagaaaggtttccagggggaaaaaatggcgccccaaa

SEQ ID NO: 13253 - DNA, 454 bp, Gossypium hirsutum
  Clone ID: LIB3829-009-Q6-N6-F4
gcgtactaatgcaaatgatatcaatccataataatactgaaacaaataagtccaaacatcatccaacatgaataatctgtgcggtagataacaaaactacctctctcgactctcgcatatttatatatatagggactcctagatatactaaaactccatataaaattcacccctcccaaaaattaaatctatataaatgagaaatcaaacaccctctctacaccatcaatagccaacacccttcagatcctgagagtagagccgaaaagcagagccgtgacagcggcaaagaaaacagagacgaatgagggggagatggaggcggttcctgaggtgggactcggtgctggggcttcagcagctacggctgaacccataagagcacaaacagcgacgagaacaaggattagagaagcctttgagagacccattgttgcaaatcctttgagcgttc

SEQ ID NO: 13254 - DNA, 523 bp, Gossypium hirsutum
  Clone ID: LIB3829-009-Q6-N6-F5
aagcaaaacaacaataattgaaagttccaatttattcaacaaaattagcatccaaacatgaggtggatcatggaatgttagcagttttcagcttaaatgttcatattacaacaacgatgtcacaacaacgacgacaacaatgagaacaaccagtacacagtaaccccaactctctcagcgtggaaccttgcttcgatttttctctttttcgtaatcgaaatgggatcctaaaactcgcgaaattgtggtggacaacctcatagttcatcatggtaatcgtccagataatcacgaggatcgtgccttctacggtgcctcctgtctctatgtcggtggtccctctctcttctccgcttttcaccttcctctctagctctttttgcttcctcctcttcccgggctcttcgttctttctctgcttcttcaaaggcttccttttcagcctccctattcctggcccatatatcttctacaacttctcttgcatattgtgggtcatcacaaatcaatatgttgtcaaaaa

SEQ ID NO: 13255 - DNA, 527 bp, Gossypium hirsutum
  Clone ID: LIB3829-009-Q6-N6-F6
gaaagcaaattgtctggcattttcatttttgggcttcactcaatcatgggagtgaaggaaatggatttgtaaataagcgaaaactccaatcatatcataatttattggaagagaaagcacaacaaacaggatggttcttagtaggaaagacttggtaacaaaacagcataggttcatttgcaaagctcagcggagagggtattagctaaggaggaaatggtagttgcagacactccccttgttcctcctaagtaccatttcttgatcatctcgaccacattcgaattctctactttgatttttgcttcctcctttccctccgtcgtgaatgcaatctcagcagtggctgaatttgctggaaaatggtaagtgatgactgaatccttcttgaaatatttagactggaagaattcaacaactttttccaaggcttcttcctcttcctcttcgtatttgtcgtcagctgccaatcggtccctcacagcactctctagctgcactccatattgggaacctttgatctcctt

SEQ ID NO: 13256 - DNA, 513 bp, Gossypium hirsutum
  Clone ID: LIB3829-009-Q6-N6-F7
ggaaaaaaataggctccattctatttatttaacattaagcccatcatcatgcctgaccagaagatttaaaaaaagaaagggagaatattaaaaacatttgatcaagcacaagtccattaaggaagctcaaataaaaacgaagttgggaacagttgcatcagggatataataataataataataataggtactataacctcaaaccttttcatttatttattttgatacactctcaggctcagctagttactatcatctgatactgcaattgcattgtcgttttggcccagcaaactacttatggatcgagctttaaccattccaagctttgctctattctttggcatcatcaatggcttctgatcctctccttctgcataattcccaccactttcaccatgcaattcacgctttgctaattgttgggaccaataaaaaagattggacaacatcagaccttgattatcaccattattaggctggccctcctcctttgctgctaaagatcggctt

SEQ ID NO: 13257 - DNA, 523 bp, Gossypium hirsutum
  Clone ID: LIB3829-009-Q6-N6-F8
ataaaaatggatccgacatgagacatgattacttaatttaaatccgaagatttggggcaagaaatccagcattaacgattaactagcaagtcatcagaagctgagacaaaacagtgtttcagctgaatattcaaagtggaaccagcttagatttttaagaacaataaagggataattaaatgcaatatcgaaaaagccagcttttgatgtccatccatggctctctacatcatctcacttcactatgcagatcttaataaccgaagcagccccgatacggtgcagtgcaacgatggcatcaccaggcttgcacaatcccttctccgtagctgacttcattgcagcttctaagatgacctcggtggattcggcatcagttgccttggctgacccttctgccaggatgggaaccaagcccctatatatcagactgtgcctggctggaccttcgtcactgcaggtccaatcaaatgaatcggttgtcaagactgggacgaccacggataggataggaacagctggt

SEQ ID NO: 13258 - DNA, 524 bp, Gossypium hirsutum
  Clone ID: LIB3829-009-Q6-N6-F9
agaaaaaaaagggccttgggttgaattttttcccatgcgtaactactgggcaatgagatcaatttacaaggggatagataacatgggaaacagcccttgtgctgaagaattgcctgcctacttttgggaggagaaaacgaaacatgggtgggcttatgatgtagaggaaaggggagttcccatcatcctccaataggaagagaaatcgaaacctagaatcaaaggggagaacacagaagctcctagcaccaagaagcttccacttattacgagataagcattctctaaccatggaagcttgctgaggtgtcaagattcgacaaatccattcaggtaaaagtgagtcttcgataactcctttggcaaaacaatgcagcaatttaggtaccagtaggttccctttgttacttataccaacaggtgcctgaatgtaatctttcattgacctttttagcaactcattcacattttgagggctgaaaatcctcaccggcggcgaagaatgtagcccacaacttaaagca

SEQ ID NO: 13259 - DNA, 519 bp, Gossypium hirsutum
  Clone ID: LIB3829-009-Q6-N6-G1
aatagagaattatttcattaacaaagcaagcttttacaagataatttattctctcagcatataatataaaactccatataaagaactcttttctcttttttttttttttgagagagagagagttctatataggcactcttgataaccgggaaaggtagcttaagtaggcacataatataacacatagtaggacaaaacattagagttttgatccttggatgggcaaatatacagcagcaacatttccttaagcatccaaatgaatcatgcatctcagacctataccctggagcatgtagtcgaatgccttgttaatatcggcaaaaggcacagagtgtgtgatgaacttgtccatatccagccccagctccttgttcaaatatttgtcgacaaccatgggaatatcagtgcgtggtttatagttgccataaaaagcacccttaagggtcctctcacttagtagattcattggatgagttttgaatgcatcgtctttctttggcacacccaccagcacac

SEQ ID NO: 13260 - DNA, 521 bp, Gossypium hirsutum
  unsure (1)..(521): unsure at all n locations; Clone ID: LIB3829-009-Q6-N6-G2
gaagaacatatctcnatatcaacattcgatacgttcgaaggaacaagttttgacaatatgtaactaaatagtactctactaatatgaatttgctaagctttaggagtagtttcttttgttgtacagcctctccatttcatccaattccaggcattgagtagtattgtgggattcatacaatggacatgccaaattctacaatttagtcaaaccttatgctggatatttggagatgtgttctcatgagcagacattgcaattcgtgaagcaagagaacgagctgaagttcggtttttcttttctgagacatgcatgaagcaactgttcttaatcgaagacttccgatggggaggaacagagcttttgctttcaacaatgcttgttttgcagggagtagattttcttcctatgccaggtgattcaggttttgtcaatggaaccttttgaatctgatctttaggtgttctttctttataaaaatccggcaatggtcttgccttgaagcaaaagctttgtcgtag

SEQ ID NO: 13261 - DNA, 495 bp, Gossypium hirsutum
  Clone ID: LIB3829-009-Q6-N6-G3
aagaaacatttaatgatgatagttgataaagttacatatacatacaatggggggttttattaaatcaataataataccaactgtgtagggcggcaaagcaatgcattaaagacgagaaaaaaaaaaaaagaaaaaaagtcagaagaacatcatatatataaatatatattcaacaaggttggaattgtttttctatacatctagattttattaataataataaaaaaggatgatttatgaaaaaggcatgtaaagaattttaattagtgaaaaattagatgagtgaatggaagccattttggtgaagccatgtttgggaaggtctgatctgcgatgggaatcctgatgatgctgcaaaatttccaaacaactggtggtgaggacctgattgccactgttgatcactagttgataatgaaagatcactcccaattcgccctccattgctgcttcttggaatatgaatctgataaggtgatggattaatgtgttgag

SEQ ID NO: 13262 - DNA, 429 bp, Gossypium hirsutum
  Clone ID: LIB3829-009-Q6-N6-G4
aacacaacaaagctagttaaaataatttcatttcactatatacacacacacatacacaaaccaagcaaccatggatacaagaagcaaaacacctaatgaaccatagctgctttattctaatagtaaaaacccaaatacatcatatattatttagatcagcttccataatatgcttagcttttttttctcatttacaattgcaagggttgcaagtgcagttatctccacatttgcagccattttcagccccagtttccatttcagctccatcaaagtgcactttccggggtgccacgccaagaacaagtgtcccggttgtggtttgctcagcaaagttcatctcagggtacatcttgcaaccgccgcagccgctgccgcacttgcaaccggagccgcaaccgcagtttccaccacagcaagacatttttc

SEQ ID NO: 13263 - DNA, 517 bp, Gossypium hirsutum
  Clone ID: LIB3829-009-Q6-N6-G5
aactataacttcaaactggagaatcttgggtcttattacaaacattgtgatcacatgctacgtccaagttacagagtcaggcaaagaaaatgccaaaaaacagccaaggacgagaaaaaacaaaaaagggtaaaaatcacttaaaagtcgactgattgttctccatattgacaccaccatccatcaacatctccttctccttgtctatgtttgctggcttctgttcaacactctgagacccagtcatccttgctagtattacaaatgacattcctccaattacgttatttaagcatctcaggaccaccactgatgacttaaatgcaagggggggaagtcccttttccaacacaaactcgatcccattcaaggtttgatacctaaaattgctgctaacacccatgtgaatggcccaggtgatggcattcaacaaggtaggaggaggcttgttgggtgtttcaaaggtgggatccatttttttcctcatcgtgatcaacccgtttgagattgcagtccc

SEQ ID NO: 13264 - DNA, 519 bp, Gossypium hirsutum
  Clone ID: LIB3829-009-Q6-N6-G6
acatgcaaataagcatttattttcaagtacaattgcaatctattgagctcaagctttccagcataaaattctttaaacataaatataaatcatgtattcttttcaggggaaaactagagaaaaatgttagtctccgtgccgaggaatggataatccaaatcaaacaaaccagaaccttatagctcaaaaaagaaccatctctattttttttgtggacttatctctttgattacaccggcggttagtgaattgacatcattattcttcccgaaaaacttcacaaattccatttttggatccatcaagtacatgactatggaatgatcaacaaggtaatctgaatcttcctctgccggcttcatataataaactcgatatgcacgagcaactttctttatctcgtccggtgtaccagttaaacctactaattttggatgaaactctttcacatattcacgtacttgctcaacagtatctctttcaggatcaacagagataaatacgggcacaatgtctatt

SEQ ID NO: 13265 - DNA, 534 bp, Gossypium hirsutum
  Clone ID: LIB3829-009-Q6-N6-G7
gaaggggctaatgagcaaactattttataagcaatcagaaagaaagtacaggagattcttagcatcctacttgaagaaagcgtagggaaaatataaagagggggagaatgagtaaagaatagtataggagattcttagtatcctaccttgaagaaagcgattggaaaatataaagagggggagaatgagtacaagggaagccatctcttaagtgtgagaccaattccttgaggtgcaagtgtccttggcctgtgctcaggggagaaaacacctgcacacaacaaggacatgaggtccctttctctatttgacttaatcacccatattctctcataccctttctgccaacagcaattggtcaaggtcttctcttcttctctccaattcctccagatcttgaactgcttgttcccttgtaattaccttttgctggcgagaatgtttgagaaagccaatgcataagattcctctttatttttcttgaagtaaacatatccagcatcacattagacacattttcatattttgccctgg

SEQ ID NO: 13266 - DNA, 520 bp, Gossypium hirsutum
  Clone ID: LIB3829-009-Q6-N6-G9
ggtcaaaataaagaaaaaaatcaatttctaatgcaaataataattgacatgggacaaatgcccaaacgttacaatgattgttatttttttttcataattctacattgttgggaaaaattgcccatcccaaaccatctatgagtcaaaacctcatttatggcgttcctatttctatcttcatgctacctgctgctgaagctgccatctctggcttcgcaaattgcaggctctttaatcttctcttcaactccttccccatgagagttctatcaaggcttgaagttgataagagtcctctattttcttcggctctccttaaaaggtatggcattaccatatcaactggtccatagggtaagtatttgctaacttgaaaccctgcgtttctcaatccaatcgacagcgcttccgacattccatataactgtgcaaattcaagcttttgattccccttctcaattcctaaatttcgtgctttcgatgctgccaatttccctgactcaagattatgagttgcgag

SEQ ID NO: 13267 - DNA, 525 bp, Gossypium hirsutum
  Clone ID: LIB3829-009-Q6-N6-H1
gcacgaaagccaaacagaatggcatgattacatttaactgactaaaaattggcttcaaattagttcattcgactttgacgagagaagaacacacaaaccacaagaaggattagtaatagtagggaatgtatgccctcaaattatcactaactttcaaaacctaagggttactacgatctagttacttcctacaactttacaacataaaaacaactacaatatccttgtttaatgtctggctgctttaaggaaattgtcgaacgggctagcaggaggcaacctcattgacaagcatgggtcgagctgcgagacagcaccgttaaaagcattcccgtttgaactcttcttcagcatcatcgtgtgtctatcagcagcagcggttgtcagtatagttttatcagcagcttcattttgatgattttcatgggccaaccagttggagagcttcttccttgtacctgtgccgaatgcttcacattggctagccatggtatcgtacgggagaggtgatgtagagactgatgt

SEQ ID NO: 13268 - DNA, 520 bp, Gossypium hirsutum
  unsure (1)..(520): unsure at all n locations; Clone ID: LIB3829-009-Q6-N6-H10
ttttacgtaaattcatactttaccatttatatatatgggtacttatttaatgggatacatgcttaatttagttcatatacatatatatactctttcttttatgccttcaaaatccccttctcagcanactgtgatcagggggggtaggaacaaagaaatttaagtttttccaagattatgaaattacaagcactaataaggtgtgccattcagccatagggaataggccaccaccaaactatcagcagagccccacttgttaaaaagatcttggtagttgggatggggacaaacagaaggatactactnaggctgtgctgtgccaggttttagcgcgttnccctagtggattccagnaactgagcaactgcagtgggtgncactggtgctgcgaatatcaaatcggttccatcatgtggtgaacttttatttgggtgtgtgcaggtcctttagaaggattgggttnttcaaaaattggattcagaattcagttaccgggtacttgttcaaactttattaa

SEQ ID NO: 13269 - DNA, 530 bp, Gossypium hirsutum
  Clone ID: LIB3829-009-Q6-N6-H2
aactataacaatcaacaccttgtactatttctctaggggtgtttcgagtttttcaacatagacgaaaactaaatgcgggtgttagtttttccgggtaaaagtaacgggggggtacatcaaagaatcgaaggcttgttccggtttttatcgcttttcggaagctaccaggtattcacataagaaaatgatgcaacaacgaaaaaaaaaacacgacatagatatatatatgatcaggtgccgccgggttcggttggcgtggcacacggggctagtatattcggagggaagttaactccgccccctctaacgaatagattagggccctttgctgagctagccctgctcatgaggtgtgagttgagaaacaccacgattaccgtgatatcgtcgtggaaatgccggcggacaccacggtcaatcttcttcaagtgcagaatatctcatttctctcttctttgctgcttcttgtagtgcagtttttacgagccgctttgcacttccactccgtggatgattttgaactatattga

SEQ ID NO: 13270 - DNA, 526 bp, Gossypium hirsutum
  Clone ID: LIB3829-009-Q6-N6-H3
caaaacaatccaatctgaaacccagccgagcccgttggtttgccatttatgagctcattacaacattagttcctttcgcacagtaaaccttatttcaagacatgggaattttcatgtgatactcgtattaattctattaccttatgctacaaaacataaatcttggcttgagaaatcagctcctccccccacagtgtggagaatcaatctctcttgattcatgtgttaggaaaagaaagctgcctggactggttttgattatggagcagcagcctacgataccgatctatagcaaggtctctttgcggcacggactatatcttcgacctgtggcacagccattctctcgagatttgctagatatggcataggaacatcagctccggcgattctctcaaccggggcatcgagatatgcaaaactttcctccacaatagatgcgcagatttcagcaccgacaccgtgctgtggaaacgcttcttcaactgttactaatctgtggggtttcctgaccgaggcattgatc

SEQ ID NO: 13271 - DNA, 525 bp, Gossypium hirsutum
  Clone ID: LIB3829-009-Q6-N6-H4
aaaaaatatggcgtggcattaatgtaatgaccactaaaataatataattttaactctaatacatactttttattgcttaattacttgatacttaatacagatagaaagtcacaccattaacgaaacaccatgaaacctagggaacataagactagcttttaaatacttatatcgggatcagagtctccatacgtagtggcaaatgagtgctccatcgaacagttcaacacttatatggcaccggcagcgatatccgatggctgattaatccaaacaaaattaccttgagaaaatacatggcaaacagtgtttccttgcttaataccaagcatgcgaaaagcgacatgatcagagctccaacctgaagtatccatatggcaaagaacaacagcatccaccttatctcctgtaacatcaccaactaaacggagtttgaaagctttagtctcagtggcatcaaagtgacagaaataaactgcataaagatatggcattggatgacaagctactttctttggagattca

SEQ ID NO: 13272 - DNA, 531 bp, Gossypium hirsutum
  Clone ID: LIB3829-009-Q6-N6-H5
aaaaaaggttaatactattaatctaatgtgattctcatacaaaatggaaactaaaagaaaccaaaatatgaaacatgagtacatgtttttttttttatgactaaggttcttccactgcccagtgccccatacaacatatttttacaatgtacccaaaagaaccccttttgccttagctggtctactagtgacgatggtgctcacactctacaggcttgatagggaacctagcagtatcagtacaatagtcatagaccaagtggtttgccctaacccacaccagttggtggctctggtgcaaacttaactccgacattgtcggctcgtcccaccagaacctcttctcagcactgctgctgcatttcttggcgatctcatctgctgtcacggaaaccgggcactcgcatgcgtcgatttcgaagcctttgtaggaggcaacaaatggtgcatggctccaatcagtcttgactaggccaccctgtgtggcccaatcatcagcattccagattgagctatatacacccatggctt

SEQ ID NO: 13273 - DNA, 527 bp, Gossypium hirsutum
  Clone ID: LIB3829-009-Q6-N6-H6
ctaaaaaatagacgtgtgtagtactagccaggcaaataatataatattctatacattgttcatatattaaatcgggtttccatgtttgaatttaccccaaaaccgcgaaagcgcaataaataataaaacataatcacttccatagcttccgtaaggacatgttcttctcgctctccttcttcattactttcgccaccgccatctcaaaatcttcttgtgttacgtggactctcctttccctcaaagcaaacattcctgattctgtgcacacagccttaagctctgcaccagaagcaccgttcatcttctcagcaatcttctttagatcaatccctctcatcaaattcattcttctagaatgtatttttaagatgtcgaaacgagactcctcattaggatttggaaattcaatcttcctgtcaattcgtcctggcctaagaagagcttgatccaagatatcaatccgattgggggccatcagaaccttgatcttgttagatgcttcaaatccatcaagctggttgaga

SEQ ID NO: 13274 - DNA, 525 bp, Gossypium hirsutum
  Clone ID: LIB3829-009-Q6-N6-H7
aacaaaagtgttttgaacattactctaaataagctttaaatgatacagagatttcttctacagtccgatttatttagaagactcccaagtttataaaggggggtatctaacaagggctcttcttcagttgtttctttgggtacgacgttgatgtgaacatttcccaacatttcttcattcatcgcattcaccctgattatcaatatgagtgggcaacaaattttctgtgtcgaacttaacaatgcccatactgaggagcctttcaaccaccttttaaaggtggggaaattttctatagaatgccccgtaattcccgcatgggagtcacattgcacatttttgtcgtaccatttggggtacggaggttgtaaaggcttcacgtagaaaggagaaataacgtgtgcatcaaataaactctgatacagctcccgatatgacattgggattggtgtaaattgggacttctcaatattttgctttgtgccggattcttgtctctgggggatctaatggctagaagcaacc

SEQ ID NO: 13275 - DNA, 466 bp, Gossypium hirsutum
  Clone ID: LIB3829-009-Q6-N6-H8
acaaaaaaggaattttaaaacaaaaaaggggggggggacaaaaggggggagggaaggaaaggggggaggggaaaaggggggggggggaacaaagccaaagggggaaaaaaaaaaagaaacaaaaagggaaaaagaaaaggcgcaaggggggggaaacccaagaaagaaaggaaaggcacgggggggggaccagcccagaaaagagggaggggaaaaaaaggggggaaaaagaaaaaaaaaaggggaacccaaaaaaaaagggggaaccaagaaaaaaacgaaaaaacaggggagagggaagaaaaaaaaaaaaagccagggaaaaaaaaaggaggagcaaaaaaaaagaaaggggggggggaaaaaggggggagaaaaaggaaaaaaaggggacaaaccaaaaaaagaaaagaaacgggaaaaacacggagaaaggagggaaaaaaagggagagggcaagggggga

SEQ ID NO: 13276 - DNA, 529 bp, Gossypium hirsutum
  Clone ID: LIB3829-009-Q6-N6-H9
gagcgagcaatcaaaaccccttcccaaactgtgcaagcttcttccaaagcatacgggtttctgggtgtggatgatgatatctatacagagggggtcgtataattcttatcgtgtaattcttatatatattgtgcaatgaggtaccacatgagtgggtatataggagtccaaatctgtggaaccactcatgtgatgagcttctacatcctagggcttcccgtgccgtgatctgggttatgtgcttcatgtggcattcagaccgaatgactctatgaaattacgtggatacttccacatattatgggtaacgtaggagacatctctatttttcccccggggaatctttagaattaccactgcttagctttcaattcgcctctgaccatcaaatgagaagtgaataacccgtcctcctctctttgaaacaggggcgcttctggggctgtcggggcttgaaacaattttgtcttctccatattactatatctctagaggcaataattttatatgaggaactactgaactcaat

SEQ ID NO: 13277 - DNA, 587 bp, Gossypium hirsutum
  Clone ID: LIB3829-010-Q6-K6-A1
cccactcgtccgggcaaaaacaaactaaatgttgaggtagcttgatcaggaacctaatctgagcagccaatgaaggtagcatgagataaaggggaaggagcaacacttgaatctgaagaataacagatgacagcatgagtgattaaaaacttaaagaagctattctctcaatatgggtccataacgtgatacaacgctatgcgagatccacgtgggataagtaaaggatcagggtttgatgcattaacaactccagaagaagcattaagagctcttgcaggagataaatggcaaaatggttgacagcaaacctctctatggtgcaccagctcacacgatggaagataggagagccaggttacaggctcaatggtctcaaatgcgatccagttacaatgtcaccttcaaacgctcctcatatgccaatgtacccacctggtggtccatgtcttgggcagcacatattatatggtcaagcacctacggtactgtttacgcaatctggattagggtatcaacagcagctcatccctggtatgaggcctggtggagctcccatgccaaatttctttgtaccaatggttcaa

SEQ ID NO: 13278 - DNA, 580 bp, Gossypium hirsutum
  unsure (1)..(580): unsure at all n locations; Clone ID: LIB3829-010-Q6-K6-A10
gnaagactctattcactcaggtattaggggtacatggnataattgcctttcattgcctcgtatgcttgtttcttagatgaaaactatatatatatgtgtgtgtgtatggagtcaaattaatggtgatagctaagtcacaaagtttgcttttttgcttgattctcaagcaacttaatgacacatgaagttggatgagggaatataattcaaaagttgcaaaaaagttatgttgtagatcataccacatatagaaagggacaaagcaatggcacaaccagcaatgacaagagtccatccatttatcacagtgaaacaatggaaccttgctatctcagctcatctatctactatggaggccaagaatattattctccaaagcagcaaaccactgatgctcccctatatttcaggaaggaaggggaagaaggtgatcccattggaatcaattctaatggtgcttcaaggggcaattggtggcagggctcactgtattactaacgtctccatccaaaataatgcaaatgtgtcaactcaaggaatggtagagcttgatcaaccttattattatggacaataagct

SEQ ID NO: 13279 - DNA, 576 bp, Gossypium hirsutum
  Clone ID: LIB3829-010-Q6-K6-A11
cccggtcgacccagctttttcgcttcatttgacaccaattaaggactacttaaacctgtgtcttgttcaaaaaaaggagctttccaagatggtatttaataaaccatgcagggttttgatcggttctggttttgagacctatgaaaagggcaaaacagcattgcagaattggaagcattgtggattagattgggcatttgttgatcccaaaactccaattcaaaatggggttaaattctgtgtttgtctcaaggaatttttaccatgggtcattatgcctctccaagtggtgtatgtgaacgaaaacactagggctaaaactaagaagagtttagcctcttttggttttggcagtggcacattacaaggtcacctactggctggggaagaacggtttacgatcgagctggacgagaacgatcaagtgtggtatgaagtactttccttctcgaagcctgctcactttctgtcgtttatcggttatccttatgttcaacttaggcaaaaatattttgctcatcagtctgccaatgctgttctgaaacatgtgtagcaactctatgtatatggattcat

SEQ ID NO: 13280 - DNA, 574 bp, Gossypium hirsutum
  unsure (1)..(574): unsure at all n locations; Clone ID: LIB3829-010-Q6-K6-A12
ggacaggnaattagaggagaatagctaaacaatatcatcatgaagactttctgaagattttctggaattatcatatgcttcttctgtagtgaattttgaaactccaatcctggatgtaaagtttgcctctgaagacaactccattaacaagtcgcctcttgaagcccttttgtctgacatgcaagtaacaggtactgctgcttcctgctctaagaaaagtgatgatggttcccttgaagcccttttgtcagacatgcaagtcacagatactgcttcttcctgctctaaaagtgatgatagttctcaacctggtgaagattgcaagttgatttcagttgacgaagcggatgtggatggtatgccttggaacttggaggtcgaaaacctggaggattatcctgcatgtaacaaccatgaagttgcggaaacaaaccttatatgaaagagaagtactagctagcttcatgatgttgtaaataatctgttttcagagtaatgttctagaaacttgatcttgactgttaaagtagaagctagctttgtgtccgaatatgttgtaaataatttgtttttt

SEQ ID NO: 13281 - DNA, 570 bp, Gossypium hirsutum
  unsure (1)..(570): unsure at all n locations; Clone ID: LIB3829-010-Q6-K6-A2
gttaattgatcgtgtagcagcaagggagagattctttatgatgctgaagctagagagatgagccaggttgttcacattcgtgaacctcatacttgtcttctgaaaggaggtatggttctacacagaagagtgatgaggcaaattttgccaacttctcaatttcatctgtacctcattgtggggagggctgtatatggaaagcggatttgataataagctttggagtgtggtgcattcaccggatccttgatctttcactgatggaaagccgaccagagctgtggnggaaaatacacatatgtgcttaatcggcttcagggtgtgatagatcttgcattttcaaagcctcgaaccccaatgtccccgtgcttctgccttcaaatcccccaggaatatcagaagaggttaagccctcctgtttcaaatggaatgttgcccccagctgcaaaacctggcaagggtaagtgtacaaatgcagtcacgctcttggatatgattaaggatgttgagattgctatatcgtgccggaagggtcgaacgggtactgctgctggtgatgtagcttttccg

SEQ ID NO: 13282 - DNA, 357 bp, Gossypium hirsutum
  Clone ID: LIB3829-010-Q6-K6-A3
gttgattataactattcttatactgcattggtatttaatacattgtgcagatagggaaccctatacagttagaatatgattgctatctgtgctggcggattctcttaactgaacaaagacgttaagtaatccgtctatgccttaatgtgaatttctttagtgcaagtctgtgtgcggcatggatcatatttcaaatgtgacttaccaatctcctaatgctgagacgccctgtgcataggaacgaaatataacggttcatggattcagagttaccaactactaaatacaacaaccctgatactatagtgttaatgaacttatactggacttaatacacattagactggcttatacaag

SEQ ID NO: 13283 - DNA, 555 bp, Gossypium hirsutum
  Clone ID: LIB3829-010-Q6-K6-A4
ttttggagtaatcctaggtgaaaaacctacctgttttcttcaaacactttttgggctgtttatttttcttacaatatcatggtgtttttcagacaagtttgagatttcacaaactactgttcatcttcatgtttctcctttggtttctcttgatctgtttgtgatcatttaaggaatcatcatcttatttgcatttttgtctttttctcgatatggactctcttcagggtttcgaaaccactggaaacccttccgttgctttaacaccgattttccctctttcgatgaccaccgtgagcgcagcgtccgccgccatgaccaccaccaacggaaaccctttatcagtctcctccctttcttcctcttccagctcctccacttccccgaccacaactctcagccgttacgagaaccaaaagcgccgtgactggaacaccttcggtcaatacctctgcaaccaccgccctcctctctccctttcccgttgcagcggcgcccacgtccttgaattcctccggtacctagaccagttcgggaaaaccaaagtccataccc

SEQ ID NO: 13284 - DNA, 580 bp, Gossypium hirsutum
  unsure (1)..(580): unsure at all n locations; Clone ID: LIB3829-010-Q6-K6-A5
cccagcgtccgggnaaatgcataaataatatctgaaagggagnncttgatctgaaacttcaatttgagcagtcaatgaaagaggcagcagataagtttcaaggagcaaacttgtatgttaagaatttggatgacagcataagtgatgataaaacttaaagagctattctctcaatatggtaccataacgtcatacaaggttatgcgagatccaagtgggataagtaaaggatcagggtttgttgcattttcaactccagaagaagcatcaagagctcttgcagagatgaatggcaaaatggttgtcagcaaacctctctatgttgcaccagctcaaaggaaggaagataggagagccaggttacaggctcaattttctcaaatgcgaccagttacaatgtcaccttcagtcgctcctcgtatgccaatgtacccacctggtggtccaggtcttgggcagcaaatattttatggtcaagcacctacggcaatgtttccgcagcctggatttgggtatcaacagcagctcatccctggtatgaggcctggtggagctcccatgccaaatttctttgtaccaa

SEQ ID NO: 13285 - DNA, 66 bp, Gossypium hirsutum
  unsure (1)..(66): unsure at all n locations; Clone ID: LIB3829-010-Q6-K6-A6
naaaaaaaaaaaaaaaaaaaaaaaaaaaaaaaaaaaaaaaaaaaaagaggggcggtccgatgtgat

SEQ ID NO: 13286 - DNA, 584 bp, Gossypium hirsutum
  Clone ID: LIB3829-010-Q6-K6-A7
taaaaaaaaaaaaaaaaaaaaaaaaaaaaaaaaaaaaaaaaaaaaaaaaaaaaaaaaaaaaaaaaaaaaaaaaaaaaaaaaaaaaaaaaaaaaaaaaaaaaaaaaaaaaaaaaaaaaaggggcggcccttttaagggacccaagtttccttccccgtccttccaacgtaatactttttttttggggcccccaaaataaatttcccggcccgccttttaacaccgtgggaccgggaaaaccccggggtttccccaattaaatcgcttggaaaaaaatccccttttccccagtggggtaaataccaaaaaggccccccccgaccccctttccaaaaatttccccaccctaatgggcaaagggacccccccctttaccggcccttaaaccccggggggtggggggtttccccccaggggaccctttacatttgccagccccttagcccccgttcttttcgttttttccctttcttttccccccactttccccggttttccccgtaaagttttaaatggggggctccttttagggtcccatttaagggttttacggcccctcacccccaaaaacttgtttggggggag

SEQ ID NO: 13287 - DNA, 575 bp, Gossypium hirsutum
  unsure (1)..(575): unsure at all n locations; Clone ID: LIB3829-010-Q6-K6-A8
anacaagtactcctatgtttcttaatgtcacgaaaaatcaagtcacttggtgtcaaaaggttatctccggtgaaggctccgacgagatttttggtggatatttgtatttccacaaagcaccaaataaggatgaattccatcaagaaacatgccggaagatcaaagcccttcacctgtatgattgcttgagagctaacaaagcaacgtctgcatggggattggaggctcgagttccattcttagacaaagaattcatcaatgtcgccatggctatagaccctgaatcaaagatgattaataaggatgaaggacgcattgagaaatgggttcttagacgagcctttgatgatgaaaaccatccctatttgccaaagcatatcttatacaggcagaaagaacaattcagtgatggcgttggttatagttggatcgatggtctcaaagctcatgctgctgcaaatgtgaccgataagatgatgcttaatgcttcaaacatcttccctcacaacactccgaccacgaaagaagcatactattataggatgatcttcgaaaggttcttccctcagaactcg

SEQ ID NO: 13288 - DNA, 579 bp, Gossypium hirsutum
  Clone ID: LIB3829-010-Q6-K6-A9
gcttttgtcaattgagaataacactgaaggtaaatgatgggtagaaatcttagcccgattttgcggcgagagctggcaaatcttgacaaagatgccgatagtcgaaaatcagcaatggaaagcactggaaatcatatgtaagagacttggattcaaaggcaataccggtcttccttgctcaagtttccgagaccaaagaaactgggtgtgtgtctggtgaatacactatttcactctatgaagttcttgctcgtgttcatggtgtgaagattgttccacagattgatagtataatgtctactattatcaagacattagcttcaagtgcaggttctttccctctacaacaggcatgttcgaaagtggtgcctgcaattgcgagatatgggattgatccaaccactccagaagataagaagaggtacatcattcactcactttgtaagcctctttctgaatctcttttgggttcccaagaaagcttgagttcgggagctgccctttgcttgaaggcgcttgtagaatctgataactggcggtttgcttcggatgagatggtcaacaatgtttgtcaaaatg

SEQ ID NO: 13289 - DNA, 584 bp, Gossypium hirsutum
  Clone ID: LIB3829-010-Q6-K6-B1
gtttggtatcacaaatttgcgagaggaaagcatttcatcatcagcgaaaaaagggaattttagtcttcaggggaacgatcgaacgatgtcgtacctactaccgcacctgcactcaggatgggccgtagatcaggccatcttggcagaggaagagcgtctcgtcgtcatccgattcggccacgactgggacgaaacttgcatgcagatggatgaggtgcttgcttctgtcgctgaaacaataaagaactttgctgtgatttatcttgtagacataacagaagtacctgattttaacacgatgtatgagctttacgatccatcgacagtgatgttctttttcagaaacaagcacattatgattgatcttggcactggcaataacaacaagattaactgggcactcaaggacaaacaggagttcatagacatcattgagactgtataccgtggggcaaggaaaggtcgtggtctggtaattgctccgaaagattactcgacaaaataccgctactgagtattcttgcaacctgttgttgatcagaaagatttaatggtcatatttcgcgaattcaatacagactatt

SEQ ID NO: 13290 - DNA, 596 bp, Gossypium hirsutum
  unsure (1)..(596): unsure at all n locations; Clone ID: LIB3829-010-Q6-K6-B10
tccgccagnacaccacccgtcaccacaggagggtgtcgccggcgacggtggtgaagggtcgaaggaagtgtaaagcccgttttgttatcttaaaagatgggtcaagggctgagttgtggagcgagtcaagagaatgtattgtttagtgcagttcaaggtggagaccttgaaactgtggaagctttattaaagaaagaatccaatcttttacatcatacgactgtttatgaccgccactctgctcttcatatagctgctgcttatggccagatcgagattttggctatgcttttggagaaatccgtgaacccggacgtagtgaatcgtcaaaagcagactccccttatgttggctgcaatgcatgggaatatctcctgcgtgaagaagctgattgaagccggggcaaatatcttaatgtttgattcaattcatggaagaacttgcttgcactatgcagcctattatggtcactctgactgccttcaggctattctctctgctgctcgatctagccctgttgctgtttcatggggatatgcacgttttgtgaatataagagatgccaagggagctacttccttgcacttagcagctcg

SEQ ID NO: 13291 - DNA, 581 bp, Gossypium hirsutum
  unsure (1)..(581): unsure at all n locations; Clone ID: LIB3829-010-Q6-K6-B11
ctgnatggggcaattcgagtaaatccgtggaacattgatgctgtagcatgagcaatggactgtgcccttgctatggcagaacagaaaaacagctcaggcatngaaaagcattacagatatgtgagtacacatcatgttggttactgggctcatagtttccttcaggatttggagaggacttgtcgagaacattctagacggagatgctggggtattggttttgggctaagttttcgagttgtggctcttgatccgaactttagaaagctctcaatggagcacattgtatcagctcacaagaggactaccactagggcgattcttctagactatgatggcactttgatgccacaggcatcgattgataagagcccatcatccaaatcccttgacatcctaaatagcctgtgcagagatagaaacaacatggttttcattgtcagtgctaaaagccgaaagacactcactgaatggttttctccatgtgagaaactaggaattgctgctgagcatggctacttcttgaggctcaagggagacgtggaatgggagacgtgtgtaccagccgtggactgtgcatg

SEQ ID NO: 13292 - DNA, 251 bp, Gossypium hirsutum
  Clone ID: LIB3829-010-Q6-K6-B12
gcagtaacctctgcactaagtatcagtccgacggctttctttccggcttaaaaggagaccttagctattcacatctcgagtcagtgaacgagggtcaccctgacaagctatgtgaccagatctttgatgcaaagcttgacgcctgcctcgctcaggaccctgacagcaagaattgcctgaagaaacatgcaccaagactaacatggtcatggcgatttgaagagatgaccaccaaggccaatgttggacta

SEQ ID NO: 13293 - DNA, 578 bp, Gossypium hirsutum
  Clone ID: LIB3829-010-Q6-K6-B2
ctccgggaccgggggctaagccaaaggcacgccgccttttcttccggcgatttcaacaccgccgttaaacacttcacggaagctataaacctttccccgtccaaccacgttctttattctaatcgctccgccgcttacgcttccctccatcaatacgattctgcattatccgacgctaagaaaaccgtcgaccttaaacccgactggtccaaaggttacagcaggctcggtgccgctcacctcggtttgcaccaatacgaagacgctgtttcgggctataaaagggtcttgagatcgatcctaacaatgaagcattgaaatccggcttggccgatgctcagtcggctgcgacggcttcggcttcccgagctagggcagcgccgcctcccaatctatttggtgatgcttttcagggaccggagatgtgggctaagttgacggcggatccgactactagggtttttttacagaagccggattttgttaaagcgatgcaggagattcaaagaaatcctagcaaattgaatgagcatttgcaagaccagagagttatgcaagctctgggggttttgttgaat

SEQ ID NO: 13294 - DNA, 576 bp, Gossypium hirsutum
  Clone ID: LIB3829-010-Q6-K6-B3
atgcgataatagattgtcactatcatccaaagtagttgattgattgatggggtccgaagggccagcagcagtaaccatccatgtgactggttttaagaaattccatggagtttcagagaatccaactgaaacagttgtcagtaatttaaaagagtatacagaaaagaaggtttgccaaaaggtgttattcttggcagctgtagtgttcttgagactgcaggtcagggagcactccctcaactataccagacattgcaatctgccttaaccggcaaggaatcttcttgttctgggagaattatttggctacattttggagtcaatagtggtgcaagtagatttgctgttgagcgtcaagctgcgaatgaagctactttccgttgccctgatgagatgggatggaaacctcagaaagtacccattattcctgcagatggtggaatttcacgtgtaagagagacttctcttcctgttgaggagattacaaaggccttagcaaagaagggatttgaggtgatgacctccgatgatgcaggacggtttgtgtgcaattatgtttactaccactcccttcgc

SEQ ID NO: 13295 - DNA, 594 bp, Gossypium hirsutum
  Clone ID: LIB3829-010-Q6-K6-B4
attccttcatctttatcttcgatcaatcaaccatgactggcaaagccaagccaaagaagcacacagccaaggaaatagcggcgaagatcgacgccgccacaaccaatagaggcggcggcaaggccggatttgctgaccgttcgggtgtggagaaaggtggacatgctaagtacgagtgtcctcattgcaaaataacagctccagatttgaagtcgatgcagattcatcatgatgccaagcaccccaaggttccctttgaagagtcaaagcttgtgaatctacatgctgttcatgtggttgagacttccaagcctcgtcctggtgttaggggcagccttaaaaagtgataaaaaaccccaaaaaatgtgtttttcgtcaagctttggtgttttgtgatgtttcgaaatatgggtttggttcctttttcatcttttaattgtttgtcacgcttgcagtagagatgggaatgagaaaggggttggggtgaaaaaagttggattattcttgtaagggtcccccttgatttgatgtcgatgatgaatggtgttgttatagcttcctcatttaatgctaatgaagtgtttgtgcaataaa

SEQ ID NO: 13296 - DNA, 578 bp, Gossypium hirsutum
  Clone ID: LIB3829-010-Q6-K6-B5
gtttggttcacaaatttgcgagaggaaaagctttcatcatcagcgaaaaaaaggaattttagtcttcaggggaacgatcgaacgatgtcgtacctactaccgcacctgcactcaggatgggccgtagatcaggccatcttggcagaggaagagcgtctcgtcgtcatccgattcggccacgactgggacgaaacttgcatgcagatggatgaggtgcttgcttctgtcgctgaaacaataaagaactttgctgtgatttatcttgtagacataacagaagtacctgattttaacacgatgtatgagctttacgatccatcgacagtgatgttctttttcagaaacaagcacattatgattgatcttggcactggcaataacaacaagattaactgggcactcaaggacaaacaggagttcatagacatcattgagactgtataccgtggggcaaggaaaggtcgtggtctggtaattgctccgaaagattactcgacaaaataccgctactgagtattcttgcaacctgttgttgatcagaaagatttaatggtcatatttcgcgaattcaatacaga

SEQ ID NO: 13297 - DNA, 580 bp, Gossypium hirsutum
  Clone ID: LIB3829-010-Q6-K6-B6
ctatagcattggctaacatgcaattcagttggatactctctgctatcttaatattcacagggttcaccagcctcaaatttgctggaaaatgtaccccaagggcacaatcaaccgaatacgagcaactcgaaattagaaccagtgatgtccctataactattgataccttcaagagctgatgatccctaggtcttgtaatcaataacaaagaaattggacaagaatggctaatattaaacattgctgaataatgttatgcatattctataaatattgatttccctcacagtagctttccattttggatgttattagatatcaatgctaaattttcttacaagccaatgaacttacaacacatataaaacaaccaaacttccacataaagtaaaagtacaaattttggggcaatgaaaacaagttatgtcttaaaattctcttactcagcctcttccaaagaagcttcgattcgaagcagcacaaatccgacagcaacaccaacaagaacaaggccattcatgattgctgcaatcctgaatatctcaccaatagcattgcaggttgaagacagtgcaccgcc

SEQ ID NO: 13298 - DNA, 590 bp, Gossypium hirsutum
  Clone ID: LIB3829-010-Q6-K6-B7
cccagcgtccgatttatccttcttcatgttaggaaatgattctagtgcacaaatgactggaaaggggcatggtggcacagtagcttcacagttcattcaggttttgtggaggatgacagccctttttccacgggaggtcagaagggaacgtattatttcgaattttctaggcctttaagaaccatggatcgtcttcaacaggatgttcagttcacaataggtggatcaagcaagatgtcggttgcactctggtatccggttgacgggaatccatggagtggatctggacactatactattaactgcgattgggtgtcgtttgatattgcttcaggtggttctaagctaaccaagtctgcgaaatcaagcagctcctgggatgctgcatctgccttttctcttttattctcagtagcagctctttgtgtggctatatttgtggcgtatcaggtttcaagaccaaagaatatcccattcacaccaatggaaaatctttagactacggatgttaaagtctgccattgtacaattaatcgagttcgagtttaagcttgagcttctcatacatgttagagattgtactattattg

SEQ ID NO: 13299 - DNA, 578 bp, Gossypium hirsutum
  unsure (1)..(578): unsure at all n locations; Clone ID: LIB3829-010-Q6-K6-B8
aaatatatgctgaatgattggngatgtcatgatagatgcacgatcaactggaaaatttatcattttgtacggctcatgggacgtgcagcttcacacattactttggagtgtgctttgcagactcatcctaacattactattattggagaagaggttgctgccaagaagctgacccttaaaaacgtaacagactacatggttgatgtcatttgcaaacgtgctgaacttggttataactatggagttattctcattcctgaaggtcttattgacttcattcctgaggtccagcagcttattgctgaacttaatgaaattctggcacatgatgttgttgatgaaaatggcctatggaaaaagaaacttaccgatcaatctctgaagctttttgagttcttacctcaagcaattcaagaacaattgatgcttgaaagggatccccatggaaatgttcaggttgccaaaatagaaacagagaaaatgctcattcaaatggttgaaaccgaattggaaaagaggaagcaggaaggttcttataaagccaattttaaaggacagtcacacttcttcggatatga

SEQ ID NO: 13300 - DNA, 498 bp, Gossypium hirsutum
  Clone ID: LIB3829-010-Q6-K6-B9
caggctgttggcaaagtgttgccattcattgatggcaagctgactggaatggcattccgtgttcccacagttgatgtctctgtggttgacctcacggttaggcttgagaagaaggcttcttatgaagatatcaagggcgctatcaaggcggaatctgaaactaatttgaaaggaattcttggctacgtagatgaagacttggtatcgactgactttgttggggacagcaggtcaagcatctttgatgccaaggctggcattgcattaaatgacaattttgttaagcttgtcacgtggtacgataacgaatggggttacagttctcgtgtgatcgacttgatccggcacatggcttctgtgtaagtgagtgattttggtgaaccaaactcatttcataatggactttttaataatagcctcgttcttcagctttagcaaaatatagaagagatgctatgggaataataatagaaattgctcgggattctgggagtttct

SEQ ID NO: 13301 - DNA, 573 bp, Gossypium hirsutum
  unsure (1)..(573): unsure at all n locations; Clone ID: LIB3829-010-Q6-K6-C1
aaagggaagctgaaataagtctaagnananaaataaagagaaagataaagcatttagtaagagccacactgatgcagaagagcttgaaaagagagctgttaaggaaactgaactgaagcatgactttgataagaagtgtgagattgatttctgggaacatctgaggtctgggtctgataatctcaagggcaatgctctagaaacaggacatgtaattaaaagtactcctgcaattaattttagccggggaaatggtggaactagataccttgaccgtatgaggggtacatttttgtcatcctctaaagcttttacaggaagtagtttctttggaaagaatactaatattcctgctattgcaaaagaaaaaaaaaactaataatcctgtagaccatgcccatacttcagccgataggagggatttctgtccatctgaacgagtagctgggaagttgagtatggatggagatgataagaatgctaaaaacaaccactctatgctttcagaaccccaactgtgggcagcacccaaaaagtcttggcaacagttatttactcgttccccttctcttc

SEQ ID NO: 13302 - DNA, 585 bp, Gossypium hirsutum
  Clone ID: LIB3829-010-Q6-K6-C10
ctcgacaccccaaaatcaaaaccctaataaaaagtcttcgattgttcttccatcgcgaataagttcacataaatgcagttcaaagatcattaatcgaagggtatttagttcaggagtggatacttcatcttcaattccgtctaaagaaacggtcattgcttcacaatccattctttccgatcaatcgccggtgcctcatcctccgccggccccggaaactttccctccagcttcgggagggaaactttggagctttctcaagtacggactcgtcggagctgtcactggaactgttggctatgctggttatctctcttacaagtgttcgtacgaggaagtagatcagaaggcaaaggcattgcgggctgcagcaagttatgctcctagtgaagatgcatctgctattgataaatatcgaggcttgctttactctgctgctatgacagttccagctaaagcacttgaatcctatctggatctcaggaggttggtggaagaaaacgtattggaatttactgaaccaacctcagataagcttcttcctgatttgcaccctcaagaacaacatgtttttacgcttgtcct

SEQ ID NO: 13303 - DNA, 476 bp, Gossypium hirsutum
  unsure (1)..(476): unsure at all n locations; Clone ID: LIB3829-010-Q6-K6-C11
ggnatctgcctgtgtgatgccaacatgactactatgtttttagggccttcgtacagatcctacaatcatttttgttctattcagcaggaggcatttctatcgagttataacaatcgcattggtataatttcattgggaaagtccatgtttttgtgacaaaagttttatactcagctccttgccttttatcataataatgaactcatgtcagatattgtggaaacctttgatgataaaaaagtttgtccttgaagaaaaaaaaaaaaaaaaaaaaaaaaaaaaaaaaaaaaaaaaaaaaaaaaaaaaaaaaaaaaaaaaaaaaaaaaaaaaaaaaaaaaaaaaaaaaaaaaaaaaaaaaaaaaaaaaaaaaaaaaaaaaaaaaaaaaaaaaaaaaggggggcccccctttttggaggaaccaaattttcttgcccgcgggcctggcaaaagaaaaattttttttttatgggcccccc

SEQ ID NO: 13304 - DNA, 580 bp, Gossypium hirsutum
  unsure (1)..(580): unsure at all n locations; Clone ID: LIB3829-010-Q6-K6-C12
cggncgcgtgggtgccagagttgctcttcataggaacgatgttgaactcgtcgccgttaacgatcccttcatttccaccgattatatgacatacatgttcaaatacgacagcgttcacggtcaatggaagcaccatgatcttaaggtcaaagactctaaaaccctcctcttcggcgataaaacccgtcactgttttcggaatcaggaaccctgaggagattccatgggctgaagccggggctgagttcgttgttgagtcaactggagtgttcactgacaaagacaaggctgctgctcacttgaagggtggtgctaagaaagttgtgatatctgcccctagcaaagatgcacccatgtttgtaatgggtgtaaacgagaaagactacaagccagagcttgacattgtttccaatgctagctgcactaccaattgtcttgctccccttgctaaggttatccatgaccgatttggaatcgttgagggtctcatgactaccgttcatgccattactgcaacacaaaagaccgtcgatggaccatcaatgaaggactggagaggtggtagagccgcttccttcaa

SEQ ID NO: 13305 - DNA, 576 bp, Gossypium hirsutum
  unsure (1)..(576): unsure at all n locations; Clone ID: LIB3829-010-Q6-K6-C2
tacctatattagtctttggtggttcgagtatttcaacccccggttgtttacgatcatttggngagaaatatattcagcactcatctttggaagcttgatcttttgtgttttcttatacattaaaggtcatgtggcaccttcttctacagattctgggtcatcggggaactttataattgatttctactggggcatggagctgtatccacgaattggaaaaaacttcgacatcaaagtctttacaaattgcagattcgggatgatgtcttgggctgttctcgctgtcacctattgcataaagcagtatgaactcaatgggaaagtttcagattcaatgcttgtgaatacgacattgatgcttgtgtatgttacaaagttcttttggtgggaagctggttactggaacacaatggacattgcacacgatcgagctggattctatatttgctggggttgcttggtttgggttccatccgtgtatacttcaccagggatgtaccttgtcaaccatccggtaaaccttggaatgcagcttgcactatatattcttgtcgctggtgttctttgcatatatat

SEQ ID NO: 13306 - DNA, 578 bp, Gossypium hirsutum
  Clone ID: LIB3829-010-Q6-K6-C3
gctcccttctttgtcgggttttggctcagatcgactgccgggtatttcatcttgggttggtggtgacatgggtgattttccaatccaaattagcaccaggcttatcgaccgactaactgaagatgatgagaaggtgaagaaaagaacaaagaaaactaaaaccagggtgccacgagagcctcgactgccagaaactaaggtagatcagccgcaaatatctgatggttctgaacaacagaaagggactagtacaggcaccggctgggctgttccgcctcccttgtttatgcctgtaaaccaacctccttactctgtcagtgcagaattggatgcaattcgatctgtcgttaaagagagcgagaacgtagtagaaaagctgcggaagcaggaaaagaacatggtgcaggaagtaacacaaaaagccaaggatcttcatgataaggagttcaagataccagaaccaaagcctatgccttgttcggttgagagtaatgcttggatgacatgctacaaggagaatactaatgaccttactaaatgcgctcctctggcgcaaaattttgcagaatgtgctcgca

SEQ ID NO: 13307 - DNA, 578 bp, Gossypium hirsutum
  Clone ID: LIB3829-010-Q6-K6-C4
actgagcactgttatttctttcccctgatttaatcaactcaaaagtattattatttactaaaggcagaaacttcttctgcttgaggaaacaaagcagagggcaacaatgaagtgggtcgaagtcatagtatctttcatcctcacactatcgttcttgtcgtttccttcatgcgggttccaatccgatgagcttctcgttgacgacgaagagttcggactcgagggggctccgcaacatcgttcccctgaacccatccccactcgatccccaccagtcacatccccgacccgaaagaggcattcagatctagattccgattctaagatccagttctctcttgaccatgcttttggcgactccgatttctctcccgctggcactttctccgcccgcctcaaaacatggagccacggcggccagactcttacaaagctacggttttcgaggaatagtttctctgatgtggagaaggagaagttcaaaaatctgctcgaaagtgatgacttctataggataagactcccatctaatgttttgagtcctcctgggagggattttattatttcatcagtgaaag

SEQ ID NO: 13308 - DNA, 577 bp, Gossypium hirsutum
  unsure (1)..(577): unsure at all n locations; Clone ID: LIB3829-010-Q6-K6-C5
ggtgattataactatttnganagctgatattgtatgtaatcaatgtgatgattgtgaaccttaaacagttagcaaatgattatgatctgtgctaatggatgctctatgattgatcaaagaatggtaagttatctgtctattcttaatgtttctttcttttgtgcgtgtatgtgtgcgttcttgttcatatgtgtaatgttccttaccaatcttataggtgagacgtgcagtgcatgtgaggaaataaaggcatttatggagtcagagttaccaacttttaaagagaaaaaccctcagctggaggtggttaatgaactcattcatgggcagcatccacatttgaaaggcttttacaagaacaaaaacgaacgggtggtatgcgtgaagaatatgactcctgaagatatccttctttatgcaaccaggctaagaaacgcattgggaagaaaggtggtgaaattgacgacaaggcatgtaactaaacaccctagtgtgcaaggtacatggacaactgatgtgaaattttgagacacagtagtaccaagttcttcacaatttttctgtatgtttctttatt

SEQ ID NO: 13309 - DNA, 579 bp, Gossypium hirsutum
  unsure (1)..(579): unsure at all n locations; Clone ID: LIB3829-010-Q6-K6-C6
ggnacctggntgtgctattttgatgcacaataaggttctttctgttgttgggcttctgcaagatgaagttgatcccatggtatcagtgatgaaggttgaaaaggctccattggaatcctatgctgatataggaggtttggattctcagatacaggagattaaagaggcagttgagcttcctctgactcaccctgaattatatgaggacattggtatcaaacctccaaaaggagttatcttgtatggagagcctgggacaggcaagactttgcttgctaaggcagtggctaattctacatctgcaaccttcttgcgtgttgttggaagtgaattaattcagaagtacttgggagatggccccaaattagttagggaactcttcagagttgctgatgatctttccccttcaattgtcttcattgatgaaattgatgcagttggtactaagaggtatgatgcccattctggtggtgaacgtgaaattcagaggaccatgttggagttactgaaccagttagacggctttgattcaagaggagatgtcaaagtaattcttgcgacaaataggattgaaagtct

SEQ ID NO: 13310 - DNA, 507 bp, Gossypium hirsutum
  Clone ID: LIB3829-010-Q6-K6-C7
cggccgcgtgggcggccgcgtgggcggacgcgtgggttgtgaagttagagtgattttgaaaggcttgggagttcgtatcgatgaacgagatgtttcaatgcattcagggttcaaagaggaattgaaagagctaataggagaagggtttaaaggtggattaccaagggtatttgtgggggaaaaatacatcggtggagctgaagaagtaaggcgaatgcatgaagaaggaaagctagagaaggctgtcgaagggtgtgaaatggtgggtgatgatggtgatggcaatgggggaggtagtggagcttgtgaagcttgtggggatatcagattcgtgccatgtgagacttgttcagggagttgtaaagtgtattatgaagatgatgaaagggaagaacaagaacaacaagaacaacaagaagaagatgatgatgagaatggaggtgaaaagggtgagtatggattccaaagatgtcctgattgtaatgaaaatggactcattcgatgtcc

SEQ ID NO: 13311 - DNA, 585 bp, Gossypium hirsutum
  Clone ID: LIB3829-010-Q6-K6-C8
gggattcgcaactcggtaagcacttgaacaggtcttggcctagggacatggatggttcaactctcacaaacaaagatagatgggaaattgatgcggctaaactcgatataagggatgtaatagctcatgggacttatggcaccgtttaccgcggcgtaaatagatacccaacatgttgcagtgaaagtattggactgtagggaggatgggatggccacacttgctgaagctgttgctctctgggcgttattcccacaagaagctgctgtatggcataagcttgacaacaccgaatgttacaaattttatcgaagctctaatgataacttccaaccttaaaatcccgtacaaaagattgaataagcgaaaataataattcccttcctgacatagcatgtagcagcggtgatcagtatcttcctggtggaacgttaaaaaattttttgatcatgaacagaaggaataaactcgcacttaatgttgccattcaaattgctcaggatactctctagacgtttgagctatcttcactccaaaaagattgtacaccgtgatgttaagaccgaaaatatgttgctagatgct

SEQ ID NO: 13312 - DNA, 580 bp, Gossypium hirsutum
  Clone ID: LIB3829-010-Q6-K6-C9
ctatccggcacttcctttcttccgtaatcttactttcagatttcagtctcagtaaagctgtttttgcaccagccaaatgggttcagttatatactctttctcagagtaagggcttttgttccaagtggtttactgcttcagccttcagcttcagggttggtgggtttttgtactgagttaaagaaatgcctctatatgattgtgtgcttttattgaagccccatgtgaagaaggaggggctcatcgatttggtagcacgtgtaggtagacatgtttatagcagaaatggggttctcactgagctcaaatcatttggcaccgttcaattaggttatggtatcaggaagctctccggaagatactaccagggtcaactcatgcagatgacaatgatggccacacccaatatcaacaaggagctgcagtacttgaacaaggaagacagactgttgcgttggcttttagttaagcatcgtgacacgaaatatgggctggaattccttaatgaagaatgatggggaattggagcttagcaaactctctcgaggcagtatatatgaagaggacattgatgacgatg

SEQ ID NO: 13313 - DNA, 426 bp, Gossypium hirsutum
  unsure (1)..(426): unsure at all n locations; Clone ID: LIB3829-010-Q6-K6-D1
gnaaattgatatgtcagcgaatcagnaactatattctcatctggaacattggctgaagttcttcttgaggcgtctagtggtgctataaatgctaaagttgagcgaggagaagagcacaaagtcttctgaatgagtactggagtagaagggatgcaattcttgattccctttatcaacaagttaaaggttttgtagaagctggtcgtcaggacttaactgacagcacaggagagaataaagaagaaatccttaaaaatctgtcttcaagcttgctgtcaatagcaaaacgacatgaaggctatcagaccatgtggaacatatgttgtgatctcaatgattcagggttgctcaaaaatcttatgcatgagagcatgggacctagatgtggattcagttactttgtgtnnttaaacagncnntgtatgg

SEQ ID NO: 13314 - DNA, 592 bp, Gossypium hirsutum
  unsure (1)..(592): unsure at all n locations; Clone ID: LIB3829-010-Q6-K6-D10
gcatccccccanaccagcaacgtctcatctttgccggaaaacaactcgaagacggccgtaccttggccgactacaacatccagaaggagtcaactctccaccttgtccttcgtttgcgcggcgggatgcaaatcttcgttaagacgcttnaccggaaagacgatcactctcgaggtcgagagctctgacacgatcgacaacgtgaaagccaaaatccaagacaaggaaggcatcccgccagaccagcaacgtctcatcttcgccggaaagcaactcgaggacgggcggactttagccgattacaatatccagaaggaatcgactcttcatctggttctacgtcttcgaggtgggatgcagatcttcgtcaagactttgaccggtaagaccattactttagaagtggagagctcggatacgattgataacgtgaaagcgaagattcaggacaaagaaggaattccaccagatcagcaaaggttgatttttgctgggaaacagctggaagatggaaggactttggctgattacaatattcaaaaggagtccactcttcaccttgttcttcgtcttcgtggtgggttctaagcct

SEQ ID NO: 13315 - DNA, 595 bp, Gossypium hirsutum
  Clone ID: LIB3829-010-Q6-K6-D11
aatttctcataaatcaaacatattttgtcataatctcgaatcatcacatcaatggctcgtacaaagcaaacagctaggaagtcgactggtggaaaagctccaaggaagcagctagccacgaaggccgctcgtaagtccgctccggcgaccggcggagtgaagaagcctcaccgtttcaggccaggaaccgtggctttgagagagatccgtaaataccagaagagcaccgagttgttgatcaggaagcttcctttccagaggctggtgagggaaatcgctcaagatttcaagactgatttaaggttccaaagcagcgccgtcgctgcacttcaagaagcggcggaggcttatctcgttggattgtttgaagacactaacctgtgtgcaattcatgctaagagggttactatcatgcccaaggatatccagcttgctaggaggattagaggtgaaagagcttagattgtttgtatttacttgattgattgtgaaattaggttagatctagtgtttggtatccgtttttggaatttgctttctcggcaaaaatccttatgtaaacggtcgtctttctatggagttctagtactttcgt

SEQ ID NO: 13316 - DNA, 579 bp, Gossypium hirsutum
  unsure (1)..(579): unsure at all n locations; Clone ID: LIB3829-010-Q6-K6-D12
ccgtccggtttagggtttctgatgaaaaacgccnnnctgcaaaaaccatgtagcnnattctttgacagnaaacaatgatggcattatttatccatgggagacttttcaaggttttcgagcaataggggctggttatttattgtcattcatcagtgccttcttaatcaaccttggtctcagtcgtaaaactcgccctgtttgtgtcgtggaagttcgaagaaatcttcgccaaattcgctcgcactcattcggatgccttaacatcccatgaactgaaggcaatgcttaaggctaacagggaacccaaggattacaggggatgggttgctagctggacggagtggataactctatacaatttgtgcaaagacaagggaggattattgaagaaggaaacaattagaggtgtttatgatggaagcctgtttcaacaaatggaaagggaaaaattagcaactgccggtaaaaagaaagaatgacatactcttacatgggcttgatttttattatgaatttgttttgatgagatgtaaatttaattactcgtttgaaggaattgaaacaattaaaatttcaccc

SEQ ID NO: 13317 - DNA, 376 bp, Gossypium hirsutum
  Clone ID: LIB3829-010-Q6-K6-D2
cgaagtgagaggacaaaggaagacatcattgacttcatttgaaaataacaggggaaaaaactgctcatcaagaggcattaaaagatgagctctgaagagggacttgaaaagagaagagacataaatagtgcattgtacgttaaatacgagaattgctattgactaagcggatgactgatctcctttttttaccttatctcctttagctttacatttaaaaaagacctagctatgaataatgcaggatgtatttttatttttagaaggtttagacgatgttataatagttttgtaacagttaaatttgctataggaaacatccgagcaaaacctagagacaggatattttaatttattttctctttgcttccctttt

SEQ ID NO: 13318 - DNA, 566 bp, Gossypium hirsutum
  Clone ID: LIB3829-010-Q6-K6-D3
cttttacctcatttccttgttttggccttccaagatctttcttttattagcttacttggtttttgaaaccggtcctctttgctgcttatcctaccatcaacacaagtaatggcaattggaggaccgttatagacaagttcagaggcctaaatatgattgccttcttttcgatcttggatgataccctttatccacttagttctggtatttcaaaagaatgtggaaagaatattaaagactatatggatgaaaagctggggatagaaatagacaaaatcgttgaactgttcaacctgttgtataagaattatgggacaacaatggctggcctcagggcaatcggttatgactttagatatgatgaataccacagctacgttaatggaagactcccttatgaaaacttaaaaccagatcctcatttgaggagtctattgctgaccttgcctctaacaaaaattatcttcacaaatgcagacaaggtccatgcacctaaagctctaattaaactcagactagaagactgtttccaatggataatctgctttgagacactcaatcctacc

SEQ ID NO: 13319 - DNA, 584 bp, Gossypium hirsutum
  Clone ID: LIB3829-010-Q6-K6-D4
atcgacgctggtttcccctttttttcttgttgggtttagggtgaaacttaagtgaaaccactcagatgggatccggtgggagcaagggttgttgtagagtaggaggaggaggaagagacactgcacctgctgcttcctcgtctagcagcggtgggctgaggggaagatccaaggttaagaatagagttttccggtcctcttgtttgggagcgttatctagatctgcttctcctaaacccaactttgatcaccggaaacaacctgcgtcggaatcggatctggtgaaaagagaaagtaacagaaaggttgaaggcgaagcggcatctaatgaggaaatgcaattgccattgccaaccccatgcatatcttccggtggtagcacctctggtgcagctgtaacagctgctcatcgctctccttctcgctgcctctccggcattagcttccttcctggtaatttgagcttccggttcagcagagctaatagcatggggtcctccgcggagatgttgaaccctgatgacgattctgagacacttgaacctcaacaacctccccgcaattcttgttctccgattatcttc

SEQ ID NO: 13320 - DNA, 593 bp, Gossypium hirsutum
  Clone ID: LIB3829-010-Q6-K6-D5
tccgaaaaaccaattgggtttcactgtcttcccatcaccccaggtctccacatctgttgttgagccctacaacagtgtcctctcaactcactcccttttggagcacactgatgtggctgttcttcttgacaatgaggctatctatgacatttgcaggcgctctcttgacattgagcgacccacttacaccaatcttaaccgtcttgtctcccaggtgatctcctctttgactgcttcacttaggttcgatggtgccttgaacgtggatgtaacagaattccagaccaacttggtcccttacccaagaatacacttcatgctttcttcatacgctccagtcatctccgctgagaaggcttaccatgagcagctatcagttgctgaaatcaccaatagtgcctttgagccctcatctatgatggccaagtgtgatcctcgccatggcaagtatatggcttgctgtttgatgtaccgtggtgatgttgtgcccaaggatgtcaatgctgctgttgccaccatcaagaccaagagaactattcaattcgttgactggtgcccaactggattcaagtgtggtatcaactaccagccac

SEQ ID NO: 13321 - DNA, 568 bp, Gossypium hirsutum
  unsure (1)..(568): unsure at all n locations; Clone ID: LIB3829-010-Q6-K6-D6
cccagcgtccgcttgnatatgattcaatgtggctataacatccttcataacataacatgctttccatgtaactcatcatttcaatgtatttcatgtatacctgtatttgttcatattgaacatttaccgtttcatttccaattcatgcctgttgtatcgaatagaatatcgttggatacctgggatagctcatacaaagtgtgctaactcatataattgtaatctgtcaattcatgtacatatatgctcacacgagctgtgaataagtatgatcacacgagctgtgaaaatgggcttgctcacacaagctatggagtatcgacaacatatgctggacctcagccatcggtaggacattcaagaccagcacccgaatcatgtaaaccctaatgacatgtcatttgtatcctacgaattcttaaggttcaaatggggctggtagtcgtcgtacgtcgttgaatttctatcatttcatgacataataaattgcataataacatctatatattaattaatgtaaaatagaatagcacattaaacagtcaatttaacttacatttaagtgttt

SEQ ID NO: 13322 - DNA, 582 bp, Gossypium hirsutum
  Clone ID: LIB3829-010-Q6-K6-D7
aacttgtttcggcgaaaggaaaacgagaggctttgtatttatttctttattgttagttaggccccccgatggagaccggaccaaccggcggtggcctaggtggtgacgatctatcccaatcgtatcctgcgaccgctatatcgcggtggagcttcgaggtgtcgcggcggtaccagcacgttctggacaagactgtcccgcacattctgtaccgttggatagcatgtctggtgctggtgctgatctacgccgtacgcgtctactttgtgcagggtttctacatcatcacctacggcctcggcatctacttgctgaatctcctgatggggttcctttctcctcaagtggaccccgagatgcaggatggcccctcgctccccacccgcggatccgatgagtttcgccctttcgttcgccgactccccgagttcaaattctggtactctattacaaaggccttctgcattgcttttgtgatgacgttcttcagtgtgtttgatgtgcctgtcttttggcctatactccttttctactggctaatgttattcattctaaccatgaagagacagatattgcacatga

SEQ ID NO: 13323 - DNA, 591 bp, Gossypium hirsutum
  Clone ID: LIB3829-010-Q6-K6-D8
ggcgtgatttgtacggagactttctcggcggagggatttgaagttgatccgttgatcgaacaagtaacggacggtcacgaaggagccgagccgcagctgctgacggcggagcatcacttctcgctgttcaagaagcggttcaagaagtcgtacggatcacaaaaggagcacgattataggttcaagatttttcaggttaacctgagacgagcggcgcgtcatcagaatcttgacccgtctgcgactcacggggtgactcagttctccgatttgactccaggcgagttcagaaaggcatatttgggattaaggagattgagattgcctaaagatgcaactgaggctccgattttgcctaccgataatttgcctcaagattttgactggagagaaaaaggagctgtgacacccgtcaaaaatcagggttcatgcggatcatgctggtcttttagtacaacaggagccttggaaggagctaactttttggcaactgggaaacttgtgagcctcagcgagcaacagctcgtggattgtgatcacgagtgtgatccagaagaagcaggttcatgtgattctggatgcaatgggggg

SEQ ID NO: 13324 - DNA, 569 bp, Gossypium hirsutum
  unsure (1)..(569): unsure at all n locations; Clone ID: LIB3829-010-Q6-K6-D9
ngacactaggagttccaaaaaaggtcacacccgatattcacctccttcaaagttttggcattttcattttcgtctccaccactaaaaaagccctgcgtccttcgaatcgattcgattcgatttcagcatcttttaaatcctctcaatttctcagatctttcccagtcttttctgcaaccatgagtaaggcaccaggactcttcgtcgatatcggcaagaaagccaaagatctgttgactaaagattatacctcgtatcagaagttcactgtttctacttacactgtcgctggagtggcccttacatcaactgctctaaagaaaggaggactttctactggggatgttgctgcattatacaagtacaagaatactcaattcgatgtcaaagttgaaaccgactctaacatctcaacaacacttacattcactgagattcttccatccacgaagactattgcatcgttcaaagtgcctgattataagtccggcaagttggaggttcagtatttccatgaccatgcaaccgttacaacaacggttggtttgaaccagacaccatgcgttgat

SEQ ID NO: 13325 - DNA, 328 bp, Gossypium hirsutum
  unsure (1)..(328): unsure at all n locations; Clone ID: LIB3829-010-Q6-K6-E1
cccagcgtccngagaaatcagnaaatgaaaaagcgtgagcaagccagtgactgcaagcaacactgacatttttgtgcccactgctaaaccagaagcattggctatcaccgcgatatgcnacatgagaaacatctcaccctatttgatattctaaacaataattcaatggcttcttattgttgaacggtaaagagactattggttactagtgatttgtggacaaactatctattatctaagggtgagatatattagtagttacatcatgtatctagggaatttagaataattttactacagttaataagattattagacctatcaattt

SEQ ID NO: 13326 - DNA, 579 bp, Gossypium hirsutum
  unsure (1)..(579): unsure at all n locations; Clone ID: LIB3829-010-Q6-K6-E10
ctttactatctttcctcctcaaaaaactctctactacccagtataagccatgagtcgtcatcctgaggtgaaatgggcacaaagaaccgataaggttttcattacggttctattacctgattcaaagaatgcaaaagttaaccttgagccggaaggagtgtttaatttctctgctactgctggaactgacaataacacatatgagttgaagttggatctttttgataaggtcaacgtggaggaaagcaaaattaatattggagttaggagtatattctgcatcttggagaaggctgaaaaagtgtggtgngaaaaaattattgcgcggggatggcaaagccccccattacgtcaaagtggactgggacaaatgggtggatgaagatgaagacaagggtcttggtgatcttgacttaggaggaatggacttctcgaacttcgggggaatgggcggcatgggcgacatgatgggcggcatgggcggcatgggcggcatgggtgacatgatgggtggcatgggcggcatgggtggcatggatgaatttgaggacagtgatgatgaagggcaagaagtgacaa

SEQ ID NO: 13327 - DNA, 588 bp, Gossypium hirsutum
  unsure (1)..(588): unsure at all n locations; Clone ID: LIB3829-010-Q6-K6-E11
tccgggccgatctcgttaggttggaaggtaatgcaatgtgctcccctggcttttcttgtgattcagccttgcaggtaacgtacattgttaagggcagcggtcgtctccaagtggtgggtgtggacggaaaatgggtcctggaaaccattgtgaaagcaggtaatctgttgattgtgccaaggttctttgttgtttcaaagattgctgatccaggtggtttgtcatggttctcaatcatcaccaccccaaaccctatgttcacccacttggctggaagcattggggcatggaaggctatatcaccagaagttcttcaagcagcattcaaggttcctgctgagacagagaaacttttccgctccaagaggaccaatgatgccatctttttcccaccacctaattgaagcaaactaaagcatccatttagctatctgctagtttctctaaatacgcttgagcttctattagtaataattagttttgaattataatcttttattattgnttctttagtacttatcaataaaagttaaatttagagttaaattataaannaaaaaanaaaannnnaaaaaaanaagggcggcc

SEQ ID NO: 13328 - DNA, 604 bp, Gossypium hirsutum
  Clone ID: LIB3829-010-Q6-K6-E12
cccggggtcgtacccacgccgtccgcttcatgccgttacatagtccctttcccattttccgactgggaatccgacgaatcggggacaccttccgacgacccacaacggtaagtcctcccttccttcccctcctcgttttttgttttgttttgagaacaaaggaaaataataaataaaaacagtaaaaaaagaacagaggaaaaaaaagaaccaaaatccgtcaccttcaaaaaaaactttgttctctcttgtattttcttttttaaattttcaatacaaaaaaatttgctaacccccctttttacagattcgatttcccttttatctagcccccctaaatcttttttacaacttgctaccccccctattttgcttgctgctcgtggttctttttattgcaggtacatgcgtgtatgggaattgctgcgacgtggggtatgcacggcgctggaggttgctgagacgtgtgatgttgttgcgagggaagaacgtgggcagttgcggcatagggcgatggtggcgtcaaggctctctgctggttaggctagggatttgggttaatgacttgggcttgtaatgggtttgggccttaagcttatttggg

SEQ ID NO: 13329 - DNA, 580 bp, Gossypium hirsutum
  Clone ID: LIB3829-010-Q6-K6-E2
gttcattcctgtaccttacacttcataaatgttgttgaaggcaaacgagctgccaaggaagccttgcagcaaaggcttggtttgaagaaatctgatcatcctttggttggaatcattactcgcttaactcaccagaaaggaatccatcttatcaagcatgcaatttggaacaccttaaaacgcaatggccaggttgtattgcttggctcagctcctgatcctcgcatccaaaatgattttgtgaatttggccaatcagctgcattcatctcattcggaccaggctcgcctttgtttgacctatgatgaacctctttctcacttgatatatgctggtgccgatttcattctagttccatcaatttttgagccttgtggactgacgcaactgacagcaatgagatatggctccatacctgttgttcgtaaaacaggaggactttatgatactgtattcgatgttgacgatgataaagctagagctgaagcacaaggtcttgaacccaacggatttaacttcgatggagctgatggtgctggagtagattatgccctcaatagggctatctctgcttggtatg

SEQ ID NO: 13330 - DNA, 575 bp, Gossypium hirsutum
  unsure (1)..(575): unsure at all n locations; Clone ID: LIB3829-010-Q6-K6-E3
gnaacaggcacaattggttgtcatcgcccacgagtggatcccatagagcttgtagtctggcttcctgctttgtgcagaaagatggaggtcccctactgcattgtcaagggggaaagcacgattgggatcgattgtccacaagaaaactgcatctgtcttgtgcttgaccacggttaagaacgaggataagatggagttcagcaaaatcctcgaggcaatcaaggccaacttcaacgacaagtacgatgagtacaggaagaagtggggaggtggtatcatgggctcgaaatcacaagccagatccaaggcaaaggagaagcttctcgcgaaggaagccgcacaaaggatgacttaagccaaccattgttcccttccagaggttccctctggttaccaagtcaaattttactcctttgcccgaggattacttatatattttgtagtttaactttcaaaacaccgagtagctgctgtttgtgatgtaattttgtgcccaaaccatcatttatgctgagcgatcttacttaaatagtcgtgtatgatatatataatcagtttcgtcctcttgactaaaa

SEQ ID NO: 13331 - DNA, 576 bp, Gossypium hirsutum
  unsure (1)..(576): unsure at all n locations; Clone ID: LIB3829-010-Q6-K6-E4
tacccctcgccgttcccngatctccagctccgcccactctactcctccacgacgtcttccccaaattgttttcagaaaatctatagacgaaggtttgcgagcatttcttcttcaagtaatcaacaaacttcatcagttggagttaacccttatccaactgtgccaccgccgtcctctcaaatagggtcgccgcttttctggattggagtaggtgttgggctctcagcactctttacatgggtagcttcaagcttaaagaaatatgcaatgcagcaagctttcaaaactatgatgggccaaatgaatacacaaaataaccaatttgccaatgctgcttttccttcgggatccccgtttccttttccaacacctccgtcaacaggacctgtcacatccccttctccatcttctgctcaaaaaactagcattacggttgatgtacctgcaacaaaagttgaagcagccccggtgattgatccatcaaccaaaggaaaaagtgaaacagaaaaagcagaaccaaagaaatatgcttttgtagatgtttctccagaagaaactgtgcagaagagttctttt

SEQ ID NO: 13332 - DNA, 570 bp, Gossypium hirsutum
  unsure (1)..(570): unsure at all n locations; Clone ID: LIB3829-010-Q6-K6-E5
agnacattatgcttgatcagacatctgagtgttcatcctatgggttaagcaggagagaaactgcagatcttgataatcagatgcttgagttgtgggaaacaactgaccaagatgttaacattgccttgaaagttggcagggcccagaaggttgtcattgctccaactggcaaccaacgaattggtgctgcaaaggcacgcaagggcaaaagtctttctacagaatctcttgtgaaggagttaggtgttgatagagagagctctaagagatttacagagccttaccaagaaggaagcaagaggaagattatagaaagacttgattctgatgcacaaaagttggctaaccttcaaataactgtgcaggatctgaagaggaaagtggatataaccgaggcaggaaaaatggtgataggaatcgaatatggtacagtaaaacagcagctagaagaagctgaggaagccatcatgcagctatttgatgtcaatcgcaaactgacgacacacgttgaagatcgttctcggtctcttgatgggaaacctgcactagaatctgatgagagtggttcct

SEQ ID NO: 13333 - DNA, 475 bp, Gossypium hirsutum
  Clone ID: LIB3829-010-Q6-K6-E6
gctttatcttcgtgaggttcgtgatttgcagtcgaagcaagagggattagctacgagtaagaagaagcgtaagagaccaccacctcaacaaatcccatctctgcaactgcaagtgccaccaccaccaccaggtgctagttataaaacaatcactatgcatcagcataaaaaaccccatatgcttctcatccttgattgatctatgtggggtactacttatctttaattttgccatatcagtatatgtttagggtagttctttttttttcctatgctttcagtaatgcttttacagatttttgagggggattccttagaatctacttttgatgcaaacagtgttagtattcctcagtaatgactactagtagtactgcaaaaaaaaaaaagtcattctaggaagtgattgtactagcagtttgttgcctaagttgaaccttatgagagcagctaatatgctagatcatggcttttc

SEQ ID NO: 13334 - DNA, 571 bp, Gossypium hirsutum
  Clone ID: LIB3829-010-Q6-K6-E7
atcacattcgatgaagaactcgtgacgtgaaagtcaaaggttgatcaacccgtagttcctggcctggacgatgaagtgactgaggttgagcatttacttgcagaacctaaaattgaacatgtttcggtagatggaatcttatgttttggaaacgagaatatagagaagcacttgaaaatggaggacttctcgtgtgccttcgattatggctggaaaatcagttccggtgggttggattctatccgtggtcgaggaggagatgatttgaagctcgaagttctcgacggattgctcgatgaggttgatgaagtggatgatatcgatgcagcccatgatctctccggtgcttgtgaagattttcttttggatattgaatttcctgaaaagttatccgagttggattgtggtcctcgtgaaggatcaactttgtgcaactcaagttcagaaagtcattcgcctggatttagtggaaggagtaatagtgtcagtggcatatcagaatcattgatagcaactgttcgggaatccaacagcgagaatggtgggcttgggaagagggttggttgcaatt

SEQ ID NO: 13335 - DNA, 589 bp, Gossypium hirsutum
  Clone ID: LIB3829-010-Q6-K6-E8
gtgtttctctccatctagccgtctcgcgtgcgccctgtggctctcttcaaccctcgcatatctcttcaagatctgatctgatctgacaaaaaatgttcgggagagcaccaaagaaaagcgataatactaaatactatgagatattgggagtgcccaaaaccgcttcccaagatgatttgaagaaggcttatagaaaagctgcaattaagaatcatcctgataaaggcggtgatcctgaaaagtttaaagagttggctcaagcttatgaggtgctgagtgacccagagaagcgtgagatatatgatcagtatggcgaggacgcccttaaagaaggaatgggtggaggcggtggtgcccatgatccatttgatatcttccaatccttctttggtggcaatccttttggtggtggtggtagcagccgaggccgaagacaaagaaggggagaggatgtaattcatcccctaaaggtttctttggaagatctctataatgggatttccaaaaagctttctctttcacgcaacataatttgctccaagtgcaaggggaaagggtctaaatcaggtgcatcaatgaaatgttctgg

SEQ ID NO: 13336 - DNA, 352 bp, Gossypium hirsutum
  Clone ID: LIB3829-010-Q6-K6-E9
cccaaagctgccgcagcaccaacgccactttcggtggccaacgatgccgagaaatggtctttcgaccccgatccaaggctgttttctggttgtggagtcgaggaagagtgcatgatcgtggggcgtggacgtgcgagctaggggtcgtgtgtgggtgtgctgacgtgcgtggggcgccgaacgtggggggttgcggtgcaaggtgaaagaagggaacctaggttttctgaatttgggccttctgtcactgggctattttaacataattgggctgggtttttctttttgggtttattatttgtaaaatgaacatttaattctgttctaatttatttgtttgattttggtctct

SEQ ID NO: 13337 - DNA, 579 bp, Gossypium hirsutum
  Clone ID: LIB3829-010-Q6-K6-F1
catacttccgaggacaccaaaccttcttttgttttcttcttctaatcaatggcatcttccatggctacaactctcacttcctcttcaaagctttgcaggaacacttctctcttcgagtcttccttccatggggttccaattaagccactttcttttcatttcaaaacaaagtcttcccattgcaacgcatccatttccatgtctgcagcatcacctccaccctatgattttaataatttcaggtttgaccccatcaaggagtccatcgtctcacgtgagatgacacgcaggtacatgatggacatgatcatctatgctgataccgatgtggtggtcgtcggtgccggctccgctgggctctcttgtgcctatgagcttagcaagaacccctccgtacagatcgctattgtcgagcagtctgttagccccggaggtggtgcctggctcggtggacagcttttctctgccatggtagtgcggaaaccagctcatcgcttcctcgacgaactcgccattgaatatgatgaacaagacgactatgttgtgatcaagcatgcagcccttttcacatccacaatc

SEQ ID NO: 13338 - DNA, 583 bp, Gossypium hirsutum
  unsure (1)..(583): unsure at all n locations; Clone ID: LIB3829-010-Q6-K6-F10
ggntgcgaaaggaaggtcacgtctttgtcgtcgattttgccggcgcagggagagcagaagtggcgaagcgagtgtaggagctttcagagaagcatagttgaaatgaaccaattgatagaactgattaccgatataccgcccttatcaacctcgttcaaaaactccccgacgaacttcaccacgatacaatggttctactgggagaaagctactatgtagaaagaacagctaaacaaactagtgaaattctaaagagaaggggaaagtcatcggaacctgaagtggattgagtcttccttttttttttttaattccacagcttctgaagcagcattaagtttcccaatcgccttattttttgtttgttaattcgttgagtaagcattactctgatttcttttgtacctagtatttactgattactttcattttattgtttcaggaaggcctggtggagctcagagaagaggatgaagaggaaaataccaccgaactggtgtctcaattaggcagaggtcatttggagcaaggatgtcctactttttctgaagaaaacaaattaatgggtgcacctgaggatgat

SEQ ID NO: 13339 - DNA, 583 bp, Gossypium hirsutum
  Clone ID: LIB3829-010-Q6-K6-F11
aaaaaaaggatccgttaacacatggggcaactccccccttgaatccgtcgacccagaaatgctgacctcatcgagaaagagaagcgccgtcaatgccgcggcatcgagctcatcgcttccgagaacttcacttccttcgccgttatcgaagccctcggcagtgccctcaccaacaagtactccgagggcatgcccggtaaccgttactacggtggcaacgaattcatcgacgagatcgagaatctctgcaggtctcgcgctttgcaggcttttcatctcgaccccactaagtggggtgtcaatgtgcagccgtactccggttctccggctaacttcgctgcttacacggcggttttagagccgcatgatcggatcatggggctggatttaccctccggtggtcatttaactcatgggtattatacctctggtgggaagaagatctctgctacttcaatttactttgagagtttgccttataaggtgaaccccagcaatgggtacctcgactacgataagttggaagaaaaggcattggattttaggcctaagcttatcatttgcggtggcagtgcttatccta

SEQ ID NO: 13340 - DNA, 575 bp, Gossypium hirsutum
  Clone ID: LIB3829-010-Q6-K6-F12
gtcctcctatcctggtttgcaggtaaagaacacttgagcttgaaacacttagcgatgaagagattataaatggagtttcagcaacagtatctggtttattaccagtatcaaaacaccacaaggaagacaagtataattcccctgaattctgcaatgggaatgtggagagctgtgatgacaatggagtgagatttggtaaggttttgaagagcaaatggggcagtgatccattattcttgggatcttacagctacgtggctgttggatcaagcggtgctgatttagacacaatggctgaacccttaccaaagcttgggagcactgactcagaccaccatccacttcaaatattgtttgctggggaggctacacacagaacccactattctacaacccatggagcttatttcagtggtcttagggaagccaataggcttctcaaacattatcgttgtgttggggtttagacttagcaatttaatttatttttgaaatactctattttcctaaatccttctcatattctatctatataaaaccatctttgttttctctttcttttaagtaaagcgaac

SEQ ID NO: 13341 - DNA, 582 bp, Gossypium hirsutum
  Clone ID: LIB3829-010-Q6-K6-F2
aaaaattaaggctaattctagtaagagtccaatattacctcatcccttccccctaaaccctccgaattctagtgcttttgatttgaacttggcattaagaactgattttgttgaaggtaatggaagtcaaaatctgaatgaaaccaatagcatggcaggaggatcagaagataatatccgagagtcaactaggaatcttgattcacaaggagaaggtattatagaaatagcagactcttattccttccggggaagatctgaatccgaagatgtagatgctgagaattttaaatctaggttgaaatgccctcattgccgagggaacgtacttcgctgggaggttgtggaagaggccagaaagtatctaaattcgaagaagagaacttgttctagggaatcttgctcctactctggaagttaccaggaattgcgtcggcatgccaggagagtccatccgacaatacgaccttcagatattgacccatccagagaacgagcctggcgccgccttgagcaccaaagagaatacggtgacattgtaagtgctattagatctgccatgcctggtgcccttgtggttgg

SEQ ID NO: 13342 - DNA, 574 bp, Gossypium hirsutum
  Clone ID: LIB3829-010-Q6-K6-F3
ctccattctcatttaactataaaacccataatcaatcaatatccttcaagcagtcctggtagctttactgcaattgaaaaagataatgaggctattcatgtttatcttggtgttgggtggtgcaagttttgcagtaacctcaaacaggcttagccaatatgaggtgattgaaaaagactatatgaactgggttaaacaaaagtcttcgttcaagcactctctcttcggaaaacccaagaacaaattaaagccctgcttaaccataagagtaaacaaaaaaccaagtcttgcggagtttgccacagtgaaaaaggctattagttcgattccagtcgttaatcactgtcgggttgtaatcttcattggagcaggaatttacaggcaaatgcagagagaagattgaaatccctgcaaccatggcttacattacaatagtaggtgctggtgcagacaaaaccgtgattgagtgggatgacacagctgacaaaatggggcagtcaggccattcactgggcacctatggttctgcaacattcgccattaattctccatatttcattgcaaagaacataac

SEQ ID NO: 13343 - DNA, 587 bp, Gossypium hirsutum
  unsure (1)..(587): unsure at all n locations; Clone ID: LIB3829-010-Q6-K6-F4
cccagcgtccgattgaatttgagaatgaatctttccagcgagtttccacttagatccattagaatggaaatcagtgataattgtacccctttgagtgcaaacaatgaatctagaggcgcgttggttgttttcgaagggttggatcgtagtggngaaaacgtcacaatgtgggaggttggtttcgtatttggagggattgggtcattcagttgaattatggcgatttccagacagaactacaagtgtcggacagctgatatctgcgtatcttacaaataaatcgcagttggatgaccacacgattcatctccttttcagcgcaaatcggtgggagaagagatcaatgatggaaaccaaactgaaagctggaaccactcttatagtggaccgttactcttattccggggttgctttctcaactgctaaaggacttgatttcgaatggtgtaaggcaccagagatcggtttaatagccccagatttggtcgtgtatctcgacataacacccgagaaagctgcagaaagaggaggctacggaggtgagagatatgaacagcttgagtttcagcggaaagtctcccaacact

SEQ ID NO: 13344 - DNA, 585 bp, Gossypium hirsutum
  unsure (1)..(585): unsure at all n locations; Clone ID: LIB3829-010-Q6-K6-F5
gggtactatggctaccattgctaaggaagaaagatatcagcactttgngaaaggaatagttgctggtttacatcgccaatgcatttatggaggtctaaggatcgggttatatgaacctgtcaaaacgctattagttggtgctgattatgttggtgatattccgttgtacccaaaaaattatagcagctctattgactggtgctctagctattacagtcgctaatccaactgatcttgtcaaagttcggctgcaagctgaaggaaaatttccagccgggattgccaggcgttattatgggactttggatgcatactacaccatagttagagaagaaggactagcagcactgtggactgggcttggtcccaacattgcacgaaatgccattgtaaatgctgctgaactagccagttatgatcaagtgaaacagacaattttgaagattcccggattctcagacaatgtcctaacacatcttctagcaggtcttggtgcaggtttctttgcagtctgtattggttctccaattgatgtggtaaaatcaagaatgatgggagactctggctacaaaaacactcttgatt

SEQ ID NO: 13345 - DNA, 534 bp, Gossypium hirsutum
  Clone ID: LIB3829-010-Q6-K6-F6
gttctagatcgctagcgcccaccctttcttcctctctttcttttcagccaaacagggtccatactgccctttatctatctatggttgctcatcatgacaaagggatataaacagggataatatcttgattatctccatccaaaagtgctaatttgtggtcaattgcatatcaaactgagcgccggcgagatattattttggcagtaacacacccaccaaacgtcctaggctccaaggattaacgcataaccctctttacagtatgctgggaacaggaacctgtcctgccattttaccagaccaggagtcttgcccttgctcaagctctaaatctcattgaacttggacgccattttaagacctaccaacatactaccagaagctttatacaggatcccatcttcatacacaccaaaccaacccttcacttctgtgcacttggcgcatgcttctttcttaaaagccatccttgattaccattgctcaattgttgctttgtttgatgactctgctttagatactcactatcacttt

SEQ ID NO: 13346 - DNA, 573 bp, Gossypium hirsutum
  unsure (1)..(573): unsure at all n locations; Clone ID: LIB3829-010-Q6-K6-F9
cggatctgcaaaagtttcacggctaattattatttgngagaaaagagaaatttcaaagttgatcctaatgaggggtgcntgaaagatgcagaaatggagaatcagctccgttggtggcacaaaatgacaagggatttgatgggcttattcctcaattatttacctcattaccagctctaaatgaagctgtttcgtgtcttgctcaaacaactacttactttactggttgtttttctgattatgctgtggaaccttccaccagagattcaggggattccgttgtacatgcacaagaattagaaacgttttcttctgtacagactgaggatactgtgattagtgatcatcctttttctagtgaaagcacctccacgttggctgaatcatctagtcttgtaaatgctacctctgctaaccatgttggaatagcaagggccactgctggagatccatctgaaaatactggtgtgattgtacattcaaatcataatgggcaaaatgggatttccatgtttcaagggcttattgaaagggcacagaggaccgttcgtggatctgctgatgatataggat

SEQ ID NO: 13347 - DNA, 584 bp, Gossypium hirsutum
  Clone ID: LIB3829-010-Q6-K6-G10
tcaacaatgacggagcaaatgacggtgcgtccgtagacgaaaataactgtacccaaagtgaggaaatgctgctccatgaagctctccgccgtttgatttcgacgatcatctaccccgatggatcttcatcgtcaccagctccgcttctgcagcggatcaagatctctgtttccgagaatgggcctcgccttggggaagcctctagaaacactagccgtactgttatacggtggactcgtagtggcagcccccttcgtgctcttcttgtcatctctgttgggtccattgcttttcttaccttgacaggattgcttgtatttatgcttttctttctagctgcaactgtcaatgccgtcatcatctcttccctcattgctttggctgctgcaggaggcttcttggctcttttctttgcctgtgtaacagttttttacattggggccatatcggttgctgcttttgttatttcaactgcaataatttcagcaattatagctgctcttgtagctacaggttgggttggattcttttgggttttatggttgggtactaagagaagtatggaccttgcaaagcactccctc

SEQ ID NO: 13348 - DNA, 464 bp, Gossypium hirsutum
  Clone ID: LIB3829-010-Q6-K6-G11
gttaatccatggatttcgaagcactgctgaggcaatgaacgaggcaatctcgatggctgatgctgagaagcagttacgacacgagaagcattataggtacattagttcacatgatgtagcgttttggtctcgtagtttctttcaagattggaaaggacgtgtaaagatcattttagaagacgatgctggggaattggtttgagcttcgggtttagagttgtagcactggaccctaacttcagaaagttgtctatcgatcacatagaatccgtgtatgtaaggtccaaaaatcgggctatattattagactatgatggaacggtaatgcctcaaacatcgcataataagaccccaaatgcagaggtaatcccgatcgtgaacagactcttgggtgataccaagaatacagtctttgttgtaagtggaagaggaaaagaagtttagacaagtggttttctccatgt

SEQ ID NO: 13349 - DNA, 579 bp, Gossypium hirsutum
  unsure (1)..(579): unsure at all n locations; Clone ID: LIB3829-010-Q6-K6-G12
gcaactcatcataaccgaacagnacttaggttttcgtggttgctaagttggattcttggttttgtttactgtaactttaacgctaatggcctcctgtngaaaaacgcagaaatgttttttaggtctgtttttcttgagggttgagacatgcttgtgttgttcgagactccggcaggctttgcccttttcaaagtcttagatgaagggaagctgaataaagttgaggacttgtcaaaggaattcttggctcctgactctgccagaaaggttgtgtcgttgaaagccttttccaagtttgaaaacactgcagaagctttggaagctgcaaccaaactacttgaaagtgcacccagtaaaggtctgcgcaagtttttgcgtgcgcattgtgatggtgaaacacttggagtggctgattcaaagcttggaaatgcaattaaggaaaaactgaaaattgattgtgttcacaataatgctgttatggagttgctgagaggtgtgagaactcagttgacagaactcatatctggtctaggtgctcaagatttagctccgatgagtttgggtctttcacatagcctt

SEQ ID NO: 13350 - DNA, 586 bp, Gossypium hirsutum
  Clone ID: LIB3829-010-Q6-K6-G2
atgcttttgctgatgggtctcaaagccacgcttgtatctaactgataagatgcaaattgctcttggtaagatcggaagaggctctcgtatatctttcacattgtctaaattactgtttttcacttgcttaggagttgactgtgccgagttgtaggacggagtaaaggttaacttttaccttattttgtaaaatatctcctcttagttattctatcagacctttagtgagctaactcatagtaagctttaattctagagaagcatcatgttgtacaaaagcatgttcaatggcaatatagatcagaagcgtaactctagtcatactatgatccctcttttcccttgttctcgttggcttttttggaaataatagattgtatttatgccctttttattttcttttcgtaacattatttcttgctaatttgatatatgcactgatatcaagtttccgttaactgcatcagctggtgggttaggtcacggtgtggcacatgcagtattcttttgtcttagcctcttaacaccagcatttggtccagcaacttattttgttgataggtgttcacagataccatttttcctt

SEQ ID NO: 13351 - DNA, 526 bp, Gossypium hirsutum
  Clone ID: LIB3829-010-Q6-K6-G3
gccgctcctcatttccgaacatacagcgcagatcctctcagcccagcgaccatgacaaagagaacgaagaaggccggaattgttggcaaatatggtacccgttatggtgccagtttgaggaagcaaattaagaagatggaggtgagtcaacacagcaagtacttctgcgagttttgtggaaagtatgcagtgaagagaaaggctgtaggaatctggggctgcaaggattgcgggaaagttaaagctggtggtgcttatactttgaacactgccagcgctgtgacggtgaggagtactattagaaggttgagggagcaaactgagagttgagctgctgctgactacgttatgttcacaactttggtatgatgttcgtgtatgtgttggctacaaaccagttgagtcattttgttgacaattatggcgcttagttcttaattttatatcttaactctggtgttggagctttatttaagttcaaatatttgagtattcttgtttcatgaatgtcttgttactttgcatc

SEQ ID NO: 13352 - DNA, 555 bp, Gossypium hirsutum
  Clone ID: LIB3829-010-Q6-K6-G4
cacgggggagcaccaaagaccatgcaaaaacatggatgggcaaaattcggatgactcaaagcaaagcactgctgatatgactgtttttgtgcaaaatcttcttcaacaaatgcaatctaggtttcaaacaatgtctgattccattatcaccaagatcgacgacatgggaaaccgtataaacgaattggagcaaagcatcaatgacctaaaagcagagatgggagtggagggcacttcatctccgttagacccatcgaagcaaaagtcagacaaagcaaagcaagatgaagggtcagcataaaactttgccagaaactaccacttgcagttgattatgattgtattatctggtttgtctttgagacgaactaaatatattgtcaagagagggacattactgagagtcccccctttccttttttagttgtactaagtatgtttcatctgtgaaactgtgagaaaaaaagagttatctcccttgaaacaccaatagatgcactggttgtttggcgaattatagagggaattaatgaaaatatgatattgttgttaagt

SEQ ID NO: 13353 - DNA, 587 bp, Gossypium hirsutum
  Clone ID: LIB3829-010-Q6-K6-G5
gttctattggtatgtatgtttgcagggtttcaggtttgccactcgcttggtggaggcacaggatcaggaatgggaactcttttgatttcaaagatcagagaggagtacccggaccggatgatgcttactttctctgttttcccatctccaaggtctctgatacagtggttgagccttacaatgctactttatcagtacaccagcttgtcgaaaatgcggatgagtgtatggttctagacaatgaagctctctacgacatctgcttccgtactctcaagctcaccactcctagctgtaagaacatgctcttcctttctgggtttcatttaatctttaatgtggattgaactaatgatctgtttggtcttcttgttggtgcagttggagatctgaaccatttgatatctgctacaatgtctggagtaacatgttgtttgaggtttcctggtcagctgaattccgatcttaggaagctcgctgtgaatctcattcccttccccaggcttcacttcttcatggtcggttttgcgcctcttacctctcgtggatcacagcaataccgagccttaactgtgcctgagctcacc

SEQ ID NO: 13354 - DNA, 576 bp, Gossypium hirsutum
  unsure (1)..(576): unsure at all n locations; Clone ID: LIB3829-010-Q6-K6-G6
cctgnatcaaatagattaataaggatgaaggacgcattgagaaagggttcttagacgagcctttgatgatgaaaaccatccctatttgccaaagcatatcttatacatggcagaaagaacaattcagtgatggcgttggttatagttggatcgatggtctcaaagctcatgctgctgcaaatgtgaccgataagatgatgcttaatgcttcaaacatcttccctcacaacactccgaccacgaaagaagcatactattataggatgatcttcgaaaggttcttccctcagaactcggcacgattgaccgtcccgggaggagcaagtgtagcatgcagcacggccaaagctgtcgaatgggatgccacttggaagaacaacctcgacccgtcgggcagagcagcacttggagtccatctctcggcttacgactccgagacacctctagataacaagccgtccaagattattgagtcaataccgttgatgatggagattcctggagttgccatacatggttaagtgccatgaaaattgaagcaaaatgtgtgaaatttaatgattgattagtataatt

SEQ ID NO: 13355 - DNA, 585 bp, Gossypium hirsutum
  Clone ID: LIB3829-010-Q6-K6-G7
atttcctcatcttcttcctcacatttcattcgtcccaaaaacatttctattcctcttttatacaaacaaaaaacatggctacaccgttgcttcatcttcttcctttaccatgcttcatttagcttcattgttctccatttttgtattagttaacgcaagaatccctgccccggtgtttacactggtggatcctgggaaactgctcatgtcactttctatggcggcaacatttgtcaactttgtttacctaatgtcttaatgatctatagatgatttcatattttctataggctcatcttctgaaggttacatctccaagtgctttaccatagatctttaaaacacgcaatgtctgcttccatgttagttgatattgttaaatgtgtcgctacatttttcagtgtttgatggatcgtctaagcccaagacagaggccggtcttctctgggtttacaaaagctgagattgaaaaaatggaaaaattgttcatggaatcaagagagctgctgcagagtaaagagtcttgtcaaaaacttgcaagaaattttagttcatcctcaggtcgtgctagtaagcccatcgtta

SEQ ID NO: 13356 - DNA, 582 bp, Gossypium hirsutum
  Clone ID: LIB3829-010-Q6-K6-G9
gcagcagcagcagccatggttctcaatacggagctttgccgatttagtggtgccaagatataccctgggaaaggcatcagatttgttcgtggagattctcaggttttcctcttttccaattcgaaatgcaagaggtacttccacaaccgtttgaagccttcaaaacttacatggacagccatgtataggaagcagcataagaaggatattgcccaagaggccgtgaagaagagaagacgtgcagccaagaagccttactcccgatccattgttggtgccaccttagaggttatccagaagaagagaagtgagaaacccgaagtccgtgatgctgccagggaagctgctctccgagaaatcaaggaaagaatcaagaaaactaaggatgaaaagaaggcaaagaaagcagaagtagcggcaaagcaacaaaagactcagggcaagggtaatgttccaaagggtggagcaccgaaaggccccaagctcggtggcggtggcggaaagcgttaagttgttaaagttattatctgtttttccctagccagaaaaaaatgggttagtatgttttttttgaagccaatt

SEQ ID NO: 13357 - DNA, 580 bp, Gossypium hirsutum
  unsure (1)..(580): unsure at all n locations; Clone ID: LIB3829-010-Q6-K6-H10
cgaaagctaaggctgacaacatnagnaatagggaagctttgagcactgcttcatgcccaaattgtggaggtccaactgctgttggacaaatgtcatttgatgaacatcatctcagacttgagaattctcgattaagggaagagattgatcgtatatcagcaatagctgcaaagtatgtgggcaagccagtggtgaactttcctctactttcatctcctgcgcctcctcgaccatttgatttcggttcacaacctgtcactgaggagatgtatggtgttggggatcttctcaggtctattagtgcaccttctgaggccgataagccaatgattattgagcttgcggtggcagctatggaggaactggttagaatggctcagatgggggaacctttatggatgaccagtcttgatggtaccacctgtatgctgaatgaagaagaatatattaggacttttcctagcggaattgggccaaaacctactggctttaaatgcgaagcttcaaaagaaactactgttgttatcatgaaccacattaaccttgttgagattctcatggatgtgaaccagtggtcaac

SEQ ID NO: 13358 - DNA, 556 bp, Gossypium hirsutum
  Clone ID: LIB3829-010-Q6-K6-H11
gtcctccaccatcattacccacacttgaaataccagggctaaatgcacctattcctcctggagcaagctttggttatcaccctggtggttggggcaaacctccagtagatgagtatggacggcctttgtatggagatgtatttggagttcatcagcaagaacaacctaactatgaggaggagcctgttgataagtctaagcattggggtgatttggaggaagaggaggaggaggaggaagaagaagaagaggaagaggaagaggtagagcagattgaagaagaggagttggaggatggaatccaatctgtcgatagcctttcaagtacccccactggagttgagactcctgatgtcattgaccttcgtaaacagcagagaaaggagcctggaggcctctctatcaagtgcttgaagaaaaagaagagaggattgcccctgggactttacttggcacaactcacacatatgtagttaacactggcacccaagacaagtcggcagccaaaagggttgatcttctgaagggtcaaaaatctgacagggtggaagtaatt

SEQ ID NO: 13359 - DNA, 569 bp, Gossypium hirsutum
  unsure (1)..(569): unsure at all n locations; Clone ID: LIB3829-010-Q6-K6-H12
caggtnnnctgcacccatacgttcttggnaaacgaccttatggtgttggtttgttggtggctggcttggatgaatccggggctcatctctactataactgcccagtggaaacactttgagtaccaagcttttgccatcggatcacgctcgcaagctgcaaaacgtacttggaacgcaggtttgagagctttagagacgcatcacgggatgatctggtcaaggatgctcttatggcaataagggagaccctgcaaggagaaaccttaaaaagctcggtatgtacagttgccgtggtaggggtcggggagccattccatatcttggatcaaggaaccgtacaacaaatgattgatgccttcgaaattgtggcagagcaagaaggtcctgctgctgaacctgatactgatgcaggacaggaggcttcagccgagcccgaacctgaacagggtgctgctgctggcgaaggcgtggcccctatggatatttgagaatgaaaaaacctgcttcccgatccttctagatgagtttttttcaacattttgcttggaaaatcgggttagtcactatat

SEQ ID NO: 13360 - DNA, 580 bp, Gossypium hirsutum
  unsure (1)..(580): unsure at all n locations; Clone ID: LIB3829-010-Q6-K6-H2
gaagggtcttaaanattgtcaagagcccagctggatgagattcttggaccagctgagtgcactatagtttcttcactatcaaactatcatttggactcctatgtcctttctgagtctagcctctttgtttatccatacaagatcatcatcaaaacctgcgggacaacaaagctacttctttcgatcccacccatcttgaagttggcgggtagcctttctcttaccgtaaaatctgttcggtacactcgtgggagttttatcttccctgctgctcagccatatcctcatcgttacttcactgaagaagttgttattcttgatagccattttggcaagcttggcgctggtagcaaagcttatgaaatgggtgggctggataaacagaaatggcatgtttactctgcttctgctgaatctgttaacaccaaagcccctacttacactttagagatgtgcatgactggtttggacactgaaaaggctacagttttttacaaagacgaatcgacctcggcagcttcgatgaccatgaagtctggcataaggaacatacttccaaactctgaaatatgcgattttg

SEQ ID NO: 13361 - DNA, 562 bp, Gossypium hirsutum
  Clone ID: LIB3829-010-Q6-K6-H3
cggtcgcgtgggcgccgaccgtcgtaaccaccgccgtaaattctcccaaaaggcgaaactacccttacagatcctcctcctcttcctcctttccctcatttcctcctccaccgcagagatcaaaaccctaaccatcacctccgactctcgccccatgatcctcttcgagaaattcggcttcacccactccggtcacatcgccatctccgtctcctccgtctcggtcacttcctccgccaatgcccccaatcccgacgcttcccgcctcggcttcttcctcttatccgaggaagctctcctccaagtcctcctcgagattcaacagaatcctcacttttgcgtcctcgattctcgctacatccagcatctcttcaccttcggcgacctctccccacctcccctctcgcgtttcaaccacacttaccctgtttcttcacccaatgaatactctctctttttcgccaattgcgcccccgaaacccgcgtttcgatgaacgtccgaaccgagacctacaatcttgaacgcgacggttccaaagattacctctccgctggtctaacc

SEQ ID NO: 13362 - DNA, 575 bp, Gossypium hirsutum
  Clone ID: LIB3829-010-Q6-K6-H4
ggagttttgcaaaaggattacaaattgaagaacttttagaaggcttgccagagccgcaatttagctccgaggattatatgatgctttatacaacaatttacaatatgtgtacccaaaagcctcctcatgactattctcagcagttgtatgataagtatcgagaatcctttgaagagtacatcacttcaacagtacttccttctttacgagaaaagcatgatgagtttatgttgagagagctggtcaaaaggtggagtaatcacaaagtaatggttaggtggctttctcggttcttccattaccttgatcggtactttattgctcggaggtcactacctccccttaatgaagttggactcacgtgtttccgggaactggtttaccaagagctaaatgcaaaagtgagagatgctgtaatttctctgattgatcaagaacgtgaaggcgagcagattgatcgcgctttgttgaagaacgttttatatatatttgttgaaattggaatggggcaaatggattactatgagaatgactttgaggctactatgctcaaagatactgctgcctactactca

SEQ ID NO: 13363 - DNA, 556 bp, Gossypium hirsutum
  Clone ID: LIB3829-010-Q6-K6-H5
gacgtgttacataggctgtggagactgatcctatagttacggcttactcgctgtcagttcaagctttgtagcgttttacccttcacctctcctgattaagggccgtgctctgtggggatacctctatttggcctcacactgaggttctattgaaggatgtggtttgttgtttctttggacgagaaaaagggaatatataattttttgatcttaaggcaatgccagggactgatctgtgagcgcctgttaaatgaggactcttatttggggagcaagggtctatatcacatcagaggtagctagttgtactatgaaaatatcttgaaaccattgagattagatatgtggaatgatgatcaagctgatggtcacctggggaaagggtgctgaatatctgagttggagagagggtcagatcgagtaagctacactaacgtgtgaaagagaaatcgttgaatcaagcttggagcagcaaagtcatatgatggatgagattgtaagattgacgtatgtagatataggtggaaatgggggggctgattttaatgagtggcat

SEQ ID NO: 13364 - DNA, 568 bp, Gossypium hirsutum
  Clone ID: LIB3829-010-Q6-K6-H6
gagcgctttcaatttgaagaggaagacttgttaaaggaaagaactgtaaaagtgagatagagatgcagaggttcacgttatattatcgggtgttaatagttattttaattccatctgcctcctttgtgattgtatcatcatcgaaagaacagctaagctcaaagcaatgtgaggatctgggttctcacgggtttagccctttgttctgattgcaacactttttctgagtatgtcaaggacaaagagttgatatctgactgctccaaaatgtctgcacagcaagactcaaatgattctacaagtaagattacttattcaggtgcaatactggaagtttgcatgaggaaactagtattctatccagaaattgctggtttcattgaagaacagaaggacaagtttccaacagttaaagttcaatatcttttcaattctcctcccaagttgatcatgttggatgatgagggccaacataaggtaaaccataataattgacaattggaaacgtgaacacatgctgcaattcctgcataagaaagttcagccctattctgcaagctcatagaca

SEQ ID NO: 13365 - DNA, 585 bp, Gossypium hirsutum
  Clone ID: LIB3829-010-Q6-K6-H7
caagcttccaaaggttctcaagcaaaacccttaggttaagccttcaccgccgtcgatccaagtcttctagctcctccaccctcacctctcctgcttcatcaccatcctctcctcgtgaaagacccaaaaggcctcaccaagtggacgagatgaaacaagtgtttcgctatttcgatggcgatgatgatgggaaaatctcggctctcgaacttagggcatacttcggctccatcggggagtacatgtcacatgaagatgctcaaatggtgatcaacgaactagattccgacggggatagcatgttggactatgaagatttcttgaagctaatgaaaatagaaaagcgggatgatgatgatgatgatgatgacctgaagaaagcgttcgagatgttcgagttggagaaaggttcgggttgcataactcccaaagggttgcaaaagatgttgaatcgccttggggatgcaaagtcttatgatgaatgtgtcgctatgattcaggtttatgatattgatggtaatggggtgcttgattttcatgagttccaccaaatgatggcttaatttgataggacactcgtacctt

SEQ ID NO: 13366 - DNA, 586 bp, Gossypium hirsutum
  Clone ID: LIB3829-010-Q6-K6-H8
gcaaacctcgataggaattcaaaggcttgtatccgatgatgaaagttacattatggatcttgcattgaacgaggtaatcgagaattttggacatctggcgacgtacgtggctaggcttgggaagaaatgcactgaccctatatatcatcattttgaagccttcgtaaatgatccgttattgaacaatatggagtggtttgggtgggaatatcgatggaaaaagaggagaaaaaaatgaagaaaatggagagatttgttgcggttacgatgcagttgacacaagagttggaagtgttggcggaacttgagcaaactcttaggaggatgcagagaaatcccgagttagatcgggtgaaattactcgagtttcaacagaaggttatattgcagcgtcaagaagtaaaaaacctacgcgagatgtctccatgggttagaacttatgattacattgtccgatttctgttgagatcactattaacgatactcgagaggataaaaaatgtgttcgggaccaaccaaatggtaccggttgagaggaatgatgatttcgaatctgttaatagtgattatctttcacgcagccatt

SEQ ID NO: 13367 - DNA, 492 bp, Gossypium hirsutum
  Clone ID: LIB3829-010-Q6-N6-A1
gcatgtaaagcataactcaatcacatagcaattaattataaagcatgaaagtcttgtgtcagacggtattagaagttccaaaacactctgtgggaagtatagtagtcaataaccagcgttcaaacggaggcaacatgattgcaatctaaacaaaggccgcgctcacgatggcgttcaagggagaaaactctagccggcagttaaaactcaggagacaaggttgtcacttaatgacaatgaagccagtggatcagcggcagcaccaccagtttgctgctgctgagccacagttctaagaacctccattggttcagcaacctttgcttttagagcttctggtgactcgagcaaatgcaaaacctcggtctgatccatctccagaagcatccctgaaactttagctgctgcatcaggctccagctgttcaactaggggataaagattctttcccagcatcgttctctgctgatctggtgtagcattagctagggc

SEQ ID NO: 13368 - DNA, 449 bp, Gossypium hirsutum
  Clone ID: LIB3829-010-Q6-N6-A11
atctgtgaatagcaatattttactaagagatgaggcgcttaaggggcaaaggggtcaatttctccagtcaaccaaacattctaagtggctatatgagatccatatacatagagttgctacacatgtgtcaaaacagcattggcagactgaggagcaaaatatttttgcctaaggtgagcataaggggaacccataaaccaccgaaagtgagccggcttccagaaggagagtgcttcataccccacttgagtcggctcctccagctccagcgtgaaccggtcttccccagcgcaggggggaccttgtgatgtgcccctgcccaaaccaaaagaggctaaactcttcttagttttacccctagggtgttccttcacatacaccactgggaggagggtaatgacccctgggtaaaaattccttgagaccaacccccaatttaaccccctttt

SEQ ID NO: 13369 - DNA, 446 bp, Gossypium hirsutum
  Clone ID: LIB3829-010-Q6-N6-A12
aaataaaaggggtagcccataacagggaggtgccaaatctgtctcttgagtcccaaatatcaatccataagcaactaccaatcaatttcttacttctattactaacccaattccatcaatcgtgaaagctattaactatctactcatttaaggttctaaaaaacaaattatttacaacatattcggacacaaaggtaggttctactttaacaggcaagatcaaggttctaggacattactctgagaacaggttatttacaacatcatgagaggtaggtaggacttctctttcatataaggggtggttcccgaacttcatgggggtgacatgcgggagaatcctcccagggttccagctccaaggtccaagggataccatccacatccccttcgtcaactgagatcaacttgcaatcttcaccagggtgagaactatcatcactttt

SEQ ID NO: 13370 - DNA, 520 bp, Gossypium hirsutum
  Clone ID: LIB3829-010-Q6-N6-A2
acgatcaatttccacctttctcggaaccccattttcttaattctttctgctgcaattacaacatatccaataaaccttttatcctatgtatctatcacatacactgcagcaatggcttttaatacacaagacagagaaaggacggaaggaggagttggttttcacagtcctgtgagaagtggtctaatgaatgagctgccattgaaaaccaaacagctagataactgtgaacctgtagaaggaaactggaacaaaaactatgaactgtaagcagccaacatcgtacatgatgttggaacattggatgctttgctggacaatcgacgcttgtagcgtttaaggacagatgccaagttctcttttcccttcggaaaagctacatcaccagcagcagtacccgttcgacccttccggcacgatatagcaatctcaacatccttaatcatatccaagagcgtgactgcatttgtacacttacccttgccaggttttgcagctgggggcaacattccatttgaaa

SEQ ID NO: 13371 - DNA, 528 bp, Gossypium hirsutum
  Clone ID: LIB3829-010-Q6-N6-A3
ggtaagagtacagatgctctaaaatattaactatttgggtccaatcatctattacaacatcattcgcctttgttcattacacagcaagttccttcacctccaaagagtgaatgtcttagcaaagctgccttcattactccatcgaacactaaagaaacatacggcaaaaccgcgaagaactcggtactactgggcctcaaaatgcacataagtggtccatgtaccttggacactagggtgtcgaggtacatgccttgtcgttaatggcaccacctttcttcccaatgcgtttcttaccctggatgcataaagaaggatattttcaggagtcatattctttacgcataccagccgatcgtttttgctcttgtcaaagcctttcaaatgtggatgctgcccatgaatgagttaattaaccacctccagctgagggtttttctatttaaaagttggtaactgtgactccataaatgcctttatttcctcacatgcactgtacgtttgacctattaaattggtaaggaacat

SEQ ID NO: 13372 - DNA, 512 bp, Gossypium hirsutum
  Clone ID: LIB3829-010-Q6-N6-A4
gatctgcaaattgaaacttaatttgtcacaaatggtttatggaaagtacaatcaaagacaaattggacgttataaatcacatagatctaaattactacaaatagtggacattggttttcttctactgatctaaaatgatatacggatatatagggacacagggtaattatccattaatggaaaaaaagagagaaatacctgacaaaaataacaaaaggaaataagcttttttaagacattatggtttatataacataattaaacaaacatatgagaaaaaaaaaccattttttttcccatgcagctcttgttgatacttgaacatacatatatatagatatatggttttttttgcttactgatttggtggtggaagagatggaggattatgagggggacgtttccttttcttcttctcgtagcttatgcctctagctttagcttgtgaatcacggacttcacgtaggtaaagcctaacagcacgagcaccaaaggggttagcttcaggcttg

SEQ ID NO: 13373 - DNA, 517 bp, Gossypium hirsutum
  Clone ID: LIB3829-010-Q6-N6-A5
gcatgagaagcataactcaatcacatagcaattaattataaagcatgaaagtcttgtgtcagacggtattgaagttccaaaacactctgtagaagtatagagtcataaccagcttcaaacgaagcaactgattcaatctaaacaaaggccacgctacgatggggttcaagggagaaaactctagcaggcagttaaaactcaggagacaaggttgtcacttaatgacaatgaagccagttgatcagcggcagcaccaccagtttgctgctgctgagccacagttctaagaacctccattgcttcagcaacctttgcttttagagcttctggtgactcgagcaaatgcaaaacctcggtctgatccatctccagaagcatccctgtaactttagctgctgcatcaggctccagctgttcaactaggggataaagattctctcccagcatcgttctctgctgatctggtgtagcatttgctagggctgaggccaaggctcctatcggaattggctgagaa

SEQ ID NO: 13374 - DNA, 61 bp, Gossypium hirsutum
  Clone ID: LIB3829-010-Q6-N6-A6
gggggtgtgggggttttttttttttttttttttttttttttttttttagggaggcgggggc

SEQ ID NO: 13375 - DNA, 486 bp, Gossypium hirsutum
  Clone ID: LIB3829-010-Q6-N6-A7
gtgtgggttttttttttttttttttttttttttttttttttttttttttttttttttttttttttttttttttttttttttttttttttttttttttttttttttttttttttttaggggcggggggggcccccccgggaaatttgggggggggggggggggggtaaccaattttcccttagggggggggaataaaaggtgggggaaaaaaggggaaaaggggtttcctggggaaaaatgtaatccgttaaaaattccaaaaaaaaaaagagccgaaaaaaaaaagggaaaaggttggggggcctaagggggggggaaaataaaataaaagggggggggttaaaggggggttttaaaagggaaaaaattttggggccaatttaaaaaaaaaaatggaaaaccccgggggaggggggggttgcgaatgggggccccggggggttttttttttaaccaggggaaggggaaaaaagtggttgtctttaa

SEQ ID NO: 13376 - DNA, 518 bp, Gossypium hirsutum
  Clone ID: LIB3829-010-Q6-N6-A8
ttaaaaccaaaggaatcttcctttcaaaattgattacgaacttcaataacataaacaacaactaaatataacaaaaacaatgatcaaacgatcacaatatgcatccatccatccatccttccatacatacatgagggggggggggtatagtggttttatatattacctatactatacattatagcatactgaagttccatggattatatggcacaaattatactaatcaatcattaaatttcacacattttgcttcaattttcatggcacttaaccatgtatggcaactccaggaatctccatcatcaacggtattgactcaataatcttggacggcttgttatctagaggtgtctcggagtcctaagccgagagatggactccaagtgctgctctgcccgacgggtcgaggttgttcttccaagtggcatcccattcgacagctttggccgtgctgcatgctacacttgctcctcccgggacggtcaatcgtgccgagttctgagggaagaaccttt

SEQ ID NO: 13377 - DNA, 527 bp, Gossypium hirsutum
  Clone ID: LIB3829-010-Q6-N6-A9
gcagaatgctcagctaatattgttacctgaaaaggcattgtaaagagcctgttctccaacattgttcttaacactgttcctaattcactaggacaagtttgatacaacagagttgagtgaacctatgttggaacaacatagagagctttcatcctcaccttcagtccaccataaacaagtgaggactgcaattataatcaaaaagaggcccagaaacaatttaggagccatgttcttacctactttctcattggggtactcgagagtttctttcttgttcttaggggctgcatcagtagaccctaggacatcaagctcagcaggactgtcatcagttgatgatacagattcagagacaccatgatcttcaccatcggtatacgaacgtgctttgcgtttgacctcattgataataccacgacgaaaactgttacggtttgtggttggactacctccaaatttctctgagcatggacttctgaacctcctgaattgtttctcggagtaatctgagttcaattcattag

SEQ ID NO: 13378 - DNA, 522 bp, Gossypium hirsutum
  Clone ID: LIB3829-010-Q6-N6-B1
aagaaaacacataaaatatatatttcaaagtttcatctcaaattggattatcctccacgtacacgcaagcattgcgaacgacatacacagttcataaggaaaatagtctgtattgaattcgcgaaatatgaccattaaatctttctgatcaacaacaggttgcaagaatactcagtagcggtattttgtcgagtaatctttcggagcaattaccagaccacgacctttccttgccccacggtatacagtctcaatgatgtctatgaactcctgtttgtccttgagtgcccagttaatcttgttgttattgccagtgccaagatcaatcataatgtgcttgtttctgaaaaagaacatcactgtcgatggatcgtaaagctcatacatcgtgttaaaatcaggtacttctgttatgtctacaagataaatcacagcaaagttctttattgtttcagcgacagaagcaagcacctcatccatctgcatgcaagtttcgtcccagtcgtggccgaatcggatgac

SEQ ID NO: 13379 - DNA, 513 bp, Gossypium hirsutum
  unsure (1)..(513): unsure at all n locations; Clone ID: LIB3829-010-Q6-N6-B10
gcaggaaaaaaaaaacagtttcttttatttttggggtatattttttcaatattaattcaggcgtttaaattaatacaccctcaataaggggaaccccacttcaatctaaagcaaacaaaagattacaacaaatatagggacccaatgagagctattttcaaacttaccaaggcaaggctgagactcatttccttcgcttattttcccccaaaatctacatatgggcctcccttccatctaacatatataactaatggggctagcactgagccggattgctccatttttctcccattgtgtgaaagagaattgcttnactgagaacttgaaacttcccatgtgttttcaaggcgtatcaatccattcattttctgcggcaatccttccggagcctccgccactgagcttgctgaatgaaccaactgcgcataagctcttgaggctgctgcttccttcactaaaattctttgagttccttgtgtttctcaggttccaggaactaacatccccaat

SEQ ID NO: 13380 - DNA, 457 bp, Gossypium hirsutum
  unsure (1)..(457): unsure at all n locations; Clone ID: LIB3829-010-Q6-N6-B11
ggggaaaatggggggactccggtttcatcaccccagcgcatatttacagcgtaagaaaaaacaaagaacaccgagaaaagtgtccccgtgcgagcgagtgtctcttagtgacactaagaggaggtgcattgcgaaacaaagtgagcgaaatattanagtgaccaacacaaagagagagcggtgcgcctttcgtgttttcccttccctagcgaagccaacacccagtgcgtttgagctgaaacaggagccagaccctgcgtcaacctacagatttccaccggatcggccaggggggacttagccttacttggggttttacccacaggacaagcaaacacttgtgctctgggagcgatcaacggccccaatactgaacttatgagaacctcgaacatgtgttcatcagagctggccgctcctatgcggagaacaaaggcaggcgacatacccctctctt

SEQ ID NO: 13381 - DNA, 394 bp, Gossypium hirsutum
  unsure (1)..(394): unsure at all n locations; Clone ID: LIB3829-010-Q6-N6-B12
gcgtagaactatatatggggggttatttcctttctcttgagtagtgttccaattccatgcgctgtgtttatcaataattttaaaaaaaaagggagagagtacaaatttctctttatattattaattttttgggttgagtgtgcaggaaaaatcttcttcattgagggagttacagtggttcacatgcggagagagggcccgaagctttcctgcgagagacatcattaaatgtggtgttgtgagagggtcaagatccaaccaaacccttcanccgagcataggacatcaggagtgtgaacagaggtcgcaaaatatcccagagacaatgagcacccatttaaacatgtgtccatggggaggatcccaccgatatggaatgtgcatcccaaatatt

SEQ ID NO: 13382 - DNA, 525 bp, Gossypium hirsutum
  Clone ID: LIB3829-010-Q6-N6-B2
aatagaatccagcgacagttttaactgctcaaaaacaaaccatttaaataacaggcaactatcgaacattttcagcaggaactacttttatgaacaatccatttaagttcacatgacaaaatgggaaaaaggataaaaagaagaaaaacgttgaaattttggttccagtttatctcagttggacaataccagcagtgaccagcttttgaatcttgttcatcaccataggattcttggtgtgctcctgcgctgcctttgggttctcctggaaatcaaccaatacctgtctcatgactggatccgatagaatgttttgaatttctggatcttgcattgccttggcctgtctttccttcaattcttcagggctgaaatcacctcgactagctctgttaatctgttctacacaccttctaacaccatcaagcaactcctggttattcggatcatgcttcaacccttcctggtatgtttctaaagctttgtcatactccttcatgaagaactgaacagctccctttcttg

SEQ ID NO: 13383 - DNA, 523 bp, Gossypium hirsutum
  Clone ID: LIB3829-010-Q6-N6-B4
attgcacaaacacttcattagcattaaatgaggaagctataacaacaccattcatcatcgacatcaaatcaagggggacccttacaagaataatccaacttttttcaccccaacccctttctcattcccatctctactgcaagcgtgacaaacaattaaaagatgaaaaaggaaccaaacccatatttcgaaacatcacaaaacaccaaagcttgacgaaaaacacattttttggggttttttatcactttttaaggctgcccctaacaccaggacgaggcttggaagtctcaaccacatgaacagcatgtagattcacaagctttgactcttcaaagggaaccttggggtgcttggcatcatgatgaatctgcatcgacttcaaatctggagctgttattttgcaatgaggacactcgtacttagcatgtccacctttctccacacccgaacggtcagcaaatccggccttgccgccgcctctattggttgtggcggcgtcgatcttcgccgctatttcctt

SEQ ID NO: 13384 - DNA, 529 bp, Gossypium hirsutum
  Clone ID: LIB3829-010-Q6-N6-B5
aagaaaaaccataaaatatatatttcaaagtttcatctcaaattggattatcctccacgtacacgcaagcattgcgaacgacatacacagttcataaggaaaatagtctgtattgaattcgcgaaatatgaccattaaatctttctgatcaacaacaggttgcaagaatactcagtagcggtattttgtcgagtaatctttcggagcaattaccagaccacgacctttccttgccccacggtatacagtctcaatgatgtctatgaactcctgtttgtccttgagtgcccagttaatcttgttgttattgccagtgccaagatcaatcataatgtgcttgtttctgaaaaagaacatcactgtcgatggatcgtaaagctcatacatcgtgttaaaatcaggtacttctgttatgtctacaagataaatcacagcaaagttctttattgtttcagcgacagaagcaagcacctcatccatctgcatgcaagtttcgtcccagtcgtggccgaatcggatgacgacgagc

SEQ ID NO: 13385 - DNA, 492 bp, Gossypium hirsutum
  Clone ID: LIB3829-010-Q6-N6-B6
aaaggaaatccccatttttgttctcttcaactttattgcataccaaaaaaacttacaacaagggcaactgccccagttacctacactccacccatgggggggggggccacccctaaccccaagaagaagaccaaccccaatgggaattacataacaggcttgaattcttttgggggggtgaaagctcataacaaagggggctcactaggccaacgtgtatgcaccgagcaatcatttgcaaacattgttagctcactcaaagctcccacaaagggcaagacaggtaaaagcggggggggggcactgttttcaacctgcaatgctattggggagatattcaggattgcagcaattatgaatggccttgttcttggtggggttgctggcggatttgggctggttcgaatcaaagcttttttggaagaggctgagtaaaagaattttaagacaaaacttgttttcattgccccaaaatttggacttttactttag

SEQ ID NO: 13386 - DNA, 520 bp, Gossypium hirsutum
  Clone ID: LIB3829-010-Q6-N6-B7
aaaactaagatttttttaattaaaagaaagtaattaagtgggaaggaattcattcaaagtacaaactcaagctaaggcagtacaaacacaagcaataatagtacaatctctaacatgtatgagaagctcaagcttaaactcgaactcgattaattgtacaatggcagactttaacatccgtagtctaaagattttccattggtgtgaatgggatattctttggtcttgaaacctgatacgccacaaatatagccacacaaagagctgctactgagaataaaagagaaaaggcagatgcagcatcccaggagctgcttgatttcgcagacttggttagcttagaaccacctgaagcaatatcaaacgacacccaatcgcagttaatagtatagtgtccagatccactccatggattcccgtcaaccggataccagagtgcaaccgacatcttgcttgatccacctattgtgaactgaacatcctgttgaagacgatccatggttcttaaaggcctagaaaa

SEQ ID NO: 13387 - DNA, 424 bp, Gossypium hirsutum
  Clone ID: LIB3829-010-Q6-N6-B8
gggggggggaaaaaagggggccattcaaaaaaaggggggggggggaaacggaaacaaataaaaccaaatcccaggaaaaaggtcaaaaaaaaaaattaagggggggggtttaaaggcttaaaaacccaaaaaaaacctaatttaggggccaaaacccccaacaaaaaaaaaaaaaagccccccccaagaaaaaaaaactttttaaagggggcctgggttttttaaaaaaagaaagctttaaaaaaaacagttttttaaaaaaaacccctaaaagtgggcccccaatttaaaggggcagggggggggaaaacggaaaaaaagccccccccaaaaattgaaagggccccggactaagggggcatttttaaggggcccccccccccccaagggaaaaaaaattttggaggggggccccccccaattt

SEQ ID NO: 13388 - DNA, 498 bp, Gossypium hirsutum
  Clone ID: LIB3829-010-Q6-N6-C1
aaaaaaaaaaaattaaatatacccgtatccatcatatctgagtccatgtaccaaagttcaagtctaccgaactaccaacattatgatatcgcaaatctaactatgatcgacaaagtaggatcaagagctgttattgtgtttcaaagcatgcatcgagtaaatcctccaattagctgggtcacttttgtttttctatttcaatcaaattaccaaagtgactgtacatctggttgtgaaataaaccgccaacatggggccttgaaatagaagacttcccaactggttgttctgaatcttgcataacccattcctttttgggccaacattttgcagcaaaaggctcgaatggatgggtgcctgcagatccattgagacttccataactcatttcgtccagagacttgttaggaaaatggttattactgccacataatgatggaaaggaagtatcctgtaaccatggatcatgatcactcaggccggttacaggactgaatg

SEQ ID NO: 13389 - DNA, 525 bp, Gossypium hirsutum
  Clone ID: LIB3829-010-Q6-N6-C10
aaagggacgaaggggggtgatttaccctatatataatataagctatgctcaaaattttgagttcatcaaacaatttaaagagattagagagcttgcctacatctaggggaaaaataataaagtgattttgtgaaacatttaaatggggcggtgaaaaaaggggattcatcaaagtgtgagttatcaaaaaaaaaggttttttttactgggcgaaattgggagcttgagaaaacttgggacaataccggctttcacattcttttgcgtccattaaactatacataactctctcctcatcgccaccagaatcggccttgctgcggcctttgtgcttgcgttcccctctgagattctttagaacgcgcaagaaactctttcgcgagagcttttctttcataagagttggatacttgtgtgagatcaggtggactattgcgcgctacctattcaagagaaggggtaagatccaaaagtgcggtatcatctccctccagcttaaacgggttaataggagcacaattttca

SEQ ID NO: 13390 - DNA, 313 bp, Gossypium hirsutum
  Clone ID: LIB3829-010-Q6-N6-C11
ttttttttttttttttttttttttttttttttttttttttttttttttttttttttttttttttttttttttttttttttttttttttttttttttttttttttttttttttttttttttttttttttttttttcaaaggggggaagttttttaaaaaaaaaggggggccaaaaggggggggggggggaaattttaaagaaaagggggggggggggccccaaaaaaattgtggggaaaaaaaggagggtttagaaaaaaaaaaaacggggggggagtgcgaaaaatccagacaaaagaggtgcctgagagaag

SEQ ID NO: 13391 - DNA, 482 bp, Gossypium hirsutum
  Clone ID: LIB3829-010-Q6-N6-C12
ggagggtaaacaccattttacttcataacatcaaactggggaacttgtgcactacaccttcaaaaccaaaaatgtgaacatgcgagagggggggaaatcattgggggttttattccatataacaagagagcttctctcaaacacctcatattctttagatcagaaacacaacttcttcactgggcctgaaaaaacttcaacatgcgtttgggggggccatgtgaaccatcaaatcaatcacacggggaactggaaccccattccttgtggtaccaggaaacaagcttcacaaaggtcttgtgtaaagcaatacctgccttgggatcaaatatgctccacctgctgtcaccaacgaaggcagtgggcacaaaatcttcctcaacctaacccaaaatgcccttaagcttgccctcaaactcttccttgatagcggctttcatctcatcataagatgcaaatttctcaagcctaacggggagatc

SEQ ID NO: 13392 - DNA, 501 bp, Gossypium hirsutum
  Clone ID: LIB3829-010-Q6-N6-C2
gaaaataagatggcaaaatttattttaccattatcactggtacttgggaagaatcctaggatttcaatacaagcagcatttgccaagcaaagcttttaatcctctacactctctcaaaaaaaaaaaaaaaactaaaaggggttttgctggcaattagtaaaggagacgatgttacaaagcacattgcaaacaaaatgcaggcggggcactggattccccaaacatccatctctcagtaaattccaggaacgatcttatagggaaccttggggcagtatagtttccagtacttaccatatttggaccggcaccggtcatcatccctcttggctcggtcgaataagaggatggtaagaaacacgacgtaaaagtatggcagaaaatggttgaataaagccggaacagtccaaaagaatgcagctaatatttctggcacataatggaaatgacgagccaaacaccaccatcccgatgttaaaagaaggctggttttggtttccc

SEQ ID NO: 13393 - DNA, 530 bp, Gossypium hirsutum
  Clone ID: LIB3829-010-Q6-N6-C3
gaaaacatatttggtgttaaagcaccaaaattaaaatggtggaaaatcatgtcaatcatttcaagtcgctttcaacatattaagtaacaaaacaaagcctttagggagaagtagaagatgttaacaaaaagtatgagacgatagatgccaaaatggcacaaactgtaaccctacaagggtgttaaaacaaattggtagattttctcgtctgctggtttatttgcaatggcaagtggcttgcactccttctatgacttgaaaatttgcccctatcaaagactacttatcagctggttttgcaagctgcctgactctgcgagcacattctgcaaaattttgcgccagaggagcgcatttagtaaggtcattagtattctccttgtagcatgtcatccaagcattactctcaaccgaacaaggcataggctttggttctggtatcttgaactccttatcatgaagatccttggctttttgtgttacttcctgcaccatgttcttttcctgcttccgcagcttttctactacgt

SEQ ID NO: 13394 - DNA, 520 bp, Gossypium hirsutum
  unsure (1)..(520): unsure at all n locations; Clone ID: LIB3829-010-Q6-N6-C4
aacccccgcaatcagaattagctgtgataatcccattgacaattgaacccaaggggtcggccacgcggacgcccacgcgtccgggggcgcggggggtgacccggggaattcggaccgggacctggaggggggccggggtttccgagaggggggggtattggaggttggcgtaagtaagggaacaggcggtgcctggggggaaatgtggtgcggttaaaattnaaaaaaagagaggggccggggggataaaggggaaagggtgggggggctaagggggggggtaaattaaattaattggggtggggttaatgggcggttttnaggaggggaaaatggggggggaggtggattaatgaaaggggaaaaggggggggggaggggggttggggattgggggggagggggggtttttttttgaanaggggggagggggaaaagnggatgggattttaggggttggggttgggggagggggagaagggggggatagggggggttgggccaagcggccccccccccc

SEQ ID NO: 13395 - DNA, 521 bp, Gossypium hirsutum
  Clone ID: LIB3829-010-Q6-N6-C5
gggaagagtacagatgctctaaaatattaaatatttgggtccaatcatctattacaacatcattcgcctttgttcattacacaacaatttcattcacctccaaaggtgaatgttttagcaaagttgccatcattactacatagaacaataaagaaacatacagaaaaattgtgaagaacttggtactactgtgtctcaaaatttcacatcagttgtccatgtaccttgcacactagggtgtttagttacatgccttgtcgtcaatttcaccacctttcttcccaatgcgtttcttagcctggttgcataaagaaggatatcttcaggagtcatattcttcacgcataccacccgttcgtttttgttcttgtaaaagcctttcaaatgtggatgctgcccatgaatgagttcattaaccacctccagctgagggtttttctctttaaaagttggtaactctgactccataaatgcctttatttcctcacatgcactgcacgtctcacctataagattggtaa

SEQ ID NO: 13396 - DNA, 526 bp, Gossypium hirsutum
  Clone ID: LIB3829-010-Q6-N6-C6
cgagaacggagtttcttttcgcaattagcaaattgggtaaagtttagcattggaagaccttcaaaataggcaagaaatcatgtcaatggtttcgtaaatcataatgaggcagaagaataggggggcaaaaaataaaatctttgtgtacaacaattgaaacccagaattagtgaataacatggatatcttgaaattctactacatataaagtccttctggaacgccttctttctttttgaacatcaccttttccttcgctttcttaaagtccgcatgcgtcaccttcatgcgcctctcccttaaagcaagcaagccagcctcagtacatattgcctttatatcagctccggagaactcatcttttgtcataacaaattcttccaagttcacatcatcagccaaagtcatccttgatgtatgtatctggaaaatgcgccttcttgttttgatgtcaggtaggggaaattcaattttcctatcaattcgaccagggcgaagcaaagctggatcaagactttcaatccta

SEQ ID NO: 13397 - DNA, 518 bp, Gossypium hirsutum
  Clone ID: LIB3829-010-Q6-N6-C7
aaggccaaatattttatgttttttcatgaagtaataattcagtagcagcaaattggacatcgaatgagtccattttcattacaatcaggacatctttggaatccatactcacccttttcacctccattctcatcatcatcttcttcttgttgttcttgttgttcttgttcttccctttcatcatcttcataatacactttacaactccctgaacaagtctcacatggcacgaatctgatatccccacaagcttcacaagctccactacctcccccattgccatcaccatcatcacccaccatttcacacccttcgacagccttctctagctttccttcttcatgcattcgccttacttcttcagctccaccgatgtatttttcccccacaaatacccttggtaatccacctttaaacccttctcctattagctctttcaattcctctttgaaccctgaatgcattgaaacatctcgttcatcgatacgaactcccaagcctttcaaaatcactctaac

SEQ ID NO: 13398 - DNA, 535 bp, Gossypium hirsutum
  Clone ID: LIB3829-010-Q6-N6-C8
atatgaaaatatagagatcacacgcttaggctgtgacactacatggtccttgatataggttatattcattagctatatcgaaatcaatggttattggagcctaacaatgaagggctacacacacacacacatacacactctgggtctcctatctaaggtaaaagcattacggaccacgggcagcagaaacagagacatccactagcctggtcatcaccgtatcatgccacctaccttacttgaatccactgtttataacaatattaccacctgcttcatgtacgtacgcccttcagggtgtgcatcccaacattttcaagagatgcttggcgaagaactagggcaacatatagggatatatggacgcaaattctgggatactactgtcgatgaaactctagggaaactaagagcgggataaagcatgtgacagaaaaatattttccataagcatataccgtaaactgtattacgtgacatgtaccgattatagaggcttcccatcaagggacctactggagccatgtacacccac

SEQ ID NO: 13399 - DNA, 503 bp, Gossypium hirsutum
  Clone ID: LIB3829-010-Q6-N6-C9
aaaaaatgggtatattcgcatattcgacattcatacttgggggagaataacctaaaataaacaaattaaaaacactcatttattgggataggggggcaattccctgggttcttctaggctcttaagacctacaaacaacataagggggggcattcagaactttaaaaaggggtactacaaagacaaagagcataggtatgggcttcaattatctatcaggggctgcgctatcctcgggttatcaaaaccttttactgagcagaggtttccgccattggctggggtctcatcgggttcatcatcatcatcaccatcatcatcatcggcatcaatggcctcttcatatatactgcctcaagagagtgtgctaagctccaattccccatcatcttcattaagggattccagcccatatttcgggggacgaggcttaactaaaagccaacgcaaccggctgggttccttggggcaaggacctgggctccttgtggatattggggggg

SEQ ID NO: 13400 - DNA, 518 bp, Gossypium hirsutum
  Clone ID: LIB3829-010-Q6-N6-D1
ctgaaaaaggaaaaacttgtaaatgcgtgcttagggtatgcatttaataagacccccaaaataagatatgaaattatacaaataccactaatgagaaaggcaatctcaagaatgtgatcagtattagccctaatctgtcataccattggggaaaggctctcctctaatttaacatcgtccccttgtacacatcctagcatgagggcagtaagcattagcttacctgcatatgggaaatccctatgttgcatcaatattgcctcaacggatgatcgtgcatctttcaaaccggctacttctacgttttcttgtctcaatggcagcacttcaccgaatccatcttcaatggtttctgctttcggaccataacacctgtttgaagccttgaaaaggatagttcggctaagttgttgcaaagtttcctcgtcgctccaaccttcggatactgatgcttgatatagctcgctccaagggtcttgatcggcagccttcttccagcactcctccaaaagttccta

SEQ ID NO: 13401 - DNA, 525 bp, Gossypium hirsutum
  unsure (1)..(525): unsure at all n locations; Clone ID: LIB3829-010-Q6-N6-D10
aggtaaatatgcaaattccatgtcaaaggggaaaccatacatagatgcaaccgggaaacaagatagaaatatttaaaaggccatcaaagggcacaatccttcacgtgaaaaccagnaaaacccacattaagggaagaccttagggggtagaacccaccacgaagacgaagaacaggggaagagtggactccttttgaatattgtaatcagccaaaggccttccatcttccagctgtttcccagcaaaaatcaacctttgctgatctgggggaattccttctttgtcctgaatcttcgctttcacgttatcaatcggatccgagctctccacttctaaaggaatggtcttaccggtcaaaggcttgacgaagatctgcatcccacctcgaagacgtagaaccagatgaagagtcgattccttctggatattgtaatcggctaaagtccgcccgtcctcgagttgctttccggcgaagatgagacgttgctggtctggcgggatgccttccttgtcttggattttgg

SEQ ID NO: 13402 - DNA, 453 bp, Gossypium hirsutum
  Clone ID: LIB3829-010-Q6-N6-D11
caaacgagagtgctagaactccatagaaaggggaccgtgtacataagggagttttgccgagaaagcaaattccaaaaacggggaccaaacactagatctaacctaatttcacaatcaatcaagtgaatacaaacaatctaagctctttcacctctaatcctcctagcggggtgggtatccttgggcatgagagtaaccctcttagcatgaattgcacacagggtagggtgttcaaacaatccaacgagataaggctccgccgcttcttgaggtgcggcgacggggctgctttggaaccttaaatcagtcttgaaatcttgagcgatttccctcaccagcctctgggaaaggaggcttcctgagcaacaacctcggggtcttctgggatttacggggctctttcaaagcgcacgggtcctgggctaaaacggggagggtttttcactccccccg

SEQ ID NO: 13403 - DNA, 363 bp, Gossypium hirsutum
  unsure (1)..(363): unsure at all n locations; Clone ID: LIB3829-010-Q6-N6-D12
gggggggaatttaatggggtcaattccttcaaacgggggattaaatttacatctcatcaaaacaaattcataataaaaatcaagcccctgtgagagtgtgtgattctttgtggggaccggggggtnctaatttttccctttccatttggggagacaggggtccatcataaacacctctaatggggtccttcttcaataatcctcccttgggtttgcgcaaatggggtagaggtatccactccggccaggtagcaacccatcccctggaatccttgggttccctgtgagccttaagcgttggcttcagttcatggggggggaagggggtccgaatgagggcgagcgaatttcgcgaagatttct

SEQ ID NO: 13404 - DNA, 375 bp, Gossypium hirsutum
  Clone ID: LIB3829-010-Q6-N6-D2
aaaagggaagcaaagaaaaaataattaaaatatcctgtctctaggttttgctcggatgtttcctatagcaaatttaactgttacaaaactattataacatcgtctaaaccttctaaaaataaaaatacatcctgcattattcatagctaggtcttttttaaatgtaaagctaaaggagataaggtaaaaaaaggagatcagtcatccgcttagtcaatagcaattctcgtatttaacgtacaatgcactatttatggctcttctcttttcaaggcccctcttcagagctcatcttttaatgcctcttgatgagcagttttttccctgttcttctcaatgaaggcaatgatgtcttcctttgtcctctcaccttcc

SEQ ID NO: 13405 - DNA, 325 bp, Gossypium hirsutum
  Clone ID: LIB3829-010-Q6-N6-D3
aagccatccgcaacagggaggaacccttttcattttatacattaatattatttaatataatgaagatgagagccagacatgtggatcatctcaacaaggagaggaatggggaccatctaatgatggcttttcatcttcataaatcttaaaattataaataacatggcaagctaagctggcactggtgtctccactgaaacctggccagagtaattgacttcagatttcatgtctgtttcccaaagctctggtaatgcctgctttatgttgcgaatgctttataatgcataatctggtcctttagggctctgggatgtgcccacca

SEQ ID NO: 13406 - DNA, 520 bp, Gossypium hirsutum
  Clone ID: LIB3829-010-Q6-N6-D4
gtagagaagaggagttggtaataatatttctttggtaacaacattgaagatgaacaatcaaatttcttccccttcctttctttcttccagctgagttgtggccccaaggcaagaaggcttacacacagccttacactgcaaatcacaaagttcaatagccccttactactcccaacccattcctgtattattttattgtgcagccaaaaggtgatcaccctgatcacagatggtatattaaacaaactcattcacattcatcctcaataataatagtatataattatcacttctcttctctttctttttcccttttgtaaccaaagtcagttgccaatgctcctctcgtataaaaaccagaagctctacttctccccaggcatcaaatcaggtccgcatatatccccacgacaaagagggcagaccctacaagcctgtgaatctccttgagccacttgtctatacatgttctatgaaattcatgattacaaggcaatctccgaatgctatccccctcctc

SEQ ID NO: 13407 - DNA, 436 bp, Gossypium hirsutum
  Clone ID: LIB3829-010-Q6-N6-D5
agccgaaccacccggcaaatctatgggggcccatataggcttgaacaaagcttaaaaaagtcgaagttcacccaatggaataagcaaaaacccccgataaaggggaacaaatcatgggggagcaaaaggcaagccctccactcaaacattacttatttaggactcattttcaccttcctaaaaaccctcgccgggctcaacaccgacttcttaaaaaaccttctcaagggcagaaggggccccacgagcttccgagaatttttcttttttcataccctcacccacgtaccagggaacaaagggccccttggcaaacaagaaaacaaacttgggggcaaggggggagaacaccccaacaaccctgggggggtgggaaataatgcaaacgggtttttgggccttagcaagaacacccccccgaaaccaccggtcgggg

SEQ ID NO: 13408 - DNA, 525 bp, Gossypium hirsutum
  Clone ID: LIB3829-010-Q6-N6-D6
accaaaatgcccctgtactttgacatttctgcaatttagccaggtaaattcgtatgaactataaacacttaaatgtaagttaaattgactgtttaatgtgctattctattttacattaattaatatatagatgttattatgcaatttattatgtcatgaaatgatagaaattcaacgacgtacgacgactaccagccccatttgaaccttaagaattcgtaggatacaaatgacatgtcattagggtttacatgattcgggtgctggtcttgaatgtcctaccgatggctgaggtccagcatatgttgtcgatactccatagcttgtgtgagcaagcccattttcacagctcgtgtgatcatacttattcacagctcgtgtgagcatatatgtacatgaattgacagattacaattatatgagttagcacactttgtatgagctatcccaggtatccaacgatattctattcgatacaacaggcatgaattggaaatgaaacggtaaatgttcaatatgaacaaa

SEQ ID NO: 13409 - DNA, 520 bp, Gossypium hirsutum
  Clone ID: LIB3829-010-Q6-N6-D7
ccataataactttggtttctctaagctaaacttctccaatacatctgaaagctaacccagtcaaaatctggagaaaattaacaaatatgtaatgtggattgatgatccttttggacaacttgtactaccagcaaatcctgtgggaattcagctgacgaatttaattttaatccctaggaagaaggttcacactttctgttgaaggcgccttcttgccatcatatcgctgtttaccaaaagagaaaggaacatatttgtatttgatcatgtgcaatatctgtctcttcatggttagaatgaataacattagccagtagaaaaggagtataggccaaaagacaggcacatcaaacacactgaagaacgtcatcacaaaagcaatgcagaaggcctttgtaatagagtaccagaatttgaactcggggagtcggcgaacgaaagggcgaaactcatcggatccgcgggtggggagcgaggggccatcctgcatctcggggtccacttgaggagaaaggaaccc

SEQ ID NO: 13410 - DNA, 501 bp, Gossypium hirsutum
  Clone ID: LIB3829-010-Q6-N6-D8
gagaaacataatgaacccaaattaattgtaacgaggaacatatatacaaagcaactgttcgtaaaagaagactctgcacccaaccctactctgagttggtattgacggcagcaacaggtgaaaccatggaatctactccacaaatattacgacccctgcagatcctataaaacccattctctccccagttttcaccccatgaattcttgataatccagtacggtttatccttcatgcgaactggagcataaccagctgaaccataccccaccaacaatactccatggtcaaggcgtttagagcagatatatgggcaagaaactcccccaatgtaggtctgcatgaacaccgcattgatagccactgcaagaggaccattcttgaaaagattagcagcgatttgatcttcatctaaagaaacaacactgaagttggccaccttggcagcaaccttggggttgtcaaatttgcaggtccctcaatcagtgccggggtaagggt

SEQ ID NO: 13411 - DNA, 229 bp, Gossypium hirsutum
  unsure (1)..(229): unsure at all n locations; Clone ID: LIB3829-010-Q6-N6-D9
aaattagtggggggggggaattttttttttttaaaaaaaaanatnngnnnnntnaatgggagagacgcagagtgtaaccccattgcttatgttgctatgtgaaaatcttaataaaattgttatttaatggaatggaaggtttgggattaaaaatttttaaattaattggggtggtgaggggagttgaaatcgatttttgttttagtttgcgaaaaaattctttgaaaat

SEQ ID NO: 13412 - DNA, 356 bp, Gossypium hirsutum
  Clone ID: LIB3829-010-Q6-N6-E1
aattaaaagggggggggcaaaaaaccttattaacgggggaaaaattattcaaaatcccctaaatcccggggggaccccccaaaataccccccccctaaaaaaaaaatgggtggcccccaaaccactaggacccaaaagcccttttcccggccaacaaaaaaaacccctggaattatgggtaaaaaaaccaaaaggggggggagggttcccagggccaaatcggggggaaagccaaggcttctggttaaacagggggcccaaaaaggccagggttgcttgcagcccctggctggccccccgctttttcataaacggaaattttcggacccgggggcggcccccggggtcccccccga

SEQ ID NO: 13413 - DNA, 503 bp, Gossypium hirsutum
  Clone ID: LIB3829-010-Q6-N6-E10
gcaacaagggtgcaaatccattatctcatatctaaatgatcaccatcaaacaaatttaaagggacaggtacaccatccatcctaagtcatgtcaaagagctaacactgtttctccacctgacacaacaacacatctgttccgcgagattttttaatctcacgcagttaaaaacacatcaggctttgatcccctctcccccatccatgacaggggaaagagcaaaatatcacccataactatagttaacagcatttcaggtttcagctaaaatgatttcatgtgctcggttcagcctcctttttctctgaagatccgatgccatgctcctcaggctttgcatctccttcggccttgtcatctggctttgtcacttcttgcccttcatcatcactgtcctcaaattcatccatgccacccatgccgcccatgccacccatcatgtcacccatgccgcccatgccgcccatgccgcccatcatgtcgcccatgccgcccattcccc

SEQ ID NO: 13414 - DNA, 484 bp, Gossypium hirsutum
  Clone ID: LIB3829-010-Q6-N6-E11
aactctaaatttaacttttattgataagtactaaagaaacaataataaaagattataattcaaaactaattattactaatagaagctcaagcgtatttagagaaactagcagaggggtgagggggtgctttagtttgcttcaattagggggggggaaaaagaggcatcattggtcctcttggagcggaaaatttctctgtctcagcaggaaccttgaatgctgcttgaagaacttctggggatatagccttccatgccccaatgcttccagccaagggggtgaacatagggtttggggtggggatgattgagaaccatgacaaaccacctggatcagcaatctttgaaacaacaaagaaccttggcacaatcaacagattacctgctttcacaatgggttccaggacccattttccgtccacacccaccacttggagacgaccgctgcccttaacaatgtacgttacctgcaaggctgaatcac

SEQ ID NO: 13415 - DNA, 489 bp, Gossypium hirsutum
  Clone ID: LIB3829-010-Q6-N6-E2
catagagaagaagtaacagcagtcaaaaagatttgtagctctcaagatgatacacatttggttctctctttttttttccttattttgaggagagcctattgctttatgatacacaaaaatggaggaacgattttaagtgctaaaactatggcagtaaaaggtataagtaaacaatgtacaagctatgggagatggtaacgatttgcagctttgcttaatcggcttttagtatttctttgccgcatggtacaactccatataatcaagcgcaggccgattccaagaccagtcttgctccatcaccctcttgcacaatgagttaaaccagtcacgaccatcataccaagcagagatagccctattgagggcataatctactccagcaccatcagctccatcgaagttaaatccgttgggttcaagaccttgtgcttcagctctagctttatcatcgtcaacatcgaatacagtatcataaagtcctcctgt

SEQ ID NO: 13416 - DNA, 500 bp, Gossypium hirsutum
  Clone ID: LIB3829-010-Q6-N6-E3
aaaaactaaaaaagctatgtatttttttattttttatataaaatgataaaaacacctccaatgttggtactcaattaacataataaataaaccttaagaaaaagattgctttttagtcaagaggacgaaactgattatatatatcatacacgactatttaagtaagatcgctcagcataaatgatggtttgggcacaaaattacatcacaaacagcagctactcggtgttttgaaagttaaactacaaaatatataagtaatcctcgggcaaaggagtaaaatttgacttggtaaccagagggaacctctggaagggaacaatggttggcttaagtcatcctttgtgcggcttccttcgcgagaagcttctcctttgccttggatctggcttgtgatttcgagcccatgataccacctccccacttcttcctgtactcatcgtacttgtcgttgaagttggccttgattgcctcgaggattttgctgaactccatcttat

SEQ ID NO: 13417 - DNA, 512 bp, Gossypium hirsutum
  Clone ID: LIB3829-010-Q6-N6-E4
gtagaaactaatttatttatgaagggcaacatgtacagttctttttctgtataaacccagttgtgaatgtaaacattcaactacaactacaggtaatcaaaaccgataaattacagtaaagggggaataatcagaataaccccattcgatatttgttccttctaaaactaaacgttcggtcttgggactcctcctataccctaggatctgatcacctcgaccatcagaaatataatgtgcacattatgctccggaaatagtaacttcgatgaacaaccgaaatcaaggtggccctgtcactccggggaagagttccgatattttgttgaatacatccataacctccttgtcattttggtattttgcaatgctcagtgggttttgtgaacaatccatgatagctgcttgaactctaggattttgaaatgccatagcaacttcaggattggccatgattttggatattacttcttcaggtgtaaggccaatctggtcgaattgctgcttcacct

SEQ ID NO: 13418 - DNA, 513 bp, Gossypium hirsutum
  Clone ID: LIB3829-010-Q6-N6-E5
ccaacgaaatccatatttatgccaagttaaacgtacaggagaaagggaagttttaggctacaaagttacagcttctttagattagatggtgcctgaaatatacagcaggatgtctaaactaaagaagaagatgacctctaaaagaaaataattatgtgaaacaaaaacttaggaaggcagatttatggacaacgcaactaaaatctcagtaccagaaaactgcactgattttgtgccgctgataagtaattggctcaatctcctttcgttgggggtttagcacatgcacaaaaggttgctttcttcctcttggggttctttcttatcccgccataaagatagtcccgcaatacaactcttgttttacgctccatgatcctggtttgtcctttactttcttttttgtcaagtttcagtaacatgaactgtattttctgcacctccaattgcaaccgcactattttttcagaccctcttcgaacttgttctgatactctccgcctcctaaaggaa

SEQ ID NO: 13419 - DNA, 473 bp, Gossypium hirsutum
  Clone ID: LIB3829-010-Q6-N6-E6
gaaaagccatgatctagcatattagctgctctcataaggttcaacttaggcaacaaactgctagtacaatcacttcctagaatgacttttttttttttgcagtactactagtagtcattactgaggaatactaacactgtttgcatcaaaagtagattctaaggaatccccctcaaaaatctgtaaaagcattactgaaagcataggaaaaaaaaagaactaccctaaacatatactgatatggcaaaattaaagataagtagtaccccacatagatcaatcaaggatgagaagcatatggggtttttttgctgatgcatagtgattgtttttaactagcacctggtggtggtggtggcacttgcagttgcagagatgggatttgttgaggtggtggtctcttacgcttcttcttctcgtagctaatccctcttgctttcgactgcaaatcacgaacctcacgaagataaagc

SEQ ID NO: 13420 - DNA, 509 bp, Gossypium hirsutum
  Clone ID: LIB3829-010-Q6-N6-E7
aattgtaaaccttggtttttcactttaccagattaatttcctaatgatttaaagagcattaatatgtgcaggtcagtgttaaagggactattacaagctaaacttgaattaacacaaaatgctttcttcaaactacgcttacttcctacgtaagtttcgtgcacggtagtaaaccggagtgcctttagttgtcggttgttcggacgaaggaacataatcgacagatgaaaccttcgggtatggatgaatggttgccagttcacggatgcgacgtaccacgggctttggtaagggacgtacggcatgcttcggatgattctcaacctctctccggttgttttcctgcacagaactggatcgtagtagatttcgccacttgtccctgagatcaacaggtgtccgataagtggatgatgcaaacagaagcttttttatattggtccatcttccgacaccgtacttggcaattccatcaacaagcttaatcacctccacaagggtccacatct

SEQ ID NO: 13421 - DNA, 526 bp, Gossypium hirsutum
  Clone ID: LIB3829-010-Q6-N6-E8
cacaagaagcataggtggtataccataaacaaatagggcaagtgccaacgctaaatctttccatacactttaccagttaccaaagcagatagcactctagaaaaaaatgggctaagcaaacaaccatatccagaatggggttttcaaataatttttgttaaacaatcatacattccattccttaccggctgccaccgatcattgctgagcgcattgcactctttgggcaccaccatgcatgtgatcatcttcctcataagcctcttgagctgcttgcgcctgcttcctacgcatctcttcctcaatgtggacatcatatagaggtgtttcctcacactcatccagctccatgtctgtcagctggactgaggccctcgaaggtagcacagcctcgagtgccttgcactgctcgggggccaaggagtcaggaaaatcaacggtaaagtgaatgtatagtttacccctcatgaatggcctttgatacataggcatcccttcatcatttatggccttgcattgatcaggc

SEQ ID NO: 13422 - DNA, 353 bp, Gossypium hirsutum
  Clone ID: LIB3829-010-Q6-N6-E9
aggagaccaaatcaaacaaataaattagaacagaattaaatgttcattttacaaataataaacccaaaaagaaaaacccagcccaattatgttaaaatagcccagtgacagaaggcccaaattcagaaaacctagggtcccttctttcccttgcaccgcaaccccccacgttcggggccccacgcacgtgagcacacccacacacgacccctagctcgcacgtgcacgccccacgatcatgcactcttcctcgactccacaaccagaaaacagccttggatcggggtcgaaagacctatttctcggcatcgttggccaccgaaagtggcgttggtgctgcggcagcctttggg

SEQ ID NO: 13423 - DNA, 515 bp, Gossypium hirsutum
  Clone ID: LIB3829-010-Q6-N6-F1
gaaagaaacagtactcaattaaaaggcacgcaagggagaagacaagctacaaaatgctaaggttttgctactaagttacaggagattattcgaaatcctaccaatgactgcacattattccaattcctcctatctccatagcagtttagcaactatgacccttacaactaagcgtcagcggtctcggcagaatctgcaacggccaagattagctccgggtgaatggttcccacatgtgttccatcaattgcattaggcaatcctaatgatttcagggcaagatgggctgccttttgccctgatatcatcattgctccaaatgttggccccattcttggggatccatcaatctcagcaacttccatcccggtgacaatcatcccaggcacaatttccctagtcagcctcactatagcatcctcagctgtattcatatccagtgccttcatccctggcacactatcaatcatcccaatgcttttcaacctcttcaccccggtggctccaaatggccc

SEQ ID NO: 13424 - DNA, 530 bp, Gossypium hirsutum
  Clone ID: LIB3829-010-Q6-N6-F10
accaacaattcctcttattactcttcactaacatatgcaaaacataccaaacttaagggtttggtaacatttacaaaacataccaaatatcacttaacaacttagatactttcaaaataaccaaaagacatcctaggggcggggccattttctaaaaagatagaaacttcaccaatttgagtttggggatcggtttgtatgctgagtccttatactttcgtacctagccactatttatcgaatttaatcgatatcttcgttcactttctcttttcccttctttgatgacgtatccggtgctacgtttgcttgcatttcctgggattcaagctgtagtgagagcaactgtccctgaaaactcatctcttgatgaatgttcagcttcaaatttcaccttttcaaaaggaacagatgcatttatggaaggatataacatccttatctcggtggcttgaggcatacattgactacgagacatttcactttctcttctttagtttacaagcataatgccatacaccacaaatacc

SEQ ID NO: 13425 - DNA, 330 bp, Gossypium hirsutum
  Clone ID: LIB3829-010-Q6-N6-F11
ctaaccccaaccccttgggaatcagcggagacaaatttccagaggagccatatgcggagaataatagcgagtaagcgtgagtaaaaccctaaatatatataaggacctaattcttgggcttaatttcgggacatcttaaaaccccgggtgggaaaggagggaggcaaacttttcaacatcaggcttcaggttttcgagctccttggggggccccaaacctttggggagggccttcaaaaagtttcccggcgggttttgggggggcaagggcatgggcaccgggtcgggggggagctcacctatctgtgcgagggctttctaaaccaaacc

SEQ ID NO: 13426 - DNA, 307 bp, Gossypium hirsutum
  Clone ID: LIB3829-010-Q6-N6-F12
ggggggggggggggggtaaaagaaacctatagaaaatgaaaagaacttctttaattcatgccgatacatctaaaaagtccccatctatatcttcccattaacccccctcccttttttttttttctcttttactctcattcactcttggggggggggggggaaatataaaacaaacagggtttatatagatagaatatgagaaggatttaggaaaatagagtatttgaaaaataaattaaattgctaaggctaaaccccaacacaacgatgatgttcgcagaagcctattcggttccctaacaccact

SEQ ID NO: 13427 - DNA, 498 bp, Gossypium hirsutum
  Clone ID: LIB3829-010-Q6-N6-F2
gccagtataaaactccttagtaatgcaggaccagtgaagagaaaactggtttgagcttcagtacatctaaatacatttgtctaaagccagaatacataaaagtctgaatacataattccagatgacacatactagaaacccacaagatggtggattctgagaccagcaaaagcttatgcatactacttgggatgaatactaccgaccggatcagggaaaagcagttcgaaataaatcccattcgaaataatgtcaagcaactgggacttacctgcaaaaatatctgatttatttcatgactgatcttcatctgaccttgaccgcgtcaggcgtctgcgtctccttgggcttggggatgcgtcttcacctacatcacttattacacgcacatcatcttcatcgtcgtcatcttgcaaacccaaaaaattctcgccccaaaggaacctccgctcagatacagctcctccagggtgtcgatgccttgaccaaaccctggac

SEQ ID NO: 13428 - DNA, 537 bp, Gossypium hirsutum
  Clone ID: LIB3829-010-Q6-N6-F3
gaagtaaatgctctctgtgttattaatgaatgaatgaaggattacaaaagtttatatttatagttgagttcagctgcatctcacagtagagaccaaattattccaacaaatcaaattcaaatctatctgcaaacaaatttaaacttttttataatccaacaggttgaccaaatggttattcactctgcatctgatcctcctccaacaccaactctttctgctcattatttctacaattactttatttgatggccagctacatattccagataaaaccccaacaccccaaattaacatgaaccatctccctgtctccctctgcatctaaagcacacggatttgttgcacacacagtatgggaaatcaatggtaaataaatattgatttgttcttgttattattcttccgttttaagaggataaatacattgtcggttggcttctgctcaagttggttgacttgaagaactacttggtttataaactagagctcgaagaatatacgtatcctcataaaaccggaagccaactatgccca

SEQ ID NO: 13429 - DNA, 508 bp, Gossypium hirsutum
  Clone ID: LIB3829-010-Q6-N6-F4
gaaaaaagaactaaattgaaatccaaatccaaaacaccaccaccgatttaaaatataaaaactccacagacggtatatgggataatattctgttatatatatatatatataacctaacatgaccacaaggatgaaagaattttccctttttggcatgctatgatatgctgtaatacaatctctttcacctgtttttccacatcatccaagggttggcaagcatctacaatctgcaatcaacacagaaaactttcatctatggccaacatatacatatatattaccttccatgaagaatctttgcggagtttatagtgttgggagactttccgctgaaactcaagctgttcatatctctcacctccgtagcctcctctttctgcagctttctcgggtgttatgtcgagatacacgaccaaatctggggctattaaaccgatctctggtgccttacaccattcgaaatcaagtcctttagcagttgagaaagcaacccctggataagagt

SEQ ID NO: 13430 - DNA, 520 bp, Gossypium hirsutum
  Clone ID: LIB3829-010-Q6-N6-F5
cttgaacctcccacaaatgttaagaatattacatgattccaaatacaatgtggaaaaatatttgccaattttcagtttgtttggtaggacaccagttgacaagataggcgtaatctaattactgactcttaaaacttcactcaatagttcatctatgttatccaaactcttcattttttttcttaaaatatttgtgtttgacatgtattctaacatggatataagagtatgatcctccaaatatatgaaaaaataaatacttggaaaaaattgaaaacactttctcccaagtccagataacattgattgttacagtaatactattttgtctaagaaaaagtaagttatacgaaaaagagatttgggaaatgctcctaccttatttctttgatcaaaaaaattctccttgagatcgaagacacaataagcaagtaaaaggtgtgtcttcctgattgcaaactaaaatcaatcataatataattccccccggaaagctttcttcacttgctcaagagtcaag

SEQ ID NO: 13431 - DNA, 513 bp, Gossypium hirsutum
  Clone ID: LIB3829-010-Q6-N6-F6
caataattaaacctggcaacaaatgaagtcaaagttttgggttcctggccgagtacatttgcgatgaggcctaggattgcccttaacctcaaatccctcacctatgaatacattgcaacagaagttatgggaaggcaaaagcgagcttattctccaatcaaaccctgtttacaagaaaattccagtcctcattcacggcgataacaagccaatctgccaatctgtcatcatcgtacaatacatagacgaggcttggtcttccggtccttctattcttgcttctgacccctgtgaacgtgctgtagctcgggtttgggctgtatatcttgacgacaagtggttcccaacgatgaaaagtataagagtcgataaaggagaggaagcaaataagcagcaatagcgcaagtggaagaagggttggctttgatggaagaagcatacgacaagtgcatcaataggaagggttactatggtggagatgaagctgggtaccttgatatagcttttggaagc

SEQ ID NO: 13432 - DNA, 524 bp, Gossypium hirsutum
  Clone ID: LIB3829-010-Q6-N6-F7
caggagacattagtctcgaatgcatttcaaaacatcagtagttccgaataaacggcagtcagaaaggataaggctttagcagccagcgttttcgaacaaaaaaaagtacacatccgccttctatttcccttatttaagcaaagaaaaagcggggccgaagtgctcttttacactcttgaataacatcattaaacataaacaacaaacccccaaaataaatgaacagttctgttgctggcattaccaacaccacctagattattttcgaaattactcagcagaaattaaggtatgtggatttgattaggctgcagattccttggcaatcttatctgccttggcaatcacttcctcgattcctccaaccatgtaaaacgactgctcgggcaggtcatcatactttccatccaacacgccctggaagctggtgatgctctccttcaactccacgtacttgccaggagcaccagtgaacacttctgccacatggaaaggctggctcaagaacctttggatcttacgag

SEQ ID NO: 13433 - DNA, 523 bp, Gossypium hirsutum
  Clone ID: LIB3829-010-Q6-N6-F9
atataatgaaaactactccattgacaagatataaattattaagccttgaaatttgaagggagcctcaaaatatataatgaaaactactccattgacaatatataaattagccttgaaattccagacattgatacacaaaatagaaagcgacttagatacctttgttaagcattgccctaaccctcattggaagaccatagagccgaataaatccggcagcatcggcttgattatatatgtctccactctcaaaggaggagatatcctctctgtacaagctataagcactggtccggccaggtacggaaactgagcctttgtatagcttcaaagtgcacggaaccagggggggtttcagttatcttctccataaatgcatccatggattcacgaagtggggcgaaccaccttcctgcataaactaactccgcatacttgagggcaagggaatctttaacttgaatgggttcccgggcaagggttagagattccagctcacgaacgggggttgaatacgatggga

SEQ ID NO: 13434 - DNA, 473 bp, Gossypium hirsutum
  Clone ID: LIB3829-010-Q6-N6-G1
acgaggagagaaagagacattcacgtatcagaaaacattaaagtcaatgctatatagggcaaattatgggcttaaaggctaaatatagttcggaccatttcacttgggggggactaatacgcttctgctcatctagcagggaatttcctctgctcatctagcagggaatttcctatctcgtacttaaaagccttctaaccacttccatctagttgaccatgaaaaaggaggggggccatgtattgcgaatgataggcatatggggatttcccctgacgatcgaagggtttagccatgatacagaactcaatcggaccccattcctttgattcaaagcaattgcctaatgccgctttatataacttagcagggtcagttaaaagctccgttccagcaggataagaagcatagaattgatcagccctcgaatacccagctctagttgggttggttgtataagcgtagctcaaaac

SEQ ID NO: 13435 - DNA, 522 bp, Gossypium hirsutum
  Clone ID: LIB3829-010-Q6-N6-G2
aaaggacttgtcaatgttgtcttttgctaaatgaaatggtaagagatacagatcagtgcaagaagacaccaaactatacaactacgataggcatcgtaaacatacgcatgtaataagccgctagacgcgggtttgaaagaaggtcttagttgttgcaaactttcattcattgaaaaaggaagtttactggatttagatgttctaacatcttcacggtaggaactgtgtagttgcaaataaacaaagggagaaattgtagaagtaggtggttgttatgaatcaacctgcctttggctttcacttaatcttctccaaaccatcctcccgcagtgcatcacggtcaagattgccattaagaagagaagaggaatcccaataacgcagccaccgtatgcaaaatttatcaaagtcatcattccagcagcaagatgaaccgagggaacaaagagttggtccactttattcccttcagcatagccattaaacgcaataaccattgagaaagtgtgggaccgttacgaa

SEQ ID NO: 13436 - DNA, 529 bp, Gossypium hirsutum
  unsure (1)..(529): unsure at all n locations; Clone ID: LIB3829-010-Q6-N6-G3
gatgcaaagtaacaagaaattcatgnaaacaagaatactcaaatatttgaacttaaataaagctccaacaccagagttaagatataaaattaagaactaagcgccataattgtcaacaaaatgactcaactggtttgtagccaacacatacacgaacatcataccaaagttgtgaacataacgtagtcagcagcagctcaactctcagtttgctccctcaaccttctaatagtactcctcaccgtcacagcgctggcagtgttcaaagtataagcaccaccagctttaactttcccgcaatccttgcagccccagattcctacagcctttctcttcactgcatactttccacaaaactcgcagaagtacttgctgtgttgactcacctccatcttcttaatttgcttcctcaaactggcaccataacgggtaccatatttgccaacaattccggccttcttcgttctctttgtcatggtcgctgggctgagaggatctgcgcctgtctggttcggaaagtgaggagcgg

SEQ ID NO: 13437 - DNA, 518 bp, Gossypium hirsutum
  Clone ID: LIB3829-010-Q6-N6-G4
acttaacaacaatatcatattttcattaattccctctataattcgccaaacaaccagtgcatctattggtgtttcaagggagataactctttttttctcacagtttcacagatgaaacatacttagtacaactaaaaaaggaaggggggactctcagtaatgtccctctcttgacaatatatttagttcgtctcaaagacaaaccagataatacaatcataatcaactgcaagtggtagtttctggcaaagttttatgctgacccttcatcttgctttgctttgtctgacttttgcttcgatgggtctaacggagatgaagtgccctccactcccatctctgcttttaggtcattgatgctttgctccaattcgtttatacggtttcccatgtcgtcgatcttggtgataatggaatcagacattgtttgaaacctagattgcatttgttgaagaagattttgcacaaaaacagtcatatcagcagtgctttgctttgagtcatccgaattttgcccc

SEQ ID NO: 13438 - DNA, 494 bp, Gossypium hirsutum
  Clone ID: LIB3829-010-Q6-N6-G5
attgaaaaaaaagactgtaatattggcacttgacatcatattgcatacagatatccaatcgggaattgggatttcttttagcattgttctacattgaaaaagctaatatctatatagaaccgaattagtcttgatactcctcctcttcctcctcatactcttcttcatcggctgcagttgcatcctggtactgctgatactccgacaccagatcattcatgttgctttctgcttctgggaactccatctcgtccataccttcgcccgtgtaccaatgcaagaaagcctttctcctaaacatggctgtgaactgttcactcacacgcctgaacatctcctgtatcgaagttgagtttccaatgaatgttgatgccattttcaacccattcggagggatatcgcacactgttgatttgacattgtttgggatccattccacaaagtaggatgaattcttgttctggacattgagcatctgctcatcgacttccttg

SEQ ID NO: 13439 - DNA, 485 bp, Gossypium hirsutum
  Clone ID: LIB3829-010-Q6-N6-G6
aaaaccaaggggaaacttccatttcaaaatatgattaccaacttcaataacataaacaacaactaaatataacaaaaacaatgatcaaacgatcacaatatgcgtccatccatccatccttccatacatacatgaatacatatatatatagggggtttatatattacctatactatacattatagcatactgaagttccatggattatatggcacaaattatactaatcaatcattaaatttcacacattttgcttcaattttcatgggacttaaccatgtatggcaactccaggaatctccatcatcaacgggattgactcaataatcttggacggcttgttatctaaaggggtctcggagtcctaagccgaaagatggactccaagggctgctctgccccacgggtcgaggttgttcttccaaggggcatcccattcaacagctttggccgggctgcatgctacacttgctcctcccgggacg

SEQ ID NO: 13440 - DNA, 520 bp, Gossypium hirsutum
  Clone ID: LIB3829-010-Q6-N6-G7
aataattaacaatcatgattaaaaaagctagtacacaaggtagctacaaaatcctgtttcaataacacctaattcaagttccgactaagataaacgaccatggaatacaacattaaataacactctacttgaaaaagtgctaagccttggctttttcatacaacattaaatgggatggatcggcctcgtactgccttttttacgttaacccattcatcctcctcagctccaaatccgacaaatctaacacgaacttcagtttcaccggaactggtaactcggtgagacagaaacatatcaacatcataccatgctccgtgtgttgatgactttgcctcaaattctagttctgatagatctgaaaccttttctcccacttttgaaaccaaacctttaagaatctgacaacttaggcctccatcatttagaaggcaagtttgaggaagtccagactcatctttgtatgtattggccactgaaggaactttcacttcgctttcttgctgcctagttgtgaacc

SEQ ID NO: 13441 - DNA, 517 bp, Gossypium hirsutum
  Clone ID: LIB3829-010-Q6-N6-G9
aaattcaaaatccataaaagcacttcatcacaaaacttcaacactgggttcatagtataggatcaagcataaatgcaaaaacatcatggccatcaatgccattaagtccataaaattggcttcaaaaaaaacatactaacgctgttgttttctggctagggaaaaacagataataactttaacaacttaacgctttccgccaccgccaccgagcttggggcctttcggggctccaccctttggaacattacccttgccctgagtcttttgttgctttgccgctacttctgctttctttgccttcttttcatccttagttttcttgattctttccttgatttctcggagagcagcttccctggcagcatcacggacttcgggtttctcacttctcttcttctggataacctctaaggtggcaccaacaatggatcgggagtaaggcttcttggctgcacgtcttctcttcttcacggcctcttgggcaatatccttcttatgctgcttcctatacatg

SEQ ID NO: 13442 - DNA, 536 bp, Gossypium hirsutum
  Clone ID: LIB3829-010-Q6-N6-H1
aggtaaatatgcaaattccattcaaaggagaaacatacatagatgcaaccggtaaacaaagactagaaattatttaaaaggccatcaaagggcacaatccttcacgtaaaaccagaaaacccacattaaggaagaccttaaggcttagaacccaccacgaagacgaagaacaaggtgaagagtggactccttttgaatattgtaatcagccaaagtccttccatcttccagctgtttcccagcaaaaatcaacctttgctgatctggtggaattccttctttgtcctgaatcttcgctttcacgttatcaatcgtatccgagctctccacttctaaagtaatggtcttaccggtcaaagtcttgacgaagatctgcatcccacctcgaagacgtagaaccagatgaagagtcgattccttctggatattgtaatcggctaaagtccgcccgtcctcgagttgctttccggcgaagatgagacgttgctggtctggcgggatgccttccttgtcttggattttggctttcacgttgt

SEQ ID NO: 13443 - DNA, 528 bp, Gossypium hirsutum
  Clone ID: LIB3829-010-Q6-N6-H2
aggtataatagaggccgcatattatttcatgtaatataataataaaaaaaggagaagctccacattctgccgtacaaatggcagtaacaagttcaggtttgctggcatagcaattgacttgataaaagacaaaaagtactagaatagaaacacaccccatgctatatcaccaggcaatgcctgggaagcaatttatttaataattataacataagaaaataagccgttttaattataataatactcttcctcctcttcccagaggcaactcagagttgatctaggtgatccacatcccccaatgccgttgaagctctggtaaatgatggaaccccctgaaccaagctcttcgatgctactctcccggcaacggtatcctttaacatccagcagacaggtctgttcaaatgagtgacaatcaacatccacatgcacggcaacagagaaattacttggtttgaagcaaactaaaaccctttgcaccaactgctccagattcaactctttcagatcatagcccacagcttc

SEQ ID NO: 13444 - DNA, 528 bp, Gossypium hirsutum
  unsure (1)..(528): unsure at all n locations; Clone ID: LIB3829-010-Q6-N6-H3
agcaacaagttaaaacataataagaacattaanagagaaaacagtaactaatcgaaacatattcaaattttagcaacaagttaaacataataaaagcagtaaagagaagagcagcgacagttgtatgcagcaacttgtattcgtaaaattcaataagaacaaacctcaaaactaaccccaatttgcatcaaaagtaaaaatccaaagtacccttatatgagttctcttttcagcggccggaggggttttctcaaagctcgaattcttcatctctgagagcgatttcagcagcctcttcatcttcctcgtcaagaataaagtactcatttttctccaccggcctaaacatgtaaaacataaccaaataaaacgccaaactcgcggtctcctcggcggcattactaacccattgatacttgtaagctgcaatcgtccttaaagcaaaaaccacaattcttgtgaaatacaaatacccaatcaccacaatgtaaaactgcctaaacagggtcaacttcgccaaattctttg

SEQ ID NO: 13445 - DNA, 542 bp, Gossypium hirsutum
  Clone ID: LIB3829-010-Q6-N6-H4
ggcttggttggtggaacagaggaggcaaaacaaataagcataaactaagtcataaaatgggattttggggtaataagaaaccacgatgatatgagattgattccgatttcggttttgattcagattcgaatttcacagtttatagaacttggccatacctggctcctactgtacaagaatctcagcagcatctcattatgtgtatgcaactttcgtcacgaaccgatcatatccagccgcttcgagttatttgcagcggcaacagtcaccgcttcattacgggataatgactaggttatcatgccaaataccggaatgtattggggttatctttgtccctctcaagatagtctcgagtaatcaggtcttctattcgctttttaatggccttgaaatccggcttgaacatgcggcccaattgctcaacacactccataaccaactgctggtgacccagaactttccgactcttcatgatacgtacaattgaggcatcaatggcatatcgtcgatccttgtcaacatcttcaattactttcttc

SEQ ID NO: 13446 - DNA, 434 bp, Gossypium hirsutum
  Clone ID: LIB3829-010-Q6-N6-H5
aacaataaaagcgatgttcccttaaatagaaacttactaaacccacaaattaaaggtgcatagagtatctataaaattaaaccacactttagtggggactcatgaaaaatatgcaccccacttccagcaaaatctaaaacctgagtgcatactgagacatatcacataagccttttgatacctcacagggaatgagcatttttctcgagcctttgggagacatgcatcccgaacattgctcacaatccaacatttctaacggtggatgggggaaagcatgatgctcaactatatcccattcatcaataaggcttaccttcttcaaatcttcatagatcaacatgccaaacacaaaactgatctatgaacttgagaagcattgaaccattaacatttgacataaactccccaagggagccctaattaaaccctga

SEQ ID NO: 13447 - DNA, 519 bp, Gossypium hirsutum
  Clone ID: LIB3829-010-Q6-N6-H6
gatcaactggatactcctttattcataattattttccctttaaagacagaaaatcagtaagctcaagcctcataatttaaaacgacaagggtaacctgagtaaatagttcaatcttgctgagttcgggtttactttatcttgggataacaggaatgtgaactactgtctatgagcttgcagaatagggctgaactttcttctgcgggagttgcagcatgtgttcacgttcccaattggcaattcttatgggttccttatgttggccctcatcatccaacatgatcaacttgggaggagaattgaaaagatattgaactttaactgttggaaacttggccttctcttcttcaatgaaaccaacaatttctggatagaatactagtttcctcatgcaaacttccagaattgcacccgaataagtaatcttacttgtggaatcatctgagtcttctgggcaacatttcaagcggtcagatatcaactctttgtccttgacatactcagaaaaaggttgcaat

SEQ ID NO: 13448 - DNA, 520 bp, Gossypium hirsutum
  Clone ID: LIB3829-010-Q6-N6-H7
aactaagggggggagtcccttaatattgatatttgcttaagcacaaattaaaggggcgagtgtgctatcaaattaagccatcatttgggggggctcatgaaaatcaagcaccccattaccatcaatatcataaacctgagtcatagcgacacattcatcataagactttgcatccccaaggggagtcaacatcttttgcgaccctttgggagtgtatgcaacccgaacctttctccaactcgaacatctcgaacgctttcttcaggtgatcatcatcatcatcatcatcccgcttttctattttcattagcttcaagaaatcttcatagtccaacatgctatccccgtgcgaatctagttcgttgatcaccatttgagcatcttcatgtgacatgtactccccgatggagcccaagtatgccctaagttcgagaggcgagattttcccatcatcatcgccatcgaaatagcgaaacacttgtttcatctcctccacttggtgaggccttttgggtctttc

SEQ ID NO: 13449 - DNA, 519 bp, Gossypium hirsutum
  Clone ID: LIB3829-010-Q6-N6-H8
atcaaccctacaacatcaatgtcaccgtagctctttttgatttcaaaacaacggactaacagcaatgaaactgcaaaaacatactgaacatgtggggcttacaaaaactatattaactgataaaagagatctatcatcttcaaatgagtatatatatatattaacaaaggcttgctccgaaataagatacgacgagtttcacataaaactcgatgtagtaccttaatgatgggattgacttcttcctcgttgtggatgttggaacaagtctcggggtggcattcataaatgcttcacgaagttgagtgtcatctcttgtcatcccttttgagcaaatattgggcacagccattgccagcagattctggcaaagatttgtcattgtgggctccgccaatcctatacacgtaattaaggccaacaagaagctccgtgatagctgcctcagtttttgcttgatccgcaaagtgtagtgtctgtaccagaagtatatttgacccagaaattatatgctgctct

SEQ ID NO: 13450 - DNA, 480 bp, Gossypium hirsutum
  Clone ID: LIB3829-010-Q6-N6-H9
atgcgaaagccctacttggttcaattcaatcccggggtcatgggggcaaatgggaacccgaaacaatatacccgaaaggggggagggccttcctaacgggggtgtgggcccaaacccaaattaacattagccggagggaaggggaccaacaagattggaatccactagcatcaaaccccgtttaatgcagaggcctttctccctcccctcccctcccctccccatacaatcacaagggataccagaaagcaaagtctaagatatacatggggaacgaacttgatctacttacgttttcttgggggggggaattaaaccaacaggtaggacgattctactcattccccaaattcagagaaccatccttcatcagctttatgcttaaactggtgaatccccctttcgagtaatggcgagaagcctttctccaatccggaccaggtttcatcaggggtgcaaattcatcatagctgaggcgcc

SEQ ID NO: 13451 - DNA, 185 bp, Gossypium hirsutum
  unsure (1)..(185): unsure at all n locations; Clone ID: LIB3829-011-Q6-K6-A10
tttttttttgtaggcaaggggnaagcanagnaaggtaaagtagggatgatcttcttaacctttttgtctgggaaacgggcttagaaactcacacaagcctgtccttccttcccatgttatcctaggtaacgctgtagctttaaactcattcatgttctgtgtcaataaagatgaaggaacggtcc

SEQ ID NO: 13452 - DNA, 547 bp, Gossypium hirsutum
  Clone ID: LIB3829-011-Q6-K6-A11
tggcaatggctacttacgatataaccccgcgtatcggcccgaacctagacaggcacttagtgtttccattgctggagttcttgcaagagcgacaactatacccagatgaacagatcttagaaagcaaagatcgagctttgtgaactagcacaaacatggtcgattacgctatggatatccataagagcctttaccacaccgctgatgtccctcaggacatggtcgagaggagagtcgaggttgtcgctcgtctcaaagctttggaagatgccgccgctcctatcgtctctttcttgcaaaaccctaacgctgttcaggaattgcgtgctgataaacagtataatctccagatgcttaatgaccgctaccagattggtccagatcaaatagaggcattgtatcagtatgcaaaattccaatttgagtgtggcaactactctggtgcctgctgactatcttgatcagtatcgggctttattgtaataacaagccaaaggagtttgagtgcattggggggggaagcttgctgccgaaatactgatgcaaa

SEQ ID NO: 13453 - DNA, 585 bp, Gossypium hirsutum
  unsure (1)..(585): unsure at all n locations; Clone ID: LIB3829-011-Q6-K6-A12
tcggccgcccaaanaatcaaatctctgctactgcatagtaaaagagagaaagagcgacaatggaggcagcaagaacagttaaggacgtttcccctcacgatttcgtcaaggcttacgccgcccatctcaagcgctccggcaagattgagcttccttcatggactgatattgtcaagaccggcaaactcaaggaacttcctccatatgatcctgattggtactatatcagagccgcttccatggcgaggaaaatatacctgaggggaggtcttggtgttggtgcctttagaaggatttacggtggggctaagagaaatggaagccgtcctcgccatttctgtaagagcagtggatctgttgctcgccacattcttcaacaattgcagaacgttaacatcattgatattgatcctaaaggtggtaggagaatcacatcgaacggccaacgcgacctggaccaagtagccggaaggattgcggttgccatctgagtaacttttaatacccaaatttgcttgtttttgctgttaagcaattttcattttaggtaccgagagagtgaagacatggaatatttttatttta

SEQ ID NO: 13454 - DNA, 595 bp, Gossypium hirsutum
  unsure (1)..(595): unsure at all n locations; Clone ID: LIB3829-011-Q6-K6-A7
tttttgcaattgaggccatcaagctgggttcaactgcaattgggctaaancgaaagaggtgtcgttttggctgtggagaagcgtattacttcaccattgttggaacccagtagtgttgagaagatatggaaattgatgagcatataggatgtgctatgagtgggttgattgctgatgcacggacccttgttgaacatgcacgagttgaaactcagaaccatagattctcatatggtgagccaatgaccgtggagtctacaactcaagctctttgtgatctggcccttcgattcggtgaaggagatgaagaatccatgtcccgaccatttggggtatcttttctcattgctggtcatgatgagaatgggactagcttatactataccgatccctctggcacattttggcaatgcaatgcaaaagctataggttcgggttccgaaggtgctgatagctctttgcaagagcaatacaacaaggacttaactctttaaagagctgaaacaattgccctgtcgattttaaagcaagtaatggaagaaaaggtgactcccaacaatgtcgatatcgttcgagtagcaccgacataccatct

SEQ ID NO: 13455 - DNA, 481 bp, Gossypium hirsutum
  unsure (1)..(481): unsure at all n locations; Clone ID: LIB3829-011-Q6-K6-A8
cggncgcgtggggctaatttagatgttttgagggcaaagattcttgttgtggagagcacatttgtagataactcagtatcggttgagcatgccagagattatggacacgttcatctgtctgagataattaattacgcggacaagttcaataacagagcaattcttttgattcacttctcagctcggtatgcattagagactatccaggaagcaattgcggcgctgccttcacctctggctggccgagtttttgcacttacagaaggtttctaaaggaatggggttgaagataagatttgtgttgttgttcaggtgatccataattttctgtaacaaaacttgaagcttagtttatttgattttagagatagtgtcgaaaagatgtgggattgaactcccaacatttgctactccttctaaccctgcgctaaggttttctttgtaaaaaaaaaatatatatattactgtgtttttttttatc

SEQ ID NO: 13456 - DNA, 583 bp, Gossypium hirsutum
  Clone ID: LIB3829-011-Q6-K6-A9
gcgttcgaaactgcgctttagatatgggattccctcatctcagaaagaaggtcacagcatcacgcttattattctcaaagcagactatcccacattattatttaacagtggatacatgtgtcgacagacttatggatttgcggagccaactcaactcattacaggaagcttcaggtgggaagcgtatatctgtcaatgatcttgtaattaaggctgctgcattggctctccgaaaggttcctcagtgcaatagttcatggacagatgactatattcgccagtataacaatgtgaatattaatgtagctgtgcagacagagaatggactttacgtccctgttatcagggatgctgataagaaaggtttgtcctcaattgctgaggaggtcaagaatttggcacaaaaagccaaagagaacagcttaaaaccagaagattacgagggaggcacatttacagtgtctaacttgggagggcccttcggtattaagcaattctgtgccatcattaatcctccacagtctggaattttagctgttgggtctgctgagaagagggttatccctggctcgggtcctgacca

SEQ ID NO: 13457 - DNA, 62 bp, Gossypium hirsutum
  Clone ID: LIB3829-011-Q6-K6-B11
ggggggggggggagagcggagggggggggggggtcaaaccctggggggggggggcccccccc

SEQ ID NO: 13458 - DNA, 599 bp, Gossypium hirsutum
  unsure (1)..(599): unsure at all n locations; Clone ID: LIB3829-011-Q6-K6-B12
gattaagctcttatgtgaggcgtgctacttatatcatggcacaacttgcgaaggnagtatgatgtacctgaaattgcgctcagacttgtgtgtgaagggtcatgtgtcagactccaacaggaccgttccctttgtaacatgctcaaggagtaaatgttgcgcgcataacaagaccttgaaggttatccgcaagaacttggtaaagtaagtgcattgagctcttctttgaaatagcagagcacatggaagattacaacaagttttatgaggcattctcaaagaacctcaagcttggtatccatgaggactctcagaacaggactaaaattgccgaattgctccgctaccactccaccaagagtggtgatgagatgaccagcttgaaggactatgtgaccagaatgaaggatggccagaatgatatctactacatcactggtgagagtaaaaaggctgctgagaactctcccttccttgagaagctgaagaagaagggttatcaggtcctttacatggatgatgctattgatgagtatgctgttggacagctcatggaatttgtaggcaaaaagcttgtgtcagctaccaaggaaggtctt

SEQ ID NO: 13459 - DNA, 540 bp, Gossypium hirsutum
  unsure (1)..(540): unsure at all n locations; Clone ID: LIB3829-011-Q6-K6-B7
gcanaacatactaaactcatgagctgggactaaaaccacatctcctctcagactctcttctcgactcattgctcaactttgctatcgagttcaaggatcgcatcgacacaaaacagattatgcccagcatttcatggaaaaaaatggggtgacgccacagactgtaccagctaattaggtggttggcaatgagaggaacttcttgtttatcctgttgtatctttctgcgcttcgtagatggtgctgcagtcctctctactcttcatgttaagcatggtctgtatgtgccatcaaaatcaaaactcggttatgaatcaattgaacgtgagagagtaatattacttgagctcctgagtcgtgactttttggtccaggaactacttgtgagcttgttttgtatttatttgcttattatgtacgaaacatataagcatttgctataagcaggtgttcagtagtaataatttgaagcgacggtaatgtcttgctcctaaaaaaaaaaaaaaaaaaaaaaaaaanaantttttaaaaaaatataaa

SEQ ID NO: 13460 - DNA, 589 bp, Gossypium hirsutum
  unsure (1)..(589): unsure at all n locations; Clone ID: LIB3829-011-Q6-K6-B8
tcgatcgggcatggctgagatgangccagcaaacgacatgaggggaaagcaatacgacaattcagaaggggaggaggaggaagaagaagaagaagaagaagtggacgagttagaggatgaagaggaagaggaagaggaaggagtgagtagagttaatgagtcgcacggggctggaacggcgccgtcgagtgatgctgaggtgagagactcgcaattggaaaccctaacaaatgatgatcgttgtgagaggttgcgggaaaatcctacttcggaattgaaggaaggagctgaatctaaggagcaagttaagatagcccaccagaaagttttgcctagtttggttgtccagcgtgcagaagctccaaaacaacatctgctccagtcatctgtttctccaacttcttcatcacaaccatcaccaacttctattacacaagatatttcatctcctcccactccaactctaccagcacaaagtcattcagatcagaaggttaatggcgcatctcctcctgtagcaaaccagcaaaacccttctaatcttaaaatgctatcctttgttcccgttgtgaagacacctgtgtctgat

SEQ ID NO: 13461 - DNA, 564 bp, Gossypium hirsutum
  unsure (1)..(564): unsure at all n locations; Clone ID: LIB3829-011-Q6-K6-B9
ggggaagaagtcactgcaaacttggnacataacaggnacatgtcgggagagatggaacggatattccgattaaaatgaaaatgctggcaagaagggtaagcccacagcatgctctgatattaagtgttggtaaacgattagaggctgngaaaaagtcttatgaaggattcatttcttccgagtatttttagtgtaggcaatacagtaccgaggcatgtagttactctagatgagaaataccttcgtcgctgcctggaattgatttttatcaatgcagcaaaagccgctcaatgcaacatatccgtgaacttgagctccgtagaaatgagcattttatccgatggattgaattcacctaacatcggggatgaagatgcttgtgacttccaaaggtttgttttcgactgtccactagcagttgggactggtggagtagtcattcgtcctgtaggacagtgggtaagttcaaaaacgggcagccggagtatggtgaatatattgaagagcccgttgttacaaaaattcggtgcatcggatgtccgtccaagttcgaatgctgttaaa

SEQ ID NO: 13462 - DNA, 521 bp, Gossypium hirsutum
  Clone ID: LIB3829-011-Q6-K6-C10
cttgatcgccgtcactcgtggcctcctcaaacccttcttgtcggtggtcccgttttgcctcttccttctgatggatatttactggaaatacgagacacggcctagctgtgagggcgattcttgtactccttccgagcatctccgtcaccagaaaatccattatgaagagccaacgcaacgcgcttctcatagccgccgctctccttttctattggcttctttactctgttactggccttgttgttaaggtcgagcagttgaatcagcgccttgagaggcttaaaaatcgggattgagtgagataagtgctttttttttttacaacgcttgtgtttgggctacactttttgttgtgatgttttaaatttagaattccctctctgttgtgtttggctactatgaaggattttattatcttacaagaattacatggtcatattgtttaatctctgttttctcaagttgtaatttgttaggcttttggttaaaattatgctctcttatgattttgtttttgattc

SEQ ID NO: 13463 - DNA, 592 bp, Gossypium hirsutum
  Clone ID: LIB3829-011-Q6-K6-C11
ttcgatgcatcttaggacttattacttttggcattgctgttccttctggtctcttcctccctatcattctgatgggctcaggttatggtcgacttctcagtatggccatgggatcatatacaaacttagacgagggtctttttgctgttcttggtgcagcctcccttatggctggctcaatgaggatgactgtgtcactttgtgtcatattccttgaactcacaaacaaccttcttttgctgccaataactatgatagtccttttgattgccaaaactgttggagactgcttcaaccccagtatctatgagattatactggaacttaaaggccttcctttcctggatgcaaatcctgaaccctggatgagaaatctcacagttggcgagcttgctgatgtcaagccaccggtagtcactctttgtggggtggaaaaggtttcacggatcgtggacgtattgaggaacactacacataatgcattccccatcgtagaccagggtgtgccggtgccaggcatggtagccaccggtgcaaccgaactgcatggactgatcctcagagctcaccttgttcaagccttgaagaaaaa

SEQ ID NO: 13464 - DNA, 610 bp, Gossypium hirsutum
  unsure (1)..(610): unsure at all n locations; Clone ID: LIB3829-011-Q6-K6-C12
cggaccgccttcccggtcgacccagcttttggggggncgcttgcggnttataacatccaaagggatcaaccctgcacttggtgctgcgactgcgtggtggaatgcagatttttgtgaaaactttngactggaaaaactattacattggaggtggagagctcagacacaattgataacgtgaagaccaagatccaagacaaggagggtatcccacctgaccagcagaggttgatttttgctggaaagcaactcgaggatgggaggactcttgcggattataacatccaaaaggagtcaaccctgcacttggttctgcgccttcgaggagggatgcagatattcgttaagaccctgactggtaaaaccgtaacactggaggtcgagagctcggacaccattgacaatgttaaagcgaagattcaggacaaggagggaattcctccagaccagcagaggttgatttttgccggaaagcagcttgaggatgggaggacgcttgcggactataacatccaaaaggaatccaccctgcatttggttttgcgccttagaggaggaatgcagatatttgtgaagaccttgactgggaaaaccatcaccctggaggtgg

SEQ ID NO: 13465 - DNA, 589 bp, Gossypium hirsutum
  unsure (1)..(589): unsure at all n locations; Clone ID: LIB3829-011-Q6-K6-C7
gcaatggccactcttacagtgcccacgacagttccttcggtgtctgaagattgtgaacagctaagaaaagccttttcaggatggggaactaatgagggcttaatcatagatatattgggtcacagaaatgccngagcaacgaaacttgattcgaaaaacctacgctgaaacctatggagaggatctcctcaaggcactagacaaggagctctcgaatgactttgagaggctggttttgctttgggctcttgatcctgctgaacgtgatgcccttttggctaatgaagccaccaaaaggtggacttcaagcaatcaggtccttatggaaatagcttgcacaaggtctgccaaccaactgcttcacgcaaggcaggcttatcatgctcgttataagaagtcgcttgaagaggatgttgctcatcacacgactggcgacttccgtaagctcctcctacctctagtgagttcatacagatatgagggagaggaggtgaacatgaatctggcgaaaacagaggcgaagttgcttcatgagaaaatttcagacaaagcttacagtgatgacgatgtcataagggttttggctaca

SEQ ID NO: 13466 - DNA, 483 bp, Gossypium hirsutum
  unsure (1)..(483): unsure at all n locations; Clone ID: LIB3829-011-Q6-K6-C8
cggncgcgtgggtttttttttttttttttttttttttttttttttttttttttttttttttttttttttttttttttaaatttttttttttttttttttttttttttttaaaaaaaaaaaaaattattttttaaaaaatcgaaaaaaggccaaattggctttttaaaaaccgggttaaagggctcacaaaacccaaaaaaagggggggggggggggttaaaataaaaaaattaaaaaacttcccaaaaaaaataaacttttaaacatgggaaaaaaaggccccttttattaaaaaggtaaaaaaaacccccccaaaaaccgggattttcaaatgggaaatcaaaaaaaaaacccagggggtttaaaggaaagggggaaaaaaaaattcattttgggcaaccaaggaaaccggtaaaaggaaaaagcccggggccccgcccctaaaatttttttaaaaaggggggtggcctcgctgttttgggg

SEQ ID NO: 13467 - DNA, 613 bp, Gossypium hirsutum
  Clone ID: LIB3829-011-Q6-K6-C9
tccgcattcccggtcgacccagcgttcggttaatacttcgggttcctctttaaagcctcaacctcatgattcacaaatgaggccaactgcacatcaaagcatgggatcaaatcctgctgtaggaggatcaacccaggcaatgaacatgatgagtgggcctaagcttgagaggcaaaactctagtaatgacccaaatagattgcagggcacatcactttctcacttttctagtggttcagttccttggcaagcctctccgagtaaggagctgaatcctggccctttttcatcagcgacatatgtgaaacaggaatctgctgatcaaggtgctgaccagcacagatctcatttgcctgcaacccagggagtctcgactacactagctgaacaagggaaggcagttacaactactgcaaaggatgagcctggagagaagcagtcttctagagttgccttcacaacaacaccctccatcacagcacaattggattctaatgtcctgttgggctctaggaatccatctgtgcctgctccaactgggatgaatgcaagaactcctcaaaaaaagccttctattggccagaagaaaccactggaagctcttggttcatca

SEQ ID NO: 13468 - DNA, 572 bp, Gossypium hirsutum
  unsure (1)..(572): unsure at all n locations; Clone ID: LIB3829-011-Q6-K6-D12
natcactccccttctctaattcatacaccgcgtttcccattttctccgttgcactcactgagtcaccatcctgtcttttgtcatcttccaaatgcaaaactcctataaccatcggaggggacgccaagccccaccgccgaagatcgttcccttgccgggccaggtgtcatttcgtgtaatatgccacgcatcatccatcggcggattcatcgggagctccggcgccgttgtttctcaacttcgccgcgagacttcctctagaatccactgcgaagaatctgtcggcgggtcggatcaccgagttatattggtagtggggtcgggatcggtcgaaagacagtttagtttgggtgagggagaagtatgttacgtttcgtgtgctcaggaagcaatgattagggtcttccagcgcgtgtgggaagtggaagcggagagagagtggggaaacgcgtgcgatggtgaggatgaagaagcttactgtggtgtgctggctgagacggcacaaattggtttcgttgtggggaaaggagggaagaatattgtgagaatgaggacagagagtggagcgaaaa

SEQ ID NO: 13469 - DNA, 597 bp, Gossypium hirsutum
  unsure (1)..(597): unsure at all n locations; Clone ID: LIB3829-011-Q6-K6-D7
ctagctttttttttcttcacantttgcttcaaccccctcccgctcttccccctgctaaaggcttgagctttcagccaaaatgggtatttctcgtgattcgatgcacaagaggcgtgccacaggtggcaaaaagaagcttggaggaagaagagaaagttgagcttggaaggcaaccagcaaacacaaagttgtcaagcaacaagacagtcaggaggattagggttcgtggtggaaatgtgaagtggcgcgctctgaggctcgacactggaaactactcatggggaagtgaagctgtgactcgtaaaaccagaatattggatgtggtctacaatgcatctaacaatgagcttgttcgtactcaaactttggtgaagagtgctattgttcaagttgatgctgctccattcaagcaatggtatctccagcactatggtgtcgaccttggtcgcaagaagaaaacacttgcagcagctaccaagaaagatggagaggaaggtgaaactgttgctgaggaggcgaagaagacaaacatgtcttaaggaagttggaaaagcgtcagcagaaccgcaagctcgacccacatattgaggatcaatt

SEQ ID NO: 13470 - DNA, 602 bp, Gossypium hirsutum
  Clone ID: LIB3829-011-Q6-K6-D8
gcgttcggccctttgtggctttcagttcatactgactcacttagatggcagacaacttctcattaaaacccaacctggggaagtcgttaagcctgatcaattcaaagcaataaacgatgaaggaatgccgatttatcagaggccatttatgagaggtaaactgtacattcagttcactgttgacttccctgactcgttgaccccggaccagtgcaaggcactagaggctgtgcttcctcccaaggcatcggttcagctgactgacatggagctggatgagtgcgaggaaacaaccctgcatgatgttaacattgaggaagtgatgcgtaggaaacagactcaagctcaacaagaagcttatgatgaagatgaggacatgcatggtggtgcgcagagagtacaatgcgctcagcaatgataaaaaaaagccgaatgtccgagacacagacggtggtttttggcgatggaatgtactgtggttaaaaaaaaaaagaaagaacatttgagagtaagattctcaaaacattgttgtgttttggtagtcctttattttttgtttttaatagtgcaagtattttagtaattgaaatggtgttatatgc

SEQ ID NO: 13471 - DNA, 565 bp, Gossypium hirsutum
  unsure (1)..(565): unsure at all n locations; Clone ID: LIB3829-011-Q6-K6-D9
ctcggctttcattttctcttcgggctggcagagatgggttatctgcacactcccttagggttgggaaaatatgtaacagacaatctggtgaggggtcatcagantgaaaattcactcccgtctatgccgtctctctatgtgatatccttcttatgtcaagcatgtgcagaaattcatagaatcggaggccatgttcttgacaaatcaattgtgcaaaggtttgcattgagccttattgaaaaggttatttcaatttataagaactttctctctactagagaagcctctggagctcaagtgtcagagaaaggaattttacaggtcttgttggacataaggtttgctgctgatgttctttctgggggtgatgtcaatgtaaatgaagagttatctataaaactgaagtctaagtcagcattcagaaggaagcaggaccacattcagacaaagtccgctgttagagacagtgttgatggacttatctattctttttcacaaaagttggatcccattgattggctgacgtatgagccatacttatgggagaatgagaggcagtcatacc

SEQ ID NO: 13472 - DNA, 570 bp, Gossypium hirsutum
  unsure (1)..(570): unsure at all n locations; Clone ID: LIB3829-011-Q6-K6-E10
tcctcttccttgggagaaggccctcnnctgggccttttcgtgggcggtggtaccctagccatcaccatctctaagcttcgtggcaagcggttcaagctccctcctggaccattacccgtgccggtgttcggcaactggctccaagtgggtgatgacttgaaccaccgcaacttgacagatttggcctagaaatacggtgacatatttttacttcgaatgggacagcgtaatctagtggtggtgtcttcacctgagctagccaaagaggtgctccactcgcagggagtggagttcggctcaagaactaggaacgtagtgtttgatatattcacgggtaagggtcaagacatggttttcacggtgtacggagagcattggaggaaaatgaggcggatcatgacggtaccattttttaccaacaaggttgtgcaacagtacaggtttggatgggaggacgaggctgctcgtgtagtggaggacgtgaggaaaaatcccgaggcagccaccaacggaatcgttttgaggaggagattgcagctgatgatgtacaacaacatgtacagaatcatg

SEQ ID NO: 13473 - DNA, 607 bp, Gossypium hirsutum
  unsure (1)..(607): unsure at all n locations; Clone ID: LIB3829-011-Q6-K6-E11
cggtccgcactcccggtcgacccagcgtttcgcatttggtgataaactcttaaacctatgtagttgctgagccagaattcaggaagaagaaatcgacggtgttgatttcataatcatcgccagtgatgggctttggaatgtcttatcgaatgaggatgctgtggccttagtgcagcacataactgatgcagaagctgcagcaagaaaacttataaaagaggcatatgcactagggagctcagacaacattacctgcgttgttgtccggtttgacagctcatgaacttgttcgaggtattggggacactatttagcataaggcaggaaataggattatgattatgaatggatgcaagttataagctcactttggcctgattggttactgcaagaggtagtcatttcaactggttacgagtgagaatgttgtatgtgttttaagatttagttgtttctcataagaaaattatcttacaccattgatggaatttttagattccgaaggggttagtaattgaaacattcgtaatgttaaaagattacattcttagtgtatcnnanaaaaaaaaaaaaaanaaaaaaaaaaaaaaaaaaaaaaaagggcggc

SEQ ID NO: 13474 - DNA, 578 bp, Gossypium hirsutum
  unsure (1)..(578): unsure at all n locations; Clone ID: LIB3829-011-Q6-K6-E12
gttatactccatatcagatagaatgttcaagagattaagatcagcccaggnattatgttattgattttcactaaagttggcggccatgttcctcttaagattctttcaatagaggatggtactgttcttaaatcttttagtcatcttcttcaccggaataagaaagtggatttcatcgaacagttcaatgaaaagcttcttgtgaagcaggaaaatgaaaacctccagattctcgatgtacgcaatgctgagctaacagaagttagcaaaaatgaattcatgaccccatcagcatttatatttctgtatgaaaaccagttattccttacatttagaaatcggacagtggccgtgtggaacttccgtggagaacttgtaacttcatttgaagatcaccttttatggcatcctgactgcaacaccaataatatatacatcacaagtgatcaagatcttattatctcttactgcaaggctgattctgatgatccattgtctgaaggaaatggctccattaatatcagcaatatattgaccgggaaatgtctcgcgaaaatacgagcaagcaacagtttccc

SEQ ID NO: 13475 - DNA, 587 bp, Gossypium hirsutum
  Clone ID: LIB3829-011-Q6-K6-E7
gtcaccaagaactgtacattatacagaaacctgaactttcgtaagtgaccgaatcaactgtggtgtctatgtgtttacaccggatatttttactgctatccaaggtgtttcctctcgacggaaagacagagccaatctgagacgtctttccagctttgaagccctccagtctgctacaaggaatcctccatcagattttgtaaggttggatcaagacatccttaccccttttgcggggaagaagaagttgtatacatatgagaccatggatttctgggaacaaatcaaaacaccaggaaagtccttaaagtgttctggcctacatcttgcacaatttcggttcacctctcccaatcttttggctagtggggatggtacaaaaactgccaccattattggcgaggttaatattcatccatcagcaaaagtacatccaagtgccaagatcggtcccaatgtctcaatatctgctaatgcgcgtataggagcaggtgtaaggctcattagttgtatcattcttgatggcgttgaaatcatgggaaaagctgttgtttttcatgcaattgtagggtggaagtcttctatcg

SEQ ID NO: 13476 - DNA, 612 bp, Gossypium hirsutum
  unsure (1)..(612): unsure at all n locations; Clone ID: LIB3829-011-Q6-K6-E8
tccgcattccgggtcgacccagcgttcgcaaanacccaaaacaanaagctgcagctcctcggaaaaacgggctgctcctactcatccaccttacgaagagatgatcaaagatgcgatcgttactttgaaagagaggacaggttcaagtcagtacgccattgctaagttcattgaagagaaacagaagaatcttcctgggaatttcaagaagcttcttcttgtccatttgaagaagcttgtggctgctgggaagttggtcaaagttaaggcttcgtataaacttccatcggctagatcttcgaagacggctactgctgcttctgctcctgcaaaaaagaaaacggctactactaagtcgaagtctaagcctgcctcaaagcctaaggaagggaagagtacaaaagctactcctaaagcgaaggccaagacaaaaactacttcgaaggccaagagtaagccggcggctaagccaaaggctacttctaaggcgaaggctgctccagccaagactaaggcagtggcttctgtgaagccgaagactactgcagctacaaagccaaaagctgcagccaagcctaaggacaagccggttaaggcttcgaggacttcaac

SEQ ID NO: 13477 - DNA, 583 bp, Gossypium hirsutum
  Clone ID: LIB3829-011-Q6-K6-E9
cggccgcgtgggggaagttgagctttgattggatgagggatgagtttatatataccatgaaggggcttatccatatgtcgttgattcatctgactgcatatttggcacgcaaggacaacactatagagatctagactttgccaatgtgttgaattgtgagaggaggccaacaattatcgatctgcctcctacaaaggccaatgatacaacccttggactgatcccaaattgttgccgaaatggttcaatcttgccgccatcaatggaccctagcaagtcaagttcagtattccagatgcaggtctttaagatgccaccagacctcaaccgctctgagctttctcctccacaaaattggaagatcaatggcacattaaaccctgattacaaatgtggcccaccaattcgtgtaagccctagccagttcccggacccaagtggcttgccatcaaatacgaccgcagttgctagctggcaggtggtttgcaatattacacagcccaagggtgcaagccccaagtgctgtgtgtccttttcttcctactacaacgattcagttgtcccctgcagaacttgtgcatgt

SEQ ID NO: 13478 - DNA, 280 bp, Gossypium hirsutum
  Clone ID: LIB3829-011-Q6-K6-F10
gtttgaacgcgtagtcaagtctttaatggttgatattgaaaggtattttacagggattgatcatgaagtatgcataactggggattggcatgcgtttaaaggatggccggaacaaacttgcacttgcggaagaactgtggacagatttaaattatgtatgcggactcgatgagtgaaatgaatcctgtgtgggcataatatgtgccttacctgatgaactatatcgagctacagtttgaggttgattagtaagagacgtgagcgaagatataatcttgat

SEQ ID NO: 13479 - DNA, 592 bp, Gossypium hirsutum
  Clone ID: LIB3829-011-Q6-K6-F7
tagcttccccttttacaaagcactgcatcaccttccaattcaataaattccaattttccttattatttcataatcaaatctatcttctgcttttctcacattaaactttgtgtccaatcctagccgaggatctgttgcatagccttctttcctcgaacaacagcatgacagtcatcagatgatgaacatagagttttgttagtagtagtagaggcttattaagaccctgactgctgtgctgggtcatgtcttgcaatgggatggcttttttcccagcaaatttcatgctccaatctcctcatgaagaagatcatcaaccctcaacttctatcaatcaaatgcttccttcttgcccgccccaagacttccacggtgtggcatcatttcttgggaagagatcaatgtcattttcagggatagatgtgtgcgaagaagcaaatggggaggatgatttatcagatgatggttcacaggcaggagaaaagaagaggagacttaacatggaacaggttaagactcttgagaagaactttgagttgggtaataagcttgaacctgagagaaaaagcagctggctcgggctcttggtttg

SEQ ID NO: 13480 - DNA, 593 bp, Gossypium hirsutum
  unsure (1)..(593): unsure at all n locations; Clone ID: LIB3829-011-Q6-K6-F9
gcgttcggtcaaaagcagnacttcgtcaaaaccctaacggggnaaaaccataacccttgaggtcgagtcttctgacaccatcgacaatgtcaaagccaagatccaagacaaggaaggcatccctcccgatcaacaacgccttatcttcgccgggaagcagcttgaagacggccgcaccttagccgactacaatatccagaaggaatccactcttcacctcgtcctccgcctccgaggtggtgccaagaagaggaagaagaagacctacaccaagcccaagaagatcaagcacaagaagaagaaggtcaagctcgccgtgctccagttttacaaggtggacgagtcgggtaaggttcagaggctgagaaaagagtgtcccaatgccgagtgtggtgctggaaccttcatggctaaccattttgataggcattattgcggtaagtgtgggctcacttatgtttaccagaaggctggtggggattgagtgggataagatggatttttagttgttttcaaataatcgtattgtcatgttcttatttttgtttgttttagtatgttataattttggggtttctattttggaattttgg

SEQ ID NO: 13481 - DNA, 589 bp, Gossypium hirsutum
  unsure (1)..(589): unsure at all n locations; Clone ID: LIB3829-011-Q6-K6-G10
tctgancaaaagcctgaccctaaatcctctctctcgcatcgcagagtaaaaccagacagcaaaaatcaacgtcacaaacgggcaaacagctcaatctctctcccgcttcctttcacagttcaacaactgctgcctctctttctctcacatttttgcttcaaccattacctctcctcaacatgaagctcgtcaggtttttgatgaagttgaacaatgaaacagtgtcgattgagctcaagaatggaaccgttgttcacggcaccatcacaggtgtggatatcagtatgaacacccatctcaaaactgtgaaacttacattgaagggaaaaaatccagtgactatggatcacctcagtgttaggggtaacaatattcgctactatatcctgcctgacagcttaaatcttgagacattgctggttgaagagacaccgagggtgaaaccaaagaagccaacagctgggaagccattgggacgtggtcggggtcgtgggcgtggacgcgggcgaggtcgaggccgttaaatatgctgccatgcctccaaattttggtaacagctggatgtgtagacaactttgttgtgggggag

SEQ ID NO: 13482 - DNA, 563 bp, Gossypium hirsutum
  unsure (1)..(563): unsure at all n locations; Clone ID: LIB3829-011-Q6-K6-G12
tgtcgtcccaagttcagttcatggacagtcaacaaaaaaanatttgaaaaactttggctgtttatgacaaggacacacctgaccgttggtacaatgttgccaaggctgtcgngagggaaaacggcggaggaagtgaagaggcactatgaactgcttgtgaaagatgtgaagcaaatttttttttttaaagtgccattccctaactataggaccactggtggcagcaacacccgaggatgaaaaatcagaagctgaattaatgaagatgatcaatggactcatgacctgtcatcatgcaccaacattaaacaacaatgaaccccattattatgctgcttacctactaattatagaataatcacagaagtagtgaaatctaagttttgttatgctcttatatatatatgcatgtatgtcagtattgatgtattaagaagaggcacaaaagctgtgatcctcacttcctctatgttctctttttgttgttgttgtcgtgaaagaacaaaaatatcttatttggaatatatattaattttatatatttaaaagcgaaattaatgtag

SEQ ID NO: 13483 - DNA, 628 bp, Gossypium hirsutum
  unsure (1)..(628): unsure at all n locations; Clone ID: LIB3829-011-Q6-K6-G7
ggaccggccctcccgggtcgacccagcgtctctttttttntatttgaaatctgacagcatttgctttgatttattcccttccattattttttttttcgttttgatcaaaaagtaagaaacggttttacaaaattctgtgctgccatcaccgatgcctgataatcggcaagttcagaacaatgctgtgtcgaatgaaaccgctgataaaattgaagaagcaattatgcggttaaaaattaatgataacaatcaagaggtgggtgtttctagatcagcctcgtaccctgatcgtccgggtgaaccggattgttcttattttttaaggactggatcatgtggttatggaagtaattgtcgtttcaatcatccggtttatgatgctcagagtgggcaatacagagaagaactccctgaaagaattggacagtcagactgtgggtactttctaaagaccggaacttgcaaatatggatccacatgtaaatatcatcatccaaaggacaggaatggggccggacctgttacatttaacattcttggtctccctatgcgtnaggaagaaaaatatgtccttattacatgcggactggatcatgcaagtttggagttgcgtgcaagttccatcatc

SEQ ID NO: 13484 - DNA, 588 bp, Gossypium hirsutum
  Clone ID: LIB3829-011-Q6-K6-G8
gcgttcggccattggtgagaagatcgagaaacatcggctttggcaagcctactgcagatgtagctgagattcacctcccttgtatcaatcttgagaaagcagaaattgtcgttgatgtcctcataaagaacccaaaccctgttccaatccccctcgtcgacattgactacctcattgaaagtgatggtagaaaactcctttcaggcttgattccagatgctggaaccatccatgctcatggtgaggagactgtcaaaataccagttactttgatatatgatgatatcaaaagtacatatgatgacattaagcctggcagcatcattccatataggctgaaagttgatctcattgttgatgttcctgtttttgggaggttaactttacctcttgagaaaactggagagatccctataccttacaagccggatatcgatatggagaagatacactttgagagattctcttgggaggaaactatagcagttcttcatttgaaattggagaatatgaatgactttgacttgggactcaatgcccttgactatgaggtctggctatctgaggtcagcattggatctgcagaac

SEQ ID NO: 13485 - DNA, 588 bp, Gossypium hirsutum
  Clone ID: LIB3829-011-Q6-K6-G9
gcgttcggccaactcaagaaccgttttaaggatgtttatttggtttatgagcttatggacacggatttgcatcagattatcaaatcttctcagccactttctaaggatcattgcaaatattttatttttcagttactacgagggctgaagtaccttcactcggcaaatatccttcaccgagacttgaagcctgggaacctccttgtcaatgctaactgtgacctaaagatatgtgattttgggcttgcccgaaccagcagaggtaatgaacaattcatgacagagtatgttgtcacccgttggtaccgtgcacctgagctcctactatgctgtgacaattatgggacatccattgatgtttggtcagtaggatgcatctttgcagagattcttggtcggaaaccaatctttcctggaacagagtgcctcagccagcttaagctaataatcgatgtccttggaagccagcaagaggctgatcttcagtttattgataatcccaaagcccgaaggtatatcaagtcacttccttattctaggggcacccatccttcccatttatatcctcaagccgatccattagccata

SEQ ID NO: 13486 - DNA, 572 bp, Gossypium hirsutum
  unsure (1)..(572): unsure at all n locations; Clone ID: LIB3829-011-Q6-K6-H10
tnctgattttctgccatatacctctgtcttcgatgagcaagttctctacctgtcttttccttcctctcgtgaatgagttgatttctangaaaaccagattagccataanagcaatacaaaaaaggcaacattgttccccagttcctcntcttgaaaacctagggcattgacgaaaaaaaaaggactgtttcaacctaagaacggcaacagggacatctgtcacttgtagaaactcttcggtatctgagattagctagatgaaggatgaaatcccaagagattcgccaaataattatagtgatttttgaaggaagctgtaaaccccataattttttgtagaaatctgtagtttcggtttgtattaagaaattactaggatccggattagcccattgtaatagtttataggcgctgcaaactgaaaattcctcggatggttctcctttctagacttgaatatcttcacggtccgtctctgcaagtgggatctataaaattttcttcgcaatttctcctgaaaaggtattttaaatcaagtaaaaaaaaaatgaaaaaaataaaaaaatattatt

SEQ ID NO: 13487 - DNA, 579 bp, Gossypium hirsutum
  Clone ID: LIB3829-011-Q6-K6-H11
attaagctctatgtgagaagtgtctttatcatggacaactgcgaggagttgattcctgaattcctcagctttgttaagggtattgtcgactcagaggaccttcctttgaacatctcaagagaaatgttgcagcaaaacaagatcttgaaggttatccgcaagaacttggtaaagaagtgcattgagctcttctttgaaatagcagagaacaaggaagattacaacaagttttatgaggcattctcaaagaacctcaagcttggtatccatgaggactctcagaacaggactaaaattgccgaattgctccgctaccactccaccaagagtggtgatgagatgaccagcttgaaggactatgtgaccagaatgaaggagggtcagaatgatatctactacatcactggtgagagtaaaaaggctgttgagaactctcccttccttgagaagctgaagaagaagggttatgaggtcctttacatggttgatgctattgatgagtatgctgttggacagctcaaggaatttgagggcaaaaagcttgtgtcagctaccaaggaaggtcttaaacttgatgag

SEQ ID NO: 13488 - DNA, 597 bp, Gossypium hirsutum
  Clone ID: LIB3829-011-Q6-K6-H7
tcgttaagctatccccttttaacaaatcactgcatcaccttccaattcaataaattccaattttccttattatttcataatcaaatctatcttctgcttttctcacattaaactttgtgtccaatcctagccgaggatctgttgcatagccttctttcctcgaacaacagcatgacagtcatcagatgatgaacatagagttttgttagtagtagtagaggcttattaagaccctgactgctgtgctgggtcatgtcttgcaatgggatggcttttttcccagcaaatttcatgctccaatctcctcatgaagaagatcatcaaccctcaacttctatcaatcaaatgcttccttcttgcccgccccaagacttccacggtgtggcatcatttcttgggaagagatcaatgtcattttcagggatagatgtgtgcgaagaagcaaatggggaggatgatttatcagatgatggttcacaggcaggagaaaagaagaggagacttaacatggaacaggttaagactcttgagaagaactttgagttgggtaataagcttgaacctgagagaaaaagcagctggctcgggctcttggtt

SEQ ID NO: 13489 - DNA, 364 bp, Gossypium hirsutum
  unsure (1)..(364): unsure at all n locations; Clone ID: LIB3829-011-Q6-K6-H8
gcgttcgcggncgcgtggggnaacagtgtatgctcttgcaaagttcaatttggcacctgcaagttccctgagaactttacaggatgccaggnatctnntgcaaaacagaaaaaagtaccattcatctctgatgacttggccttggagtgtgaagggaaggacaaatacaagtgcggttccaatgttttctggaaatggtgaagacatcccaatgtaattttctcaattttctctgtattgttgtgctatttagtgaaacaccctgaaaatgttgtggtatttgttgttaaacagaagtatggtgctgaataaactagtcaaacactttccagatggaacttgcttaattttgcagtattggttc

SEQ ID NO: 13490 - DNA, 581 bp, Gossypium hirsutum
  unsure (1)..(581): unsure at all n locations; Clone ID: LIB3829-011-Q6-K6-H9
gctttcggggnaaacgggttgtaacatgttcaagtataaattagtaaggcttcccgggcaaacgggtgcatttntcgacatgggaaatccattcggaaatggaaagaagatccgtcttcaagagatggacttattcttccagacctcacttcaggtgctngaaagcatacctgtttcacttgtaaatgaggtcgatgatgaaaagggacctgcttatttcacatatgtctcgactgttaaatatccaaaatcgttcaaattagtacaaccttcatacggatgcaattgccgtgatgcatgtcaagcaggaaattcaaactgttcctgtattcaaaaaaacggaggcgatttcccttacattaccactgggattctagcttgtcgaatgcctatgatatttgaatgtggttcctcatgcccttgttttcgtaactgcaaaaaccgggttttacaaactggttttaaagttcactttgaagtttttaagacacgagacaagggttggggtctacggtcatgggaccctattcgtgcaggtacgtttatttgtgaatacgcaggtgaagttattgaaaaaatta

SEQ ID NO: 13491 - DNA, 181 bp, Gossypium hirsutum
  Clone ID: LIB3829-011-Q6-N6-A10
ggaccgttccttcatctttattgacacaaaacatgaatgagtttaaagctacagcgttacctaggataacatgggaaggaaggacaggcttgtgtgagtttctaagcccgtttcccaaacaaaaaggttaaaaagaacatccctactttacctttctctttatccccttgcctacaaaaat

SEQ ID NO: 13492 - DNA, 538 bp, Gossypium hirsutum
  Clone ID: LIB3829-011-Q6-N6-A11
aagactaaaatattaaatattaatttattaaattaataattgagtgaccagataatgatttttcagtcttgttcctactcaaaaactaaaatcactgttaaacttgtctgaaagaaataaccaatcagcaaatagctcaaaattgcatattaattcaaaagagcttcctcgtccgttcaacttagcgtgcaggctgcgcttgtgcgtgttcgagaagctggctgactagcttgtaggtccgccctttaagggccttagtgtggtcgatcagctgctcgtaaacattcaatcggttaggctccataacaacggttccagtctctgaatcaatctttgcatcaagtttcgagtttcggataagattcacaatccatctctcaccctcctcgtaatttaaattcagtttctcaaaaagcacccccatatcaatgcgctgatgaattctgcagtatgtctcgaagataaatagacgagcattctcaagaaactcatcttttaataggacagtagaaaagttgccctcttcaactctttttcc

SEQ ID NO: 13493 - DNA, 538 bp, Gossypium hirsutum
  Clone ID: LIB3829-011-Q6-N6-A12
cgaaatccatgctcgagtgctagacaataaaaaaggcaaaatttaaagattcgagttttcatcaacaaggttcaagatcgacggtgataaagagagaacaagtcaacaaaccctaaaataaaaatattccatgtcttcactctctcggtacctaaaatgaaaattgcttaacagcaaaaacaagcaaatttgggtattaaaagttactcagatggcaaccgcaatccttccggctacttggtccaggtcgcgttggccgttcgatgtgattctcctaccacctttaggatcaatatcaatgatgttaacgttctgcaattgttgaagaatgtggcgagcaacagatccactgctcttacagaaatggcgaggacggcttccatttctcttagccccaccgtaaatccttctaaaggcaccaacaccaagacctcccctcaggtatattttcctcgccatggaagcggctctgatatagtaccaatcaggatcatatggaggaagttccttgagtttgccggtcttgacaatatcagtc

SEQ ID NO: 13494 - DNA, 532 bp, Gossypium hirsutum
  Clone ID: LIB3829-011-Q6-N6-A7
gagaaggcaaatactaaatccaattaaaggttctatttttgtaatcaaacaatccaaatggtgagatggatgagtttgtagtgccaaaccaaacataaggtttcacagcttgaatccccaaaaacaaatacgagccttgatcccgacttgagcatcgttacagcagaaaacatggtacaatgtgttctcatagacgagtaatgacagcttcaacctctgacggggtgtatagatggtatgtcggtgctactcgagcgatatcgacattgttgggagtcaccttttcttccattacttgctttaaaatcgacagggcaattgtttcagcttcttgaagagttaagtccttgttgtattgctcttgcaaagagctatcagcaccttcggaacccgaacctatagcttttgcattgcattgccaaaatgtgccagagggatcggtatagtataagctagtcccattctcatcatgaccagcaatgagaagagataccccaaatggtcgggacatggattcttcatctccttcacc

SEQ ID NO: 13495 - DNA, 481 bp, Gossypium hirsutum
  Clone ID: LIB3829-011-Q6-N6-A8
gataaaaaaaacacagtaatatatatatatttttttttacaaaaaaaaccttagcgcagggttagaaggagtagcaaatgttgggagttcaatcccacatcttttcgacactatctctaaaatcaaataaactaagcttcaagttttgttacagaaaattatggatcacctgaacaacaacacaaatcttatcttcaaccccattcctttagaaaccttctgtaagtgcaaaaactcggccagccagaggtgaaggcagcgccgcaattgcttcctggatagtctctaatgcataccgagctgagaagtgaatcaaaagaattgctctgttattgaacttgtccgcgtaattaattatctcagacagatgaacgtgtccataatctctggcatgctcaaccgatactgagttatctacaaatgtgctctccacaacaagaatctttgccctcaaaacatctaaattagccccacgcgtccg

SEQ ID NO: 13496 - DNA, 513 bp, Gossypium hirsutum
  Clone ID: LIB3829-011-Q6-N6-A9
cctcaattcctgatcccccttattccccaaaaaatttaaattggtttacaatgaaaatactactcccgaaaaaattgcccaggaatacatgttttggattcaagccatcacgaaaattgatcacagcaagaaagtgtgtttaatttaaagaaacaaacaccattgatttagagcaacattgactctggattctcaatgtaccctttgaaagctttcagccattcagcaccaatcgcaccatcaataactcgatgatcgcagcttagagttacagacatgaacgaggcaaacttgaattggtcaggacccgagccagggataacccttttttcagcagacccaacagctaaaattccaaactgtggaggattaatgatggcacagaattgcttaataccgaagggccctcccaagttagacactgtaaatgtgcctccctcgtaatcttctggttttaagctgttctctttggctttttgtgccaaattcttgacctcctcagcaattgaggac

SEQ ID NO: 13497 - DNA, 532 bp, Gossypium hirsutum
  Clone ID: LIB3829-011-Q6-N6-B10
agagtcatcaccggttgacagagtaataggtttacatgtaaatcacatattgaaattacaaagagtcgaactcaagtaaaatctaaaccctacactaaattcattacagtactccaccaaaagttaactacaacaaaaaaccgaaaaagctaaaacgtcaattagcagataactaaaccacacctaaacaattaaggttaaaaaaatattaaacctaacgcggctggggtaggagcagtgacggaatgagtccttttctccattctctttcgtttattaacttggctactttactgaaaacccaccgacggtaacactttgggaggtcgaccgcggcctcgcttcacgccgggaggaggtggaggagcggcggcggtaccagtcttggccttcttagtggggcgcccacgcggccttccggtgctgacgggtttgggcttggggggagccaataagtccttcggcttaggcggacgaccacgaggtctgggaggagagacgacgacgccaggtggaagaggaaccttgggtt

SEQ ID NO: 13498 - DNA, 132 bp, Gossypium hirsutum
  Clone ID: LIB3829-011-Q6-N6-B11
ggaataattaattcggaaaactaattcaacccacgattaatcaggggttacatagaggggccccgaacatagggatataactgggtaatgggccggaaaatcgaaaataacccaaggggaattagtttttct

SEQ ID NO: 13499 - DNA, 536 bp, Gossypium hirsutum
  Clone ID: LIB3829-011-Q6-N6-B12
atggcagtaagaaactgtataaatatcccagaaaaaacagcacttatcatttaaaagtactcgaaaataactaacaaaagcaccaaacaaaatgtaaaacaagctaacagatgcttcaaaagtacgataaatctactgattagagttcatataaaaacatgttaggcttaatcaacttcctccatcttgctgccttcggcatcagcatcctccaatgggggcatatcagcatcagcttcagcttcacctgcatcctcgtcaatgctcaagccgagtttcagcatcctgtggatcctgttgccaaaggtgttagggtcatcaaggctgaagccagaggtcaggagagcagtctcgaagagaaggagaacaaggtccttcacagatttatcattcttgtctgcatcggctctctttctcagctcttccatgatggggttctccgggttgatctccatcgtcttcttgcttgacatgtaaccagccatgctgttatccctcaaagcctgggccttcatgattctctccatgtttgcagt

SEQ ID NO: 13500 - DNA, 534 bp, Gossypium hirsutum
  Clone ID: LIB3829-011-Q6-N6-B7
ttttttttttttttttttttttttttttttttttttttttttttttttttttttttttttttttttttttttttttttttttttttttttttttttttttttttttttttaaaaattttttttttttttttttttttttttttttaaaaaaaaaaaaaaaaacccgggttaaaaaaaaaaaaaaagaaaaccccgttaaaaaaaaaaggaaaaaggtttcccaaaaaaaaaaaaaaaaaaaaaaaaaaagccccaaaaagggttccgggacaaaaaaggcaaaaaaaaggggcaaaaaaaaaaaaccccccccacggaaaaaaaaaaaaaaacccggtttttatttgggggggaaaaaaaaacccggttaaaaaaaaaaaggaaagggggggggccccccttttaaaaaggggaaaaaaaaccccgggaaaaaaaaaaggttccttttatggcaaaacccaaaaaaagggggaaaaagggggggggcaccccaaaattttttcaaaaaaagggggggaaaaaaggggtgggggg

SEQ ID NO: 13501 - DNA, 530 bp, Gossypium hirsutum
  Clone ID: LIB3829-011-Q6-N6-B8
gccaaccaaatctatattgtttccactattataaccttgttccaaacagattgagagagagatatacaacagaaatatacagcctcaccagaaataacaaaggaaaaactaagcgtaggaaaaatcaaacctgatgaattaccatttcaatagtttatatagagacatgcctgatgttgacaacagaaaaaggcccaataagttcagcatggcttgatttcaaatccgatactcagtagcgttctagctgattccattgccttctcacctccaaggtctacagcctcaccggtcaattcaccttctgtacccactgaccactttgttgatgtaacttgcttttgctctccatcagctattgcaagttgtaaattgttcatagaagcaggagcagcagcagcaacgagaggagcacttgaagggccatgccgcttttttggtacaggcatgtcatggtcatgaacacctttatatgttataacgacagcatttgtattatctacagctgtctcaatatgcttacgaacagg

SEQ ID NO: 13502 - DNA, 516 bp, Gossypium hirsutum
  Clone ID: LIB3829-011-Q6-N6-B9
gcaattgatgagttacatgcttcaatttcacttctaattagttcaatgaccacattttagtataaaaatcactcaatctaaaacttccacaatcaatcaaaatgcataataaagttacaatatcattttgttatgagaaaagccaaatatttcccaattctattataaacaaacctatatattttaagataccgatctcgatacgtgtatacgaacataaacatcggaccggtgttcttgctacctcgacagctttacatttttctgtcggaaatttggactttgagcatggatgtatgccactgcaatggaaaatgactgcagggctgaaagtgttgtttggaaatgaagaaaatacaggccatcatgaacatttgctatcctcaatgtcggggtaccgtgcttcgagccctgaacgaaaaaatcgaataacttgcatgcctcagaggtatctgttgaaggcaaacctcgctgcttacttgctctggctctaagtacggtcagcggacagcccaa

SEQ ID NO: 13503 - DNA, 519 bp, Gossypium hirsutum
  Clone ID: LIB3829-011-Q6-N6-C10
gaatcaaaaacaaaatcataagagagcataattttaaccaaaagcctaacaaattacaacttggagaaaacagagattaaacaatatgaccatgtaattcttgtaagataataaaatccttcatagtagccaaacacaacagagagggaattctaaatttaaaacatcacaacaaaaagtgtagcccaaacacaagcgttgtaaaaaaaaaaagcacttatctcactcaatcccgatttttaagcctctcaaggcgctgattcaactgctcgaccttaacaacaaggccagtaacagagtaaagaagccaatagaaaaggagagcggcggctatgagaagcgcgttgcgttggctcttcataatggatttctggtgacggagatgctcggaaggagtacaagaatcgccctcacagctaggccgtgtctcgtatttccagtaaatatccatcagaaggaagaggcaaaacgggaccaccgacaagaagggtttgaggaggccacgagtgacggcgatca

SEQ ID NO: 13504 - DNA, 520 bp, Gossypium hirsutum
  Clone ID: LIB3829-011-Q6-N6-C11
aatcaaatgaaaatatcttcattatttaactgaaacttaatgaaaaagattggtgcaacttaacaaggttgtacacggctgttgaatctattctctttgatctatccatagggtgaaaaaaaactgcaaaaaatgagtgcaactgtggaagactgaacttagaaagatgaaaacaaaaaaacaaaatatgtgtggttcaaacaaatctgctattgtacttttgttttatttttcccttaagaaagcttgggtctttctagatgaggaaaggcactcaaaatgttgtaagcccgcaagtcttgcctggtcaagatcccaactacaggagccacccctgcaccttgatactttggcacgatgagcaaatgccggagtccgacttgcctgaacagcaccaaggctttagccactgacaagctttccaccacagtgaaaggggttgtgttggtgagaggatgtaaatcaacatacatttccatttcatcacgggtcacggccacctgctcaatcttgagttccc

SEQ ID NO: 13505 - DNA, 547 bp, Gossypium hirsutum
  Clone ID: LIB3829-011-Q6-N6-C12
cttaagtataagacagtaatattatttgaacatcaaactttaatcaatacagtaactaaagatgtggttcactgaccatttcagcaccacaaaacactgtgttcattcaacaccacaagctactaatggctttcgccacttaaaacacccacagttccatagaaatgaaaattatgaaaacaagcacaagacacccaattagaaaccaccacggaggcgaaggacaagatgcagagtggattccttctgaatattgtagtctgctaaagttcgaccatcctccaactgctttccagcaaagatcaacctctgctagtccggaggaatcccctccttgtcctgaatcttagatttcacattgtcaatcgtgtccgagctctccacctccagggtgatggttttcccagtcaaggtcttcacaaatatctgcattcctcctctaaggcgcaaaaccaaatgcagggtgggattccttttggatgttatagtccgcaagcgtcctcccatcctcaagctgttttccggcaaaaatcaacctctgctggtc

SEQ ID NO: 13506 - DNA, 515 bp, Gossypium hirsutum
  Clone ID: LIB3829-011-Q6-N6-C7
cttggatagcatataactcgcattaatactatagaaaaacaggaaaacctcgtaaccacactagaccattatagtttggtcataaacatttattcaccaggaaattgtctcaagatatcagattcaattctccacatgtcctgcaagtaccagcagcaatttttcatagtctccatgagtgtccttgacaatggcacgagtcagtgggacactgttccttcgctggtactcatctgctatgatctttagatcaacctcagccctagtgcaaacaactctagtaagagctccttcatccgttcctcgtctattgattgctaggcgaagaaccttctcaaaatacttttccggatagaccaagcacttcactgtggaccttagtagtgcaaggaactcatccttaggatcagccttcaagtccttgtttatgtcatttccatattcatttttgtagtgattcagagttgcattgatctgtgccttgcttcttgtagccaaaacccttatgacatcgt

SEQ ID NO: 13507 - DNA, 519 bp, Gossypium hirsutum
  Clone ID: LIB3829-011-Q6-N6-C8
agcaagcaaaacattatttttctacaattctgaaaatgctatatttgctattttacaacttgttttaatgtcttacacaacctaagtagaggaggggggagggggtatgatgtatgaacttcatacacttccctacacaatctaactttcatacattggaagcaaagttacatcttattatatagcttatcaaacctcctcttcccttattcaaggcctctagctcagtctaatacaaggtttgcttgtattactgccggactcgtagcagttatcttcttgggtgcgaatttcatacccagcatctgggatgctttccagttcactggagcaactgctgctgtttgccttggcttcatttttcctgctgcggttactcttaggaatcaccacttcatagcaacaaagaaggacaagatgttagctcttttcatgattgtccttgccgtattctcgaatgcggtagccatatacagcgatgcatacgccctgtttaagaagaattcaggagcaagaccc

SEQ ID NO: 13508 - DNA, 514 bp, Gossypium hirsutum
  Clone ID: LIB3829-011-Q6-N6-C9
gtcaatgcattaataccttacacaacgttgatatagctagatgtttgagcaatttcataacagtacaattgctctacacatgctcaaaaataatttgtacaaatcaacagtctaatttcctaatttttagtatatgaaagtgcatagtaccatcaggttcaggtttatgaccatgcattgctttcatggttcaatacaagaaacagtttcactgaaaaaacataataggaaccaattctgaattgctcggatgctacagtacacatgatgaaccagatccatgaggattgagagggcccctcttttcaaattcttgattggcctttgtacttttcccagatgcaaataaaggcctgcggtttgcatctttacttgcctgtgaaccaaatgccgcatccgttcctccctcacgtttctggcgagcttgctcagccataagctgccattttgacagcatgtcatcccctccaacagcagcacgagcagcaacatttgcagcagtggtcctcatctt

SEQ ID NO: 13509 - DNA, 419 bp, Gossypium hirsutum
  Clone ID: LIB3829-011-Q6-N6-D10
gctgagaaaagtacaaaaccaaactaggtcaatgatcttatactgaacatctttagtctccacctgaagacaacttggggtgacaaacccaggagatcacgctgtgatgcttaccataacacacactgcttagcaaaacattcttagctgagattcatttaccaatcacatgaccgcatcggtacttcttgttgagatcctaaatggggcagctatccgtgctgcaaacagaccgtgaatgactttacgcgtcaagcgaacccgatccttgcataaaaaaatgagaattttcatgggggtcataagaagcctgcaatgcaacccatgaaccgaagattgtcttcctttctcttgggaatataattccaaaacgtatctccacttgcgctctcataatgcgtcatccccggccacgcttg

SEQ ID NO: 13510 - DNA, 544 bp, Gossypium hirsutum
  Clone ID: LIB3829-011-Q6-N6-D11
gagtaccaattcatcacttaccatgaatgaaaattgttaaaaaataacaaacagtcctgaaacttgaacaagtttcatagtagacatccactcaagatgtggctttgagttttgttttctgttttttagcatccaatgaagccaagcctttgcctaatccaacaggtgctgcttctccttccttggatgttgttgactcatcttttttggaatcaactgctccatttggattatgatgcccatttgcttcttccctcttctccccagaagcttctccgccatctcctgcctctggagtcgcccccatgttgatcatgttaagaagctgagttaatgggggcacagcttgaactggtattccatgtgagcgagtcacaagaccccttgcagcagccttcttccttacttctgccgccgctcgagctgctctttcatcgaatcctcgtccacgaggtagagtctcaccaatcattgccgcattaagagacttgttgaaagatgcactagaactcccagatcctccagctgcagcagcagcttggaa

SEQ ID NO: 13511 - DNA, 521 bp, Gossypium hirsutum
  Clone ID: LIB3829-011-Q6-N6-D12
caaaatgaaaatgttaattatactaaatgagaagcaatgggaactcagttaatccttcctacatttcaacaaacataaacacttgctaaagaaacaacatttgcacctgtactacattctccggagaatggcccagtgatagctcctcaatcaagacttgtatgtcagcgccagtgagttctgcaatctcaaaaagtaccctaccttctttgtccttcaagcagtggacaatgttggaagcaactagaagcctaagagtcacaggagtgcccttaatcaggactgactgaaatcctctctcaatgtcagcttcaacggatcttgcaaatacaagaacaacagcattttgtgcaggagaatactgtgattcaaggttctccaaggcagaaatggtgacaacacgatcacgatgatcggtttccagggactcaaacattatagaagcaccagtttgattttgcaaagctttgacaatggcacccttcttgccaatgatggccccagcagcaccattggaacaa

SEQ ID NO: 13512 - DNA, 551 bp, Gossypium hirsutum
  Clone ID: LIB3829-011-Q6-N6-D7
cccaaaacaggctgccatttatattaagttaaatatcaactaaattccaagtacaaaaaaaacatgcagctcaaggtatatgataatactgttgaattaagacacaacttcactacttgaaaattcatactaaaagtgtaaccactatcacaatctcaaaatctcctgaaaatggtgaaagaaaggttaaaaaaagggacatttgatctgaaatatgaaatctcaagtaacaaaactttaggcagctccctttcccttccttctctggatcttcttcatgtagaactccagttctttgccttccaagatatacccgtcagcacggccgcactgaccaggccgtgaagagatacaagccagtaaacgaccactactgaattgatcctcaatatgtgggtcgagcttgcggttctgctgacgcttttccaacttccttaagacatgtttgctcttcttcgcctcctcagcaacagtttcaccttcctctccatctttcttggtagctgctgcaagtgttttcttcttgcgaccaaggtcgacaccatagtgct

SEQ ID NO: 13513 - DNA, 544 bp, Gossypium hirsutum
  unsure (1)..(544): unsure at all n locations; Clone ID: LIB3829-011-Q6-N6-D8
gacaaanaacataaaagttgtgcataaatctttgcataccttagaaagcatcaggtttcaaagcatataacaccatttcaattactaaaatacttgcactattaaaaacaaaaaataaaggactaccaaaacacaacaatgttttgagaatcttactctcaaatgttctttctttttttttttaaccacagtacattccatcgccaaaaaccaccgtctgtgtctcggacattcggcttttttttatcattgctgagcgcattgtactctctgcgcaccaccatgcatgtcctcatcttcatcataagcttcttgttgagcttgagtctgtttcctacgcatcacttcctcaatgttaacatcatgcagggttgtttcctcgcactcatccagctccatgtcagtcagctgaaccgatgccttgggaggaagcacagcctctagtgccttgcactggtccggggtcaacgagtcagggaagtcaacagtgaactgaatgtacagtttacctctcataaatggcctctgataaatcggcattcct

SEQ ID NO: 13514 - DNA, 516 bp, Gossypium hirsutum
  Clone ID: LIB3829-011-Q6-N6-D9
aattattaagtaatgtggttctcgtataggcatcgctaactagaacagtgagcgcttgcaccaagcatatctaggcataacagtccggttggcccataaaattcatttgtaggatatgtgatgttatttacttttcttgaaacatgacatgtggaattactgaacccgacaaagcaacaagaggcaatgaaaccaaaaacggagactagatttcacatgataatgccctagtttctttcaacatataccctttgccttgctgtgccacatggggcaggatggttgctcctattgctatttcccatcatttatcccggaggttggaaatttcaggcaaccctctccatcaatataaagtaaagcatacatctacccaaatctggaaatatagcagaaatcaagaatctgatctggtggttgtaaaggatgatagaagtcctgtggcttgtacgggtaagatgtcaccaaatgttgacatggcagctgcagatctatccttgaatatgcccacttgcc

SEQ ID NO: 13515 - DNA, 558 bp, Gossypium hirsutum
  Clone ID: LIB3829-011-Q6-N6-E10
ggaagggaaaatattaatcttattgcaaatcttgattgattcatggatttacattgtcacacctcacaaatattttcaactgaataatgtttcatactgtctttcaagagttcactaaaatggatagaagagaacaagttaaaattgccttggcttagcaacaatggtggaatgcttcaaaatatgaagactgaactgtccacctttctccgtggtatcaatttgagattgcccagggggaggcaagagctcaaaattctgtaccaaacgacccaaagtaataccaaggatgggcaatgcaagaataattcctgggcaacttcttctccccacgccaaaggggaggtagcggaaatcattgccgttggcctcaaccttggcttcctcttcaaagaacctttcaggcctaaattcttcgggatttttccagttagcagggttgttggcaagccaccatgcatttaccaagattttgctctcagcagggatatcatagccacccaatttcgcatcatgcaggttcatgtggggcacgagtagaggaattgccattcgtaa

SEQ ID NO: 13516 - DNA, 489 bp, Gossypium hirsutum
  Clone ID: LIB3829-011-Q6-N6-E11
gatacactaagaatgtaatcttttaacattacgaatgtttcaattactaaccccttcggaatctaaaaatccatcaatggggtaagataattttcttatgagaaacaactaaatcttaaaacacatacaacattctcactcgtaaccagttgaaatgactaccttttgcagtaaccaatcaggccaaagtgagcttataacttgcatccattcataatcataatcctatttcctgccttatgctaaatagtgtccccaatacctcgaacaagttcatgagctgtcaaaccggacaacaacgcaggtaatgttgtctgagctccctagtgcatatgcctcttttataagttttcttgctgcagcttctgcatcagttatgtgctgcactaaggccacagcatcctcattcgataagacattccaaagcccatcactggcgatgattatgaaatcaacaccggcgatttcttcttcctgaatttctggctc

SEQ ID NO: 13517 - DNA, 543 bp, Gossypium hirsutum
  Clone ID: LIB3829-011-Q6-N6-E12
agagcagaaactaaatgaattttcgatacaataatagttaataatggtacagttccatgacaatcacaatgccccaattcacaaaccactcaactaatattacataacatcctaaccaaaatcaaacccttagttagaccacacatgaactagaccgtacctattacccgtatatatctcgttgcgttcttcgtcatagaaaagtgcagttatatcttccaatgcttctgcgaccctgcttctaattctcgacgcgttgctctgcgtttttgaactgcaaccacatttgtcactgcagctgcattgttcttcaactgggaaactgttgcttgctcgtattttcgcgagacatttcccggtcaatatattgctgatattaatggagccatttccttcagacaatggatcatcagaatcagccttgcagtaagagataataagatcttgatcacttgtgatgtatatattattggtgttgcagtcaggatgccataaaaggtgatcttcaaatgaagttacaagttctccacggaagttccacac

SEQ ID NO: 13518 - DNA, 556 bp, Gossypium hirsutum
  Clone ID: LIB3829-011-Q6-N6-E7
aaaacaaacatcggtcagttgaaattttattctaatttgagcatctcaatatacatacgagtaaaaattaagaaatactactgatttccctagttcacaaaatgcacagtaaccattacatcacaactagggtagataaaggggctgcgaaataggagggagcctagaggcggcaaacgggagcggatacaaatatcataatagtatttcgtcttgaacactgacgtttaacgtcttgtgcggaagaacaatgctattggtgaccacgacttcatcttcaacagtcactgcttctccaagaattgtgattccgagttttgctttatagtctccttcagcctgaacacgggaccatttcccgatagaagacttccaccctacaattgcatgaaaaacaacagcattttccatgatttcaacgccatcaagaatgatacaactaatgagccttacacctgctcctatacgcgcattagcagatattgagacattgggaccgatcttggcacttggatgtacttttgctgatggatgaatattaacctcgccaataatg

SEQ ID NO: 13519 - DNA, 520 bp, Gossypium hirsutum
  Clone ID: LIB3829-011-Q6-N6-E8
gataaaatatcaggggagctctgatttcatctcataatccattcaactggaaaaattacattctaaaatctgcctttaaactaaggaatataaaaatttagcgtcaatcaacaacaaccaaaaaaaaaaacaacccctcgaagaaaagttccaagaacagataagatccgatgtcatattttcctgggtacggacccaaatacaccaactaaacttcactcgaatttacaaaactacccctacgttgaccaccctctcttctctcatttctttcccctcctcgacgtggctttcttcgccggtgacttgacacttttcggctttacactcttcgccggagcttttttagccgcaggagccttcttcgcagcaggcttgggagcagcagccctctttccgggggacgtcctagttgaagtcctcgaagccttaaccggcttgtccttaggcttggctgcagcttttggctttgtagctgcagtagtcttcggcttcacagaagccactgccttagtcttgg

SEQ ID NO: 13520 - DNA, 547 bp, Gossypium hirsutum
  Clone ID: LIB3829-011-Q6-N6-E9
ggaaaatcaatgttggctacattcttatatgatcatggatcatttacatgtgcttgtaagtttgtagagagcatattacaataaaccagagggacagcagagcagcctatcaaattccacggcatcttttgtaacatcgaatggcatgtaatgatcaaaccacttgaaagaattaacgaatcggtatcggttacaaaatcatgcgggtctctctctcatcgcagcaagaatggctcatcctagctattgatgcaacattatgaacacaaaaactgcaaggaagattgagagtattgtagtgaagccctctctgttactgttgtttgttggaaatactgaaggtagagcgcattcctcgccgttgaagaacactttagagggaaatccttcacctgcagctatgttaatgccgggggtatttttcttggtaaacgagatcacagtttgttgttttccaggcacccttggatctttctttgggttggctccatcagtttctcctacaatgtagtttaatccaggaagaccttgcatgattatagtattg

SEQ ID NO: 13521 - DNA, 528 bp, Gossypium hirsutum
  Clone ID: LIB3829-011-Q6-N6-F10
gaaatcacttagctacataatataaaccataaagttcaccatctaagattcatattacaaacaacattggtcactgaatacatcatgatgaaattaaagtaacccatggatcaattatacgcaagcaatatataagaaaagaaaacgtattcattcagcagctgtcaagtggagggaaaggggttgaagccacttcgtaccatttcgtcaagcgtcgaaaacagaggttggggcagattatcccagtcataccaatcccagccgtcgcacttgtctggctccgggttttgtggaacttgattagggtccgccagcactgcacggagaaagacgatgacgtaatggcagtgtttggatttgtccaggaagactttattggtcactgttaaaaagtctgctttccccatttccaagcccgtctcctccatcaactctctggctccgcactcttcgaagctctcaccaaactcgaggtggccgccggggagagcaaaggtggattcaccgattgaggcgcggcggcgaccc

SEQ ID NO: 13522 - DNA, 525 bp, Gossypium hirsutum
  Clone ID: LIB3829-011-Q6-N6-F11
aaaaccacccccaccttggctaatttgccattaagaccgtggtctaaacggcccttacggtttcaaagctggagaaccatataaattttagggtattaaagacatttattcggcgacaagaaacaatacctcaacaaggactaagtgggtgccttttgagcaacctattataccatcaagcagttgctctatgcaaattgaaactccattcttttaagaactgacaacaattgttaaacctaataacccccatatattctttggttaaccaagggcacctgttcaaactgtggcaataccatttcccacttttgcactgctgtatttcttggggatgaatctgaacaaatctctgctcaataactagaacatcaatcagatcatttgagtatcatgttagtcactgccctcattattttttttttgagtaacataaacggctctatttacagttctctttacttcattaaacatgaaccggtgagataagcataccatatgtagccatggtgatattttgcaaga

SEQ ID NO: 13523 - DNA, 548 bp, Gossypium hirsutum
  Clone ID: LIB3829-011-Q6-N6-F12
gttctaatagcacaacaatatgcatccacacacttaatggtttgattttttttttgaaagcaaagcactaactcgagttccctgcactcttcattgtgttacactttcatgaaagtattccgttacaaattcggctatgtagagcacaacttgtctcacctttcagttctctggctgattgttgagtcagcagggtggtacagtccgataggtggtagtgagatagttgttcatatatttgaagcacttagggccattactttgcattgttcattcatggccaaaagttgagcttctttcttgtcgagaagtgcggtcaacctcacattctcttccataagcttctgaacttcagtctctttctgctttttctcgccctcgagctgtgttgtctttgcaactagtcgttcaaagagccgctcgatggtttgaaactgcttctccgatgaaagaagagtttctcttacactaataagactactaacataagatttcaaggactcgaaatcctgcttcacacgagtaagctcctgttcgttttcagcagc

SEQ ID NO: 13524 - DNA, 547 bp, Gossypium hirsutum
  Clone ID: LIB3829-011-Q6-N6-F7
atggaaccaagagagaatccccttttttattgttttcatggcccatgctaggctagctagagctgcatgctgctgcaaaccaactagtcatcaccagcaaaattactaagttattattaacttggaaattcgtctcgcattaatctaacctagaaaacatctctctctctaataagcctagcaaacctgatataaatatatataacccaaaacacacacttttattcctccataattatcttttcagcccctcctgatgaaaagtcttaaactgaatataattcaacttttatacaccactctgaaggtaccaaaacattcaatattatgattatatataaccagcagtttccctctttagatcaagaacgttccaagtttgacagcatggtcaatgagttcacactatgaatcaattgaaatgtggttgctcaagccatggccaaaacccagtttgatcttcaatggtgcagaacatgttgctgaggctttcttctttaaccatttgatccatcttttgacatggatgatggtgatcaggccttga

SEQ ID NO: 13525 - DNA, 545 bp, Gossypium hirsutum
  unsure (1)..(545): unsure at all n locations; Clone ID: LIB3829-011-Q6-N6-F8
acagtcgaagtcaaccttgaaaggctataaaaggaggccctaagcacctccnacacggttgaatactacaagcaattacaacaactacaactactgcggaaaaacaaaaagcaaggatcttacttcactaagtagccttaactttatcatccccaacagctgaaagtataggcaagctactcaaaaactcatcaagaccctcaaagaacccattcccttcaatgttatcctcctccccatagccggggtgattcccctcattcctcctcggtgccggctcttcaacttcattactaaactccacattcaaatccaacttccccaaattctttgtgcccctcgccatctgcttcctcccactattaacaactcctcttctactcgattcagcagtcaccacaccttctggcacagtggacgcaccactcaaattcccactaccatcaacattagctgcctcattacccgccttcttcactctctcactctgtggtttcttagcagttttccccacagatcctttccctttgacatttttcgccttc

SEQ ID NO: 13526 - DNA, 507 bp, Gossypium hirsutum
  Clone ID: LIB3829-011-Q6-N6-F9
agcaaccaaaattccaaaatagaaaccccaaaattataacatactaaaacaaacaaaaataagaacatgacaatacgattatttgaaaacaactaaaaatccatcttatcccactcaatccccaccagccttttgggaaacataagggagcccacacttaccggaataatgcctatcaaaatgggtagccatgaagggtccagcaccacactcgggattgggacacttttttttcagcctttgaaccttacccgactcgtccaccttgtaaaactggagcacggggagcttgaccttcttcttcttgggcttgatcttcttgggcttgggggagggcttcttcttcctcttcttggcaccacctcggaggcggaggacgaggggaaaaggggattccttctggatattggagtcggctaaggggcggccgtcttcaagctgcttcccggcgaaaaaaggcgttgttgatcgggagggatgccttccttggcttggatcttggctttg

SEQ ID NO: 13527 - DNA, 533 bp, Gossypium hirsutum
  Clone ID: LIB3829-011-Q6-N6-G10
ctgatcgaaggcaatgaacatgatcagaatgccgcattccttcattttacagcataattgacagaggtattaaaatatctgctagtcgggaatctcaggatccatgattaagccgtacaaccaaggctaatgatcatatagaaaagtaaaatatcaatactattccttttaatattcgtaacttcacccataaattctccccacaacaaagttgtctacacatccagctgttaccaaaatttggaggcatggcagcatatttaacggcctcgacctcgcccgcgtccacgcccacgaccccgaccacgtcccaatggcttcccagctgttggcttctttggtttcaccctcggtgtctcttcaaccagcaatgtctcaagatttaagctgtcaggcaggatatagtagcgaatattgttacccctaacactgaggtgatccatagtcactggattttttcccttcaatgtaagtttcacagttttgagatgggtgttcatactgatatccacacctgtgatggtgccgtgaac

SEQ ID NO: 13528 - DNA, 516 bp, Gossypium hirsutum
  Clone ID: LIB3829-011-Q6-N6-G11
gataaatgaattgcttaatatggccatccttatagattgaacaggtgcagtacaatgtcaatgatggaaaaatccaatgtacaaaaacctcaacccaaatctatcgcaaattgtacagaagctcgcctgaacaggtctgctgtgtttcaccagagactggactccatgttggagacttcgattcaactcaggccttgaatgcggcagtcgaaaactgcagtgaacctctctgccctgtccatgcacgcattcatccatgttcgagactttagacgaacttggagattcaacacttcgcattaatgcagcagtcgagcatcccaaaccgaagaaaaccccttttgcattagtccatgcatgcacagtgacatttaaatagcaaaatactatgccctgcactgaacacaattaactttctggatctctagagactgtaaatgaatggacaccaaaagcctgctttaagaacatgtgagctcagctccatgcaaaaacattttcaaacgaagaaaacaa

SEQ ID NO: 13529 - DNA, 536 bp, Gossypium hirsutum
  Clone ID: LIB3829-011-Q6-N6-G12
aaatatataaaattaatatatcttccaaataagatttttttgttctttcacgacaacaacaacaaaaatagaacatagaggaagtggggatcacagcttttgtgcctcttcttaatgcgggagggctgacatacatgcatatgtatataagagcataacaaaacttagatttcactacttctgggattattctataattaggagggaagcagcataataatggggatcattggtggtaaatggtggggcatgatgacaggtcatgagtccattggtcatcttcattaattcagcttttgattttccatcctcgggcgttgctgccaccagcggtcctatagttagggaaaggcacttttcctgactcaatttgcttaacatgttttacaaacagttaatagtgcctcttgacttactccgccgttttccctccgacagccttggcaacattgtcccaacggtcaggtgtgaaccttggcataaacagccaaagctttttaaaaaacttagttttgttggactgaccatgaactaaa

SEQ ID NO: 13530 - DNA, 558 bp, Gossypium hirsutum
  Clone ID: LIB3829-011-Q6-N6-G7
gagcaagccaaaatttaaaacataggatcttacaacttttcacctgcattttattcaccacaaataagaaaagaaaaattgccttcctgcctcccagcattttgctcatagcaaatattccaacaacctatatcgactcagctggatcacaggtgaaaggggtgcaggaggtacacatcatgaaagtctcgttcaaaggtttcgaatttgaacaaaaggatagcaagttaaaagagattaacaaaaatgacatgttaaatcagtttcaatcatcatgtgaggttttcgaagaaccctgcaaagaatgtggtgacgtaacctgttgagcaggtgaatcatccgaatttttaatctccgagttctgatgtttcttgctcacagagtcagtgttccatgccaaatcagagagctttgacggcagaggagcttcagacaaatgggctgttggtgacattctctgatatgttaagagagacgtatccaacacggataaagggacacttagaccataattataaggatatcccatgtatgggtgatcgaatctgcaagttggcc

SEQ ID NO: 13531 - DNA, 521 bp, Gossypium hirsutum
  Clone ID: LIB3829-011-Q6-N6-G8
aaaagcaaaataacagtttattcaactgcaaattcaagaggttcgctaagagggggggggggtgctgctagacaaaataaaaaccagggtcacagcatcccattcatgcatacatacataatacataatatgcataattataggtaccaacttttccataattgtagtacatgttaccgtcacaatctaaacattaaattccacacaccattagtatattattgcaatgaactctgtaacaaaacaaaagaagctcaaggggaccatccctgttgatcttttgctttaatcctcatcatcatcatcatcatcaccaccgtcttccctattcttcttaaggcgggttgtgccaccctccttgctgatgggtaatttcatagctccaaacggagtgtcaacgttgatgtgacctttcatagagtaacctgttccttttcccctaatcatgtcccacagagcagatccgaaatccttaggcctgaaagagataggaatctcaatataactgattccgtttttgc

SEQ ID NO: 13532 - DNA, 541 bp, Gossypium hirsutum
  Clone ID: LIB3829-011-Q6-N6-G9
aaaactaaaaatctcaatgcaaagttccatggcatgcagaagtttcaatggtgttcttctaggttaaataataatactggttgcaaaacaaacattataacaaagtaacagaacccagcatagcttaaaacaatgtcatctaagcatttgcagatgcagcctctgggtggtaatgaagcatctcagcccacatcatctccctaatcatctcttctctcatgttctcgtctatgtcgagatcaatcgggacttgggcaggtggattgcacctcagatcatatagccctgacatgtatgggtgtaggagagcttctgtgacggtaattctcttagatgggtcaaaaacaagcatcctttgcaacaaatctatggctaatggatcggcttgaggatataaatgggaaggatgggtgcccctagaataaggaagtgacttgatataccttcgggctttgggattatcaataaactgaagatcagcctcttgctggcttccaaggacatcgattattagcttaagctggctgaggcactctgttcc

SEQ ID NO: 13533 - DNA, 456 bp, Gossypium hirsutum
  Clone ID: LIB3829-011-Q6-N6-H10
aaattgaaaataaaattttttttattttaattgttgggccgggccgggttgtatttcaggtctggaaaggaaaaccaggcagggaggggttggtgggccgggcctctaagacaaggggaggggccagccccgatccagggcaaaacagaaaccaaaccgaaacaaaagaacaaaaaaaaaaaaggaggggagcaaaattcaaaaaaaaaacacggaaatgaaaaagcgagggggaggggatggcaaacttaagggaactcagagccggaaccggagagactcgacaaagaaaaggggggcacggggccgaggataagacaaaacatatcttagggggaaaagccctgcgctaggaaaaaaagaaaggaacgggagaacaagggtaactggaaagcactggggaaaagcgaggcgggctgggtagaaatcaaccccttccggaaaggaaggaaagga

SEQ ID NO: 13534 - DNA, 548 bp, Gossypium hirsutum
  Clone ID: LIB3829-011-Q6-N6-H11
atggcagtaagaaactgtataaatatcccagaaaaaacagcacttatcatttaaaagtactcgaaaataactaacaaaagcaccaaacaaaatgtaaaacaagctaacagatgcttcaaaagtacgataaatctactgattagagttcatataaaaacatgttaggcttaatcaacttcctccatcttgctgccttcggcatcagcatcctccaatgggggcatatcagcatcagcttcagcttcacctgcatcctcgtcaatgctcaagccgagtttcagcatcctgtggatcctgttgccaaaggtgttagggtcatcaaggctgaagccagaggtcaggagagcagtctcgaagagaaggagaacaaggtccttcacagatttatcattcttgtctgcatcggctctctttctcagctcttccatgatggggttctccgggttgatctccatcgtcttcttgcttgacatgtaaccagccatgctgttatccctcaaagcctgggccttcatgattctctccatgtttgcagtccacccatactc

SEQ ID NO: 13535 - DNA, 531 bp, Gossypium hirsutum
  Clone ID: LIB3829-011-Q6-N6-H12
aaattcaattcaacctattcatattgatttatgatctaactgatttaaagtcattcttcgaacgatatctcgatcagttttcaatctaacctatctaatcaagttaaaatatcattgcatatggtccatcgtttaggtaagcaaaaacagcattagcactttaccaataatctctgcaagaacaaaggccatccttgaactgatgaaacctattagcatctctcaccacgaaaacaaccttcacaatcttcgacaagcattttatgaaatcatgacaatccccacaaattctcaagttcttgaacacccttatcactcttgcttcatcccaccctccatggcaaagtgccaatccgattgccagcttctcactgtgaaccctcaagctctccaccttcgactcttcgtctatatcccgcaatgcaaatttcaccccatgaacataccccatttcttctttcatccttctctccatctccttcaacacttgatgaatcttgtctatcattgggtgagtatcgtctccgccgt

SEQ ID NO: 13536 - DNA, 558 bp, Gossypium hirsutum
  Clone ID: LIB3829-011-Q6-N6-H7
atggaaccaagagagaatccccttttttattgttttcatggcccatgctaggctagctagagctgcatgctgctgcaaaccaactagtcatcaccagcaaaattactaagttattattaacttggaaattcgtctcgcattaatctaacctagaaaacatctctctctctaataagcctagcaaacctgatataaatatatataacccaaaacacacacttttattcctccataattatcttttcagcccctcctgatgaaaagtcttaaactgaatataattcaacttttatacaccactctgaaggtaccaaaacattcaatattatgattatatataaccagcagtttccctctttagatcaagaacgttccaagtttgacagcatggtcaatgagttcacactatgaatcaattgaaatgtggttgctcaagccatggccaaaacccagtttgatcttcaatggtgcagaacatgttgctgaggctttcttctttaaccatttgatccatcttttgacatggatgatggtgatcaggccttgacgatgaggttt

SEQ ID NO: 13537 - DNA, 353 bp, Gossypium hirsutum
  Clone ID: LIB3829-011-Q6-N6-H8
gaaccaatactgcaaaattaagcaagttccatctggaaagtgtttgactagtttattcagcaccatacttctgtttaacaacaaataccacaacattttcagggtgtttcactaaatagcacaacaatacagagaaaattgagaaaattacattgggatgtcttcaccatttccagaaaacattggaaccgcacttgtatttgtccttcccttcacactccaaggccaagtcatcagagatgaatggtactttcttctgttttgcaagatcctggcatcctgtaaagttctcagggaacttgcaggtgccaaattgaactttgcaagagcatacactgttccccacgcgtccg

SEQ ID NO: 13538 - DNA, 537 bp, Gossypium hirsutum
  Clone ID: LIB3829-011-Q6-N6-H9
gaaaaagcatatagaattacatgattagatattcaaaaacccaaaaagtctttgcttgtctacataatacagcttttttgtaacctcaataaaagtaacctctgcatttcggcgatccacataagcacttcttttttccgtgctccatgttgttactttcggtctcatccgaccgtggaataccgtaatcgtatgtcaactcggtcattggaggaatgtgtttcttagcaaagaaagcaatatggagaaaagcttcattgttatgttcatacatgatcggttgccaaaaaacattcggggagcaactatgattcataaatcgagctatgtttccactgttcttcgaacttatgattagaggagacggaatatcgaacttttcactagtgtcagatctttcctctgctgactcagtttcatgattccatttgaaggattcatacactcgattcgtatcgaaaacgtaatcattgttttcaccatcgtccccgtctgctttttccttaattttttcaataacttcacctgcgtattcac

SEQ ID NO: 13539 - DNA, 598 bp, Gossypium hirsutum
  unsure (1)..(598): unsure at all n locations; Clone ID: LIB3829-012-Q6-K6-A10
gcgttcggctgatctcctctcactcgctgncctcctgaaacacaaatcaggatttggttgttgtgagagcagaaacggaaaagttggtatttgagcttctaccatggcatagagaagtgaaacaagtttatcaaagatctcagaacatcagtgtggcagaggtggaatgggtgcatgcagcaaatcgattgattgagaaggttgaagatgagcctgaaatgtttgaagattggccaccaggggttagatcaaaaagaaggcttatcttgacaaggcagcttatgcagcaactacttcgtgctcctccaagagtaattctttctgcagatgctagcaaaagctatgaggctgtggcatattttgttgccagatcagtcctgggagatgcatgcagcacagcatgtatacctgaaagtgatactgctattcttcctgatggtgaaagcaccctctctgaaaagcttcagaaggagagaaaccagtccaccttaaagtatgccgaagattttgtcatcaaaacgaagaagctggagaatgatntacagagtctggacaagagagcctcaatcttggacttaagattggaatgtcaggatct

SEQ ID NO: 13540 - DNA, 589 bp, Gossypium hirsutum
  unsure (1)..(589): unsure at all n locations; Clone ID: LIB3829-012-Q6-K6-A11
gcgttcgcggncgcgtgggcaaaatggcgatctcgtgtgggggacgaccggttgggaagagtattctctcttaacggcgcctggtcttttgttcaaaattcaacacacagatttgcctcttacctactatactggacttcttggtatggctggtatgactgcttatactggtttttacgaaatctgcaccccgaagaaaggggaatatgtctatgtatcggctgcatccggagcagttggtcagcttgttgggcaatttgcgaaattgttaggctgttatgttgttggaagtgccggaagcaaagagaaaattgatctgctgaagaataagtttgggttcgatgaggcattcaactacaaggaagagccggacttggatgctgctttaaaaaggtacttcccagaaggcatcgatatttactttgaaaacgtcgggggaaagatgctcgatgcagtgctgctcaacatgagagtccatggtcgtatcgctgtatgcggaatgatctcacagtacaacaatgacaaacccgaagcaacgcacaacttgatgtacatcattccgaaacgggtccggatgcaagggtttatc

SEQ ID NO: 13541 - DNA, 182 bp, Gossypium hirsutum
  Clone ID: LIB3829-012-Q6-K6-A12
tcgcttacaactcgtagtctggatatcctactatatgacacatcatgcattttcagaaggttctgattcctactgtcgtgaccctcgtttcttagtttcattgagtatttcagttgcacttctaaaacatataatgtccttcctcaaatgtttcaaattggctataccaaactgtttcttcg

SEQ ID NO: 13542 - DNA, 601 bp, Gossypium hirsutum
  unsure (1)..(601): unsure at all n locations; Clone ID: LIB3829-012-Q6-K6-A7
cgttcgtaaaaaaaganaaaagaaaagaaagaggggagggggaagattgagatcaagaggattgagaactcaagtaacaggcaggttacttattcaaagagaaggaatgggattatgaagaaagctaaagagattactatactgtgtgatgctaaagtttctcttattatctttggtagttctggcaagatgcacgagtattgcagcccttctactaatttggtcgatattttggaccaatatcagaagacttccgggaagaagttatgggatgctaaacatgagaatctcagcaatgaaattgatagaatcaagaaagagaacgataacatgcagattgaactgaggcatttgaaaggggaggatatcacctctttgccttacaaggagctgatggccatagaggatgcccttgaaaatgggcttacctatgttcgtggcaaacagatggatgtccttgataagacatggaaaaataccaaattcctggaggaggactacaagcagctcagtttcattctgaatcaacaacaagtcgcttatgaaagtgcaagagagcagatggatcatggataccagcgagcccgggactacaactcac

SEQ ID NO: 13543 - DNA, 586 bp, Gossypium hirsutum
  unsure (1)..(586): unsure at all n locations; Clone ID: LIB3829-012-Q6-K6-A8
gcgaggnagatgtccacaaatccatgaagtataatgtgtggtcaagtactccgaatggcaataggaagctagatgcagcattccatgaagctgaaactagagaaagtgagactggcaccaaatgtcctatctttctttttttctcggttaatggaagtggacagtttgttggcttagctgagatgattggcaaggtggacttcaataaagatatggacttctggcaactgaacaagtggaatggtttcttccctgttaagtggcatgttataaaagacatccctaacaaggagctcttccacatcatcctagaaaacaatgagaacaaacctgtaactcatagtagggacactcaagagattggtctcaagcaaggcttagaactgctcaggatttttaaaggctattcagaaaaatcatcattgttacatgactttggattttatgaaaatcgagagaagacacttgatgcgaaaaagaattacaagcctgctactctagaatacatggaagatgatttgactaagcaaacaaaagcaggagagaaagaagtggaagaaagagttgaggaggaaccaagaaaact

SEQ ID NO: 13544 - DNA, 184 bp, Gossypium hirsutum
  unsure (1)..(184): unsure at all n locations; Clone ID: LIB3829-012-Q6-K6-A9
gcgttcgttcanacgctttgaatcaaagctctttcttccgccttctagaatggcaactgcgtgtagcccatttctctagtccctttctgagaaactccaatttctgtaaaagatctcctgatgttgcttcccacaaaaatttaacttcagctttgaatgattcctccaatatacaccaagcttc

SEQ ID NO: 13545 - DNA, 625 bp, Gossypium hirsutum
  Clone ID: LIB3829-012-Q6-K6-B10
ccgggtcgacccagcgttcgctttatttcctttgccgcccctagggttttattacattccccactggcttctgcagatgtcgagtaccagtgcttcgtcggaggtctcgcatggaccatcaacgaccgtgctctcgaagaagccttcagtgcttacggcgagatcgtcgattcgaagatcattaacgatcgtgagactggaagatccagaggctttggcttcgttactttccgtgatgagaaatctatgaaagatgctattgaaggaatgaacggtcggagtctcgatggaaggaatataaccgtcaacgaagcacaatctcgccgaagcggcggcggcggtggtggtggaggatttggaggaaacggtgggtacaaccgtggaggcggtggatatggtggtcgccgtgaaggtggatatggaggtggtggttacggaggtggacgccgtgatggtggtggatacggtgacggtggatctcgttactcaggtggcggcggttcttgggcttaggttaaggcgttttaggatttgagtgagcttcggctcttattttagggtttaatgggtttgtttgttagtgtgtggtttctatcgatattttttcttgtatcatcaggagttt

SEQ ID NO: 13546 - DNA, 182 bp, Gossypium hirsutum
  unsure (1)..(182): unsure at all n locations; Clone ID: LIB3829-012-Q6-K6-B11
gcgttcgggnaaatgnaacacaaanagaacagagggcctttgtctttttaactaaataaattctattactttagtatgtatcagcaaatcttcatgaggatttggttcttaattatgtgtaatgtggcttttctgctatgtcagaatgtattatgatatttaagaaagtttgttttctattg

SEQ ID NO: 13547 - DNA, 613 bp, Gossypium hirsutum
  Clone ID: LIB3829-012-Q6-K6-B7
gtttgcatatgtggaccctgttcctacgtctatagatgctggatttaatcaatcagataatgcccccttgtacttcaattcggaccagggaagtaactccatcaattgttccgactatggctggggagaacagggtgccagaactcctgaaatatcatccattcttgaagcttctgtagtgggtgaagagtttcttgaggatgctaaccctagcaagaagctgaaaccaagttctgacaatcttatgcatgctgaagagaactccgcaaagaccttgtcggacgagctgttggctttggacaaccagatgaaatacttccaaatgccaccatttattgaaggaaactgggacgccactattgatgccttcctcaatggagatgcaacacaggatggtggaaacccgatggatctttggaactttgatgatttccctgccatggcggagggtgttttctgaacgaactttccataataactagtgtttgtaaataaagcaacatgaatttggtcaaaatctgttgtgaagttgaagtaaaaaccaagctatatgcatgcataagccttgcctgcactgctttcagaggttcttagtatgtacccttttttttat

SEQ ID NO: 13548 - DNA, 592 bp, Gossypium hirsutum
  unsure (1)..(592): unsure at all n locations; Clone ID: LIB3829-012-Q6-K6-B8
gcgttctggctgcagtaccttgaagtgctgtccacacattgcctcaanaagatttgaagttggaggtattgatttgacaaagttacttgctcaagagctgggtaaatcaaatcctatggtgaacctcagcttatctgatgttgagaaactaaaagagcaattctcgtgttgtgccgaagatgaagttgcttatgacagaatgctcagatcatgtgaaacagaggaacatactcttcctgatggacaggtgataagaattggaagggaaagatttactgttggtgaggcattgttccaaccatctatattgggcttagaagctcatggaattgttgagcagcttgttcgtagtattgcaacggtttcttctgagaaccagaagcaactgctagaaaataccgttctttgtggtgggactacatctatgactggttttgaatcaaggttccagaaagaagcaagcctctgctcatcagcaatccgtccttctctagtgaagcccccagaatatatgccagagaatttgtcagtgtattcagcatgggtaggaggtgcaattcttgctaaagtggtgtttccacaaaatcagcat

SEQ ID NO: 13549 - DNA, 575 bp, Gossypium hirsutum
  Clone ID: LIB3829-012-Q6-K6-B9
gcgttcggccaaacagcatgcatatcttcgtgtaacactctaaccggcaagacgatcactctcgaggtcgagagctccgatacgatcgacaacgtgaaggccaaaatccaagataaggaaggcatccctccagaccagcagcgtctgatcttcgccggaaaacagctcgaagacggccggaccttggccgattacaacatccaaaaggagtcaactctccacctcgtactccgtctgcgcggtgggatgcaaatcttcgtgaaaaccttgactggcaagacaatcactctcgaggtctagagctccgacacgatcgacaacgttaaagcgaagatccaagacaaggaaggcatccccccagaccagcaacgtctcatctttgccgagaaaacaactcgaagacggcacgtaccttggccgactacaacatccagaaggagtcaactctccaccttgtccttcgtttgcgcggcgggatgcaaatcttcgttaagacgcttaccggaaagacgatcactctcgaggtcgagagctctgacacgatcgacaacgtgaaagccaaaatccaagacaag

SEQ ID NO: 13550 - DNA, 604 bp, Gossypium hirsutum
  unsure (1)..(604): unsure at all n locations; Clone ID: LIB3829-012-Q6-K6-C10
tcgtanagnaggtngaaaaagnaaaaanaaaaaagggtttctgaaaaaaccataggtgatagttttttcttttcacttttataataataagaatatatagtaatggggagaggaagagtggagttgaagaggatcgagaacaagataaatcgacaggtgacgtttgcaaagaggaggaatggtttgctaaagaaggcttatgagctttcaattctttgtgatgctgaggttgctcttatcattttttctaatcgtggcaagctctatgagttttgcagcacttctagcatggctaagacacttgagaagtacaacagttacacctatggagcattggaacctgctcaaacagaaattgacgcacagagcaattaccaggaatatttaaagctcaaatcaaaagttgaggtccttcagcaatcacagagacattttcttggggaagagatagcggacctgggcactaaggaactggagcagcttgagcatcagttggacttctcattgaagaaaatcaggtccacaaagatgcagttgatgattgaccaactttctgaactgcaaacaaaggaagaagtcctactggaaaccaacagaaacttga

SEQ ID NO: 13551 - DNA, 439 bp, Gossypium hirsutum
  unsure (1)..(439): unsure at all n locations; Clone ID: LIB3829-012-Q6-K6-C11
gcgttcgcggccgcgtgggntcgatatactgggatgctcatacatttgcactcaccgagtccgggaagctttatgcatttggtgcgggagacaaaggtcagctaggcatagagttagctaacaatcagacagaaagaggaaaccccgagcgggttgatatcgatctcaattaggaatccgatggcttctcctcccatttgcatacaccatgggtgattcattagattctagacaatcacgcattgcatgtggtgttttaagtttccctgtttattttgtaaatagaaacaagcaaaaaagaaattgtgaagattttaagtttaggagtagcaaagggccttaagtggtctgatttcctaagaaaaaaatggttagcacataggccttaagttgttaatagctgaaacatctctgttcaggttcattgattacttatgtt

SEQ ID NO: 13552 - DNA, 185 bp, Gossypium hirsutum
  unsure (1)..(185): unsure at all n locations; Clone ID: LIB3829-012-Q6-K6-C12
gcgttcgcttttactttctgctacttttcaaaaagaccgtttcattcttttattctaatgtcttaagcttttttctcctgtctttcagtttgaaactaanacgtttcttctcctttttttcatgctgagaaactaagacgcttcttcttcttttcttttatgctaaaaaatcgaagcgcttcttc

SEQ ID NO: 13553 - DNA, 588 bp, Gossypium hirsutum
  Clone ID: LIB3829-012-Q6-K6-C7
gcgttcgcccacgctccggttttacagactaaaactctgacttgaaatgaagatctcaaatgtcgatttttgcgggcaattttagcttcaaaatctcatccacacttcagtttcgagttttctcatttccctgggtgaatggcaacaaggcaatcttttgtttgaaagagaaggaatatagttcatcagttccagtaaggtatataccaaagaaatctttggaaactgaagagcccgaaacttcttcacattcaaagggtttgagtaagaatgaatctcgtaaaagcactgcttggaatgtatttggtagaaagtttacaaacaatgaaggcagtgttattgataaaaagtcacaaacacaaagcggaatgttcaagaaaattgcattacatgatgatgttcaacaaggtgatgaaataatggtgaaacctgtagaggtggttgaggaggtgcctcaaggacaaaacatgaacagaaagaattcgttacaagtttgcaagagaatgtcagatgccgagaagttggcaattgaattacttgcagcaagagcatttaccgcagttgaactgagaaagaaactgcttggca

SEQ ID NO: 13554 - DNA, 591 bp, Gossypium hirsutum
  Clone ID: LIB3829-012-Q6-K6-C8
gcgttcgaaaaacaaaaaaaaatatattcccaattattttattttattttattttttttaagatccttactgttggagtaccctagtggctttaatctacactgtttaatttattatctttcaaatcctttcgattttcctttacttaaattctcttcattcacggattcatgaagttttgatttgtcgcacgctttacgagagtatgatggattctgaagatgtcttgcctgttgaggggcttgaggttgcccttcaaaatggtgttaataggaaacttcaggtgtctgaggacgacgatggtttttcagataatgtgactgggaatgttgagaaaactttggagacttgtttgcagaatgaaatggatgataatggaataactaacgaagatagataaggaatgagtggcttcgtggatagcaatggattgattgattctaaggaaggggaagttaaagataatgtgaagcaatccaaatctcacaaggttcaagggaagaccaagaatgagaagccctcatgtcccagaaatgtttcttcagctctagtgaagaaaagtaaagatggaaaaagtgcagaggcgacttt

SEQ ID NO: 13555 - DNA, 582 bp, Gossypium hirsutum
  unsure (1)..(582): unsure at all n locations; Clone ID: LIB3829-012-Q6-K6-C9
atcttgtagtagtttatacgcactacgtacctgaaaactcaccanatagttctccactccacacctgaatatcctcatgttcggtctctgccagaggaatttgtagaatcttccgagcagtatcttcttgaaagccaccttgtcaatcccctgaatccagttgtcttcccagatagaaatgcaactccctttaccaactctccaacccaatcctctttgaagaagtccttttgacgcccagatgctcttccaggtgaatgaaggaattgatgttcagaaaaactctcccgtcctccctatcgtctgagcaaaattgtgttcaagccgatttcaagaaaaaagaacaaaagcaatctacgaaaaacctaaaaatatcatgccaaaggcggcagatagaaacgtgctagggtagcagactacacaatataaagtctcaaaatcattgtgtttttttagttttaaaattttacgcaacgtttgggcatcaaaacggcggtggaaggttgcgtttggtaatttcaagcgatcgagaaggtttaattctgccctaagtctctatatttttaagacatttgaacttta

SEQ ID NO: 13556 - DNA, 608 bp, Gossypium hirsutum
  unsure (1)..(608): unsure at all n locations; Clone ID: LIB3829-012-Q6-K6-D10
ttctgtaaaagnaagagagagaaggatggttttctcaacggtgttaacatcagttccaaatctctaccttaccaggnaaacccaagaatattcacatccaaattcgatgcctatcgtcaccatctgtatcaatttcaagtcaatcaaatttgacccaattcgatttaaaggcttactgggctaccctttatgcagaaatcactcaaaagcttgaagaagcaatcccagtgaaatacccagatcagatctatgaagctatgaggtactctgttcttgcaaagggtgctaagcgagcccctcctgttatgtgtgtggctgcctatgaaatctttggggataatcgactcgctgcttttcctactgcttgtgctcttgaaatggttcatgctgcttcactaattcatgatgaccttccttgcatggatgatgctctagaacgcagaggccaaccttcgaaccataaggtctttggtgatgacatggcaatccttgctggtgatgcactcttccctcttggcttccaccatattgtcatgcatacgcctcctgagcttgttcctgaatcccggctcttgcgtgtgattgctgagatagcacgcactgtgggg

SEQ ID NO: 13557 - DNA, 573 bp, Gossypium hirsutum
  unsure (1)..(573): unsure at all n locations; Clone ID: LIB3829-012-Q6-K6-D11
taaaactcattttctccagagganaactgaaaatttcaccatctaaaaagcttgaagtgcttttggttgataaatgaccaaaataacctatcttctcccccttggaaaacgttctttcctctgctgtgaaagttctatacccatttttttcacattttcgctgtgaaagctccttcctgttctttgttcctcttccgcagttgagtacgttttcttcttcttctctttagttattagttatgctttgtttttatatactttttaattctggcttttgtgcctcttttgctttactgttttgtgcctctactgctgctttgctctgcctcttttgttttgtgcctcttttgctcgctttgtaactcttccaaactattttagttgataagaatagaagaaatatagactaaatcaaaattctatccaaatttcatatcgttgctgaattttctgtatcttttgtatttgaaagttctgatgatgttctttttaattgtttctagggtttagctttacgataagataccatggctgtgtttcattttggttgaagttatcgtcgattgtattatt

SEQ ID NO: 13558 - DNA, 547 bp, Gossypium hirsutum
  Clone ID: LIB3829-012-Q6-K6-D12
tcgcggtcgcgtggggacgatggcgatgcatgcaggggttcagacctccaaattctaattctgatgggcgctggtttaactggttcaattgttccgaggagtgggcgttatctgaactaattccccagcttcaggaattactgaaaggcgtcgatgatgtccaattctcgccttataagtgtgatcacacccttcttgctgctcagattaaacaattggcgcaagagctcaaggatttgacaacttccaatccggttaccattcttaatgggaactcacgctccggcgggggcattgcttcttatcttgtgccatctgccccacttgcagcattaagatattgacatatgtggtggaagggcttgtcaatctttgatgtgatgtcaagtcacaaagcaaaatatgatggatgctggaacaactgtgccaaaacactaagataatgtatctgaaacattaaatacaacaataacgacatttatccataagattggaaggcttagactgcgaaagttgaggatcataaagaaacataccttatcatcgc

SEQ ID NO: 13559 - DNA, 287 bp, Gossypium hirsutum
  Clone ID: LIB3829-012-Q6-K6-D7
gcgttcggttaaattgttgggtctttgatgattttgggatgggattttccttgcataaaagaactagaggggagcaaaaacaaggttgattgcccccactcttgttagggttcctttttctttttttgctttctttaattattaattactgtatttggtgagaggagaggatggatgggagacatttttgtaatatatcgtgtttgatcaatgacactctcatccttcctccttcgcatgtaattgtaatttgaaggaaatggaggttttaatttttcttttgcctt

SEQ ID NO: 13560 - DNA, 584 bp, Gossypium hirsutum
  unsure (1)..(584): unsure at all n locations; Clone ID: LIB3829-012-Q6-K6-D8
cggccgcgtgggcggncgcgtggngaaaaaaacacanattaagacagaagcatggccagccagctcgtaggaacaaagagagcttgtgtcgtgggtggcagcggattcgttgcctcattgctggtcaagttgttgctcgagaagggttacgccgttaacactacagtcagggaccctgacaaccagaagaagatctctcaccttgtaacactacaagagttgggagacttgaagatctttcaggcggatttaactgatgaagggagctttgatgcccctattgctggttgtgaccttgtcttccatgttgcgacacccgttaactttgcttctgaagatccagagaatgacatgatcaaaccagcgactcaaggagtggtgaacgttttgaaagcttgtgccaaagcaaaaacagttaaacgagtcgtcttgacatcatctgccgcagctgtgtctatcaacacactggatgggacagatctcgtcatgacagagaaagactggaccgatatcgagttcttatcatcagcaaagccaccaacttgggggtaccctgcatccaagacgttggctgaaaaggcagc

SEQ ID NO: 13561 - DNA, 554 bp, Gossypium hirsutum
  Clone ID: LIB3829-012-Q6-K6-D9
ctcataactgcgttctttcttttccgttgacgcaactttttcctcctttaagtaaacctttgtccaaaccccaaaaacatggcgcctcaacgtaccaagccctccctccctttgaagactagggtcttcatctcccttatctccgccgtcactgacgcctcctgccgctccgatggctctgtcaaccgccgtctcctccgcttactcgactaccaagcccctcctaatcccaagccttctaactccgtctcttcttctgaccccaccgtcgatgcttcccgcaatctctggtttcgcctcttctctccttccctcccttccgatctcctccttcccgttgtcgttttcttccatggcggcggattcaccttcctcagccccgcatcccaggcgtacgacgccgtttgtcgtaggttcgcccgtaagtttcctgctttcgttgtctccgtcaattaccgtctagctcccgaacatatctacccatctcaatacgacgacggattcgacgttcttaagtttttaaacgacaacttcgccacagtcttaccggaaaa

SEQ ID NO: 13562 - DNA, 434 bp, Gossypium hirsutum
  unsure (1)..(434): unsure at all n locations; Clone ID: LIB3829-012-Q6-K6-E10
acggcgtccgcgtatccagnagaaaacacatggcagcatatattcggagaggctattaacattgacgggagtgtatggattctggaagcacgtttccaaccttgaccgtcgcgagagccgccgttacctggagatgttttacgctcttaagtaccgcaagctggctgaatcggttcctctggcagaggaggagtaaaacaaaggaagaggcgggttttccctggaggatttttctgagttcttcataataataataataataataataataataattatcttttgttgttttcatatttatggccggacaagaaaaagcctcttttgtatctcttttcctttttttgttgttttatttttcccggcattgttagaacatggagggggtactacgcccttggattccaacaaaagattgtgattttgttttccaa

SEQ ID NO: 13563 - DNA, 555 bp, Gossypium hirsutum
  unsure (1)..(555): unsure at all n locations; Clone ID: LIB3829-012-Q6-K6-E11
acaaatctgccctcacaggcctcaggtctcaccttcaccttctgctgcttcttcatttctatttttaatcagaaatatatattaataccctaaaattaaaatgnnggaagaggaaaattcaagggcaagcccaccggtcaccgccatttctccactcctgaagagctccgtgctggtacctctgctcgtccccgtacttttaagaaggaagaagctgaagtggaggaggaagaagaagagtctgaagaggaagtagaagaagaacccgagaaacgaaagggtactcaagggcttattgagattgagaatccaaatttggccaaacaaaagaatgtcaaagctaaagatgttgatatgggaagaacaactgaactatcaaggcgtgaaagagaggaaatagaaaagcaaaaagcacatgaacgatatatgaagctgcaggaacaagggaaaactgaacaagcaagaaaagatttagagcgcttagccctgatacgacaacaaagggcagaagctgctaagaagagagaggaagagaagaccgcgagagaacagaag

SEQ ID NO: 13564 - DNA, 314 bp, Gossypium hirsutum
  Clone ID: LIB3829-012-Q6-K6-E12
gcgttcggaaaaatcatgcccttatttcatgagggccgcatcatgtcacttaggagtagcatgccatgtccatcatccccagcctgccaaagctgggactggcttacctgggaatggacctgtgggatcattagttgtcccaccaacaggcgtgccatatgctggcgggttaccctactggccattacctagggcaccgtatgaatatggcccgcatttacaaactccaaagatcatgccagttgaaagttctccttctgaaaacatattatcaagaaatggctggtagcacatacatgggtcctgcactcttg

SEQ ID NO: 13565 - DNA, 599 bp, Gossypium hirsutum
  unsure (1)..(599): unsure at all n locations; Clone ID: LIB3829-012-Q6-K6-E7
tcgctcattgaaaatatttgtggaaaacagcaactagctggaagctggatgaagcacttcagctgttttatgtcggtaatgaaggtggtgtagttggaacggcttctgagtctccagcagtgngaaaacgtagattcttgggttgatcaaaactctggtgagttgaaggagtctggaaacagtgatgttggacccattggtggagaggaagtacgccctcctttacctgtagtaagggagactctttatgatgatgcatcgttatatggagcttcaagattaggattacctccccaacagtcgagttcgttaattgcattccgtaattttgatgaggaaatgaaacggcccggggtttgggaatcagatgaaggtgcttcttccacggtagatgctcctcgggataatcttgcctctttatatcgtcctccttttcatctgatgttccagggaccatttgaaaaggcaaaagctgctgcatctgttgaggacaagtggctccttgtcaacttgcaatctaccaaggagttcagctcacatatgcttaatcgagatacttggggaaatgaggcagtttctcaaactgttagcaccaactt

SEQ ID NO: 13566 - DNA, 560 bp, Gossypium hirsutum
  Clone ID: LIB3829-012-Q6-K6-E8
taccgtccgcattcccggtcgacccagcgttcgcggccgcgtgggcttacacatgcccctacgctcagcgtgtttggattacacgaaactgtaaggtgccagcattggaacacaataatgaagtgaaaggagagagtctagacttgatcaagtatatagacagccacttcgaagggccttcacttttccccgatgaccctgcaaagaaacagtttgcagatgagttattatcctgcattgactcattctataaaacagtgacttcttcattcaaaggagagggcactgaagcaggcattgcatttgacaacatcgaaacagctcttaccaagtttgaggatggacctttcttccttgggcagtttagtctgatatgtgactaaaactgtatcattgctcttcagttattgatatgcgcctagttttcatcaagtttcagaaagtagattgttaaacattgacttcctttccaatgtaatatgtatgcatgtatgtatgtgtacataaataaatatatctgtgtcatcttcaggtggatatagcttatgcaccgttcattg

SEQ ID NO: 13567 - DNA, 556 bp, Gossypium hirsutum
  unsure (1)..(556): unsure at all n locations; Clone ID: LIB3829-012-Q6-K6-E9
caattttgggatgtgacacaactttaaaaggtttaattgttatataacctttgcttaattgccacttaaggcacctaacaatttagaaatcaatttcctttcatttaggtcactaatcaatttaattcctgtattattttattgatcaatttaatttaacaacacttaattattcgagctctcagatccatacttgactcataaattattctattttaattatttaatatctctacacaattaattctattcgaaactaaattttatgatactattaaaaacctagtcgttacagttgataagctccaattatccaatcaccagaatggttatttatgaaagctctaatctccactcttatgggttttctattgaagaactataagtttgaaccagtcaattggaggtggtttccaagaccaaagagcaaaacatggcaaatctttcctattcactactagagaaagagcagagaactctaccactgcagtatagactttatcaaggaattgttttatatggcgatcattttcaaanactagtatgttgtgagtaa

SEQ ID NO: 13568 - DNA, 601 bp, Gossypium hirsutum
  Clone ID: LIB3829-012-Q6-K6-F10
tttaaaaattcactcttttatctttcaaaatacagaactttgatctttaaaaagaaagttcatcttttttaatttctgggttttgggtttttagtctccgccatggattcaacttcaagtgcagcagcaccaacgccaccaccaccgccgccgagcttttacttcgacgacaaatggaagctatcaaagaaagaaacttcttcatcatcatcatcatcaaagggtcgttctttatcatcatcttcaacttcaaattcgtcatcattcatgatcaaaaccaccccatcatcatcatcaacatcaccaccatcatcatcaaaaacaaaaagatgtgctttcactaggaaatgtgctaggctattcaaagaacaaagggctcggttttacatcatgaggcgttgtgttatcatgcttatttgctggcgtgaatacactgattcttaagtatttttaatggaggatttaatggcatccaaccaaccaagcaagaagaagaggaggatgctatcaagctctatatatatatacatgtatataaagatttggtttttttagggttttagaactaattagaacttagaccattaggattgttttttcg

SEQ ID NO: 13569 - DNA, 576 bp, Gossypium hirsutum
  unsure (1)..(576): unsure at all n locations; Clone ID: LIB3829-012-Q6-K6-F11
ctttccgnanaaaaaaaaagctcaanaananaaaaccatgngccgatcaacttacggacgatcagatctctgagttcaaggaggctttcagcctctttgacaaggatggcgatggttgcattactaccaaggagctggggactgtgatgcggtcacttggtcagaaccctactgaggcagaactccaagatatgatcaatgaagttgatgctgatggaaatgggaccattgattttcctgaattccttaacctaatggcaaggaagatgaaggatactgattccgaggaagaacttaaagaggctttcagggtgtttgacaaggaccagaatggtttcatatctgctgctgagcttcgccatgtcatgacaaatctcggtgagaagcttacagatgaggaagttgatgagatgatccgtgaagctgatgttgatggtgatgggcagatcaactatgaggagttcgtcaaagtcatgatggccaagtaaggataaaaaatgggtaaaaaggggaacagggcagataagtttgctaagatctctatttatatcaatagggcatctatgtttttatgtt

SEQ ID NO: 13570 - DNA, 338 bp, Gossypium hirsutum
  unsure (1)..(338): unsure at all n locations; Clone ID: LIB3829-012-Q6-K6-F7
gcgttcgcggnaagctggtggttggtgccccgatcggcggtggtgcacgtggcagaggaaacgtgcggcggttgagggtgaaggaggctaggngttnngctgctgaaaactttaagttgttgggctattatttgggctagtttagtagtgggctttagattttgtaaaatggagttgcttatttgggacttttattttggaatttgggttttgtttatttgtttatttgcttgggccaaaattggctactacagtactgttttgtaaaccgattgtgactgttttccctcaaattttgtatttatgtaattttaccatcttctatttttttttttggc

SEQ ID NO: 13571 - DNA, 578 bp, Gossypium hirsutum
  unsure (1)..(578): unsure at all n locations; Clone ID: LIB3829-012-Q6-K6-F8
gtctggntctttatctctttgcaactccatatcgtgtaacttgggattattattttctatctcgggagcatacactcgagattgacaagtgggaagacagagctgagtatgaatatgtgaaaaacaaggggatttctatttttctgatgcaagcagggatgcttggaacacttgaagctctatgggaagtcttcccattatttactaacactggatggggtgagagtgccaatctcgggtttctcaagaaacacatgggggcttctttcgaatcacggcctcagccctggtacaccaacattagtgttgatgatatacattcgggagatttccttgtaatatcaaaaattcgtgggcgctggggcggttttgagactctcgagaagtgggttactggttcttatgctggtcatagtgctgttttcttaaaggattctgaagggaagttatgggttggtgaatcaggacatgaaaatgagaagggagaagacatcattgcagttattccatgggatgaatggtgggatttggagctgaacaaggacgactctaatccccatatcgcagtgcttcctctg

SEQ ID NO: 13572 - DNA, 625 bp, Gossypium hirsutum
  Clone ID: LIB3829-012-Q6-K6-G10
cggtccggccctcccggtcgacccagcgtttgccccacccttgcagaacgctggctcttggctcttctcctcatgctcactgtttcaacggttattgccttcttcatgagagccgccttcgattcgtgcgatcggaatgtttctgttgataatgttatcagctcagctcgggattccgtccaagtcgccgataagcgagccccgcagatcgctgctgcaaagccgagtccactcagtttcatgaagtccaagattgttctactggtgtcgcacgagctctcgctttctggtggaccattgttgttgatggagctagcatttctattaagaagtgttggtgctgaagttaattgggttacatttatgaaaccatctgaaactgatgaagtaatatatagtttagaacataagatgttggacagaggagtgcaggttttctccgcgtttggaaaagaagctatagatactgctctaagagctgatttggttgttttgaacacagcggttgctgggaaatgggtagattatgttcttaaggaagatattcaccgtgttctgcctaaggtgttgtggtggatccatgaaatgcgaggccattacttcaaattagagtatgtaaagcatc

SEQ ID NO: 13573 - DNA, 271 bp, Gossypium hirsutum
  Clone ID: LIB3829-012-Q6-K6-G12
tcggttgattttgaaggcatttgtattggactgatggccatcggccgtgtatctttttttgctttttatgcgttatcattaaaccttgaactctgtattgaagatgagtgatcaagttattttatgcttgactttgtttttcagcctacgtacccggacttagacggtgaagaatgccattcatactgcatagttttgtagccgatgcacactaaaattattcttacgtcagagtttatatatattatattagaattttttatattttatc

SEQ ID NO: 13574 - DNA, 599 bp, Gossypium hirsutum
  unsure (1)..(599): unsure at all n locations; Clone ID: LIB3829-012-Q6-K6-G7
tctgtttcttctttggnaccttacaactactacaacactgtttctcggaatcgagattggtgtccttgttggggtaggcgtctcacttgccttcgtcattcacgaatcagcgaatccgcatattgctgtattggggcgtcttcctggcaccactgtttataggaacattcagcagtatccagaagcatatacttacaatggaattgtgattgttcgcatcgatgctcctatctactttgcgaacataagttacatcaaagacaggctacgagaatatgaagttgtgggtgataaatcgaccaaacgtggaccagaagttgaacgaatttattttgtaattttggagttggcacctgtaacatacatagacgctagtgctgtccaagctctgaaagacttgcaccaggagtacaaatcacgggacatccagatagctatctcaaacccaaaccaggaggtcctgttgaccttatcgaaagccggtgtcgttgagatgattggtaaggaatggtactttgtaagagtgcatgatgcagtccaagtttgcctccagcatgttcagaccatgtctccgaaagcatcagatccttcacatgaaa

SEQ ID NO: 13575 - DNA, 394 bp, Gossypium hirsutum
  Clone ID: LIB3829-012-Q6-K6-G8
gcgttcgcggaaaggtctgcctagtaaaatgagtgtgccatagaactaacagaagagaacttcgataagggcttgtgtcctggtactactaagagacttgcaattgaagcagtttgcagctaaagttaccccggtatatgtctccgacacaaatgttttggctgcttcctgaagaagaaaacgaagaaaaagcattttgctccgttttctttcgggcacgagctgtgttttatttcctcaacatgatgcccctaattttatttttcttttgctcaagtactttttgtcctttgaggtgtttgcgacaattcaagagcatagatagacttagctcttaatacgtggaatattcgtttttgcttttaaatatatcgatattggtcaagcatttggc

SEQ ID NO: 13576 - DNA, 562 bp, Gossypium hirsutum
  unsure (1)..(562): unsure at all n locations; Clone ID: LIB3829-012-Q6-K6-G9
gctcaattcacattcacatgagccccaattgattagcatcaccgtttacgacaccgacaggnatagaatgcaaaaccctgtcgccaaggttgccgtggtgggaagcggaatttcagggtctgtttgtgccgctactttggcaaggaatggaatttcagtgaccctttttgactctgccaggggtcctggtggccgcatgtctcaaagaagagagataagtgaagatgggagagagctgttattcgatcatggtgctccttacttcacagtgacaaatcccgatgtgttgagtgttgttactgagtgggaatcaagaggccttgttgcggaatggaaatcgaattttgggtcttttgattgtttcaccaacaaatttgtcaacactgaacaccaggaaagagaaagcaagaagtatgttggtgtgcctggaatgaattccatttgcaaagcattgtgccacgagcctggagtagacagtaagtttaatatgggcatcgggaagtttgaatggttagaacacgagaatctatggtcattgataggtttggacggacagcatctt

SEQ ID NO: 13577 - DNA, 606 bp, Gossypium hirsutum
  unsure (1)..(606): unsure at all n locations; Clone ID: LIB3829-012-Q6-K6-H7
ccccgcgtccgcaaaagtgaaagaaatgagggttgttaataagagagatggaggtttaatctctctatcagtattatttgtaatggcaatattactcatcttcaacgccaaatgtttcagagttgctgtgttagcggagaagttcaatgacaccgctttctggggtggccacggtggcggtgacagtgtagggctcgacgatgatgactacagcagcttcatcggtgacgatatggagctggagatgttgacggattcctacatccgccgagtgctcgccggtagcaacgngaaaatcaacgattgcattcactaacaacgctaaaaaaactccaagttgtggcaagggtaaacaatatggtccgtgcatgggtgacaagaaagttgctagcaattgcagtacataccaccgtacttgccagggatcgtcataatataaaaggaaagaaaaataaagttaggaccttgctgcctctcgttatttcatcttttccccttcccactcacaacatggggcttggccctcatgacttctctccgacagccccgatcctcagtttgctgtgcaccgctgtcactttggtcctccgctagtgattcaccaca

SEQ ID NO: 13578 - DNA, 580 bp, Gossypium hirsutum
  Clone ID: LIB3829-012-Q6-K6-H8
tttcacttgcccaaaccctctctcgccctctcaggctacctataacgttattagggtttcttctccttcttactccacttcctcccctaaccacgctccttttaagcgcgtcggcactcacaatggcagcttccactgcgacgaggccctcggctgcttcatgattcgtctcactgacaagttctccaactccgagattatccgtacccgagatcccaaggtattggaggggcttgatgctgtgcttgatgttggaggcgtctatgatcctaatcatgaccggtatgatcatcaccagaaggggtttgaggaggtttttggacatggatttaatacaaagcttagcagtgctggacttgtttataagcattttggcaaggagataatagctaaagagcttcagcttggagaagaccacccggatgtgcatagattatttctggccatttacaaaagcttcgtggaggcaattgatgcgattgacaatggaatcaaccagtttgatactgataagccacctaaatatgtgaacaatacacacttatcttctagagttggaagattaaatctagactggaca

SEQ ID NO: 13579 - DNA, 514 bp, Gossypium hirsutum
  Clone ID: LIB3829-012-Q6-N6-A10
gaatgaaaggcatccaaaaggctttaataaatacacttaatttttaccttaagaaaatcagctacctgtttcaaaaataattcagactgagctttgttcttcccccattttacccaaaaattatggggtttacccctcactttctctcaagattttcagacaagtatattcaatgataaactcatatatttctcaggaaattgatacaaatggcctgcaatggcaggcaatgatctaagagcctccattgcttttaaattttggagcaaagatgcaccgagggataaaaagataattggccaaaaaaaaaaaaaagggaaaaatcaatcaagtaatgatcaaagggaaagacattgtaccctgtcagggagattacggggcatcgggagtgcaattacgtatctttgggagaagaatttgtgagaactagcaattgcatcagaggacaatgaggtctcagtgccgtcagcttgcccccgaccatggaacttggcaaaacgattgatgacggaaa

SEQ ID NO: 13580 - DNA, 523 bp, Gossypium hirsutum
  unsure (1)..(523): unsure at all n locations; Clone ID: LIB3829-012-Q6-N6-A11
gtatgaaaaaccccaaatagactcttgttcaaacgcacatgtccaacgcatatccgaacataaatacaaaatacanttgaaataaaacacaacacacatgcacgaattataccggtgttattttccgtataagtgcatcaatcacgggcgacgacgactaactgtttcccgacattgcgaccgatgaagaggccaatgagagctgttggagcactctcaataccttcggctacgtcttcaatgtacgttatcttcccttctttgatgctaggtataaccatttctagatacttgggatacaagtgatagaaatcactgacgataaacccttgcatccggacccgtttcggaatgatgtacatcaagttgtgcgttgcttcgggtttgtcattgttgtactgtgagatcattccgcatacagcgatacgaccatggactctcatgttgagcagcactgcatcgagcatctttcccccgacgttttcaaagtaaatatcgatgccttctgggaagtaccttttta

SEQ ID NO: 13581 - DNA, 534 bp, Gossypium hirsutum
  Clone ID: LIB3829-012-Q6-N6-A12
ggacaaactaaaattgcacttttccatacaaaaaagttaaggaaaggcatataaacatttctgatttcatctgaattacaaagaaattacaaaagtttagatccttacatgcactcaacataacacagtaattatacacaaaaaagaaaactatgacaaaactattcaaagcaaaaaaacagtctcaattcaacaaaatccctatttgtcttatgcacattataatatgtatctgttaccataaatgtaaagaaactgtacctgagaatggaagaggggcggttctttttggcagcagttcagcgtattgctttcaacctgggaattctatcacgctcttgaacctagcttcccccaccattttcttcgagctttgactgattcggggtggccacgcttatgtagtcttgccttggctgcctttaatctcagcttataatctttcttccatgtctcgaaccggagtcttaatgtccgaagttcatcatcaggattcatattagaagcttgctgtggcactctgatgtcaattaa

SEQ ID NO: 13582 - DNA, 553 bp, Gossypium hirsutum
  Clone ID: LIB3829-012-Q6-N6-A7
agcacgcagaaaaaccagtctatagtttcataaagacactgagaatggatacagcaatataaaacaagttcatagttgggactgcaatacaacttagaaaatattacaagaggtaaatatgcatgagtttaagatcatatcacatccctggaattaaatactcagataaaatgttatcatattatcaccagaaagcaagcttgagagaatttcaggcttcagcaagccccaatccacagtgttattacattctctcttgtaagtttggctgcattggctgcacttggaaggtggaagacatctgtgagttgtagtcccgggctcgctggtatccatgatccatctgctctcttgcactttcataagcgacttgttgttgattcagaatgaaactgagctgcttgtagtcctcctccaggaatttggtatttttccatgtcttatcaaggacatccatctgtttgccacgaacataggtaagcccattttcaagggcatcctctatggccatcagctccttgtaaggcaaagaggtgatatcctcccctttcaa

SEQ ID NO: 13583 - DNA, 533 bp, Gossypium hirsutum
  Clone ID: LIB3829-012-Q6-N6-A8
aaaaaactccagcaaatgctaattcaaattcactgctttgtcaactaaaaatccaactcagattaaaaaagaggcaacatagaaaaagaattttaaagcaaaagctgaaaaacagagcgcccccccccccccccgggcacatcttaactagttaaaaagttgaaaagctatggtgcagggacggtaggaaatgaacttgctattgggttcttcacagcgacgctcttccgattgcagccgttgagggatagttttttggtgagattgatgatggatgttgcatctccagttttcttggtcctcctcaactcttcttccacttctctctctcctgcttttgtttgcttagtcaaatcatcttccatgtattctaaagtagcaggcttgtaattctttttcgcatcaagtgtcttctctcgattttcataaaatccaaagtcatgtaacaatgatgatttttctgaatagcctttaaaaatcctgagcagttctaagccttgcttgagaccaatctcttgagtgtccctactatg

SEQ ID NO: 13584 - DNA, 181 bp, Gossypium hirsutum
  Clone ID: LIB3829-012-Q6-N6-A9
gaagcttggtgtatattggaggaatcattcaaagctgaagttaaatttttgggggaagcaacatcaggagatcttttacagaaattggagtttctcaaaaagggactagaaaaatgggctacacgcagttgccattctagaaggcggaagaaagagcttttgacttcaaagctgtctgaat

SEQ ID NO: 13585 - DNA, 477 bp, Gossypium hirsutum
  Clone ID: LIB3829-012-Q6-N6-B10
gaattgaaaaaaagcatatacttcattccacttttatgttttaaaactcctgatgatacaagaaaaaaaatcgatagaaaccacacactaacaaacaaacccattaaaccctaaaataagagccgaagctcactcaaatcctaaaacgccttaacctaagcccaaaaaccgccgccacctgagtaacgagatccaccgtcaccgtatccaccaccatcacggggtccacctccgtaaccaccacctccatatccaccttcacggggaccaccatatccaccgcctccacggttgtacccaccgtttcctccaaatcctccaccaccaccgccgccgccgttttggcgagattgtgcttcgttgacggttatattccttccatcgagactccgaccgttcattccttcaatagcatctttcatagatttctcatcacggaaagtaacgaagccaaagcctctggatcttccagtctca

SEQ ID NO: 13586 - DNA, 176 bp, Gossypium hirsutum
  Clone ID: LIB3829-012-Q6-N6-B11
caatagaaacaaactttcttaaatatcataatacattctgacatagcagaaaagccacattacacataattaagaaccaaatcctcatgaagatttgctgatacatactaaagtaatagaatttatttagttaaaaagacaaaggcctctctgcttctctttgttgttcattttcc

SEQ ID NO: 13587 - DNA, 514 bp, Gossypium hirsutum
  Clone ID: LIB3829-012-Q6-N6-B7
cagacacaatcacttttacagtcactcaaatttaaaatttagtccaaagtccacaaaaaaaacacataaaaaaagggtacatactaagaacctctgaaagcagtgcaggcaaggcttatgcatgcatatagcttggtttttacttcaacttcacaacagattttgaccaaattcatgttgctttatttacaaacactagttattatggaaagttcgttcagaaaacaccctccgccatggcagggaaaatcatcaaagttccaaagatccatcgggtttccaccatcctgtgttgcatctccattgaggaaggcatcaatagtggcgtcccagtttccttcaataaatggtggcatttggaagtatttcatctggttgtccaaagccaacagctcgtccgacaaggtctttgcggagttctcttcagcatgcataagattgtcagaacttggtttcagcttcttgctagggttagcatcctcaagaaactcttcacccactacagaagcttcaa

SEQ ID NO: 13588 - DNA, 535 bp, Gossypium hirsutum
  Clone ID: LIB3829-012-Q6-N6-B8
aacttaatgagattacccagttaccaatcaatagtcacataaacttacaactttgttttctcctcaatttcaggtttaaactgccattagcagcattcctgagataatacagacagaaaagctcactcgagtaaaaaaatattagtcaaaaacactttctatgaaccacagaaggtccagtctcatcataatctgcctttgttacatgctgattttgtggaaacaccactttagcaagaattgcacctcctacccatgctgaatacactgacaaattctctggcatatattctgggggcttcactagagaaggacggattgctgatgagcagaggcttgcttctttctggaaccttgattcaaaaccagtcatagatgtagtcccaccacaaagaacggtattttctagcagttgcttctggttctcagaaaaaaccgttgcaatactacgaacaagctgctcaacaattccatgagcttctaagcccaatatagatggttggaacaatgcctcaccaacagtaaatctttccct

SEQ ID NO: 13589 - DNA, 546 bp, Gossypium hirsutum
  Clone ID: LIB3829-012-Q6-N6-B9
aggtaaatatgcaaattccattcaaagagaaaccatacatagatgcaaccggtaaacaaagactagaaattatttaataaggccatcacagggcacaatccttcacgtgaaaccagaaaacccacattaaggaagaccttaaggcttagaacccaccacgaagacgaagaacaaggcgaagagtggactccttttgaatattgtaatcagccaaaggccttccatcttccagctgtttcccagcaaaaatcaacctttgctgatctggaggaattccttctttgtcctgaatcttcgctttcacgttatcaatcgtatccgagctctacacttttaaagtaatggtcttaccggtcaaagtcttgacgaagatctgcattccacctcgaagacgtagaaccagatgaagagtcgattccttctggatattgtaatcggctaaagtccgcccgtcctccagttgctttccggcgaagataagacgttgatggtctggcgggatgccttccttgcattggattttggcttacacgttgtcgatcgtgt

SEQ ID NO: 13590 - DNA, 543 bp, Gossypium hirsutum
  Clone ID: LIB3829-012-Q6-N6-C10
aactaaagacatagtatatgagtaaaatatatatgtcatccaaatttttacaaatattggagcttcgccccacacttaaaaccatgcatgcatcctccgtaacagatgcaacaaaatataggttggaacctggaatttgctttaattattgcctattcttaatttctaatcagtttatatgagaaaatatggaattctttgtaattaaagttgaaacaatcaaagcatccaaccagggatgaatccacttggtgcaagtgcagaggctgttgcagtgtcctcaactgttacactactagggttgtatccaatttgcagtgaattgttgcagtgtaaaggctcaaaaaatccctctgactgaggaggaggtggtggatggttgtatggaatgctttgctcccccgtttcccatgatgatctcattgatggaccactttcatccaacttcattctcaagtttctgttggtttccagtaggacttcttcctttgtttgcagttcagaaagttggtcaatcatcaactgcatctttgtggacctgat

SEQ ID NO: 13591 - DNA, 415 bp, Gossypium hirsutum
  Clone ID: LIB3829-012-Q6-N6-C11
aacataagtaatcaatgaacctgaacagagatgtttcagctattaacaacttaaggcctatgtgctaaccatttttttcttaggaaatcagaccacttaaggccctttgctactcctaaacttaaaatcttcacaatttcttttttgcttgtttctatttacaaaataaacagggaaacttaaaacaccacatgcaatgcgtgattgtctagaatctaatgaatcacccatggtgtatgcaaatgggaggagaagccatcggattcctaattgagatcgatatcaacccgctcggggtttcctctttctgtctgattgttagctaactctatgcctagctgacctttgtctcccgcaccaaatgcataaagcttcccggactcggtgagtgcaaatgtatgagcattccagtata

SEQ ID NO: 13592 - DNA, 309 bp, Gossypium hirsutum
  Clone ID: LIB3829-012-Q6-N6-C12
aaatccaaaacttcaattagttttggcttttaaagggggcccaaacggggcataaccaggtgatagggcgggggctagcctacccaaggggtccttaacaggccgctcatgggttaaaggacaaaatgggttcaaaaaactaaggccccctaggggccaaaagaaaaagccttgggtatattaccccgcaggagggaccactagctttccttgaaagacggcctacttcgatcccaatatgcataaaaggataaggccctaagagggggaattaaaaaccccaaaggggcttacccaaaaacaatctca

SEQ ID NO: 13593 - DNA, 541 bp, Gossypium hirsutum
  Clone ID: LIB3829-012-Q6-N6-C7
acaagaatgggtgtcagacacgagtactcggagcaatataggtaatcacatccggattagagtctatggggcactatggtaaggtttatgttaggagttaagatgagctgtttatcagggttggcatttcaaagaagtgatcctatctatattttccctgagatacatttcaaaattcaaacaacgggtatcaaaatctaaagtcaaaacctgggtgctgaaccataactgagtagcttttggtgcctttaggaaggatactgagattccaacttctttaaaacagaaccaataacaccccagttgaaaccgcgatactgaagccaccgaacaatccttgacttccgtgtctctttgggaacatctcgacctcgaagccattgcttcgaggcctgaattaataggtgatccattgaaagctttgaaaagccaagtcgggattcctgatcatcatttgagtcactatcccgaccctcgaaaactagttttaacgcattttctgcatcagcttcacttatacccttcttgaacaatgcttgct

SEQ ID NO: 13594 - DNA, 534 bp, Gossypium hirsutum
  Clone ID: LIB3829-012-Q6-N6-C8
agagactgaaaaaaatctacaagctatttcatgggaatgaacgaaaagcatttacacacagtagcaaacttcaaagaaattaagaaaggacttttaattcacaataccaagttattcagcagccaaggagaaaccctaatcatggatttatctaaacaacaacaaaagaaaaactcctaaaaccttccaaaatatattcaataaagcccatccttaaaccacatacattaggacaactcggtaaaagatagacacagagtcctgcaagcaacgaccgaaacaaccaaagctgccaaatatcagagaagacatcataagctaatgtagaagtttttcataccttgatcgtcgagtaattcagtcttagacatccttaaggcaaaatgaggtcaacagctttgtatatgaacatcatggtgcaataggctcctgtacaaagtccagctgtccttgctctccgatcattggccattgatcaatgtcaggctgactttctcctgaatcaactgtaggaaccgcctcctctagttgaat

SEQ ID NO: 13595 - DNA, 541 bp, Gossypium hirsutum
  Clone ID: LIB3829-012-Q6-N6-C9
aatcaaaagacaaaccattgaccatatttatcaaagtataaaaccaaacaggaaaaagccacaaaagccactgcagaaagtgagcttagctagacaaccgttcataagttcagataacatacggaacacctaagagtgttgcaacccaaaagtctaaagacatgaaaaagcagcataaatagtttttggtagccaaaatccaaaagccctatacaaaaacatggttcaacggttttcagcagaagaacatggagctgctgacattatccttcaacctgggaagctgaggtacagaaatggctcccggagcagtcaccccaccatggctcgatgatgtctctgaagcatcctcaaacttcataaattgccccaactgtgaagctgccaaatgagcgtagcaaataggggccacaacagatatggctgtggtgctcctttgatacacgtaggatagagaatgaacaagctcctgcagatcatcagctgaaaacccaacctggtctaagagaacatgatagtgggtcggccttgtggtccctat

SEQ ID NO: 13596 - DNA, 525 bp, Gossypium hirsutum
  unsure (1)..(525): unsure at all n locations; Clone ID: LIB3829-012-Q6-N6-D10
caagaacacactgatgttaaccgggtcaataactagcaatcgtcaatgtaanattcaccaacatgaaaaaaanagcacatcattgactcaaggtcactaacattgaaacctctattaatagcataatctatgaagctatagagtggcgccacacagtcaccatacttttcaaagccatccaattcgttcttagccttgcttcgaagctcttccataatctccatcgacttctcgatcccatacaacctcacataacctttacctttcttttcctgcccctcggttccttctttttctgtcgattttgacagcaaaacatcattcaccacttcatacaatacacccacagctctcccgtacctcctcaacctttctatctcgtcatctttggcaccagccaacaatcccccacacaccgcagagcattcacccattgcaccgtattttttctcttggataaaatcaacagtgttgccgcctttaaggtctaggaactgcccagcagccatgccagaagaccccaca

SEQ ID NO: 13597 - DNA, 499 bp, Gossypium hirsutum
  Clone ID: LIB3829-012-Q6-N6-D11
ttttttttttttttttttttttttttttttttttttttttttttctttttttttttttttttttttttttttttttttttttttttttttttttttttaaaaaagggccaaaacccaaaaattaatggggaccccccccttttttttccccatttaaaagggaaaggggggcccagggaaaaaaattggggccagggaaaaggggggggggaaaccctttggggttaaaaaaaacccaaaagggggggaaaaattaccagaaaaacaaacaaaaaaaaaaccttgggggaaagaaaaaaaaaaaattttttggtcaaaagggaaagggggaaaaggccaagggccttggggaggggggggacaaaaaaccggacccaaaaaagccctaaaaaatttgggaactaagggggctcgggaacaaaaaaccaaaatttccaccgcggggggggtccgaaaaacaaaaaaggggggccaactggaaggccggccattggggggc

SEQ ID NO: 13598 - DNA, 531 bp, Gossypium hirsutum
  Clone ID: LIB3829-012-Q6-N6-D12
acataaaattctgatagaatggccataaactccttgggaggaaaaaaaatgttggaaaactattggcaacatggtgagagaaggggcatgagctgtagtaatttaacagcattgaatctaggctgatataatcccttatacacagtgagatagtacgttcttaaaggcatcaggcttgctattgatatactacacccatcatttcctgatggacaggagttcaaaacttcgaagagggtgatcatcacggcttcctctaacagtggtggcacgactagatgttttggcctccaaggcatgttggattctttgtgtggtagacatgcgaccaccggttgatgatagtcggttttggggaatgtcattgggttcaccggatgaactgggcctgcttgttactaccgctcttcttgaagtgctaccatatcgagaagaactgcgtcttttacctgaatcaggatgcgcatgctttgacaaagttgcatcctcaacagccttgtttttagaatgatcatgacgagggctagtact

SEQ ID NO: 13599 - DNA, 281 bp, Gossypium hirsutum
  Clone ID: LIB3829-012-Q6-N6-D7
aaagggaaaaaaaaaaaaaaacccccatttccttaaaataacaataccctgcaaagggggaagggagagagggtcattgaccaaacccgatatataacaaaaagggcccccatccatcctttcctttcaccaaatacaggaattaaaaattaaagaaagcaaaaaaagaaaagggacccctaacaaggagggggggcaaaaaaccttggttttgccccccccaagtttttttatgcaaggaaaaccccctcccaaaatcatcaaaaacccaacaatttaac

SEQ ID NO: 13600 - DNA, 513 bp, Gossypium hirsutum
  Clone ID: LIB3829-012-Q6-N6-D8
agaacaaaatgcatgcttcatttgtaggacatgaggggatagaaattcataatcaaaatagatgacaaacgccacacggttttgccttcatttgtagagcatgaagttattcgaatattatcacaatagcacaacagtcaaacaccataatcattggggaagcgtcaaagcgcttcacttgagcagccccttaaacttcaaatattccacggtttggtcgtaaatttcctcgatcccatacttaaagctgaatccttcgctaataagcttctctgaggaaatgatcaacttgggtttggaggggaaatctccaaaatcggtagggactttgaagtcagggtatcttttgttgaggaactttgctagttctggcacactggtattgacagcactgcatatatatcgacccgatgcaaattctttttcagccaaaaaaacatgggctcggcattcgtcttccacatgtgtgatagagatcgaacctgacagcatctgcattcctttcaaagcatt

SEQ ID NO: 13601 - DNA, 533 bp, Gossypium hirsutum
  Clone ID: LIB3829-012-Q6-N6-D9
gttcaagtgaaattaatttatgttattaaaaatttcaccaaattctataaaaatcttccattcaaccaaataaaaataaaaggcaaaacaaattaccaagtggatttgggaaatgaaggttgctaagaatatcttagtgcctgcaaattgagataaccagacagcctaataagaactattactttcacctctcaactcacacatttttttaaatatatatatgtggatactaataccttctgaaatggtcaattttgttgtgggagttggggtttactgcaacagttgttcatgaaatctttgatctgcaatattaactggccagattcttgcaattctgggaatatgtagaaggcgtgaatcatggttggaaattccatcaatgttgcttctttcccgcatgcttttaaccattcatagtacctcttttgccaatctttcaacgggtcaaatccacccaccaccaccatcgtcgccggaaaatccaccccggatatatcatcagcgttcggtccgcttacattcacggcttt

SEQ ID NO: 13602 - DNA, 462 bp, Gossypium hirsutum
  Clone ID: LIB3829-012-Q6-N6-E10
gggaaaacaaaacacaatcttttggtggaatccaagggcgtagtcccccccccatggtctaacaaggccgggaaaaataaaccccccaaaaaggggaagggggtcccaaaggggctttttcttggccggccctaaatttgaaaccccccaaagagaattattattattattattattattattattatgaaaaacccaaaaaaatccccccgggaaaaccccccccttcctttggtttaccccccccctgccaaaggaacccattcaccccgcttgggggccttaaaagcggaaaacatttccagggaacgggggttttcgcgacgggcaagggtggaaacctgcttccaaaaaccataccccccccccaatgttaaaagcccctcccaatatatctgccctggggatttctcccggacccccgacccgtgggccgacccacccctccccggacccctgggt

SEQ ID NO: 13603 - DNA, 525 bp, Gossypium hirsutum
  Clone ID: LIB3829-012-Q6-N6-E11
gaggacaagcatgcaactaacttgagatgatccaaaagttacatttatgttttagaatatccaacaatcagattccaaactcttttttttttatgggataagagctcaagtatacaaatgcagaagtcaatatagaagataaagagagaaactgatcacagatttttctcaacctggattatttgcgagcttcagttttcttctgttctctcgcggtcttctcttcctctctcttcttagcagcttctgccctttgttgtcgtatcagggctaagcgctctaaatcttttcttgcttgttcagttttcccttgttcctgcagcttcatatatcgttcatgtgctttttgcttttctatttcctctctttcacgccttgatagttcagttgttcttcccatatcaacatctttagctttgacattcttttgtttggccaaatttggattctcaatctcaataagcccttgagtaccctttcgtttctcgggttcttcttctacttcctcttcagactcttcttctt

SEQ ID NO: 13604 - DNA, 557 bp, Gossypium hirsutum
  Clone ID: LIB3829-012-Q6-N6-E12
gaagggggtgcaggaagtacacatataatgaagtgtgtcctcacaaggtttcagatttaacaaaacagatgttaaaaatgatgatacaacgacacagattaaactagttttgatcgtgtgaggtttttgaagaactctgcaaagaatgtggcggagaaacaacctgttcggacgaatcatctgaactcttggtctccaagttttgatgtttcttgctcgcagggtcggtgttccgtgcccaatcaggaacccttgatggtagaggagcttctgataaattgggtggtggtgtcattctttgatatgttaggagagacgtatcaaacatggataaaggatagcttagagcataattataaggatatcccttataaggatgatcgaatctgcaagttggcccgtgtttgcagagtccatacatagtgtaactagaacatacaggttgtccaggtcttgaaggaagcccgagtgggccaacactactcatggctgagatagaaatcctttccttcggatgatggtacttgcaatcagatccatatttgcaagtaccggtg

SEQ ID NO: 13605 - DNA, 510 bp, Gossypium hirsutum
  Clone ID: LIB3829-012-Q6-N6-E7
ggttctcacaaaacaaaaactctatttacatggaaacaggcgatgtaaaccatgtacataaaacccatatacaaagaaaatgatactggaagtgactggatctaatagagattaaaccatgtgcattaataccatccgcaaagtttcaactgtttggaaaatagtggaggcctaagtggtgggctaggcagcttaaatgtctggtctttcaaaagaactaaacaaactgaaagtattgaagacataaaaggagtattttgagtatatatacataataaagtcgggggttctttcatcccctcgtaaataactccttgaagtgcaacacaaagtgaaaaacagggatgtgaagagttcgtaaaccaaaaaatctttcaacgcaagggggttgaatgaacttgaaaaccattgccatcttgacaatattcattcccacgcaactgagatcatagaattggcaagccccgactcctcaaatgttaatttgctatcataatccagagatttcga

SEQ ID NO: 13606 - DNA, 534 bp, Gossypium hirsutum
  Clone ID: LIB3829-012-Q6-N6-E8
caatgaacggtgcataagctatatccacctgaagatgacacagatatatttatttatgtacacatacatacatgcatacatattacattggaaaggaagtcaatgtttaacaatctactttctgaaacttgatgaaaactaggcgcatatcaataactgaagagcaatgatacagttttagtcacatatcagactaaactgcccaaggaagaaaggtccatcctcaaacttggtaagagctgtttcgatgttgtcaaatgcaatgcctgcttcagtgccctctcctttgaatgaagaagtcactgttttatagaatgagtcaatgcaggataataactcatctgcaaactgtttctttgcagggtcatcggggaaaagtgaaggcccttcgaagtggctgtctatatacttgatcaagtctagactctctcctttcacttcattattgtgttccaatgctggcaccttacagtttcgtgtaatccaaacacgctgagcgtaggggcatgtgtaagcccacgcgtccgcggacgc

SEQ ID NO: 13607 - DNA, 527 bp, Gossypium hirsutum
  Clone ID: LIB3829-012-Q6-N6-E9
gggtataaaaagatataatattcttttgtggttgtaagcgtgttaaaagaagcaatgcggaaagttgaaacagtttaaaataaaacttaaaagaatgaactgaattggatgcaaaataaatcttaaatttatctataatttataatctataatatctattatattaagatgattgtaaaattaatatttaacctgattggtttaaaaaaataaataaatatcaaatttatatatgaattttggttaaatatacattttgatacattgatttgatgcaattatgctcataaaatttgaattttgattcataagtatacaaaaaacttcgattttgattcaactgtccacattttaataaataaatatataaatttattttcatattgaattaatataattatttatatatgcaatatatcaaagtaaaatgatgctaatttgataatgttgtcaataatttgtaaaaattaaatcaaattaaaattcatgtgtaaaattacacaaaatcaaagtttacctataacatt

SEQ ID NO: 13608 - DNA, 497 bp, Gossypium hirsutum
  Clone ID: LIB3829-012-Q6-N6-F10
aaaacttggatttttctatgattatattaatattagccatttgattaagaaaaaaaagtaagagttacattaagaaccaccccatagctacttaaatggagaatggaattcctcttacaaaattcgaaaaaacaatcctaatggtctaagttctaattagttctaaaaccctaaaaaaaccaaatctttatatacatgtatatatatatagagcttgatagcatcctcctcttcttcttgcttggttggttggatgccattaaatcctccattaaaaatacttaagaatcagtgtattcacgccagcaaataagcatgataacacaacgcctcatgatgtaaaaccgagccctttgttctttgaatagcctagcacatttcctagtgaaagcacatctttttgtttttgatgatgatggtggtgatgttgatgatgatgatggggtgggttttgatcatgaatgatgacgaatttgaagttgaagatgatgataaag

SEQ ID NO: 13609 - DNA, 531 bp, Gossypium hirsutum
  Clone ID: LIB3829-012-Q6-N6-F11
gaacaaaaacagagcaaacaggtagatattagggtctagtccacgaaataatgcgtacaaagaaacagtcaacaatccaacaaaaggtagtaacataaaaacatagatgccctattgatataaatagagatcttagcaaacttatctgccctgttcccctttttacccattttttatccttacttggccatcatgactttgacgaactcctcatagttgatctgcccatcaccatcaacatcagcttcacggatcatctcatcaacttcctcatctgtaagcttctcaccgagatttgtcatgacatggcgaagctcagcagcagatatgaaaccattctggtccttgtcaaacaccctgaaagcctctttaagttcttcctcggaatcagtatccttcatcttccttgccattaggttaaggaattcaggaaaatcaatggtcccatttccatcagcatcaacttcattgatcatatcttggagttctgcctcagtagggttctgaccaagtgaccgcatcacagtcccc

SEQ ID NO: 13610 - DNA, 535 bp, Gossypium hirsutum
  unsure (1)..(535): unsure at all n locations; Clone ID: LIB3829-012-Q6-N6-F12
atcaaattagcattctttgaaggaattcaactaaaattgacacggnaaaaagcaaacacacaatccgtatgcagatgacagtctcaaccaaatgaacacacatcaaaattggtctaaaaaactgcaagtaccaaactacaaagataaccaaaatcaaaaggctctgatactatcaaatgcaatctcatttcttcttggcagcagatttggtgaccttagcacccgttgggtccttcttctcaacgctcttgatgacaccaacagccacagtctgacgcatgtccctgacagcaaaccgtccaagtggtgggtactcagagaaagtctccacaaccataggcttggtgggaaccatctttatcatccctgcatcaccattcttcaagaacttgggctccttctcaagctcctttccagatcgcctgtcgatcttggtcagcaattcggaaaatttcacagcaatgtgggaggtatggcagtcaaggactggggcatatccgtttccaatctgcccagggtggttcatgatgatgac

SEQ ID NO: 13611 - DNA, 327 bp, Gossypium hirsutum
  Clone ID: LIB3829-012-Q6-N6-F7
gccaaaaaaaaaatagaagatggtaaaattacataaatacaaaatttgagggaaaacagtcacaatcggtttacaaaacagtactgtagtagccaattttggcccaagcaaataaacaaataaacaaaacccaaattccaaaataaaagtcccaaataagcaactccattttacaaaatctaaagcccactactaaactagcccaaataatagcccaacaacttaaagttttcagcagcaaccctagcctccttcaccctcaaccgccgcacgtttcctctgccacgtgcaccaccgccgatcggggcaccaaccaccagccttccg

SEQ ID NO: 13612 - DNA, 502 bp, Gossypium hirsutum
  Clone ID: LIB3829-012-Q6-N6-F8
gactaaaaaaaggctttcatagttttatcagcatcaatgttccattttctatcatatctataacagttgataccagaaatctccactcctagtctgattaccatttttacaactgatactgctacacaatttcttggggcatcttgcatacaattgacccgaacaattgatgaactaacggtgactaccagcataatgacaaaacgacaaatagcagaagcgaggctgtctagcagtttggtggcctggagtactttggaggcttaaacggacaccgttcattcatatgggggtatgggtccatggaattaaatccaggcagttccattcggtacttccccaaaatctgacagtaaggaagctttacattgtctgcatcattgcaccactttggcagccggctaaaattattctcgaaaaaccttagagtatacgcatcttttatcgtaaactcggtgacttgaatagagtcagcaatgggatcaaaaagtcctgcctcctt

SEQ ID NO: 13613 - DNA, 528 bp, Gossypium hirsutum
  unsure (1)..(528): unsure at all n locations; Clone ID: LIB3829-012-Q6-N6-F9
gaatctatctctgctccctttatattcaacaaaaaaaaaaaaactttcaggtttatacgttcaggttcttaaaaagttgtaagcattcattaaataacactttnacaagtgacagcattgaaaggaattacatcgattaaacaaaatttctcatcctgcatggatccaacaccttcagtgtctgcataaaattttctaggtatgtctagttctcatcactcatcaacttcaacacctgacattggaattcctccactagttttgctcctttcccttaacataatccacaccaaagtcataattatcatcatcatcatccatagcatcatcccctgaggttaatttatttttggcttttttccttctcttattctcagctcttttcatctttgtgttcagcatgccttctactgcatacagcttctcattttgcctgcttgtggcagattttgactttgccttttcagcatcttcttcttcagaagccatctgctcatcattaccaccattaccagatgtatcttcttg

SEQ ID NO: 13614 - DNA, 514 bp, Gossypium hirsutum
  Clone ID: LIB3829-012-Q6-N6-G10
gaccagataaacagctactgaacattgtgttataacaatgtaaaataatttacatacggcgaactagttgaaaataagacagaagaagaaaagaaaaggccagaattaaagatgtcactccattatattgattgaaaactggatatacctcattgtaattttatggtgggcgggggttttcactgtcaaaggtgtttacttgatctgattttagacttcctcaacgcttctttaagtacttcaccaattctctctgccatgtgatgttctagaaatctttctttcaccctttcgtaccctctctttcctattgtaagcctcctctctacatgcgtagctagtttcacaatatgtttcgccagagttgtcaccccttctttcccagcagggtgcaataaacctgttgtgccgttcactactatttccgttgtgcccccggcagctgttcccagcacaggcaactgaaatgccattgcttcgattgttatccgtccaaagcattctccccgtccct

SEQ ID NO: 13615 - DNA, 268 bp, Gossypium hirsutum
  Clone ID: LIB3829-012-Q6-N6-G12
gataaaatataaaaaattctaatataatatatataaactctgacgtaagaataattttagtgtgcatcggctacaaaactatgcagtatgaatggcattcttcaccgtctaagtccgggtacgtaggctgaaaaacaaagtcaagcataaaataacttgatcactcatcttcaatacagagttcaaggtttaatgataacgcataaaaagcaaaaaaagatacacggccgatggccattcagtccatacaaatgccttcaaaatcaac

SEQ ID NO: 13616 - DNA, 513 bp, Gossypium hirsutum
  Clone ID: LIB3829-012-Q6-N6-G7
gtacaagaagcagctttatacagctactaaataagttaaactactagtagtagtacaataatgttccaaacaatacatacaagaatcggagttcttggtcctaatcttttaactaaattgtaaacaattgaacaacatatcggatatcggaaacaccttgttaaaaaaatggcattatccaaaacgtttgcttcggatgcaagcaagtttcaagaccgtcgagacaacaatggctccaattgagggtcatcctgtgttgaatccgaacgcatttgactattacccgattctagctcagaaactgatatatcctcccttcgctgtttcatttttctctgaaagaaacttgatttttcatgtgaaggatctgatgctttcggagacatggtctgaacatgctggaggcaaacttggactgcatcatgcactcttacaaagtaccattccttaccaatcatctcaacgacaccggctttcgataaggtcaacaggacctcctggtttgggtttgag

SEQ ID NO: 13617 - DNA, 390 bp, Gossypium hirsutum
  Clone ID: LIB3829-012-Q6-N6-G8
gccaaatgcttgaccaatatcgatatatttaaaagcaaaaacgaatattccacgtattaagagctaagtctatctatgctcttgaattgtcgcaaacacctcaaaggacaaaaagtacctgagcaaaagaaaaataaaattaggggcatcatgttgaggaaataaaacacagctcgtgcccgaaagaaaacggagcaaaatgctcttttcttccgttttcttcttcaggaagcagccaaaacatttgtgtcggaacatataccggggtaactttagctgcaaactgcttcaattgcaagtctcttagtagtaccaggacacaagcccttatcgaagttctcttctgttagttctatggcacactcattcttacctaggcagaccttttcg

SEQ ID NO: 13618 - DNA, 539 bp, Gossypium hirsutum
  Clone ID: LIB3829-012-Q6-N6-G9
aacaaaatggtgaaacccttggaataaatcccaaagcccttgctggtaatattaaaatcttgcccttcctacatcatgtttaaacatgtcatgcagccaacatcaagggaaagcaaatcaaaggttatagtatagggtactgattaagcctttaagcttagaagcagcagccaagccactaagaattgcaccttcaacatttggactcaaacagaaatccccacagattgccagtttcttcttttcactccacacacatttctcttccttggctatgcttgctgctgggaaggcacttccccatctatgagctttcatgaaaaatggctgtggaatactgagacctgtgctgaggaattcttggagcatctcattccccactttcgataatgtttctttcgaaggtttctcaaggccagattgagcaatcacatccttggcatactccgttgttgaatgcaatacccatcgttcacttgtggaagagcgccctggcttgctgctttcacattgtgcacggcttaaaaccttagaattgg

SEQ ID NO: 13619 - DNA, 527 bp, Gossypium hirsutum
  Clone ID: LIB3829-012-Q6-N6-H10
cgtaataaatcaaagttcggttttgcattgcaaaatttccaaattactctcatacatatatgataaaatccaaggagataatcacccagcaaaagagatgaattgagcttacaagccaaaacaatgcttctcaacatcccaaaaggaggaaaaaaaaaaccagaggacctactaggttaacactgctggcgggtggtaaaagtcccacctctgccatctcctcctgttttaacaaacaacagaaggaaacgtgacccttaatacttttttttttaaaaaggtaccttaattaggacacctaccccataataaaactaaaaacccaaaatgataaaagggctactttaaaataagcccttcacatttttgagtgacccgaaagtcccactatagggccctatagatagagtataatatgctagctatactaaaagtcaagctagttaaatactacttcggatgcttggtatatttatatagtaattattaattaaaacttcaaaagcctaagatgataatgtgttcct

SEQ ID NO: 13620 - DNA, 470 bp, Gossypium hirsutum
  Clone ID: LIB3829-012-Q6-N6-H12
cactcaattaggatctcatttctttcctaattagtatgtgttgggcccaattttagctaggggcccaataaacaaattaaacaaaaacaccgaaacagtccaatgtccatttacaaacctataccactacccataccagcccaaacattaaacgggcccaatctaaaattacaacccacaccaaagaccctagcccaaattttcagcccaaaagcttaaacaatttcagctaaagaaaccctaagcagacccttgtgtcgtagccaacagcgagcttcccccgcacgtcgcgtgctttctctgtgtcgtacgctactctactacgctacatcagtgatacacccacgcacgtacctgggtccactccgcggatcggcgtcggaggtggaggcgcaaaagtgccgatgaccctcgtgcacagcctctcaggacagggtcaaaacccttgaaacgaattgggatttgttttg

SEQ ID NO: 13621 - DNA, 518 bp, Gossypium hirsutum
  Clone ID: LIB3829-012-Q6-N6-H7
gaaaaagctttcaacttttctattcaccagaaagaataacataattacattcaaaccccatcctgcaaaacatagtacataattacaccgtcaagcaccatggagcaagcgacctcagtcactaatcgaacaagctgcagtgtggtgaatcactagcggaggaccaaagtgacagcggtgcacagcaaactgaggatcggggctgtcggagagaagtcatgagggccaagccccatgttgtgagtgggaaggggaaaagatgaaataacgagaggcagcaaggtcctaactttatttttctttccttttatattatgacgatccctggcaagtacggtggtatgtactgcaattgctagcaactttcttgtcacccatgcacggaccatattgtttacccttgccacaacttggagtttttttagcgttgttagtgaatgcaatcgttgattttccgttgctaccggcgagcactcggcggatgtaggaatccgtcaacatctccagctccatatcgt

SEQ ID NO: 13622 - DNA, 524 bp, Gossypium hirsutum
  unsure (1)..(524): unsure at all n locations; Clone ID: LIB3829-012-Q6-N6-H8
acttggngaaatgatccaaatcctgtgttatagaatgatgtaaaagaaacaaagtcaaatgaaagaatagaagcaatctcccaaaattacatctttagagaagttcttgccatcactagagcaccctcatcagtttgatttccaccgataaacccactcatgtggacaaagacacagccggaaattcttgtctcctttgagagctcatcgtccctcaaacctcgccactgtgctgggaggggcttccggctctcaaaactatcaggagatactgatactgcctgcactcgccattgtttgccccgttcatcctcataaagaacatatttaataagaggctcaaccttcagctctgcctcaagctcaaataagtgaagcttccaagggcaaaaccttttcaaaaccataatttcaccactaggatctatgtcaaatctctccgcaatgcactccattacaattgaccttgctggtagccatgatcttgcatgaaattggacactctctaagaactcactaccagc

SEQ ID NO: 13623 - DNA, 470 bp, Gossypium hirsutum
  unsure (1)..(470): unsure at all n locations; Clone ID: LIB3829-013-Q6-K6-A10
gagatttaaaggcctgggaaggtgggttagatgatttgttccaaagtaatggttgcaagctactatttaatgaatttattgtttctttgagttatattgaatatttttttttttttttcatnncttctcaattatgtgggggggggggtttttttttttttttgagnnacctttggatgtgacaattgtggttggcaacagatncgacccccctcaacataatgctaatgcgctcaacaaaatatttcaaatcctttggacattcaagagttgaaatttaccggagattataaagcgatctgaagttggcaaagactcgtgaaacattggaggatcaagctgagataaagagattgggagaaactatttttagaagtcaatctgaagttgggcaggttttgtgaagtgtaagcaactaaaggaattggtgtttgtcggttttttggttcaagtaataggcatggtaagaa

SEQ ID NO: 13624 - DNA, 576 bp, Gossypium hirsutum
  unsure (1)..(576): unsure at all n locations; Clone ID: LIB3829-013-Q6-K6-A11
gtgttcnggggggaggntaaacataacgatttaacccaaaagacgccatttgcagttattttgtgaaacttatttattccttgaaattactgccagtagattcagatttaaatgtgcttatgcaattgctttagtcaaagatcagattttttttttaaagcgactcgagggcgtttttgtgtggagatacacttttttttcagggnattttttgcccttaaaaacctctacgtatatactaactatgcattcttaatctaaagtgtctctttcgtgttccctgcaggtttgttttgcaaaagctaatatggattcttcatatgtataccgattgcatgattcattatttttggcaaaaaaattaaaattatacaaaggatcttaaagcagcacaagatatttgttttcttcgtttgaaaatgtttttgcatggagctgagctcacatgttcttaaagcaggcttttggtgtccattcatttacaggctctagagatccagaaagttaattgggttcagtgcagggcataatattttgctattttaaaatgtgactgggcctgcgtgggactaatgc

SEQ ID NO: 13625 - DNA, 339 bp, Gossypium hirsutum
  Clone ID: LIB3829-013-Q6-K6-A12
cccggtcgacccagcttttgcaccactaacaggtggcttccccatgtttaaattgtcatcttcttgtaatcctccccaaatcctcccctgcttgtcctaattgcaagtatgtccactctttccctgcattgcaacctaccaagtatcccaataccttaagtctcttaaactaacacactcgtgtcaaactcgggtttagctcagttgtttcatataactatgacccgttttcgttttcctcgagttatgacttcttaagaaaatcatttggaagaacttgtaatgttttgttcaatgtactcaataacagtaaatataatctttcctttttcatgtgat

SEQ ID NO: 13626 - DNA, 607 bp, Gossypium hirsutum
  unsure (1)..(607): unsure at all n locations; Clone ID: LIB3829-013-Q6-K6-A7
tnctggtanaagttcacatcaaccttgttgtcattggccatgtcgactctggcaagtcgaccactactggtcatttgatctacaagctaggtggtattgacaagcgtgtgattgagaggttcgagaaggaggctgctgaaatgaacaaaaggtcattcaagtatgcttgggtgcttgacaagcttaaggctgatcgtgaacgtggtatcaccattgatattgccctgtggaagtttgagaccaccaaatactattgcaccgttattgatgcacctggacaccgtgactttatcaagaacatgattaccggtacctcacaggctgactgtgctgttctcattattgactcaaccactggtggttttgaagctggtatctttaaagatggtcagactcgtgagcatgctttgcttgcttttaccctcggtgttaggcagatgatttgctgctgcaacaagatggatgcaacaaccccaaagtactcaaaggcaaggttttgatgaaattgtcaaggaagtcttttcttatcttaagaaagttgggtacaacccctgagaaaatcccgtttgttccaatctccggtttttgagggtgacaacatggattg

SEQ ID NO: 13627 - DNA, 570 bp, Gossypium hirsutum
  unsure (1)..(570): unsure at all n locations; Clone ID: LIB3829-013-Q6-K6-A8
tttcggcaaatcgtaagggnacagnaaaaaatcagagaaattctcacttgtcttgctaccaaagaaaattcccaaaaactccgatcgacgatgtccggtatggaacgattgcacaggatgttcgccggcgctggtggtgcgttgggtcacccgccgccggattcgccgactctcgattcgtcggagcaggtctacatctcctctttggccctcctcaaaatgctcaagcacggaagagctggagttcccatggaagttatgggtttgatgttgggagagtttgtcgatgagtacaccgtacgtgttgtggatgtctttgcgatgccacagagtggtactggtgtcagtgttgaagctgtggatcatgttttccaaacaaatatgcttgatatgctcaaacaaactggaagaccagagatggtggtgggttggtaccattcacatcctggatttggctgctggctttctggtgttgacataaacacacagcagagttttgaagctttgaaccaaagggctgtttcagtggtggtggacccaattcaaagcgttaaagggaaagtggtgatc

SEQ ID NO: 13628 - DNA, 591 bp, Gossypium hirsutum
  unsure (1)..(591): unsure at all n locations; Clone ID: LIB3829-013-Q6-K6-A9
cccggtcgacccagcttccgtgttggcanaaaatgatatgctgaacttgcattggcnagagtgatctttgttataacctcagctgtaaaggatgtatgtgggaagctaccaacagagcgcctttttctggataaatacggaaggatatgcttgactttggatgcaattatttggaagggatatctggagaacacagataaagacaggatcaggagattagtacgtttaaaatctccaaccgagttttaggctgagaacaccctactgtcacaacccatttggaggcagtagattcagggtcctgtactcaactgaaaggcatggtatatcctctgctgtagtatgtatttactatgtgagtattgtgtaatatcatgcttcctattctgcattacagatatttttcagttctgggttggagcttgtggaactgttagatggacattgtgatatcctcgcattgataggataccagtgattttttttattatttgaagttgtgacttaagatcagtttgaagacataattgtactttattgttattttcatgaccttactaacttgagaatatatataacacaaataatttg

SEQ ID NO: 13629 - DNA, 590 bp, Gossypium hirsutum
  unsure (1)..(590): unsure at all n locations; Clone ID: LIB3829-013-Q6-K6-B10
gcgttcggccacgcccttccatgttattgttttgtnntgagtttgaccaattcaagggnnatgctgaagatgcaattaggggtcgagatggttacaactttgatggttgtcgtttgagggttgagcttgctcatggtggcagaggacaatcctcaagtgatcgtcggggtggatatggagggggtgcagctaaatttggcgtctcacgacattctgaatatcgagttattgtccgtgggctcccctcttctgcttcctggcaagatttgaaggatcacatgcgaaaagctggtgatgtgtgttttgccgaaatttcgcgtgacagtgatgaatgttgcaatgtcatattcttatctccttatgagggcacacttatatggatgttttttgatgttcaatctggctgatgcttagagttaaaagatcaattgttcctgccacttcccctttctatgcctgaacttttggtattgttgattataccaattatgatgacatgaaatatgccatccgcaaacttgatgacaccgagtttagaaatccttgggcaagggcttatattcgggtgaagagatatgagagcagtccat

SEQ ID NO: 13630 - DNA, 577 bp, Gossypium hirsutum
  Clone ID: LIB3829-013-Q6-K6-B11
tcaagtttgggttttctttctttctcttttgtatgcttttttgattgttcaaagaagggtatggtgcgctccaaagcctctctacttgatcttgatcatgatgatcatcatcaattgatggacggtcctgatggggatgttggtgctgttcccccatcttcttctgatgtctcttgctcgatttgccttgatttggtctccgatactggaggtagatccagggctaagcttctatgtggtcatcaattccatctagattgcattggttcggcctttaatatgaagggggcgatgcaatgcccgaattgccgaaaggtagaaaaaggtcagtggttgtatgcgaatggatccaaccgatcgcttcctgagctaaccatggaggactggaatcttgatgatgattattatgagccagtttattctgaaatgcaatttagagctcagtggtgtccatatggcgaattcacaagaatcggttcatcatctgaggaagttgaatctccttcgactacatctgcagctctgagatcctctaatggtgaacctgatgcatcaactgtacccagattgtttggac

SEQ ID NO: 13631 - DNA, 585 bp, Gossypium hirsutum
  unsure (1)..(585): unsure at all n locations; Clone ID: LIB3829-013-Q6-K6-B12
taccggtaccgccttcccggtcgcccagcgttcgtcacttccgnanattttatgacctgaaaaactgaatcacagttagaatcccataaaaaacctanagttgcgtgggttgaactgaaagcgtgagcactgatgaaagtgaaggaaaagttggctgaggagcttgaagagaatgctgttcaaaatagtgcactacatttggctgctttggagcaaaaaagggctgatgaaaatgtaatgaaattggctgaagatcagaagaggcagaaggaggaacttcacaacaggataattcagcttgagaaaaaattagatcaaaaacaggcattggaactggaaattgagcaactgcgaggatcactgaatgtaattaggcacatgggagatgaagatgatatagaagttcttgagaaagtggatgcaagtcttaaagagttgagagaaaaagaggcagagcttgaagacttagaagcattaaaccaaactcttattgtaagagagcgcaagagcaatgatgaactgcaggatgctcgcaaagaattgattaatggattaaaagaaatatccacccgttcacaaattggt

SEQ ID NO: 13632 - DNA, 603 bp, Gossypium hirsutum
  unsure (1)..(603): unsure at all n locations; Clone ID: LIB3829-013-Q6-K6-B7
tcgccagtcactactgtggngacaaccttagctatggagtctccatcaggaatcgcccctcatagtgtcaatgtaggcacaccttcagcacagccatctagtgagacagtgaaacggaaaagaggaaggccacgaaagtatggtcctgatgggactgtttcgttggcgctgactcctgcatcagctcctcatcccgtgaccacaacgccgggccaaaaacgaggaagagggcggccaccgggtaccggaaggaagcaacagttagcttcccttggtgactggctgtccggttcagctgggatgggttttactccacacgtcatcaccgttgcagtaggagaagacattgcaacgaagataatgtcattttcgcagcaagggcctagagcagtatgcattttgtcagccaacggggctgtctctactgtaactcttcttcagccatcatcttcgggtggcactgttacatatgaggggcgattcgagatattatgtctatcaggctcttacctgctgatcagcaacaatggctcttgcagccgaagtggtgctcttagtgtttcccttgccactcctgatggccgcgtcattggtggaggtgtc

SEQ ID NO: 13633 - DNA, 587 bp, Gossypium hirsutum
  Clone ID: LIB3829-013-Q6-K6-B8
gctcttataatttttcttgctgctaccttctctccacccaaacacatatttcccaggtaaaaagaaaacgctcgagcgaacaagatatggccgatcagcttaccgacgatcagatctgtgaattcaaggaggcctttaacctgttcgacaaggatggagatggttgccttactaccaatgagttgggaactgcgatgccatcacttgggcataaccccactgaggcagaactgcaagatatgattaatgaagtcgatgctgatggaaatgggaccattgattttcctgaattccttaacctgatggcaagaaaaatgaaggatacagactctgaggaggagcttaaagaggcattcagggtgtttgacaaggatcagaatgggttcatttctgcagccgagctgcgccatgtaatgacaaaccttggtgaaaagcttacagatgaggaagtcgacgagatgatccgcgaagccgatgttgatggtgatgggcagatcaactacgatgagttcgtcaaagtcatgatggccaagtaaaggacctattcaactataaccaggattaaaaatggggtttaaaaaaaagaa

SEQ ID NO: 13634 - DNA, 559 bp, Gossypium hirsutum
  Clone ID: LIB3829-013-Q6-K6-B9
ctaattccacgcgtgatccctgtttcatgtgccagggggtgatttcacagccggaaacggaaccggaggtgaatcgatatacggatctaagttcgccgacgagaacttcatcaagaagcacaccggacccggcatactatccatggcgaacgccggtcccggaacgaatggatctcagttctttatttgtaccgctaagaccgagtggcttgatgggatgcatgtggtgtttggtcaagttgttgaaggtatggatgtggttaaagccattgaaaaagttgggtctagcagtggaagaactgctaagcctgtcgttattgcagattgtggacagctttgttaagaacaagaacaagaacaagaaatggaataatgttgactctggtctatgaatggtgattcatgtctgaaatttatcatttttatgtgtttttctttgctgtttactggatttggcttagattgttctctaagaacatgacagccataaataatgtacgctatttatcatcatatttgaccatataattgagttattacataccctttttgttgtttt

SEQ ID NO: 13635 - DNA, 597 bp, Gossypium hirsutum
  Clone ID: LIB3829-013-Q6-K6-C10
tcggtaatttagttataaatcttcttccaacttaaaagctgaataacttcacgttcaaagccaagaagcaatcttttgttgtgaacctcttgattaagtagaaatttcgatgcagagtgatcaacagttttactccccaaaagcagtgcccagacttgcagatcacgtggatgataattacattcacatgccggttccttctgcttttggtacagtttttcctccatgtgctaagccattgccacccctccatggcattgagtttcaaccctcagaggtttgtcccaaaaatttcgttatcttcaatcagaatgatcatagaaaccagataatgttcaatcctgctgttgcaaacaaatttaatggtcatggattaaatgtttttgcaacttaccttgatggaaagtatgacattaaagatgttaatgatgcggaaaaagatacctcatcctctctgaaagaggattcagatgatattgatgcactactcagctcagaagaggaggaacaagaagattatgatgaggaagaagttagcacagcacggacttctggtaattatgaaagtgactctgattctcactctgcctatggctc

SEQ ID NO: 13636 - DNA, 576 bp, Gossypium hirsutum
  unsure (1)..(576): unsure at all n locations; Clone ID: LIB3829-013-Q6-K6-C11
gcgttcggaactgaaganaattggagaagatagaaccgagaagctgactagaattgctcttgccgaaagtcaagaaagtctagaagcatcggaactagagttgagggacaatgaattaaaattggaggagttgcaaagagagctcagcaaggcaagtgaagcaaagcaacatctcgagtctcaactcagtatcatggaaacagatgcagagacaatgtcagcgaagattgatgcattaggagcagaaattgaaaaggaaagggcactgtcagtgcaaatttcagctgatgcaaatgagtcaaagcagcttctcgagtctcaacttgttagcattgaagcagaggctcggatgatgtctgcaaaggttggttcattggaaacagaagttgaaaaggaaaaggcattgtcagcagagattacagtgaagtgtcaagaattggaagaagagctttcaagagcgagacaggaagctgagctccagcaaactgcaaactcgaacgttgaagtgaagataaaacaggaggatttggctgttgctgctggaaaacttgctgagtgtcagaaaacatagcatct

SEQ ID NO: 13637 - DNA, 170 bp, Gossypium hirsutum
  unsure (1)..(170): unsure at all n locations; Clone ID: LIB3829-013-Q6-K6-C12
cccagctccggtgtaaaaatttggaactgccactgagtaaaagctcacatgctcaaaaccgaagaggaatatcaaatggnncatgaaaatggaaacccctaaaaccccagccacgatgcattgcagtgacgggctcaattaaaccaagaacccaagatcattttgctcct

SEQ ID NO: 13638 - DNA, 605 bp, Gossypium hirsutum
  Clone ID: LIB3829-013-Q6-K6-C7
ctgctttccttcccttttcattcctctccttagtcttcccctggccgacccttggctttccaccgcccctcgtaccccctctgtatccggtgactgacgaagcgcaaagatggggtttgtcgatcactttttgagtgggtccaaaggtggtagactctaaatccgcgaaatcgaaaggagaaaggcccctttttacctcgttttggtacgattccggccacggggaagaagcctccgacgatgagatcgtggaacgatgacgcggtcgcaaggttacaaatcagtggcggtgacagagggtcggtgcagagagcagttggccgacagtcaggggcaagtggggcgtcggctgaacctaggggctagggtttcttgatttttttggttattgggctaggttaagtttaggttttgggctaggggatttaattagaattgggcttgattattgggctccaggtatgggtttgaaaatgggttaagtgggctaagtgagtagggcaaatttgggtttcaacaatactgatttagcaaaaacctcacaacctccaaatgtaaacaatcactctaatcatctctttttttttttgtattttatcaataac

SEQ ID NO: 13639 - DNA, 166 bp, Gossypium hirsutum
  Clone ID: LIB3829-013-Q6-K6-C8
actgagagcatcaactgctgaaatcttaaaaggctgattgctcttcatgctatgctattgcattcgtttctaacgccacctgctgaattaaagtggcttatttaactgattttcgaccctattttttctattaataatttaagataccttgtattttaattaattt

SEQ ID NO: 13640 - DNA, 588 bp, Gossypium hirsutum
  Clone ID: LIB3829-013-Q6-K6-C9
gcgttcgaaatcttgaaaattttcacaaacccttcttcctctcagtccattcgcaggcttcatcggcgccgaatgcgcctccaccatcaacgcgattttaattagatcctaaaggatctaataacccttggaccggagaagtgaacaatgaataaattgaccccaaatccactaaccgagaagaagaggctcaagtgataaggaaaagctaagcaggtgtaatcagtactagctttcaggtattttgttgaggttcgaccggattgtacgaagaatgtatacgcatgatattggttttgcaaaggttcaggtggattgtatggagaatatatataaacatgacatttggttttatggaggttcgattggattgtacggagatacttgtgcatatttatatgataaccctacatgggttctttcaagtataagactctgcggagtctaaggcttaaagcctcatatgcgtaagcaaacccttggccatggcatatgtaagttatgtaagtccatcggacttgttctttaagttttatgttaaagttatgagatttcaccatgtcaagtccgtaacaaaaatcacatgta

SEQ ID NO: 13641 - DNA, 596 bp, Gossypium hirsutum
  Clone ID: LIB3829-013-Q6-K6-D10
tacaatttcttctcatttcgaaaacttttttttaaaggcttcttctatatattctttgaagatattaatcagaaaaatggcgctggtttctttcatcggcagggttctttttgcgtcagtgttcatcctctctgcttggcaagagttcaatgaatttggcgtcgatggtggtccagcggcgaaggagctgaggccaaagttcaacgtcttctcaaagactgtgtcgtctcacacagggttgcaagtgcctgaatttgatatcaagtatgtagttgctgctgctgtagcctttaaaggtgttgggagtattctctttacctttggcagcaccgtcggagcttatcttctggttttgcaccaactcgttcttactcccattgtttatgacttctacaattacgacacggaaaagaaagaatttggtcttctttttacaaagttttcacagaacttgacgctgttaggggcattgctgttcttcattggcatgaagaactcaatccccacaagacaactgaagaaaaaggctccgaaaaccaaaacagtttgaagacgtaacacatccggttaaaaccgaagagggtctggtttttctc

SEQ ID NO: 13642 - DNA, 579 bp, Gossypium hirsutum
  unsure (1)..(579): unsure at all n locations; Clone ID: LIB3829-013-Q6-K6-D11
atttcttccttaactcatccctttcttcgctttcattttcctctcagatttcccggaatccaagcagtatctcaattgcccanacgaccgaaaaacttgcacatttccctgtcctctaaacacactcgttccctttcaatttccgctacggtggctgctccggttgagactgaaccggttgagaacctgaagaagttcgttaagtctaggctccctggtgggtttgctgctcagactattatagggacgggacgaaggaaatgtgccattgctcgtgtggttcttcaggaaggaactgggaagttcattatcaattaccgtgacgctaaggagtatcttcaagggaacccattatggttgcagtacataaaagttccattggtgacattggggtatgaaacgagttacgatgtattcgtgaaagctcatggaggtgggctttcgggacaggcacaggcaatctcactcggcattgctcgtgcattgctgaaggtgagtgccgatcataggagcccgttgaagaaagaaggcttttgaccagagattcaagggtggtggagaggaagaaagttggtctca

SEQ ID NO: 13643 - DNA, 597 bp, Gossypium hirsutum
  Clone ID: LIB3829-013-Q6-K6-D7
gctccttctcgctgcgatttcgtcttcaaaatctcagttctcaaatcgtagcgctcttttctatcaagccatggctctgatcttgcatgcaggaaaacaacaaaaatgcctttaaggcactcattgctgcagaatatagtggtgtgcaggtcaaaatggttgagaattttgagatgggtgtgtcaaataagactcctgagttcatcaagatgaaccctttggggaaggttcctgtgttggaaacacctgagggtccggtatttgagagcaatgccattgctcgttatgttgctcgctcaaaggttaacaaccctatatgtggttctacattgattgattatggtcatatcgagcaatggattgattttgcagccttggaaattgatgctaatattgccaaatggttgtatccaagacttggttacggtgtttaccttcctccagctgaggaagctgctattgctgcattgaagagagcccttggcgctttgaacactcatcttgcttccaacacatttcttgtgggacatgctgtcacccttgctgacattatcatgacatgtaatctctacttgggtttcttccagatcatgacca

SEQ ID NO: 13644 - DNA, 594 bp, Gossypium hirsutum
  unsure (1)..(594): unsure at all n locations; Clone ID: LIB3829-013-Q6-K6-E10
gcgttcgattttaaaaaaaaaagnanaaaaaactcagcaatgccggaggagacgaattccatagactacattatggagaaggcatcggggcctcacttctccggcctccgtagtccgacctccgcctcttcctcttcgtcctttttcgccgacgccaacgctcctcgtcagcccttcgtcatcggtgtttctggaggtacagcttcaggtaaaacgacagtctgtgacatgatcatccaacagctccacgatcaccgcgttgtacttgtcaatcaggattcgttttatcgtggtttaaatactgaagagttaaaacgcgtgcacgagtataattttgatcaccctgatgcttttgatactgagcagcttctggaatgtgttgagaagcttaaaagtgggcaatctgttcaggtcccgatctatgattttaagcaacatcgtcggtcttcggatagtttccgacaggttaatgcttctgatgtcataattttggaaggaattcttgttttccatgaccagcgtgtcaggaaccttatgaatatgaagatttttgttgatacagatgctgatgtgaggcttgctcgtagaataaga

SEQ ID NO: 13645 - DNA, 594 bp, Gossypium hirsutum
  unsure (1)..(594): unsure at all n locations; Clone ID: LIB3829-013-Q6-K6-E11
cggtccgccatccgggtcgacccagcgttcgtctagtttcaaatgggcacccaagnccgnggagnaaccagccgagaaaaaccagctgaggagaaaaggccgagaaggccccnagctgagaaaaaaccaagagccgagaagaagctccctaaagaagccggggacaagaagaagaagcgaagcaagaagagcattgaaacctacaagatctacatcttcaaggtgctgaagcaggtccatcctgatatcggcatttccagcaaagccatgggtattatgaacagcttcatcaacgacatcttcgagaagctggctcaagaatcttcgaggctcgcacgctataacaagaagcccaccatcacctcccgtgagattcagactgccgtaagattggtcctgcctggggagttggccaagcatgctgtttcagaagggaccaaggcggttacaaagttcaccagttcttagtttccaaaaatctaaaatacaaaaaaaaaactgggaaatatggttttgttgtaaaattcattagctttttgtaggccttcctggtattcgcggagcttaaatggaaatttaaccatattttgaatt

SEQ ID NO: 13646 - DNA, 573 bp, Gossypium hirsutum
  unsure (1)..(573): unsure at all n locations; Clone ID: LIB3829-013-Q6-K6-E12
ttcgctgnaaatctagttataaattgccctgtacttcataggagtcatgacagtggctcactgttctgttaaagaattcagggaataaacttagcattttttaaggttaaccaacatgacttaaccttaatgttctaattgaggatcatactgttgttgttgttgttgttctttttcagtctaattaacacatttatgcagagtggcccttccattgctgcatttcttttctgttcatggattccactgttggtattatcgaatcattaatgctttaaattgttgtgattttctaaggttcttttctattaagtttgatgaaattgctgatcagacattcttgttactgtttgatttgcagacctcatcaattcttgttcttgattgtggtgtgataaagagtttcaaagttggtgaaaacagtgttttaatgtttcaaaacattcttaattgaatcatgcaattatatcatcatccatgctcattgaacagccaaaaggtgaggcttgctttggaagagaaaggcgttgattacacctcatttcatgtcaatcctattcttggcaagaacat

SEQ ID NO: 13647 - DNA, 592 bp, Gossypium hirsutum
  Clone ID: LIB3829-013-Q6-K6-E7
ggtatttccaaggtggacagacccgtgagcatgctctgcttgctttcactctcggtgtcaagcaaatgatttgctgctgcaacaagatggatgccacaacccccaaatactcaaaggctaggtatgatgaaattgtgaaggaagtgtcttcctacttgaagaaggttggttacaaccctgagaagattccttttgtccccatctctggttttgagggtgacaacatgattgaaaggtccaccaaccttgattggtacaagggtccaactcttctcgaggctcttgaccagatcaatgagcccaagagaccctctgacaagccactccgtcttccacttcaggatgtgtacaagattggaggtattggaactgtcccagtgggtcgtgttgaaactggtatcctcaagcctggtatggttgtaacctttggtccctctggattgaccaccgaagttaagtctgttgagatgcaccatgagtctcttcctgaggctcttccaggtgacaatgttggcttcaatgtcaagaatgttgctgtgaaggatctgaagcgtggatatgttgcttcgaactcaaaggatgatcctgccaa

SEQ ID NO: 13648 - DNA, 566 bp, Gossypium hirsutum
  unsure (1)..(566): unsure at all n locations; Clone ID: LIB3829-013-Q6-K6-E8
cccagcgtccggttctttttcacccacaaaanaaaaattgcttatactacaattaaccatgccttcaagtgctcgtctagttcacaggcaatgaatcatgggccttttccggcgactctttggcgccaagaagcctgcccaacaacgccccgacaaagacaggaggcgttggagctttaccagatcttcccatcccacgtcttcgacttctcatcttgatgccctttctggtccatgcaatggcacattggatgccaacaagcgcgccatagcagtagcagccgccactgctgctgtagctgaggctgctctggctgcagcgcatgcggcggctgaggttgttaggctgacaagtggtggtgttggcagcgccgatgggagcaaccgacgcctcccacaagaactagcggctgttaagatacagtccgcttttcgaggttatctggcacggagggcactgagggcattgaaagcattggtgaagcttcaagcactggtgagaggtcacgttgcgaggaagcaaacagcagacatgctcagacgcatgcaaacattggtcagacttc

SEQ ID NO: 13649 - DNA, 572 bp, Gossypium hirsutum
  unsure (1)..(572): unsure at all n locations; Clone ID: LIB3829-013-Q6-K6-E9
gtctaacaatggcgatcctaagctcggtcgaagtcctagcatgagggaccgcgtggaggacacgctttctgctcatcgtaacgagctcgttgctcttctctccaggtacgtggncgcagggaaaaggaatactgcaaccgcatactttgatcgatgaactggaaaatgttgtaggcgacgacaaagctagagagaagctaagtgatggtccctttagcgaagtccttaaatctgcacaggaggccataattctgcctccatacgtggctatagcagttcgcccaagacctggtgtttgggaatacgtacgagtcaatgttcatgaactcagcgtggagcaactggatgtgtccgaatatcttcgcttcaaagaagcacttgcagatgtgggggaggacaaccattttgtgcttgagcttgattttgagccattcaatgcatcctttcctcggcccaaccgctcttcatccattggcaatggcgtccaattcctcaaccgtcacctttcttcaaacatgttccgtaacaaagattctttggagcctttacttaatttcctgagagcccacaaa

SEQ ID NO: 13650 - DNA, 620 bp, Gossypium hirsutum
  Clone ID: LIB3829-013-Q6-K6-F10
cccggtcgaccccgcgtttggcatctttcaaccgcgggcaatacctaatagtagctgtttgcttactttgatctttcccctgtgcaaatggaggctgcgttggcagagctagagagagtccagcttcaaatccttcggcgaatatcgaagctagagctctctcacctgcctcaaaatgctgaacctatcctttcttcatcccctctcactaacggcgatgctagctccgatgttgaagcttgcctctctaatattctacgatccaatggcgtcaacgacttcattttcaagcgagtcgcctccgattactacgactggcctctcgagtcccgccgcgacgttctcggcgccgcctctgttcatcatctttgcaaaagcatcgttttgtgagacttgctcctgaggaaacatcaataaagttgactggctatgagcacaatgcagttacttgcatcggtatgcaaactgacattccagtaattttagatgaagccattgtaaagcttgatccagatttcttctggttgggtggaggcgaggttgatttgaagctgggaatcagaacctctgaatttataaactttgtcaaacctttcattgtcagctgcagtggcacctaa

SEQ ID NO: 13651 - DNA, 585 bp, Gossypium hirsutum
  Clone ID: LIB3829-013-Q6-K6-F11
tctcgaagcagtttagtagattcgggtctccttttaccatgtaagaggttactccgctctctaaggcatcttttgcaatctgatgggcacgcatgttttctattctgggaatatgcttgaactctattgtttgataatggacacacatgttttgaatatctcgaatgattgcttctatggctgatttgtctgtttctgttgtttgacacttcctgattattgtccgtgaatccccctttaatttgtgcttctcgaaaacccattaagatcactaacttaattgcttctaaccctgcatatgcttctgccgcgaacggagatggaacactattgtgaaggatcgtcttcaatgccagaattttatttctacgaccccaaaccaccatccagagacagatctaaaagttctcttgtcgaatgcaacgtcaaagtgtatctcaaccattgttgtcttcctgtgatggatatccgttcgtgtactagctggtttcttaagtaccatattaaccataaagcgtagcaaaagattcgactctgctcctcagacccctgcaggaatacccagggcattgtctgaatacgtga

SEQ ID NO: 13652 - DNA, 606 bp, Gossypium hirsutum
  Clone ID: LIB3829-013-Q6-K6-F7
tcgcttttcagtcctacccaaagcggcccctcaactctcctctcctttagcaatatctttccccttcactgtttcaactcaaagaatggcggaggagaagaaggctcaatctgctggggtttggcctacggttaaaccttttgtcaatggtggtgcctctggtatgcttgctacctgtgtcatccaacccatcgatatggtcaaggtaagaatccaactgggtcaaggatcggcagcaactgttaccaagaacatgcttagggaggagggtgttggtgccttttacaagggtctatcagcaggactgctcaggcaagctacatacactactgctcgattgggatcattcaaaatgttgacaaacaaagcaattgaagccaatgatgggaagcccttacctctatatcagaaggctttgtgtggtctgactgctggtgctattggagcctgttttggcagcccggctgatttggcacttattcgtatgcaggctgatgctactttgcctgttgctcagcgcagaaattacaccaatgcattccatgcactctatcgtattgttgcggatgaaggggttttggcactttggaaaggtgcaggccccac

SEQ ID NO: 13653 - DNA, 593 bp, Gossypium hirsutum
  Clone ID: LIB3829-013-Q6-K6-F8
tcgccaatgttactatcgcggtcctggtccttggaataactaactcttcaaaattgaacgtaaaccagatcttgcaggaacttagtagagagtggcctggaagttcctatgacttgttatccaaaaattgtaaccatttctgtgatgagttctgcgaaaggcttggtgtccaaaagcttccaggttgggtaaaccgatttgctaatgctggtgatgccgctatagaaatagcagaaaacactgccttacggttgagacaagccaagactgagatagtatcagctagcaaagtggcatatcgttttcttgtgggtgttacgtctagttctagtggtggcaatgatagccccggcaattcaaatagaggaagccccagatttcaagcagcttggtttaaaaacatcatcactactggtgccaaaccatctagcagttctgaaatcgagactcagggtggcagtggttttcagaaccatcggctacagaattctgcacagacaatgcaacaaaatttccaagatccacaaagatcaccgtgacaattcaaataatttggaataaccatggtgacagaattcatggcatgatatgtg

SEQ ID NO: 13654 - DNA, 585 bp, Gossypium hirsutum
  Clone ID: LIB3829-013-Q6-K6-G10
tctccccgcgtccgccccgcgtccgtgtggatccatcaatgacatttaggctacccgtgataatcgtcgagttcatgccatcaccaacaatcatcaaattcttcttgtttgttccaatctcgacgttttcattgtaagtaccctttttcacatgaattatgtacctggtcttgcttttatctggtgccgctgccactgcttctcctagggtcttgtagttgccactcccatctttagccaccacaacgtcggccttgatttcattaggcaaagcctgtaaaagctttcgatccttgctgctgagccatgatggaaacccaccgatcaatgggtcgtcatcgaattctgtcttcgtaggagaaacggaaaccaaaatggccagggaagttcttgctctcgatataaggtcgctgagccctggctccataagggtcctcactgacccttgtaacccatccaagcacgtcacatggtttgtcagcacgctgctcagccacgcctgagcattggaatgccaattaacatcttgtttttcaacaccaaccatagaatccatgatcctgtccctggataactccaccaact

SEQ ID NO: 13655 - DNA, 574 bp, Gossypium hirsutum
  unsure (1)..(574): unsure at all n locations; Clone ID: LIB3829-013-Q6-K6-G11
gctttcgcggncgcgtgggcggccgcgtgggccataccgatccggtgctgacttcgttcgtggctaccctttcagtctccgtgagggtgttaccactgccgtctcacacggtctctggctcaacatcccggattatgatgctcccacacagcttgtcaagccactcgagaggaacaccaggtatgtcgacgctataatgacgattccgaagggaaccttgttccccatgtgcggaatgaatctggcatttaaccgagaattgatcggccctgcaatgtactttggactcatgggagatggtcaaccaattggacgatacgatgatatgtgggctggctggtgcaccaaggttatttgtgatcacctcggatggggagtgaagaccggacttccctacatttggcacagcaaagcgagcaacccgtttgtgaaccttaagaaagaatacaaaggaatttactggcaagaagagttgattcctttcttccaatccgttgcccttccgaaggactgcaccaccgtacagaaatgctacatcgagatctccaagcaagtgaaggcgaaactcggcaag

SEQ ID NO: 13656 - DNA, 294 bp, Gossypium hirsutum
  Clone ID: LIB3829-013-Q6-K6-G12
gcgttcgccccgcgtccgcggccggccccccttatttagtttgttcaatttttttcctagccttgttagttcatgtttgttagggtgtaatcaaaatcctcttctgtacagagcatctgcactcaaaaaaggaaacaacactcgaagggtagaaatagtaaaaacatgcatatatggtattgtagggggaagacatctatcgagggaatcatacatctcagttcaaagttgtaccttgatcatgatctactgttatgagatagagaattcactagtaaaaagcatcagaatttc

SEQ ID NO: 13657 - DNA, 583 bp, Gossypium hirsutum
  unsure (1)..(583): unsure at all n locations; Clone ID: LIB3829-013-Q6-K6-G7
ggnatatagggcagctgtaaggctttagaagaggctatttttatgaaaccagattatgctgatgcacattgtgatttagcctcagctttgcatggtatgggtgaggatgagagggcaattgaagttttccagaaagctattgatttgaaaccaggtcatgttgacgctctatacaatctaggtgggctttatatggacttgggtaggtttcagagagcttctgagatgtacactagggttttagctgtgtggccgaatcattggcgggcacagctcaataaggctgtatccttgttgggggccggagaaactgaagaagctaagaaagctttgaaggaggccttaaaaatgacaaatagggttgagttaaatgatgccatataccatctgaagcagctacagaagaagaaagtcaagactaacggtggtagcaatggggaggcggcttttgtaatagtggatccctcaaaattcaagactttgggtgagaagactacactgaggcaggatttaggaaatgctcttcaaattagggctttccagagacttactagattgaaccgatgtgaagtggatcttttga

SEQ ID NO: 13658 - DNA, 572 bp, Gossypium hirsutum
  unsure (1)..(572): unsure at all n locations; Clone ID: LIB3829-013-Q6-K6-G8
tccggntggtgaaggcaccctcaaattcccaccccnatacaaggcccttggaagccaaagaaaatcaagaaccccaactacaagggcaagtggaaggcaccaatgattgacaacccagatttcaaggatgatccagatctctatgttttccccaacttgaagtatgtcggtattgaattgtggcaggtgaaatctggaacaatgttagataacatcttagttgccgatgatgtagagtatgccaagaaactagctgaagaaacatggggcaagcagaaggatgctgaaaaggcagcatttgaggaggcagagaaaaagagagaggaggaggaatcaaaggatgccccagttgattccgatgctgaggacgaagatggtgctgatgatactgaagggcatgagtctgattccaataccaaatcagacgatgaggacaaggaagatgcacatgatgagctctaagcactgcaatatttcgcatacaattcggtttggagataaaaacgccaaaatcttccctacccttaataaaaaaatttctagtcttaggagtttcctgttggaattgaatg

SEQ ID NO: 13659 - DNA, 546 bp, Gossypium hirsutum
  unsure (1)..(546): unsure at all n locations; Clone ID: LIB3829-013-Q6-K6-G9
tcgnaaaaaacccagttcctagcttcttgccatccactgatgtcgttgacgaagtcaggaaactttgaaattaacaagaaacagtttcttcagtgttgggagattttgatatatcttggccttgatcctatagagaagcattatggaagactatgtaacaataatttgcaatagggtgaaggctgatatactaggtaaagattctgagacagcaggaaaggaagtaattgaggtcccaagtgttcatgacgaggagacgtcatttgccatgttcaggttgcagaacagcaaggctgggggtattcaaatggatgaagatcagacaaaaacccaagaacagcagctgcagcagttggtcgatgagagaatcaaggaggtgaagttaattgcacaaaaggtgtctcacaaacatgtatgaagggtaccactttcttggcatgatgcattgacctggttataagcatattactgataatttctagtgaagctagcactgttgtaggattagtaaatttgaggcttgttctgtaaaatttttgagcacta

SEQ ID NO: 13660 - DNA, 614 bp, Gossypium hirsutum
  unsure (1)..(614): unsure at all n locations; Clone ID: LIB3829-013-Q6-K6-H10
cccggtcgacccagcgttttgcgaatggcggagaattccaacatctatcgcatcagctaatcacgctctaaagaatggatcaggttcaacacccatctatcatgcagaaggtagcaggccagctccttcgttctagccattctcaagattttcaaggttataatgggtctttcaggagtcctgctctataccaaaggcgtgctgcatatggcaattactccaatgctgctctgcagcatcctgtccgggcttttggagacctgtctatggttccatcaacagcttctgctatttgcgttcaggctcctgctgagaaaggatttagcggctttgctattgatttcctcatgggtggagtttctgctgctgtatcaaaaacagctgctgcaccaattgagcgtgttaagcttttgattcagaaccaagatgaaatgatcaaaagtggaaggctctctgaaccttacaagggtattggtgattgtttcaagcgaacaatcaaggatgaaggatttagttctttgtggagagggaacactgccaatgttattcgttatttccctactcaggccttgaactttgccttcaagnattacttcaagaggcttttcaacttc

SEQ ID NO: 13661 - DNA, 65 bp, Gossypium hirsutum
  unsure (1)..(65): unsure at all n locations; Clone ID: LIB3829-013-Q6-K6-H12
gggggggnngnggggngggggggggggggggggggggnggggggggggggggggggggggggggg

SEQ ID NO: 13662 - DNA, 604 bp, Gossypium hirsutum
  unsure (1)..(604): unsure at all n locations; Clone ID: LIB3829-013-Q6-K6-H7
attgaanaggttgtngaatattgagggtgtttattatttgttgtttttttataattactgatgtctccgccgctgcttggcgtggaggaggaagggattcagagcaatgttactttactcggttcttcaggctcaatggaaagtgtgtgccagaatagtgctgacttgaaggaacggaactacatgggcttgtctgattgttcttcagtggatagctctgttttttcccctccgtccgaggaaagaaaggctagtttgaatctaaaggcgactgagcttaggctcggacttcctggattgcagtcgcctgaaagaaatccagagctttgcttgttaagttcttctcagcttgatgagaagccgtttttccctttgcatccttcaagtgatggtcactgctttgcatcacagaagagtgttgtttcagggaataaaagagggttctctgatgcaatggatgggttctcagagggcaagtttctttctgattcaaaagttgatgttatgctgtcacctaggccttcttcaaacttcggggctcaaccaatgaaagctaaagaaatcacgagccaaaacgtggtgcatgacaggcctcatgctgctg

SEQ ID NO: 13663 - DNA, 329 bp, Gossypium hirsutum
  Clone ID: LIB3829-013-Q6-K6-H8
cgggagcttgggggtaagctgactttgcttgccagagggatgagtgtatatataccatgtaaggggctgatccatatgtcagagattcatctgactgcatatttggcacgcaaggacaacactatagagatctagactttgccaatgtgtggaattgtgagaggaggccagcaatgatggatctgcctactacaaagccaatgatacaacccttgaactgatcccaaattggtgccaggatggtaaaatcttgccggcatgaatggatcatagtaagggaagcccattattccactagcagatctgtaagatgccaccagacgtaaacc

SEQ ID NO: 13664 - DNA, 402 bp, Gossypium hirsutum
  Clone ID: LIB3829-013-Q6-N6-A10
aaataaaaaaaaaaaaaaaaaaaaaaaaaaaaaaaaaaaaaaaaaaaaaaaaaaaaaaaaataaaaaaagaaaaaaaaaaaaaaaaaaaaaaaaaaaaaaaaaaaaaaaaaaataataaaaacaagaaaataaaaggatggacaaaactaaaaaaatttaaaaattttttaaaaattaaaaaaaataaaaaataaaaaaggttaaaaaaaattaaaaaaaacaaaaaaaaaaaaaaaaaaaaaaaaaaaaaaattgaaaaaaatgaaaaaaaaaaattgggacacccaaagaaaactaaaaaacaaaccccaaaaaagatggcaaaaaaaggaagaaaaaaaaaaagttaaaaaaaaacctcaaaaaaaaaaaaggtaaaaaaaaagccagaaaaaagaaac

SEQ ID NO: 13665 - DNA, 547 bp, Gossypium hirsutum
  Clone ID: LIB3829-013-Q6-N6-A11
gataaatgaattgtttaatatggccatccttatagattgaaaggtgcagtacaatgtcaatgatggaaaatccaatgtacaaaaacctcaacccaaatctatcgcaaattgtacagaagctcgcctgaacaggtctgctgtgtttcaccagagactggactccatgttggagacttcgattcaactcaggccttgaatgcggcagtcgaaaactgcagtgaacctctctgccctgtccatgcacgcattcatccatgttcgagactttagacgaacttggagattcaacacttcgcattaatgcagcagccgagcatcccaaaccgaagaaaaccccttttgcattagtccatgcatgcacagtgacatttaaatagcaaaatactatgccctgcactgaacacaattaactttctggatctctagagactgtaaatgaatggacaccaaaagcctgctttaagaacatgtgagctcagctccatgcaaaaacattttcaaacgaagaaaacaaatatcttgtgctgctttaagatcctttgtataa

SEQ ID NO: 13666 - DNA, 314 bp, Gossypium hirsutum
  Clone ID: LIB3829-013-Q6-N6-A12
acatgaaaaagaaagatatatttactgttattgagtacattgaacaaaacttacaagttcttccaaatgattttcttaagaagtcataactcgaggaaaacgaaaacgggtcatagttatatgaaccaactgagctaaacccgagtttgacacgagtgtgttagtttaagagacttaaggtattgggatacttggtaggttgcaatgcagggaaagagtggacatacttgcaattaggacaagcaggggaggatttggggaggattacaagaagatgacaatttaaacatggcaaagccaccatgttagtggtg

SEQ ID NO: 13667 - DNA, 534 bp, Gossypium hirsutum
  Clone ID: LIB3829-013-Q6-N6-A7
gaaaaacattaaaacataaaactagaatttgtttaaaaagcaaatcaacaagtctcacaaaaagtaaatttaaagtccaaatttaagataattgtccaaagctgtaatgaaaactgatataattatctctgcaataatctctcatttcttcttggcagcagatttggtgaccttagcaccagttgggtccttcttctcaacactcttgatgacaccgacagcaacggtctggcgcatgtcacggacagcaaaacgtccgagtggtgggtattcggagaaagtctcaaccaccatgggtttggtgggaatcatctttaccatacctgcatcaccgttcttcaagaacttgggttccttctcgagttccttgccagatcgtctgtcaatcttggtcaacagctcagaaaatttgacagcaatgtgagaggtgtggcagtcgaggactggggcataaccatttccgatttggccagggtggttcatgatgataacctgtgaggtgaagttggcagcttccttggccggatcatcctt

SEQ ID NO: 13668 - DNA, 423 bp, Gossypium hirsutum
  Clone ID: LIB3829-013-Q6-N6-A8
gggggaaaaaaaggggggccccttaaaaattaaaaaaaaaggggggggtttggccccaacctagaagggccccggaaaaaaaaaaagggttccggggggcaaaaagggttaaaaaaccccccggggggggaaaaatccccaaagggggaaaatttgggggacaaaaaaaaggggaaaaagggcccctaaaagggctttggggattttggggggcccaatttgggaacccccctttttaaggggggaaaaaaatttccccccggggggggctttggggttttaaaagaaaaaaaaaaattttcggaaaaggggggttaattttttggggggggggatcaaaacccttaaagggggaccccttgggcccctttttttggggaaaaaaaaaaaaaaatttttcccggggggaaattttcggggggg

SEQ ID NO: 13669 - DNA, 542 bp, Gossypium hirsutum
  Clone ID: LIB3829-013-Q6-N6-A9
acaataccaaattatttgtgttatatatattctcaagttagtaaggtcatgaaaataacaataaagtacaattatgtcttcaaactgatcttaagtcacaacttcaaataataaaaaaaatcactggtatcctatcaatgcgaggatatcacaatgtccatctaacagttccacaagctccaacccagaactgaaaaatatctgtaatgcagaataggaagcatgatattacacaatactcacatagtaaatacatactacagcagaggatataccatgcctttcagttgagtacaggaccctgaatctactgcctccaaatgggttgtgacagtagggtgttctcagcctaaaactcggttggagattttaaacgtactaatctcctgatcctgtctttatctgtgttctccagatatcccttccaaataattgcatccaaagtcaagcatatccttccgtatttatccagaaaaagcgctctgttggtagcttcccacatacatcctttacagctgaggttataacaaagatcacctctg

SEQ ID NO: 13670 - DNA, 541 bp, Gossypium hirsutum
  Clone ID: LIB3829-013-Q6-N6-B11
atcacttcttgaagtttcctttttcatgcgagtcataaagtctgattcaaatcgtttgaaacaaacatggacaaacaaattgataggaatttgcaaccaatatgtgaccggttcatctatggtcggtcccagatcggttgccagaaccagagccagatgtaggacgatatgccccccaaccggtgactcttgacacagttcggaaatgagacaaacgctctctttccaaagcaatataattatttggataagagctttctgcttccggtaggttctgtccagatgaacttgatcgagggtagacatagaagcccccagtttgatcaggttgtgggactgctggggtcattggggccacacctcttataccaggaactaccggagcaggcacaccaggtcgattgaatcgctgttgattgaaacgatgttgctgtctataataggcaagagatggccaggttctatcatgggtatgagcaccgctgcctggatgatgatgaaaaactgaagagacaaacgaactcccgcctcttgaactgga

SEQ ID NO: 13671 - DNA, 531 bp, Gossypium hirsutum
  Clone ID: LIB3829-013-Q6-N6-B12
aacttaaaacacacaatacaatatattaaaaacatgtccctgtttgcggggctgcatcatgactcgactcccacgttaccaaaggaagttcaagttggacatgagcctaatctgtaaactatactgcataagcagttcttagttgacatgagcttgaattctaaatgttacatgaatgcagtttcttcccagtaaggaacctgtttcctggcttgggagctgaatattatttaacatggaattcaattatgtagaacacagacaacaataaagacagcattaaacactacactcggcaaacctaatccgatattatggagatgcatcctttgctttccccccccccccacgggtactgctccttataggcagtcagcaaattatttcctgaaaaacaaattagcgaccttcaggtcattcctcgcttgcgtttagcgttgtcccaaagcttcagtaagaatgtaacaccctctttcagggttgcctttcttccttctccgtaattccacaactcagaaattatgtaccttc

SEQ ID NO: 13672 - DNA, 510 bp, Gossypium hirsutum
  Clone ID: LIB3829-013-Q6-N6-B7
aggagacatttcttttatatattgtctcaacgcctcgtagaggcttaaagccgacaagatcggggtacataaatgtcaataatgtcgaaaagtaaaataaagataactaaaaaccatggctgcctataaagaggactgaagcatgtctaatttaaaactggttcaaattggagaaatgaaatggtaccgatgggatcagtagaaatcgtgagttcggtctatcaaagctacaaatatcggaccaaaccaccgctcttgtcgacgagtaaaatcaagtgagattccgtcaagctgaaaatcaggctgcctgtagcagcaaactttgtacattgcttgtgaaactattagaggaaacgagtcaaccgcgcattagatcgatgtcaacatgagtgttacgcatatccattgttcttgaaccaggccatacacctgctggtgaagttggaatcagattttgacttggtgaaatgccggacggagatactagattgtcgacactctgattgtccg

SEQ ID NO: 13673 - DNA, 521 bp, Gossypium hirsutum
  Clone ID: LIB3829-013-Q6-N6-B8
cctagcaaatagtcgctcatataaagcaaagataacatcgaaatgttccagtttgctcgaaagaaaagcccactgcatacatgtattgacactaacaacccagcactactgagcaaaaaagcgagcaaacacgcataaggctaaggaccggtccacaagcatatgcaagcttggaacaacacaaccatccaacaaaggctagctacttaaaaacctcgatgtcctattgattaatagatatttaaccaaacttatgtgacctgctatttaattgcttctttttaaaccccattttacaatcctggttatagttggagaggccctttacttgaccatcatgactttgacgaactcctcctagttgaactgcccatgaccatcaacatgggctttgcggaataatgtcgcttacttgcttatccaggaagctactcaccaagtgtttgacatgacactggcgcatactaggctgccgaaatgaacccattctgatcccttgtcaaacagccctgatgcctctt

SEQ ID NO: 13674 - DNA, 530 bp, Gossypium hirsutum
  Clone ID: LIB3829-013-Q6-N6-B9
aataaatattgtattgcaaaaacaacaaaaagggtatgtaataactcaattatatggtcaaatatgatgataaatagcgtacattatttatggctgtcatgttcttagagaacaatctaagccaaatccagtaaacagcaaagaaaaacacataaaaatgataaatttcagacatgaatcaccattcatagaccagagtcaacattattccatttcttgttcttgttcttgttcttaacaaagctgtccacaatctgcaataacgacaggcttagcagttcttccactgctagacccaactttttcaatggctttaaccacatccataccttcaacaacttgaccaaacaccacatgcatcccatcaagccactcggtcttagcggtacaaataaagaactgagatccattcgttccgggaccggcgttcgccatggatagtatgccgggtccggtgtgcttcttgatgaagttctcgtcggcgaacttagatccgtatatcgattcacctccggttccgtttccggctg

SEQ ID NO: 13675 - DNA, 549 bp, Gossypium hirsutum
  Clone ID: LIB3829-013-Q6-N6-C11
aacttgaaggaacttgctgtatttttcttcaaagaatggagaaactatagccccaggtactggcaattaaggttctcaacttcaaactttgtatccagaatccagacaaccattcatttatatatgagacaacctaaaggtgaactagttaatggtgattaaacagtatttaaccactaccttttcaaatgacaaatgatttctttggttttacactaatctaaatctcttaaatttctagttggatcccattcttactccgagtgaaaaattttgcgaaaccatttcggttcttctctaaactggcatgagttgatgacacaattgaagacgaggatgaagatggcggtgtgttgccattttcatcattcttatttacttgagggctagaatggtcagcaccaactcttgttgactctggatctgctttaggtgaatatgtttcattagaatgtaacttccaaggttcactggatttcggaatcaacgacactcctctagagaactccggtatgctcgtggtgtcaattaaaaagtcttcaagtgtcc

SEQ ID NO: 13676 - DNA, 509 bp, Gossypium hirsutum
  Clone ID: LIB3829-013-Q6-N6-C12
aattggaaagacggcattcggattttatttatattttcctaatggtcatgcagctaagtccttcaaacccaaataacataacaatgcattcatatttggggttgaaatattctgattgttcccacttaaggaaaatcacatttcacaatgaatcagcccataaatccatgtctaacatcaaatcatcccaatcccatttgctgcatccttcagtactactcaatacattaacttcatcaagctgcccaaactgatgatcttccgttgccaaatcaccaaaaaacacaccacctgcagcctcctctctgagggcttcttcttctttcacaagctcctggccttgttgtttatcaacttcaacaaagttgaaaggggggggcatggggctttcttgtattggtggctggttcttaagagcaaaatgatcttgggttcttggtttaattgagcccgtcactgcaatgcatcggggctggggttttagggtttccattttcatgccattttgc

SEQ ID NO: 13677 - DNA, 529 bp, Gossypium hirsutum
  Clone ID: LIB3829-013-Q6-N6-C7
gacttgaagcatattttaacttaattgaaagatgataaatataaatacatgtgtgtttctcttttcaacaccaaagtaattttgggacgttaaagaggaaaatgattgggattgctatttgggtttgctacttattattagtaagaaaaaataatagctttctgttataccccctacggcttggaaaatgtggtagcacaacaaaccaccagaggactagtggctcggaaggcttgatcctagccagccttctgttatcctcgaaagggtctttgccgaccacccctacgaacaagcttctcgctccttttagaagggtctcatccatccattcctcagggcacctgctcttctgttgagagtgtgacttttaggccaccaaaccttacttgaatcttacaaccttgcactatcatttagaatgaatgctagaatgagccccatcacatacatccctccgtgcagttcacaatgatgatagaatcttcaagcatgaaacctctattatatatatatccccagactcaat

SEQ ID NO: 13678 - DNA, 175 bp, Gossypium hirsutum
  Clone ID: LIB3829-013-Q6-N6-C8
aaattaattaaaatacaaggtatcttaaattattaatagaaaaaaataggggtcgaaaatcagttaaataagccactttaattcagcaggtggcgttagaaacgaatgcaatagcatagcatgaagagcaatcagcctttttaagattttcagcaaattgactgctcatcatgtt

SEQ ID NO: 13679 - DNA, 551 bp, Gossypium hirsutum
  Clone ID: LIB3829-013-Q6-N6-C9
agatccataggcaaacataaaagaaacttcataaatttggcggattcatacatgtgatttttgttacggacttgacatggtgaaatctcataactttaacataaaacttaaagaacaagtccgatggacttacataacttacatatgccatggccaagggtttgcttacgcatatgaggctttaagccttagactccgcagagtcttatacttgaaagaacccatgtagggttatcatataaatatgcacaagtatctccgtacaatccaatcgaacctccataaaaccaaatgtcatgtttatatatattctccatacaatccacctgaacctttgcaaaaccaatatcatgcgtatacattcttcgtacaatccggtcgaacctcaacaaaatacctgaaagctagtactgattacacctgcttagcttttccttatcacttgagcctcttcttctcggttagtggatttggggtcaatttattcattgttcacttctccggtccaagggttattagatcctttaggatctaattaaaatcgcgttgat

SEQ ID NO: 13680 - DNA, 518 bp, Gossypium hirsutum
  Clone ID: LIB3829-013-Q6-N6-D10
gaagggaaaaatatgaaatccttttgtggaactcaaattaaatagctatgaacttcgacaggacaacaaagccttggtacaagcatacagaaacagatctagttacaccgaggtatacaaattaagatcgaacgagaaaaaccagaccctcttcggttttaaccggatgtgttacgtcttcaaactgttttggttttcggagcctttttcttcagttgtcttgtggggattgagttcttcatgccaatgaagaacagcaatgcccctaacagcgtcaagttctgtgaaaactttgtaaaaagaagaccaaattctttcttttccgtgtcgtaattgtagaagtcataaacaatgggagtaagaacgagttggtgcaaaaccagaagataagctccgacggtgctgccaaaggtaaagagaatactcccaacacctttaaaggctacagcagcagcaactacatacttgatatcaaattcaggcacttgcaaccctgtgtgagacgacacagtctttga

SEQ ID NO: 13681 - DNA, 536 bp, Gossypium hirsutum
  Clone ID: LIB3829-013-Q6-N6-D11
aactaaaaaaaacattttattttttgatgtaacgtagtaaaaaagaaaaagtaatcttatattggtacttttacccttaagtaacaatagactaaggatcaacattcctcacatgaaatgcaagagaaatgttcatcagcacaaccaatcaagaacaagatctacattatcaaaaagggttcttctacaatttagaatttttgtaaaaaaaattcatcagcaaatgttactgaatttctacaaaccaaccatgaaagcgatgtatatatatccccagttttccatccacttaacgtttggaaaactgtggagctttacgagccttcttgagaccaactttcttcctctccaccacccttgaatctctggtcaaaagcccttctttcttcaacgggctcctatgatcggcactcaccttcagcaatgcacgagcaatgccgagtgagattgcctgtgcctgtcccgaaagcccacctccatgagctttcacgaatacatcgtaactcgtttcataccccaatgtcaccaatggaact

SEQ ID NO: 13682 - DNA, 484 bp, Gossypium hirsutum
  Clone ID: LIB3829-013-Q6-N6-D12
aaaacaccaaaaactagtcatgcaacataccatccatgaaagaactattttcgtctaacaaacggaaaataaaattcaactgcaatccatattttaaagtatccaaatgcaaggaaatagttgcagtacaagcatcaaacacattggaagagtcattccatcaatttcaaaaactcacacatttataaaagggggtaacccagtttggaaaatggaaattaatcaatctttcctaagttccatgtattcccgggggataccaactgcatttatgaaaacaagttcgagtttggctccagggtatatatctctctcggatgcaaatgcaaaaacagtttttaccaaataaatagcttcagcttccacaagcggagaaacagcatcctgggcaggcaataaaaaaggactgggaaatttcaattggttatccaaaaaaggcatgatgagcgttgaaccaaaaccttgagaactgtatccaaccttt

SEQ ID NO: 13683 - DNA, 526 bp, Gossypium hirsutum
  Clone ID: LIB3829-013-Q6-N6-D7
caaatccaacatctcagaacattaaaacttaattgtaatgttaccttaatcaaaactgaaaacagcaacctataaataaaacctgacatgcaaaaaggtaccagaaatataaaaaggtaaaattaagaacatattccatcacttaaagcacttggcatccaagagaggctctccctcaaatggctcgcagtcttcaatcatctgattcacccgttccttctgggctgcatctgagaggtcgaccttcttccactcgtagagttccatgtcatagcactcgtcaatcacaaattgaggaatctcttgcccacggaaaagccatagtcctttcaccttgaatggagggttagcaccgatcaccaacatcttcccaaatgcatacttgcgggccaaatccattctctgcaggaatcctccaaccttgttcattgtgacaaatgaaactgtattctcctcattgtacttgtagtcacaaaaccacagtgagtatccctcgggatcatacatgtcccagaatcctttaatc

SEQ ID NO: 13684 - DNA, 521 bp, Gossypium hirsutum
  Clone ID: LIB3829-013-Q6-N6-D8
gagaacaatgccaggatattttggtttttaacaatgtaagtttgaagtaatacgagcattgcacaaaatagtaatatgaatttcagatgatatgctgcagttcaggtaagcgcaaagttggagccaaggatttagaggagatacaaactacaaacatctgtaactcaatgctatcaactggtccaaatttcactaacatcatttgcaattatctgcaatgatgaacagataaatcatttggctttgcagctgacatcttgcccacttctactcccatatttcagcagctaagatcactctgaacatgcttaggagataaaattactgactaggcaaaagaacagactcagcaaatgctgaagaaccattattaggagcaccctctaacttgagaatcgaagttaccaagttatatatctgaacattctcaaaagacggcaccttctttccccttgcaaattgaggaccatgaccaataaaaatggtcctcatggagaaaaatgcattgtcatacccatgtg

SEQ ID NO: 13685 - DNA, 551 bp, Gossypium hirsutum
  Clone ID: LIB3829-013-Q6-N6-D9
gatcctaaacatccatgacaatatattgcacaaaatgatataataacacaaacattgtgaatctgataaacgatggcaagaaaacagccatttatgtctcagctaaatgacaatattatcccttgtggacatatatccttctacaaccattacctcaaattctcttcctaagcgagacaaaaaagaaagtgcattatctaaatttccaaatccaaggttcgttgctacactgggccatcaaagcaaaggatgataactaatgctcaccaataactagaattttgttctaaagcttcaaaatttccacccttaaggttttgattcaatcaccttctttgcaaaggatggtaaacagaaagcagccgaatgaatctcagagttgtaaaacttaaggggtcgttttgatttgcagcagctctcatctttgtctataggattcaccggatgcttgaagtcaacaagaggcccctcagttgagcaaagcatgaaaccaatcatgccacttgggtatgtaggaactgtagtccaagcatagttaacagagcctttga

SEQ ID NO: 13686 - DNA, 480 bp, Gossypium hirsutum
  Clone ID: LIB3829-013-Q6-N6-E10
gccaccaaaagttctttgattggcttgcagaggtcttcaaaagacttctttttttcctcctttttctttttctcctcctccggctcggcctcgaaatttaaaccttcctttggggcaaaaacaagcttctcggatcatcgctggtgatgggaaccccaaaagatttgaaaaagctaaaaggtttgggattacagaatttgggaatccaaaagactaccacaaacctgttcaaaaggggattggggaaatgaccggcggaggagtggatcgcagtggggagtgtacagggagcgtccaagccatgatttccgcttttgaatgcctccatgatggttggggggtttgggtgctggggggtgtgccaaaaaaagacgatgcattcaaaactcatccaatgaatctactaagggagaggacccttaagggggctttttatggcaactataaaccacccactgatattcctatgggtggcgacaa

SEQ ID NO: 13687 - DNA, 529 bp, Gossypium hirsutum
  Clone ID: LIB3829-013-Q6-N6-E11
aattcaaaaatggttaaatttccatttaagctccgcgaataccaggaaggcctacaaaaagctaatgaattttacaacaaaaccatatttcccagttttttttttgtattttagatttttggaaactaagaactggtgaactttgtaaccgccttggtcccttctgaaacagcatgcttggccaactccccaggcaggaccaatcttacggcagtctgaatctcacgggaggtgatggtgggcttcttgttatagcgtgcgagcctcgaagattcttgagccagcttctcgaagatgtcgttgatgaagctgttcataatacccatggctttgctggaaatgccgatatcaggatggacctgcttcagcaccttgaagatgtagatcttgtaggtttcaatgctcttcttgcttcgcttcttcttcttgtccccggcttctttagggagcttcttctcggctcttggttttttctcagctggggccttctcggcctttttctcctcagctggctttttctcggctggct

SEQ ID NO: 13688 - DNA, 519 bp, Gossypium hirsutum
  Clone ID: LIB3829-013-Q6-N6-E12
ccaactcattttatgtattatcaatttacagtacacctgtaacccacaaatccttaatatcttttcagcaaatttctgatttgaagtgagcaccaagtttttattaatgttttctccttcctccagccattaaaatattttcctataacttttttataggtaggcctttgttgcaccaaaccccagtagtctgctatatttggcctgcaacttatatactcattttccaaacccaaaagcaccaatcgagccagcacgggtacaaatgtcgcatccgccatcgtgaactcatcccccacaatatatgttgggtcattcagctttgtttcaacttcatcaagcaattggaccaagctttctgtgctccttttaacaagatcagcattcttcagcttctcctcggtctcgtatgcttctctgagcttgctggggtaagcactagcaaggtctggtgattcggccatccgagcgatcaccactttccttatgaatttaaaaacgtaaaggcggtgcttgtca

SEQ ID NO: 13689 - DNA, 525 bp, Gossypium hirsutum
  Clone ID: LIB3829-013-Q6-N6-E8
aagacacgaaccaatcatctggattaagttaagagttctgcttcacaactatataatacaaaatgcaatctaaattcacggagtgggaactgaactgcaaagcttaacatgttcagcaaacggcagtcgtgtcatgctgtttcggacctgtagaccactgtagatctaagttcgtaacatcacagtaagttaattacagccctagcacagcacagcagtgcctaatcacacacgaggaaataaaaagggaggtcattgcccttggtgggcaccagcaagcttattcaagcaatcagatgctagattatacctgtacctataatcaacatgttgagccgaatctctttctgaatcccacaacccctgaaaggttcttctgttagaaccatacttgtcaaactctagtctctgccttggggcactctgagaccggtacttagcccggaatgattccgtattagccatgtaatttgggtgaccagaaaatccacttaaatagccccatgagcattctctctttgcgaa

SEQ ID NO: 13690 - DNA, 529 bp, Gossypium hirsutum
  Clone ID: LIB3829-013-Q6-N6-E9
acgattgcaattcttaccacctctcatacaggcacactgttagctttacatacaaatcttcaaccagatttcaagaggcagtccaaagccagaacactgcatttatttacaaaacccatcacatatttgatttttacttccaacacaaagccgaattaaaatgctccatagcaaggagacctagtctgctttatttatatattatattggtcatcctcgcaatcaaccagacccttaaatgtatactaccagtaccctacgagcgcaaccagggattaagcttttaatcatcactggccaagggaacagattttaccaattcacggaacttgaggatgtagaacatttcaagatatcttcgggtctcacgcctctcgagttttgagacgtacttccagaaaccatatactccagccaatgtcatcagcctttcagaataaattttccatgtatacctttcataaatcctcttaagccctccatcagatattttagtccagtggctttggatcctccttgcaacgttcaa

SEQ ID NO: 13691 - DNA, 515 bp, Gossypium hirsutum
  Clone ID: LIB3829-013-Q6-N6-F10
caggctctgatccctaaaaaacaaattttcattcctatctaacaattccaccttactacataaccaaagtacatggctgtctccggaggacttaacatttccaattgctcaattgacttccaaaatttgataaccaaaacaaaccaataaaagataaagcatcattctcgaccggataggatgcccatgtgaatggattttcttgaagtctttagtaagttgtcttgagtttaatttctttttatttagtttggggaatcaatggtagataattaggtgccactgcagctgacaatgaaaggtttgacaaagtttataaattcagaggttctgattcccagcttcaaatcaacctcgcctccacccaaccagaagaaatctggatcaagctttacaatggcttcatctaaaattactggaatgtcagtttgcataccgatgcaagtaactgcattgtgctcatagccagtcaactttattgatgtttcctcaggagcaagtctcacaaaacgatg

SEQ ID NO: 13692 - DNA, 537 bp, Gossypium hirsutum
  Clone ID: LIB3829-013-Q6-N6-F11
gcagaataagtcatgctgattttcaagtttggaagggaaaacaatctggggaattatctgtacggagtgcctataaactattacagtattctttactagatcctagtagtattatattacagaccgaatctaaaaaattttacaacaaactttggatcctacaatttcctacaaaaattgcaattacagtttggcgtatctcctggaattatctgtccacgcttataaaccttaggagtaaaagggtgctcacgaacgtttgctgcctccgttgttgtttgggggatgaagactgctctcacgtattcagacaatgccctgggtattcctgcaggggtctgaggagcagagtcgaatcttttgctacgctttatggttaatatggtacttaagaaaccagctagtacacgaacggatatccatcacaggaagacaacaatggttgagatacactttgacgttgcattcgacaagagaacttttagatctgtctctggatggtggtttggggtcgtagaaataaaattctggcattga

SEQ ID NO: 13693 - DNA, 534 bp, Gossypium hirsutum
  Clone ID: LIB3829-013-Q6-N6-F12
ccatgaagaataaagaagccatattggaaactgcttgacttgaagttatcaggttatcaaaataccaacatcatttctgcttattttgtacatctaatgaaaataataaaacattttaatagcccatccaatgtcgaaaaaaaccagaatggaatgcccggtcaaacgactgtaggctactatagaatacaataaccccaacattcactctcacccttaacaatatagaaatacacagattatggcatggaagtaaattcgaagaacaatgctcaattgctcatgcatcatgagcaaataaatggagaaaagtctattcacaaaactgatcgtataagaaactggaaaatcatgtatcagaccctatgatatccctggcccaggaaattccaactggatatgatctgtgtaccttcgttttcatggtagggacttttttgacaggggaatctacatcggttttgtcagggtctactgttggtttctgatttggggctgactcattggtttcggtaaggaattgtagtcccttca

SEQ ID NO: 13694 - DNA, 520 bp, Gossypium hirsutum
  Clone ID: LIB3829-013-Q6-N6-F7
gaacttggtttggtacacatttatttttaatcagaagtatgagcaatcaaatcataactctgggatgcaaatggttttcctatctcaccctaaaatatttaatcagaaaaaaagacaacattgacttgaaatgtatttcaaaatttgcatgattagccagaaccagcaaaaaccaggattttatttgacgcaatcaattagtccagcattactccacgtctctgagaagtgaccacgctctacaaccctatttttttctctgccttctgaatctggttgaggaatatccaagtcatcatgacgtgcggagcaatcctaacacaatatacagggaacccggtgtaaaatttgaatggtcctccagccttgagggttttcatggcacagtccaaagagccgctatatggatactttcccgaagcatcaggttgcattttctgaatttgtgttttgacataatcaaaaggcaaactgcaagcagcagcaaagaaacctgaaacagtacttgcacctagcaccg

SEQ ID NO: 13695 - DNA, 502 bp, Gossypium hirsutum
  Clone ID: LIB3829-013-Q6-N6-F8
gatacacaatgaatgacatcttaattggcaatgtagagtttcaactattacacaacagggcttccaaaaatcgtttccatcacatatcatgccatgaattctgtcaccatggttattccaaattatttgaattgtcacggggatctttggggatcttggaaattttgttgcattgtctgtgcaaaattctgtagccgatggttctgaaaaccactgccaccctgagtctcgatttcaaaactgctaaatggtttggcaccagtagtgatgatgtttttaaaccaagctgcttgaaatctggggcttcctctatttgaattgccggggctatcattgccaccactagaactagacgtaacacccacaagaaaacgatatgccactttgctagctgatactatctcagtcttggcttgtctcaaccgtaaggcagggttttctgctatttctatagcggcatcaccagcattagcaaatcggtttacccaacctggaagctttt

SEQ ID NO: 13696 - DNA, 457 bp, Gossypium hirsutum
  Clone ID: LIB3829-013-Q6-N6-F9
aagatgaagaggaattaacttttatatcgaaattccgtaccagctaatctctttgaaatacaagcaatgaaattcatcagcaaaacccttgcttcctcccacctcattagttactctagacacatgaatgatggcacattatgaatgtaccatgttagacgttatcatcagtacataaaaaaattacttcatcccagatgatactacatgactttctcctcatgcttagccactaaagtcactgataaagactagttatttctaattaggccagtagattccaaggttttgctgatttaactcataaatccccctcctggcatattagggggggcctgtgatgaaacttgcccctgaaaaactaattgggatcatcctggaccttgaacgtaagcaggacccattcctgaaccaaccatttgttgttgctgaaaaagttgctgttgctgcatctgag

SEQ ID NO: 13697 - DNA, 510 bp, Gossypium hirsutum
  Clone ID: LIB3829-013-Q6-N6-G10
aagcatatcaagcttacttaaataccatggctaatatccgacagcctttactagacagaccaagaggttcttacagcagggattgccccctaattttcacattggtacttctaatatgcttagctgccctggttgcaatccatttagtaagattcagctccttcgatgctaatcatccatataaatattgtgagagagctgttgaccagaaatcatgtttagccttgctctctgaagtagcctcaaagacaaccgtaagaaagaagggtgttgatctgctacatgctttcttagagcgatctgcttctgatatgcaaaatgtcatcaaccaggctcgcaacttcaacgatggaatcaataatagtagggagcaagcgagtttggctgattgtctggagttggtggagttatccagggacaggatcatggattctatggttggtgttgaaaaacaagatgttaattggcattccaatgctcaggcgtggctgagcagcgtgctgacaaacc

SEQ ID NO: 13698 - DNA, 537 bp, Gossypium hirsutum
  Clone ID: LIB3829-013-Q6-N6-G11
aaaaccaacaaaaaagattttaattaattgaaatgcaataatctgaattaagaactgtagaagctaactctcaaagtctaatacaatacataaaaccataaatttcttattgttcatctaagctcagtaaatatgataaaatataactatgagatatgtagtaacatatataaatgtatctccctccaacctgcaaaataacacaatgatgtgttttcacttggaagcaccattaggaatcttggcggatatatcgcccgatgggttcagttcatcccaagcttcaatccatgtcaccatagcatccgccagcttattgaagtagtcatcgaccttgccgagtttcgccttcacttgcttggagatctcgatgtagcatttctgtacggtggtgcagtccttcggaagggcaacggattggaagaaaggaatcaactcttcttgccagtaaattcctttgtattctttcttaaggttcacaaacgggttgctcgctttgctgtgccaaatgtagggaagtccggtcttcactcccca

SEQ ID NO: 13699 - DNA, 437 bp, Gossypium hirsutum
  Clone ID: LIB3829-013-Q6-N6-G12
ggtgggggggggggggggggggggggggggggggggggggggggggggggggggggggtggggggtgttactttctgtggggggtgggggggttttttctttccttgggggggggggggggggggtgggggggggggggggggggggccgggctgggatggggtggccggcccagcaaaaaaaacaaaaaggaaaaaggagggggaacgaacgcccgggggcgggggggcgggcgggggggcggagggggggccgggggggggccgcaggccggccaggccgggccgggaggggcgggaaggcaggggggggggaggggggggggggggggggggggggggggggagggggttggccggggggtgggtggagtacggggccggtcgcagaaaaaagaggagagggggggggaaagggaaaggccaaggccggggggg

SEQ ID NO: 13700 - DNA, 536 bp, Gossypium hirsutum
  Clone ID: LIB3829-013-Q6-N6-G7
acagtgtaataatctcaaatatacatcatctcaaattttcccccccaaaacagaagagtaaaaatactctacaacaactattatgaaacagggatatttcagagccatcacttgaaaacggttattacacaaaagcatgacacggccactgaacatattgatgaactgtatattgaacaatgcacacgggatgcctaaaataatacgatggaatggtacaagattagcaaaagactttaaaaccaactagctatggatctttgcgggattgcaaattaaagcacaagcacttatctttcattgcttcagcttccttcccatactccttgaatttatattcatcttgtttaaagttagggggaaccttcccctcactgtagcattgattacaaagactaaaatgagactttacttctttaaagcgagaaccgataattgggtaacggcaaactgagcagacatggtgttcatgacgattcctatctccagtttctaacttcaggaaagtggacaagataccaaagccccaatcagga

SEQ ID NO: 13701 - DNA, 463 bp, Gossypium hirsutum
  Clone ID: LIB3829-013-Q6-N6-G8
aaaaaaaaaaaaatcttggggccataaaaagggaaaagggggggcctttgttcaaacgggaaaacccgccctaaaaaagcctcagggaaaggttttttgccgggggcattcaattccaacgggaaacccctaaaactagaaactttttttattaaggggggggaaaatttgggggtttttatccccaaaccgaattggcagcgaaatattgcagggctaaaagcccaaaaggggcattttccttggccccaacgggggattggggatgggaaaaaaactcaggcccttaagtataataagccccatttttgtcctcagaatgggaatcaacgggggcacccttggatccccccccccctctttttttctcggccccccaaaaggcggccttttaagcatcctttgggttgccccaggttttttaagctagttttttgggatactctacataatggggaactaa

SEQ ID NO: 13702 - DNA, 516 bp, Gossypium hirsutum
  Clone ID: LIB3829-013-Q6-N6-G9
agggctcaaaattttacagaacaagcctcaaatttactaatcctacaacagtgctagcttcactagaaattatcagtaatatgcttataaccaggtcaatgcatcatgccaagaaagtggtacccttcatacatgtttgtgagacaccttttgtgcaattaacttcacctccttgattctctcatcgaccaactgctgcagctgctgttcttgggtttttgtctgatcttcatccatttgaatacccccagccttgctgttctgcaacctgaacatggcaaatgacgtctcctcgtcatgaacacttgggacctcaattacttcctttcctgctgtctcagaatctttacctagtatatcagccttcaccctattgcaaattattgttacatagtcttccatatgcttctctataggatcaaggccaagatatatcaaaatctcccaacactgaagaaactgtttcttgttaattttcaaagttttcctgacttcgtcaacgacatcagtggatgg

SEQ ID NO: 13703 - DNA, 480 bp, Gossypium hirsutum
  Clone ID: LIB3829-013-Q6-N6-H10
gtataaatcgtttagggagtaatttccccccctaaatctgaattattaatgaatttttttgccgaaataaatttctcaatgtgtcgagcttttcatcgccatctttaaaacctaaaacataacaaaagaagggagatagtaccaccctaaatttaagcaccaccagatccgtacttttttccgaaaacaatgagctgcaacttgtcgtatccagcgagcacaccagcaccggcaatggcacgaaggatgttagctccagcacccttgaatagaaacttggcaccttcgtttttcaagatctgaaaaaaggcatcgagcgagctcttgtatttgacagcttcaccagaagtcatcatcattcttctacgaacagtgtcaattgggtaagatgcaaggccagcaccatttgtgatgagccaaccaaaagcaaagctagcgaaaaaactatcctgcatgcttccagtcaaaagcactggcttc

SEQ ID NO: 13704 - DNA, 536 bp, Gossypium hirsutum
  Clone ID: LIB3829-013-Q6-N6-H11
cttgcagatttttcattctattatatatcaattctaatctgatgtccttaatagttatttttcattctcatctcaccgttacagctgcgtttaaattcaaacacacactccactattgtttctaatctcaccgctacagtaactaatttcaccgccaccgctatttttaacctcaccagaggtgaacacaccgcctatccaaattagcacgcccatccaaactaaccctaaatatatataaaataacaattctagcgacgatgggggcaaaaagtgaccaaataattgccgcgggtgcaagtagcaatgctggttggatcatcgtatgcataggaatatgctttgggacaagctgccttgaaaatcttcgaatacgctgttggcttgcatgactgggggttcccgaaggtcccagtgcagcaatacctcggcgagttgaaagcaaagcaagcacttttacaagctaccactcgcttgttatccttcgatctcacttgtaaaccaagtgggcacattaagttcaagtcactcacaca

SEQ ID NO: 13705 - DNA, 455 bp, Gossypium hirsutum
  Clone ID: LIB3829-013-Q6-N6-H12
aaagccaagagtcgctccataattcaattttctagaacatgcaaggctccatagatacaagtgcctggtgcatatcaagttgtaattatggcaacattgttgtgcaaccttttgtcatgaaagctgtaatatttaaagatacatcatcccgaatttcttaaataaaggccaacatttaacttgagcaaattagaagacatctaaaatataatgcactgccccgtactccatggcttccaaaaacggaaaagaagtaatctctctactctttcccaaaatcagtactgtagtgtgcactagattccagtttcttggcttcgttcaactttcttactgccttcatgaaatcttcatggattacataatcacgttctgcacgaatcgctgacattccggcctccgtgcaaacatttcgtagatcagcaccattaaaaccctcagcaagtttaacaaca

SEQ ID NO: 13706 - DNA, 523 bp, Gossypium hirsutum
  Clone ID: LIB3829-013-Q6-N6-H7
agataatatgtcgaggtctttcatcattcaaacacgcaccataaaagttcaacaagcaatgcactttacaaactaaaaagacatgctttgaaacagggactcgttcggactcatgactgatagaatcttaaagttcctcacaaacgctaggactaggaaggttttataacttaatgtagactaacaggtttatttgctacaaacaccgacaaatggttgtgcctacaatgggaatttctagttcttgcttatagcagtagccttacgcactggatacgacttttttcagtagaacaaaaacaggcttacatgatgatctcctacccactccagcatcatgtcatctctttcagaaataataatcttcggtgtgtgggaaaagatcatgtatgatggtagctagttccggttcctgcatttttccatggccctcggagcgagtccaatggcatcagagcttttcatgatcctcaaccttttgcaggtgtcagtgaacatctcccatggaacatcacccacaagc

SEQ ID NO: 13707 - DNA, 527 bp, Gossypium hirsutum
  unsure (1)..(527): unsure at all n locations; Clone ID: LIB3829-013-Q6-N6-H8
ctcaataaacacactgctgatgatgacattgaaaaagaaatatacaactcgagaaaatttacctgtccttggcagctgcaactttatcaaataatacaagtccttgccgatacagaacaacaataataagcatgcaaaacttagaatagattctgacaggcctccacctcagaggctgatgcatcgagcaggccttgcccagatggattcaagctaatggtcttcgttgctgcatcgaatacagctttctgataaaagttatcctccattttcttaaggatttccttcaccactttaaaatctagtcccccagccaaaatgagtctcccgattatttctccaaaattatttggtgctttcggtaagtcaatggcaatgtcatccagcaaggcaccgtagaggaggcatccggtcgcgatgtctcttgcagcaaaaactttcttggaaaacaagtattcaagaagtttccagactggctcaacgcatggtgggncttttgtccaaggcaattgaaatcgcttctttca

SEQ ID NO: 13708 - DNA, 437 bp, Gossypium hirsutum
  Clone ID: LIB3829-013-Q6-N6-H9
aaagccttcaaaaaaggggtttttaagattcagggggcccttttccttaggggtacaaacgacacccggcccaaaaaaggaggtccccaaacaaggggttttttaaacctttttattataaaaaccaagttttttttacttaaaaaaaagagttttaaaagcccattggatccttaaaccgcatttgggctaaaattttacccttgcaaaccaaaaaaaccgaaaggtactttgccgccagaatttcctgggcttttggggagccaagggccccccttgccaagggcatggggatctggatggacaactacagtttttccaaaaaaggaatttgggcctggaaaaaaaaattgtttggcggggaaggaaaaacttgcacagcctttataaccaaaagggacattccctaaataaccaacggggggggtttaattttt

SEQ ID NO: 13709 - DNA, 581 bp, Gossypium hirsutum
  unsure (1)..(581): unsure at all n locations; Clone ID: LIB3829-014-Q6-K6-A10
gggnaaatcgtagtagtcgctccgatcaagagaaattgtgtcaatcaagggtgccacacgacaaaattctttaaaagaggcattacctactgagatggaggtgtcattcaatgagtatgctaatactgggatttctcaagattcaggggatgtaactagggaagatgatcaaccgaaaatggcaaaaggaggtgaatcattttttgcaaatattatcaagaagagttttaaggatttctcaagatttaatcaaacagaggaacgtggngaaaagtaacatttcagttaatggacatcctattcctgaacgtgtggttaaaaaagctgaaaagatagctggaccagttcttcctggacagtattggtatgatttccgagctggattctggggtgttctcggcggaccttgtcttggcataattcctccttttatcgaagaatttaaccatccaataccagagaactgtgctggtggaaccactggtgtttttgtaaacgggagagagctccatcagaaagatttagatttgcttgctaatagagggcttccacctgacagagatagatcttatatcattgag

SEQ ID NO: 13710 - DNA, 599 bp, Gossypium hirsutum
  Clone ID: LIB3829-014-Q6-K6-A11
tgaaaaattaatgcttcagcacttgtgctgctatgactccgaagttattgttaatggtgacttgtcaaaggagacaatcatgaaggaagtgccatctctgcaaaaccatgtaatggcagaaggttcagtgctcaaggagtcttttttcccccctttcaatgtgccatcaaaagactcatcagaagcatgtttttcaaatctggttcaaggtgaagacttgcaaccatcagcttgttctgtaggtgggaatcttggcagttctaaaacagaaaattcaactgttactactggtggcaaagatagtgactgcaatgagaggggaaacactaaaggtggttttgaaatcccagtgaccttatcacccaattgtggtggtttccagaactcgggcactgcaaagatcgcgagtaaagagaccctgcagaagattagttgtgcttcaaagattgaggtttcaagcactgttgcactagaagatttgataggaaaagcagtgaagaaagttcctggtaaagctctatctatgagtactactagtgaaacatcaaagaatgctcaggctactatgtctctagataagccaatttgtaacggtagtc

SEQ ID NO: 13711 - DNA, 563 bp, Gossypium hirsutum
  Clone ID: LIB3829-014-Q6-K6-A12
gggggaggacgttctaaaaataacgccaaggtgggcttatgaagccagctttcacaattatgcgtgataaagactcaaagtgcttcctcctattgattcgtggcactcatagcattaaagatacactaacagcagcaactggtgcggttgttcctttccaccattcagttttacatgaggggggaattttttttttgttttaggatatgcacactgtggaatggttgctgcagctcgttggattgcaaagcttgctgcttcttgcttgctcaaggctctcagtgaatatcctgactatcaagttaagatagttgggcattcacttggaggtggaacagcggcattattaacatacattcttcgggaacagaaagagtttgcctctagcacttgttttacatttgccccagctgcttgcatgacatgggatttagcggagtcaggcaagcacttcattacaactatcatcaatgggtctgatttagtgcctacattctcagctgcttcagttgatgaccttcgcactgaggttacagcatctttatggttaaacgatttgaggg

SEQ ID NO: 13712 - DNA, 592 bp, Gossypium hirsutum
  unsure (1)..(592): unsure at all n locations; Clone ID: LIB3829-014-Q6-K6-A7
gctttttctgcatatcttccttgcaatatccgtattaaagtcactcccggcacccagccatcattccatattgagatatggtctcctacccctaccctccacacaatccatccatcaaagtttttttgtcgaccaaatactcctccagatgttgagtactacgttgcctacggtggagttcacgatcggtgcaaatcctttgggttctaatagtggtgtcagtcgagctacgaagaaggtctgtaccaggatggagttactaccggacatggatgactcgacaatagatgggaatggacaaaaggttcagggatcggaggtacctagagtgtcgtataaattagcactattaggggcctngccagtgcctgcgcagaacgctttaatgaagcaagatttcgctctaacagaaggcaatgtgatcacggaggttgtcgagggtgtcccattgatcacgttttttgatcgggtacaagagtacattgaacgcagaatgtctagaacaatcattgtgaaaatgttcgggggaagaattggattcatcaatgcatcgttgaataagatttcattgtttgtggagtccaagatgccc

SEQ ID NO: 13713 - DNA, 607 bp, Gossypium hirsutum
  unsure (1)..(607): unsure at all n locations; Clone ID: LIB3829-014-Q6-K6-A8
tcgggaaaaggnatcaattgcaaatttggggtactgctgggcaagagaggtttcgtacaattacaactgcttactaccgtggagccatgggcatattgcttgtgtatgacgtgactgatgaatcatctttcaataacattagaaactggattcgaaatattgaacagcatgcttcagacaatgtgaacaagattctggtgggtaataaggctgacatggatgaaagtaaaagggctgtccctacctcaaagggccaagctcttgctgacgaatatggcatcaagttctttgagactagtgcaaaaacaaacttaaatgtcgaggaggtttttttttcaatagccagggacatcaagcaaagacttgctgacactgactcaaaggctgagccacaggcaatcaaaattaaccaacaagaccagggagttggggctgcggcagctgctcaaaaatcatcttgctgtggagcttgaacaaactacattgcggatgagatctgaaaggtacattttcttctctatggtgccattttgatcctgtgaaaactaatttgttacaactaatttggttatattctcctgcatatcattattttacagctgctact

SEQ ID NO: 13714 - DNA, 569 bp, Gossypium hirsutum
  unsure (1)..(569): unsure at all n locations; Clone ID: LIB3829-014-Q6-K6-B10
gcgttcgcaaaacagcgggtagagagaaagcanacagggagggaaaaggaaggaaagggaagctttatataacccatctcctttctctctaaacgctcttcctttccatctttcctttctttgctttgcttgtttctattgagagatttccactaacaaaagctctagacttttgtcttcccacatttttctctcaccatgatttccttgcacagaagctgttttctgaataacactggcatttctgggtcatcaagccctttctcatacaagctgaagaagctgccaccagcttcagtcaaagtcacagctttaggccccaacagggatcgaaacagcagcgttttgattgaaaacaacaactcattgaaagaaataaaagaagatggcacttcttctgttgctgatgtggaccccaatcctactgttaccggcgaagaccgcgacctctactatgacgccgccgccaccgacgatcaacttgtcaccccttggtctctctctgttgccagtgggtattcgttgttgcgagatcctcaccacaacaaaggactcgcctttaatgagaa

SEQ ID NO: 13715 - DNA, 587 bp, Gossypium hirsutum
  Clone ID: LIB3829-014-Q6-K6-B7
gcgttcgattttgttggttccaaaattatgtcaaagttaaagctactggtagtccaatgaccagtgtagcacaagtaatagtggtagctatcaagaaaaggaaattaaaacctgtggagcagccttggctctcccttttcaagtattttcctcccaagtctatcaactccaagcttccctataccgaccaattcagattcttggacaaagcagctattgtgacaccccaagatgaaataaagggtgatggatcaccagcggatccatggagactgtgcagcttgcagcaagtagaagaagtgaaatgcctgtttagagtgcttcctatatgggcatcacaaatcatgtattgtgttacccttgttcaactgcatacctatgccgtgttccaagccgttcaatctgatagacgcctcggaaatagcaactttaagatcccagctgcatcctatgttgtcttcatgatgcttagcctgaccattttcatacccgtatacgatcgagctatcgtcccattccttcgaaaaatcagagcaaaagaaggggcattacaatcctacagaggatcggtattgggatgtttgtct

SEQ ID NO: 13716 - DNA, 115 bp, Gossypium hirsutum
  Clone ID: LIB3829-014-Q6-K6-B8
aaaaaaaaaaaaaaaaaaaaaaaaaaaaaaaaaaaaaaaaaaaaaaaaaaaaaaaaaaaaaaaaaaaaaaaaaaaaaaaaaaaaaaaaaaaaaaaaaaaaaaaaaaaaaaaaaaa

SEQ ID NO: 13717 - DNA, 574 bp, Gossypium hirsutum
  unsure (1)..(574): unsure at all n locations; Clone ID: LIB3829-014-Q6-K6-C10
gtgcatccacgctctcctggcactctcccgtgccttacctctttggtggcctagcagcgatgctgggcctcattgcttttgctctcttgatcttagcttgttcctactggcggctttctggtcgtttggacaacaacagtgaaggaggtgatgtcgaaagggatgtcgaaagtggtgaaaatgagggcgactcaaccaagcaggtgaaggtttatgaggagaagattctggtgataatggccggtgaagagaaacccacgttcttggctacccctgtaattgtatgcactaaagcttcctctttcggtggtaatataaatggcaaggttgatgatgacaaggaaggatcaaagaaagacgaaagtggcgagaaagtgaaaggagagatgagtggcgacgacgacgacgacgacgacgatgatcaacaatttccaacagtaacagacaactctgaaaaccatgacaaccatgacagccaaccaaccccagaccaaaatcaaaccagtgagcttagctcttagttgcttacttgctttcctttttcttttctttntttcaatttggtccctcttcg

SEQ ID NO: 13718 - DNA, 582 bp, Gossypium hirsutum
  unsure (1)..(582): unsure at all n locations; Clone ID: LIB3829-014-Q6-K6-C11
gcgttcgggcagggctagnattccagcccccaaaaaactattgatgggagatggtcattttaatgggcaatttcgggagcagttgcagtcatcattgctgttagaggagaggcaaaagaggcagaatgaggtttatatgggacagaacatgccacaaaatatttactccactgggggtaggtacttgtcactgaggcaagaacacctgccttcagaaaatatgcaagattgggcagtcactcctgcccgcatgccagcgcctttccaacatccgttgaacagtagagaactgttgagtcaaaactggtttactggagagcatcaagttccagttcgtggtggatgggctggttcagatggttttagtggccaaagtcagagtatcatgagtgcaagcaatgcagatcagagcttttttagtgttctatctcactgtaaccaatttcattcgagcagcccttatgtatcaatgggctctactgggcagttcattccacagaggaacaatggaatggtgaggggggggccttctggaataattggaaatagtatgcagcaagctgctcttccgttcgattattt

SEQ ID NO: 13719 - DNA, 597 bp, Gossypium hirsutum
  unsure (1)..(597): unsure at all n locations; Clone ID: LIB3829-014-Q6-K6-C7
gttattctcaattctcacacttgaacagcaaaagaaacactttcacttttagttcagttctactgaggtttccatctctgaggacatggagagtcagagaggtcctcttcttagcttggcttacttctgtcaagggaaagacaatggaagagcttaggtattctcttttctatacgactatggagctggaacagacaaggatggcagttcaggaagagctaagaaagagagatgatcaattaattctactcaaggagttgctaagcaaggcaataagagagagggatgaagcacaggagaaatgccaaagactttttcttgagaaactcatgcttcatcaactgcagcagcaacaacaacaaaaacagcaagtttctcctctctctggagtttctggcgttgaggatgaacgcataaaaggaatagactccaacaatggcttctcatcatctgactgtgagggaagcatcgtttcatcccctgttcttgacccaactcaaccaccccaactgccaccacaagnactaccacctcagtccatgccacaaacaaccatggagcttgtgcctgataagccattgcctgaaaagggaaagc

SEQ ID NO: 13720 - DNA, 581 bp, Gossypium hirsutum
  Clone ID: LIB3829-014-Q6-K6-C8
ctccggtagaacatcctccccacaccacagaagagcttgggttacttcttaccaaaggctagttcctcactggcactctgtttctctttctcatcagcattccagtataccgatatcaatatctagagttaatcaatttgatgctgctagattggatattgagctgtcagccatgttaaaagaacagctggttaaagttttctccttgatgaagccaggaatgttatttcaatacgaaccagaactcgatgcattcctcgagtttctcatttggcggttttcaatttgggtagataagccaactccaggaattgcacttatgaatctgaggtatacagatgaacgtgccgtggcattaagaggaaaagtaagaacaggtttggaaggacctgggctaacttttgctcaaaagatgtggtattgtgttgctccagtgggtggtcagtacatctgggctcgtttacagtcattctctgcttttcgcagatggggtgattctgagcagaggccattggcacggcgagcttggggtttgatgcaacgtatagaagggcttttcaaggctgcatcatttggcaacc

SEQ ID NO: 13721 - DNA, 544 bp, Gossypium hirsutum
  unsure (1)..(544): unsure at all n locations; Clone ID: LIB3829-014-Q6-K6-C9
ctttttctcttttttgtttcaatctgccctccaaaaaaaaacttgaaaatggatccgtttttatatgcgatccccccagnaaaaaaacaaaccatattttcctattatcctattgccctccctgctgttcgtggcttgttgcaggtaccactagcgagaagacatgcgcagaggctactgaacgtgggcggttgctgcgacgtggggcatacggcgccggtttgctgctaaccacttagggtttctatgtttggctaatttgggctagtgctattgggccgaatggtattgggtcatttggatttaggttatttgtaaaaatggactgtttagggcacgtttggtttgctgtattggattagaggtgtattggattagaggtgtaatggaatagaggtgtaatagcaaatcaactgtttggttgaatgtaatggaatataggcgtaatagtaatcttgtgtttggttgaatggaatagaggtgtaatagcataatggaaaaaactaaaatgactagaatacccttagcataaatttattttggt

SEQ ID NO: 13722 - DNA, 593 bp, Gossypium hirsutum
  Clone ID: LIB3829-014-Q6-K6-D10
cttttactatcttcaattcattgagtaattttctttaatgaaccgattgttttcaaatctccattttgactgtcagttgtcaaaatcatttctttttatatattctcatgttgataatttgattaattatggaatgcaaagattgggtttctaaattttggttcaaattagatatgggtttggaagatccatccattgatgtgtttttaagacgaaattagatggagttaaagcaatattcaagatttaaccatttattaaattagggtttaggatccaatcttcatttttttttttgatatgaatattcttgtttgcttatggaatttttgtccatggtacctttgtaacatatcagattggaatttttttggatttctgaatatatacatatatatttatttatctttcatgtttgatttatgatccaatcatcacatatggtgaattagcttttattttagattttcagcattgtttttgcaattggtgtttctccaggttttgagagttgtgaaggttaagaaattcttcagtaatggcattgcaagagaagctggatagatttaataagcagcaggagaagtgtcagt

SEQ ID NO: 13723 - DNA, 595 bp, Gossypium hirsutum
  Clone ID: LIB3829-014-Q6-K6-D11
tcgctctttcgtatttggttataaactagcaaagaaaatgtgcctaaatgaaatgctctgtgtatcaattagagtcaatcccatgtttgatgcatgaattgaagaatcttggactgccataattaccatacaaatccaaatgatttcatcctttttctcccattcactatttactagctcaaattttcccttcttcctttaacgtggtggtttcatacagtttttattttcttttaaagccccctctctttcaacatatatagctagtgaaaattttatgcttttgtgtggctatgattaaaaagcttattcatgagtataccgacatgcaaagcgaaaggtacgttgggagatagttgtaagcaagcgttgcttgggtagctgctatttgtgacccattaatttgcttgattatggaataaccaaatgacacaagacagggtgtttaacattttcatacatttcttgagcaaatgttggcaagttggtctttgtttttatgctctattcttggcactcttacatgtttagatttaaccttaaatatccaaaaatagatccattttgaacaagaagtatgcatatataataaaca

SEQ ID NO: 13724 - DNA, 585 bp, Gossypium hirsutum
  unsure (1)..(585): unsure at all n locations; Clone ID: LIB3829-014-Q6-K6-D7
gctttctgccaatgaactgtcgtataatgtttagtttagtttataatcatgtaatatttgatccttcaattttacatatttattatctaggtgggaacttatttgatctgttttagcttttcttagggccagtttgagatattatgcttgtccggttcttacttactagccgaggatggtggaccacgcagtcgaacagggggcataagtgcttcactttctactcctgatggtcatgtcataggcggtggcatcgcaacattgattgcatcaagcctagttcaggtatccttttcatttctccaaatttaacttctattttgatgcttataaaatcagacgagtctgactagggtcttatttgcatgcgcataagacgtgctggttggaatgagtgggtttgaataagggtgtgatatgtcattgaattgtatgtctgcaacccggatagtgttttcggtgggttaaaaaaatgagaagcttatgcatatgattttaaggtattatacacttgctgcagctggtagtttgcagctttgtttatgggggatctaaaacaaanaacaagcaactggctagcccaaa

SEQ ID NO: 13725 - DNA, 600 bp, Gossypium hirsutum
  unsure (1)..(600): unsure at all n locations; Clone ID: LIB3829-014-Q6-K6-D8
tcgggnaaacagagagcagnagaaaatgaagaccatactctcatcagagaccatggatatccccgatggggtcaacatcaaagtgaaggctaaaatgatcgaggttgaaggtcccaggggtaagcttacacgtaacttcaagcacctcaacctcgatttccacctcaccaaggacgaggagacgggcaagcgtaagctcaggatcgaggcctggttcggtactaggaagaccagcgccgccatccgtaccgccctcagccacatcgagaatctcatcaccggtgtcaccaaaggttaccggtacaagatgaggttcgtctacgctcactttccgatcaacgcctcaatcactggcggcaacaagtccatcgagatccgtaacttccttggcgagaagaaggtgcgtaaggtggatatgttggaaggggtttccattactcgatccgagaaggttaaggatgagatcgttttggatggtaatgatattgaactcgtgtctcgctcagcagctttgataaaccagaaatgtcatgtgaagaacaaaggatattagaaagtttcttgacggtatctatgttagcgaaaagggcaggatcgccg

SEQ ID NO: 13726 - DNA, 593 bp, Gossypium hirsutum
  unsure (1)..(593): unsure at all n locations; Clone ID: LIB3829-014-Q6-K6-D9
gcgttcgcggccgcgtgggcggncgcgtgggnaattgaagtgatcaacaacacggttgctcctgatgataatgttatttgtgctctatccggtggtgttgattccacagttgctgcaacccttgttcacaaagcaattggggaccgacttcactgtgtttttgttgacaatggtttgttaaggtataaagagagagaacgtgtgatggaaacctttgaaagggatctgcatttaccggttacttgcgttgacgcaagtgagcagtttcttagtaaacttaaaggggttgtagaccctgagatgaaaagaaaggtaataggcaaagaatttatctgcatctttgatgcttttgctcatgaattggagcaaaaagtaggaaagaagccggcttttctggttcaaggaaccttgtatccagacgtgattgaatcatgtcctccaccaggaagtggaagaacccattcacacacaatcaaaagtcatcataatgttggaggacttcccaaagacatgaagttaaagctcattgagccacttaaacttctcttcaaggacgaggttcggcaactcgggaggatattgaaggttcctgc

SEQ ID NO: 13727 - DNA, 575 bp, Gossypium hirsutum
  Clone ID: LIB3829-014-Q6-K6-E10
cggccgcgtggggccgccagcgctgcccttagttgcttggtcctcttcgcggggctccgacacctcgacccaaaccgggaagcttctaaaaagctttggagcacaagaaagaaattgccaagcgtttgggtcgtcctctaatcaatactaatccctacgaggatgtaatagcatgtgatgtcataaatcctgatcacattgacgtggaatttgagtctattggaggattagaagccatcaagcaagctctgtatgaactagtgatccttccattacggagaccggagttgttttcacatggaaagcttcttggtcctcaaaaagggttttgttatatggaccccctggtactggaaagaccatgctcgcaaaagccattgcaaaggagtctggagctgtttttatcaatgtgaggatatcaaatctaatgagcaagtggtttggtgatgcacagaaacttgtggctgcagtgtttagcttggcatataaacttcagcctgccatcatatttattgacgaggtcgatagttttctaggacagcgtcgtaatacagatcatgaagcaatgacgaaca

SEQ ID NO: 13728 - DNA, 549 bp, Gossypium hirsutum
  Clone ID: LIB3829-014-Q6-K6-E11
gcgttcgtatatcccctgggtcaactgacacattgccatttgctacaatgggttctggttccctggcagcaatggcagtatttgaatcaaaatacagggaaggccttactagaaatgaaggaatagaacttgtcactgaggctatatgctctggtatcttcaatgacctcggaagtggaagcaatgttgatatttgtgtaataactaagggtggcaaagaatacttgaggaaccatctacaacctaatcctcgaacttacaccagctccaaaggctattcttttcccaagaagacagaggtcctcttgacaaaaatcataccgcttaaggagaaagtggagatcatcgaaggaggcgacgccatggaagaatgaagcacttatgtaactgatgattagtatatcaactctctagctttcatttatgctctatcaaagaactattttctgatcagtgttgtgcaattgctcatctgtttgacctaagattttgttggtaatcaaaccatttgagtttgttttaacattgcagtaatggtaatttaccctc

SEQ ID NO: 13729 - DNA, 515 bp, Gossypium hirsutum
  Clone ID: LIB3829-014-Q6-K6-E12
gacacgattaaactattaaattgattcgaaaatttacatacataatattcgtaattacattaaaatattaattctacaaaagttacgggtcactcccgatgatatatacacatacagacaatatatgaagtaatgagagtgcatacgagctttgatattagatgtgcttactaatttatgagatgacaaaaaccctaagctcacctctatctcctatggtgattcgggtatcggcatcaatgaaggtaacatcaaagtcgccgctccctggattagatggaggcctcaaagcgtcgggaatccgaggtacatccaatgacggaagctgaaaaaaggtccctctagttttcacactcgttttctcgaatgttattttgatctttgaagatcctatgatttcaaatttgtgagctaaggtagcagtaacttcaagtggaggtaatggccatggagctcccaattcaatttctgctatattatcaaaatctttgcttatgacatcaattctctgaaaa

SEQ ID NO: 13730 - DNA, 589 bp, Gossypium hirsutum
  Clone ID: LIB3829-014-Q6-K6-E7
ggttgccaaaatcagtccaaccgcccctcttgataaagtctgtcccattagctgtgggatatgtacaggttttggggccactgtgaatgttgctaaacccaaaagggtcaaactgttgcagtttttggactgggtgccgttggtcttgccgccgctgaaggtgcaagggtttgtggggcttctcggatcatcgctgttgatgtgaaccccagaagatttgaagaagctaagaggtttgggattacagaatttgtgaatccaaaagactacgataagccagttcaagaggtgattgtggagatgaccggcggaggagtggatcgcagtgtggagtgtacagggagcgtccaagccatgatttccgcttttgaatgcgtccatgatggttggggtgtttgtgtgctggtgggtgtgccaaagaaagacgatgcattcaaaactcatccaatgaatctactaagtgagaggacccttaagggtgctttttatggcaactataaaccacgcactgatattcccatggttgtcgacaaatatttgaacaaggagctggggctggatatggacaagttcatcacacactctgtgc

SEQ ID NO: 13731 - DNA, 604 bp, Gossypium hirsutum
  unsure (1)..(604): unsure at all n locations; Clone ID: LIB3829-014-Q6-K6-E8
gcgtttcganatttgagcagcctccgccgcctgagtttggatctgggtatcgacggagacccgaatttgagcagcctccgcctcctgaatttgaatctgggtatggccggagacccgaattggcgaacaagagtccgagtacagatctgagtatagtaggaaaccagagcacggtgaatatggatccgaatatgggaggagacccagctatggtgaacccgaatctgaatacggatctgggtatggccgaaaggcagagtatgaaggaggcggatccgaatatggaaccggatacggacagaggactgagggcgagtatggatcgggttatggaggtagaacagagactgaatacgggtccgggtatgagaggaaaccaagttatggtagatccgaggaagaggaagaaggatataggaagccaagttatggtagatccgaggaggaggaagaaggatataggaagccaagttatggtagatccgaggaagaaggatatggccgcaagaaacatggcgatgacgacagtgatgatgatgatgaagagaagcgtcaccaccaccgctataagcaccaccaccataagcgccacgatgactatgac

SEQ ID NO: 13732 - DNA, 580 bp, Gossypium hirsutum
  unsure (1)..(580): unsure at all n locations; Clone ID: LIB3829-014-Q6-K6-E9
cttcttcttttctcctttcctcgacaaaacctcagctctcttaccgccaaagnaggatcatcttttcaggttttgcgatggcatcgaagcggatcttgaaggaattgaaggatttacagaaggatcctcctacatcttgcagcgctggtcctgttgctgaagacatgttccattggcaggcaacaatcatgggtccaccagacagtccttatgctgggggtgttttcctggtgaccatccattttcctccagattatcccttcaagcctcccaaggtggcatttagaacgaaagtattccatcctaatattaacagcaatgggagcatttgcctagacatcttaaaggaacagtggagtcctgcgctaacgatatccaaggtactgttatcaatctgttctttactgacggacccaaaccctgatgatccattggtgccggagattgctcacatgtacaaaaccgacaagaacaagtacgagacaactgcaaggagctggacccagaagtacgccatgggctaacgagcattgttgtgtgcaagggggaaaccccccccctttttttttttcttttttcg

SEQ ID NO: 13733 - DNA, 557 bp, Gossypium hirsutum
  Clone ID: LIB3829-014-Q6-K6-F10
tcgatgtggcagtggtgtgtcagcagctggtgatgaaagggaattgggtcttttggagatggagaaatggtacgaaatctagaaattcagcattggctgctaatggcaatcaagtggaggctgagtggattgaacaatatgagcctggagtctatataactcttgtagtactgcgggatggaactaggtattttaaacgagtgcgcttcagccgaagaagatttggagagcaccaagcagaaacttggtggtcggaaaaccgcgaaaaggtatacgagcggtacaacgtccatgtatcagacaaagcgtcgatttctgggcaaactgcccgcagatcggaaggagctttgtctccgacttctcaagtgtaagaaaaggaggaaaagcgtgagctcatttagtgtcactgacaaggttaaggagcatgaaacccccttcttttggtcatctcattttacatagtttgactgcccctgtataatttattttattgcatttaatgtctaggtctgtttcacagatatgttgtattgtggtatatataaaatcatcatttt

SEQ ID NO: 13734 - DNA, 595 bp, Gossypium hirsutum
  Clone ID: LIB3829-014-Q6-K6-F11
gcttttctggaaaacaaaagcgaagtacgagaaaaattgacaaagtgttaaagaaaaatggttgatttctgtgatttgctgaatattccatttatgaggaccagtgtaagaaaggaggaagtcactgccaaattattggaatttttggaatcccctcatgctacaacaggcgttcttcttgctgacaaggaacagaagggtaaaaggcgtaaggctacaccaagcaaaaacattggttctgcggaggcatcggatacatcagccaagaagcgacgaaaaacaccccaaggtgtagaaaagcgcaagcgttcatccaaagctgaggaggaggaagatgatgataaagttgaatcccctgttactagagatgattctcatgaagatgatgctgacactgcgccaaaagaagagaatgatgatgaggagactaaatcagaggaggaagaagaagaacccaagaagtcaagcaaaaagggcacatcaaaaaaggttgcaacagagagtccggagtcaaaaagcaaggataaatttgaatctgaaaaaaatctcacccctgcaaaatctagcaaaaaatcttctggatcaacttcaaaac

SEQ ID NO: 13735 - DNA, 587 bp, Gossypium hirsutum
  Clone ID: LIB3829-014-Q6-K6-F8
gccgtttcgtcattggaggtccccaggtgatgctggtctcactggtcgcaagattatcattgatacttatggaggatggggtgctcatggtggtggggctttctctggtaaagaccctaccaaggtggatagaagcggggcttacattgtgaggcaggctgcgaagagcattgttgctaatggactagctagtaggtgcatcgtgcaagtctcctacgccattggtgtacctgagccattgtctgtatttgtggacacttacggtactggaaagatcccagacaaggaaattctcaagattgtgaaggagacctttgacttcagaccaggaatgattgccatcaatcttgatcttaagagagggggcaatagcaggttcttgaagactgctgcgtatggtcattttggtcgggatgacacagatttcacttgggaggttgtcaagccactgaagtgggacaaggtccatgcttaattggagcttcttcacattgattctatgtctggtttatcttatctgctgtctgctaccatatgagtctgcttttcttacaatttcctttaatttctttttttgggtttgaaat

SEQ ID NO: 13736 - DNA, 488 bp, Gossypium hirsutum
  unsure (1)..(488): unsure at all n locations; Clone ID: LIB3829-014-Q6-K6-F9
tccgcgatagcgagctcgaggctttgcttggcaggtcgcaggcagccgcccagccgggacgaggtttccttgatgttgagcgaagtggacggtgacggcgacggctacatgcaacctggnaaacgttgcatgaaccaggtggttggaccggcttgcgacgaacccgcctgcgaaccggaactgagggagacttttgatatatttgacacagatcatgacgggaagatcacggcggaggagttgatggcgttttttaaggacaaaataggggatgagcggtgcacgttagaggattgtcggcgcatgatagcgagtgtcgataagaacgaagatggatttgtctgcttcgaggacttctccagaatgatggagctgcagcgatgatcatatgattatgggtttttatccgtttgtgtttgataatcatgtgataagagatgcacttgatttgagaaatacagaaatgaaaatttgtcttggtttttttt

SEQ ID NO: 13737 - DNA, 599 bp, Gossypium hirsutum
  unsure (1)..(599): unsure at all n locations; Clone ID: LIB3829-014-Q6-K6-G10
tnctggataattttcaaaaaaccttttcttccctctaacttgatttgaaaatccacaatggccgccgcctactcgcgaagaaaatgtctacatggcgaaactcgccgagcaagccgaacgctacgaggaaatggtcgacttcatggnagaaagtctcggcttccgccgccgacaacgagggactcaccatcgaagaacgctacctcctctccgtcgcttacaagaacgtgatcggcgcacgccgtgcttcgtggcgcatcatctcctccatcgagcagaaagaggagagccgtggtaacgaggatcacgtggccgttatacgtgattaccgggctaagatcgagtccgagctctcctcgatctgtggcgggatcttgaaactccttgacaccacactcatcccttcggcttccggtggagattcaaaggtcttttatcttaagatgaagggagattatcacaggtatttggctgaattcaaaactagcgccgaacgcaaggaagctgctgagagtactctcactgcctataaatccgctcaggagattgccaacgccgaattggctccaactcacccgatccgactcggtctagccctc

SEQ ID NO: 13738 - DNA, 587 bp, Gossypium hirsutum
  Clone ID: LIB3829-014-Q6-K6-G11
ttggtttatgagcttatggacaccgatttgcttcagaatatcaagtcttctcagccactttctaatgatcattgcaagtattttctttttcagctactacgagggctgaagtaccttcactcggcaaacatcctgcatcgagacttgaagccagggaaccttcttatcaatgctaactgtgacctcaagatatgtgattttgggttggctcgaaccagcagaggcaatgaacaattcatgacagagtacgttgtcacccgttggtaccgctcacccgaactcttactctgttgcgacaattatggcacctccattgatgtttggtcagtaggatgcatctttgcggagattcttggtcggagacctatcttccccggaacaggatgcctcaaccagcttaatctaattattggtgtcctcggaagccagcaggaggctgatcttcagtttattgataatcccaaagccagaaggtatatcgagtcacttcctttctctacgggcatccatttgtctcgtttataccctcaagccgatcctttagccatagatttgttgcaaaggatgcttattttcgacccgtccaa

SEQ ID NO: 13739 - DNA, 579 bp, Gossypium hirsutum
  Clone ID: LIB3829-014-Q6-K6-G12
gcgtttcggctctttcttggccatatcgccaggcagatttgttgcgggaaattgttggttatcgtgcagacattgtttgtcttcaggaggtgcaaaatgaccattttgaggaattttttgcccctgagctggacaaacatggatatcaagctttatacaagagaaagacaaatgaggtttacagtggaaatatccatacaattgatggttgtgccacatttttccgtagagatagattttcccatgtcaaaaaatatgaggttgaatttaataaggctgctcagtcgttgactgaggttgccgttcaaactacccagaagaaagctgctttaaatcgtttggttaaggataatgttgcactaattgtggttttggaagcaaagtttagtaatcagggagctgacaatcctgggaagcggcagcttctttgtgtggcaaacacacatgtaaatgttccacaagagctaaaggatgtcaaaatctggcaggtgcatacgctcttaaagggattggagaaaatagctgcaagtgcagacattccaatgttggtgtgtggggattttaattctgttcctgggc

SEQ ID NO: 13740 - DNA, 610 bp, Gossypium hirsutum
  unsure (1)..(610): unsure at all n locations; Clone ID: LIB3829-014-Q6-K6-G7
gcgttcttacagnaactaagtgtctgcaccagtgtaatcttgggagggactgatgacttatctgaggaagtgtcaagtggcgataccttgagctctagcaggattcatggtgaggactcgcttcctagtaaggagttaaggagaagacagatcaagctctcagaccctatcaaccaattgtcattggaaaactcggtgagggaaaatcttcaaacatgttctgcccttcatggggagtcatttaattctgctatggctagaatgcatcctgccgctttcacacaattgaaacaggcactgaagatgccgtaggctgcccctgatatagttttgtatcaaccgaggtcccttttttttctgggctattttgtttcaacttttccaaagattgagaaaactattttggtgtttttcttgaggtgggtttggtggtttttggattcttttataaatttctgctatggctgcctgcatggtgagttgttgatttcttcgtgttgttaaaatttgcctcatttatcacgtggagcaacaattaaactctgtaaatagaactggaaatgaaaagagaaggggcggnggaaattaaatttctgatactgagggcctc

SEQ ID NO: 13741 - DNA, 596 bp, Gossypium hirsutum
  Clone ID: LIB3829-014-Q6-K6-G8
gcgtttcgaaataagcttccttttcctatcatttcagggatcttccccagctatttttcactctgatacagaattatataatttgttttgaagtattttgaatttcctacaagcaacgagagatgcaggcatcaagggcaaggttgtttaaggaatacaaagaggtgcagcgaggaaaagacggcggatcccgatattcagcttgtttgtgatgattccaacatatttaaatggactgctctaatcaagggaccatctgagacaccttatgaaggtggagtgtttcagcttgcattcgctgttcctgagcagtaccctttgcaaccccctcaagtgcggttcttgacaaaaatatttcaccccaatgtgcattttaagacaggagagatctgccttgatatattgaagaatgcatggagtcctgcttggacacttcaatctgtttgtagggctataatagccttaatggctcatccagaacccgatagccctcttaattgtgattctggcaatcttttaaggtctggtgatatgaggggattccagtccatggcaagaatgtacaccagacttgcagccatgcctaaaaaaggtga

SEQ ID NO: 13742 - DNA, 459 bp, Gossypium hirsutum
  Clone ID: LIB3829-014-Q6-K6-G9
tcgtcttgcttcttttcctcaagctgtttctactccacagcagtaggaggattaagaagctatgagaatcctaagaacaagatcactgcagtgcctgctgaagaagaggagatatggggtgctaaattcaaggtggaagggccaacagttgttgctgccacagagtagtcctttgctttctccttctaaatctatggatccatgggaatataggagctgcaaatgcatagcatatggatcagtctccatgtgaataactgagtcccagtacttgtagaatgggaaatgaaaagaagaaaaaaaaaaaagaagaaaaagaactgtttggttatgagaaatggcagtaactttctgtttaggtagctttatgttaaaactagcttttattcctgtttcgtcctttgtacatcataatgtcagcttcaacttctagtctaataaaagcttgtttgagggtcc

SEQ ID NO: 13743 - DNA, 595 bp, Gossypium hirsutum
  Clone ID: LIB3829-014-Q6-K6-H10
gcgtttgtggcaatggctacttacgatataaccccgcgtatcggcccgaacctagacaggcacttagtgtttccattgctggagttcttgcaagagcgacaactatacccagatgaacagatcttgaaagcaaagatcgagcttttgaactagacaaacatggtcgattacgctatggatatccataagagcctttaccacaccgctgatgtccctcaggacatggtcgagaggagagtcgaggttgtcgctcgtctcaaagctttggaagatgccgccgctcctctcgtctctttcttgcaaaaccctaacgctgttcaggaattgcgtgctgataaacagtataatctccagatgcttaatgaccgctaccagattggtccagatcaaatagaggcattgtatcagtatgcaaaattccaatttgagtgtggcaactactctggtgctgctgactatctgtatcagtatcgggctttatgtagtaacagcgaaaggagtttgagtgcattgtgggggaagcttgctgccgagatactgatgcaaaactgggatattgctcttgaagaacttaatcgtttgaaagaaaaatcga

SEQ ID NO: 13744 - DNA, 554 bp, Gossypium hirsutum
  Clone ID: LIB3829-014-Q6-K6-H11
gcttttgctgtattcatgcaatcttgcttctggtgttctttgcaatatccataagcttgtctagcagcttaagctcttgcaggacaagctgacaggaaagacaggctggggtctggctttatcccctgtagggtctacccggatctttccctgttgctgccccctttgcactgaagtgtaggaagtttgcactcagtggtggaggaccgaccagaagtccaaccaggatagggctgagaaggagccaatcttttatgtgcaggcacctgaaagacgatgcatagcaatacatgaaacgtcaatgagtatacagtgccggctgtccatcctcagcatgatcctattaaggtaatggataatactatccattacatgccacactataagcccttcccttatccaaacgtgaaggcacacaccatgcactactagggagttactccagagagcttcattcgaactaccaactggcctacatatgacaagactgatcatgtaaaagcattaataaccttgcacctttgacaaactataatgcttcaacttggatggat

SEQ ID NO: 13745 - DNA, 577 bp, Gossypium hirsutum
  unsure (1)..(577): unsure at all n locations; Clone ID: LIB3829-014-Q6-K6-H8
gcgttcgggntgatgtttacaaaagnagcagnaacactcggtgttggattggcatcactccaacttacgtcgtggtccaatcacaattgttcagaattctattctagcgcctgtgtttcgccgtccattgaatccagaagcagttgctgaaggcgagaaaattctgtccgcagctctgtcgaagatcgaatctttttggctcgacgataataggccttttttgctcggtgagaaccaaccatcaatagccgatcttagcctcgtttgtgacataatgcaagttaagcttgtgggtgagacggattggaacagattattgggtccttacaagaaagttcagcaatggatcgagaacacaagaaatgctacaaatcctcactttgatgaactgcataaggtcctgaaggaactcaaagaaaaactgcaaaattagcaattaaaagggtttagcaaataatgaaggtggtggagtctttgcgttcaagaatctgagaaatgaagaactgcattactatngtatgtataattagaacgtgtggtatgttttcagtcactaagaacaggggcttatgtttat

SEQ ID NO: 13746 - DNA, 588 bp, Gossypium hirsutum
  Clone ID: LIB3829-014-Q6-K6-H9
gctttcggcatgcttcaccttgttgaaaccttatgtgacttatcggatacccgtaatctcaagagtgttagggaactcgtttacaaaagagttttggaaagttgaacaagcagcgagttgccttgaccgacaacgcaattgttgagcaggcactaggcaagttcggcatcatttgtgttggaagatctcatccacgagataatgactgtgggacctcattttaaggaagccaacaacttcctttggccatttaagctcaaggcaccattgggtggtctgaagaagaagaggaaccattacgtcgaatgtggagatgccggcaaccgtgagaattacatcaacgagttaattaggagaatgaattaaaaaactaaactcgggttttgttttaaaaaactagtggttgatgtcttttttggtttattttgtaagggattctgatgttaatttctgttggaagttagaatcacttttttgttatcaaagacacggatatttttgctttgtgttgccagtgttatactttgtgactgagagctttctcaaagttcttctggtttagaatttattactaatatggtatttatt

SEQ ID NO: 13747 - DNA, 524 bp, Gossypium hirsutum
  Clone ID: LIB3829-014-Q6-N6-A11
agcagcattggacttgacatacactaataatagaccaaaatttactatcacaagttctttattccatagaacaggtccttttcgtccgtgtgtcccaaactacaactatctaatgaagaaacttcagaaaaggaaaaggaataggaaaaactacaattatctgatgttttttttttctccactttaaacactctcctggttacaaaatacaatttagctcatgtcaacaagagagcaagaattactgcataaactataacagcagacagacaggtcaaaattgctccaaattgataatggatttacttcatatcctgaatggtcggttttctgatttagaatggtctaacttagccttcttaaaccgtgttttcttggtggcgatttgttggaaaagatttgcaccgccgaacttgtgcttattttgccttatcttcttcctcttacccctgtcatattcttcatcccattcatctggaacataaccaattcctttactttccgaatcatttgcttctatggtc

SEQ ID NO: 13748 - DNA, 533 bp, Gossypium hirsutum
  Clone ID: LIB3829-014-Q6-N6-A12
aaatcttgtaaaaacttcaatagttactggcttcatctttttggagttcactaattaacaattccatcattttcttatacataggcatataatgatcattgatcatggttcttgatagcctgattttactgtacagttctctgggtgtttcgtatataccaacacgttcatcattcgacccatccccatccccgtcgccatcatcatcatctagcttcccactaggatccaatgaaggtatcgaaacaatatgcataattctgcctgggggatagaactggtggttctccaaggcatccgaggaagataccgtttttttactttctgatgatgtatcagctataactgtctcttcctccgttatttctttcgccacagctgcttcttccgctcgggcctgaagatcaacctcgcttgcccgcctcttaagctccttctctagttcgtaccacaactcaccgcctgtgatttcatccacggttgatgtagtaataactctatccattgtaatcaggggttcgtcttcatctgtg

SEQ ID NO: 13749 - DNA, 457 bp, Gossypium hirsutum
  Clone ID: LIB3829-014-Q6-N6-A7
aaaaaaaaaaaaaaagggcggcccccctttttttttttttttttgacccttagacctttaaccatcaattcgggcctaattttgggccttaccaaggggctaacccttccttgggcgtaacccactccccaaccttttttttcaaaattcggagatctaaaaacattttaagggggccccgcccccccccaataaagggtcgggggggacccccatttttgtttcatttttaagcccccccccaaatttttgtttttcaaaaagggggtttgaccccccccccaatgcccacttaaccccccggccaagggcccccccctgacccaagggtccccatttaaaacaaatgtttggcggggacccatacccaacccgttgaaaacaggtattaatttttacctttgacccccgggactttattaaatcaaaacaaaccccccacagcccaaggggtccc

SEQ ID NO: 13750 - DNA, 540 bp, Gossypium hirsutum
  Clone ID: LIB3829-014-Q6-N6-A8
aaacaaataatctaatataattaatattgcaaaataccaagatctaataacatttcacaccagacagtagcagctgtaaaataatgatatgcaggagaatataaacaaattagttgtaacaaattagttttcccaggatcaaaatggcaccatagagaagaaaatgtacccttcagatctcatccgcaatgtagtttgttcaagctccacagcaagatgatttttgagcagctgccgcagccccaactccctggtcttgttggttaattttgattgcctgtggctcagcctttgagtcagtgtcagcaagtctttgcttgatgtccctggctattgaaaaaaaaacctcctcgacatttaagtttgtttttgcactagtctcaaagaacttgatgccatattcgtcagcaagagcttggccctttgaggtagggacagcccttttactttcatccatgtcagccttattacccaccagaatcttgttcacattgtctgaagcatgctgttcaatatttcgaatccagtttctaatgttat

SEQ ID NO: 13751 - DNA, 514 bp, Gossypium hirsutum
  Clone ID: LIB3829-014-Q6-N6-B10
ctgacacctttcaagtttctatttcatgtaatgtgaaacattttccagtccataaccacattttttttcaaaaaaaaaaaaagctacttttgacttcatttgatctaactacaccacccaccattcacctttttacccaccaagtaccttacaagacagcaaagatgaacacgaggaacaaaacttcaagaatgacaaagatttcaaacaaaaaagaccaaatccaagacttcaaggaatggttaaactgggcttcctttttttaataaataatatgataaaagtagaggcgttctaactaccttcaccggtagctttggtaggcaggattgtacatgcagtgctcagcatacttcacaagatccttgggctgaggctgccgagtagccaaacccagttcatatgctttagctgcaacactggctgcaatatgggctgaaatctttctgatatttctaaatggtgggtaaatgagtcccttgtcaaagttctcctgtgtcacctgtgcagccaa

SEQ ID NO: 13752 - DNA, 525 bp, Gossypium hirsutum
  Clone ID: LIB3829-014-Q6-N6-B11
agtggtcaagctctcgctgcaagtcgtagcttattatttcattaaaaactttgtttagagtgcaagatacactacatatatcatcaaacgccaaaaggattaattacactttccaataattacatggatgaggatctatataatacaaaagttgccactaattgaggcacaacggcattcaagggaataacaagggggcaagagaaagaaagaaagaatcatgaatgtcgacaggcaggagcacaaggtaagcaaaacctaaaccacgacccaaaaatattttgcgagcaaaaagcacgcacgcacgcacacccacacacgacacgcacatataaaggcatgcaaaccaaacttaactcgtagctgtagtacatagactacatcgcatccgaggaccaccggcctcgctaccattgtcatcctcctgctcctcctcatattcatactcatataacccctcagaggggcctccagtcccttttttgttggtgctattaatttcagtagattccatcaagcaagtcg

SEQ ID NO: 13753 - DNA, 533 bp, Gossypium hirsutum
  Clone ID: LIB3829-014-Q6-N6-B12
atggcagtaagaaactgtataaatatcccagaaaaaacagcacttatcatttaaaagtctcgaaaatactaacaaaagcaccaaacaaaatgtaaaacaagctaacagatgcttcaaaagtacgataaatctactgattagagttcatataaaaacatgttaggcttaatcaacttcctccatcttgctgccttcggcatcagcatcctccaatgggggcatatcagcatcagcttcagcttcacctgcatcctcgtcaatgctcaagccgagtttcagcatcctgtggatcctgttgccaaaggtgttagggtcatcaaggctgaagccagaggtcaggagagcagtctcgaagagaaggagaacaaggtccttcacagatttatcattcttgtctgcatcggctctctttctcagctcttccatgatggggttctccgggttgatctccatcgtcttcttgcttgacatgtaaccagccatgctgttatccctcaaagcctgggccttcatgattctctccatgtttgcag

SEQ ID NO: 13754 - DNA, 522 bp, Gossypium hirsutum
  Clone ID: LIB3829-014-Q6-N6-B7
gaggatcaagaattttggcttctcatttatcctttttatttttcttgtttcgtaggaacatgtcaatagaatatgaattagatgcaacatcaaaatctcttgaaattatcctgtttctcttcagtcctacaactgcatattcttgttggatcttataatctaaagctaaagaaataaagggttttcatctaagctagctacctatacatcatctatatatgaatacaattcaacataagactaaggtttatctaactgttgtttctcgccattaacgtgaagttcaagctcaggggtgttgtcgctgtttcctttgtacttataccaacttgcgcataacaaaaagtagcccaagtttaagattcctaggccagcaattatgtaatagtagtaatccaatcttcccttattcagatcctcctttaaccagtttccggtggctgtgcggtttgttgttcgatgaattataaagatcagcaagctactgaaataatttgaacctgccaacccacagtagaatag

SEQ ID NO: 13755 - DNA, 407 bp, Gossypium hirsutum
  Clone ID: LIB3829-014-Q6-N6-B8
ggggcccggggggggccccgggaaatccggggcgggacccggggggggccccattttccctaaaggggggggtaaaaaaagggggggaaaaaaagggaaaaaggggttcccggggaaaaatggtaaccgcttaaaaatcccaaaaaaaaaaaaggcggaaaaaaaaaagggaaaaccgggggggcccaaaggggggaccaaaccaaaaaaaagggggggggccaaacggcccgttttaaaggggaaaaaccggggggcccagtggaaaaaaaaaaccccccacccccgggggaaggggggtttcataatgggccccagggggggttttttttttaacaagggaaaggggaaaaaggggagggcctttaaccggggggcctggaaaaaagttgaaaaaggggcccccc

SEQ ID NO: 13756 - DNA, 533 bp, Gossypium hirsutum
  Clone ID: LIB3829-014-Q6-N6-B9
gtaactaaaaagaagccttaaaagtaaagcctcttaattttgatattagcaataaccaagtaaatgcacaaaaccccaagtataagaaaatggagtgtcactcatcttaaactctaaattaatttataccctttttcatatcgcaaccgctaaaccttttattttaggtcgccggctctctgtatcttcggaagataacgcctttcttttgctaaaattattgttcatactcgtactattattacctttgtcgatgttgctatcgttgttgacgaccttgtcattgttattatcactattgtggtcggcgttgttgtcatcatcatctttgtcaatgtttgtgcaagaaagatgaagggatttgagaaggtaagcttcaattttctctaggtctgataattgaagaggcttcaacatgaattcttcagctcctccttccaggcacatgctaattctagaaggaacattctctgatgacatgaccacgactggcacatctttccatgaagatcccttaagacgtttgagtaaat

SEQ ID NO: 13757 - DNA, 520 bp, Gossypium hirsutum
  Clone ID: LIB3829-014-Q6-N6-C11
aggtaaatatttaaatacaaagtccttgtcattccattgtactcttacgaaatccacaacaccataaaaacacattattcaactaagagacagagaagcagctgtaattaaagcctccaacattattgagtatacttgatatagtcaatgggatcaaacgagggaatatgaaataaggaaaaagaaaaagaaacctaagttgtgatatgtaaatctaccaaatatgagatgccatgccagggttttttcatccttcacaagtcacgacttacctcccaccaccccacctaatagtttgtgtttgttttgtgttgagttcagttggctctttgtataggtatgtactgagacctagctttggaatcttgtaacctagaaagtcgatttctctaccatccctctaaaaataattataggaacgaaccaccaatcacatgaagtacttgttcagcatatctcgcaatcatccaagccagttcatgaatgatgaactttaggccttccactcctcagaaacaaa

SEQ ID NO: 13758 - DNA, 563 bp, Gossypium hirsutum
  Clone ID: LIB3829-014-Q6-N6-C12
tttttttttttttttttttttttttttttttttttttttttttttttttttttttttttttttttttttttttttttttttttttttttttttttttttttttttttttttttttttggggttttttttttttttttttttttttttttttcgaaaaaaaaaggaaaaaattttaaaaaaaaaaaaatttaaaaagggggagaaaaaaaaaaaattcccccaaacgggggaaagggggggaaaaaaaaaaaaaaataaaaaacccgggggaaaaaaaaaaaccccccccccggggaaggggaaaaaaacccccttaaaaaaaaaaaagggggaaaaggggggaaaaaaaaaaaactttttaaaaaagacccaaaagggggaaaaacgggggggaaagggtaaaaaattgcccccggggggtttccccaccccccaaaaaaaaaaggcccaaaaaaaccccccccggggggggggccccggggaaaaaaaaaaattggggaaaaattgggggggggaaaaaaaaaaaaaaaagggggggccccaaaaaaaaaaagggggggttt

SEQ ID NO: 13759 - DNA, 552 bp, Gossypium hirsutum
  Clone ID: LIB3829-014-Q6-N6-C7
caaccaaaaagaaaaaaaagggtaatataaatatgatcacacatcattacacaagtagcagatcctgattctgatttcgtgggatccactaatccgacaagcaagccccttaaaccttcttggttgttggccatacccatcttccccatttaaacaactccacacccaatcccttgtgctcaaaaatccttctattttttaatctaatctcttcctttctcaaacactccacacttaccaaaccagcacagcacactttttagttaagactacattatagaagctaaagttataacactagtactgaattttcacatgccacaacaattgctaatttggacaaatcaatttcaaagctccctttcacatcatggagcaaaaaacacatgtgaagaaatcaaggaaaataataaagggagggaaacaggagagaaacaaaattcttcaccctaaaaacattggcaaaaagccaagaaacaaagcttttctttttgttctctccaaagagttaaactagaagttggatgattgcttctgtgaagcaaaccactg

SEQ ID NO: 13760 - DNA, 511 bp, Gossypium hirsutum
  Clone ID: LIB3829-014-Q6-N6-C8
ataatgtaagtattatagttacattcattgcagatgagaagaattgttgagcagactcaaatggtaaacaatcgggttatgatcctataatatacaggcattggagcaaacaaactccatgagcaaattacaagccttagacatctccttcaccgaatatgttaatgacagagtgttaacttctttatttgtagttaaacggagacatggtggcaatacatgtgaagttttttaaccccactctcagaataaagcgtagccctaaaagatattttcaattttccttatttcttttgtttccaagtctgatggaactcaatatatatacttatttaccagcaatagaaactcccatcccttcctaatcattttgtcgatttctccacaatatacacctcacttgattatatcttttactctggtaaagactagcctatagacaaatattaatgttcatcttataaataaagagtacatataaaaatctagaaactgaacattcagatataca

SEQ ID NO: 13761 - DNA, 544 bp, Gossypium hirsutum
  Clone ID: LIB3829-014-Q6-N6-C9
accaaaataaatttatgctaagggtattctagtcattttagttttttccattatgctattacacctctattccattcaaccaaacacaagattactattacgcctatattccattacattcaaccaaacagttgatttgctattacacctctattccattacacctctaatccaatacacctctaatccaatacagcaaaccaaacgtgccctaaacagtccatttttacaaataacctaaatccaaatgacccaataccattcggcccaatagcactagcccaaattagccaaacatagaaaccctaagtggttagcagcaaaccggcgccgtatgccccacgtcgcagcaaccgcccacgttcagtagcctctgcgcatgtcttctcgctagtggtacctgcaacaagccacgaacagcagggagggcaataggataataggaaaatatggtttgtttttttctggggggatcgcatataaaaacggatccattttcaagatttttttttggagggcagattgaaacaaaaaagagaaaaag

SEQ ID NO: 13762 - DNA, 552 bp, Gossypium hirsutum
  Clone ID: LIB3829-014-Q6-N6-D10
gatcaaaatgaaccaatcggtaagaaaatgaaattactgttattattacaaggagaagtaatcattggatcaaattatgttgctacataccaaaaaaacaagaagaatagctagtttcgtctatgtgtgagaccccgttttccgggttcaagaattcttgagattctggaaaagttcaggaagatgtgcatttgttagcttagccttcttggagaactccttgtttttctgtttaggctttggcttggcggaaattccctgcacttgcgcagcagctcttctttttgccgtgttcgtggcgggtttcattccattcttctgcagatctttctcaatgtcgagcatgtctcgtggcaattcaattgaacgaaataactctttaaggtcatcatctaccttaataggtaccctgggatcattcgggaaggctatgtcttcctgagaatcaaaattcgatagcagccaaatctgacctgcagctttcagagcctgcaagtcttccatcacattcgggtatgcatctttgagatcgataacagcaatgccttctat

SEQ ID NO: 13763 - DNA, 518 bp, Gossypium hirsutum
  Clone ID: LIB3829-014-Q6-N6-D11
gcatcaaatgtattcacataaaaccaaacaagccccaaagggtgtgatgacaaaaaatagccttatcttttttctcttagacgtccaatactgaagatttagcactaaagtaagctataacaatcgttggaaaagggtactttggaagcttggaggctcttgcaaagtctatgatcctcttttgccagtttaatcaaccaaaacttttttttatatggaaacacaagaagcagagggacagacattaaaaaagttcatcctaagacataaaattaagattttgcagagtcaaaacatttatattaagttctcttaaagcaacaaatattttaaaaattatatacaaattccccatgtaaagaagcatgacacaaaagtgcaaaccaagtgcgagaccaaatgtttttctatccaattacatgctattttgctgttggggtttctttttgtgtttgcacccgagaaagaacttgcaattgcaaacacctgtttattatatatgcatacttcttgttcac

SEQ ID NO: 13764 - DNA, 531 bp, Gossypium hirsutum
  Clone ID: LIB3829-014-Q6-N6-D12
aaggaaaactggagatgaacattaaaatatcaaaagcattgaaaatgcataccataaaacctaacatgttttggtttgttttttaactcatgacgttaagcaaagattacaactttctacagcagtctattgtccatactttaaaacaaatttcagttaacttacccccagaattttctatctctaagacaacatcgaaaatcaaaacaattcttacttagtacccatagtttgaaccataaacagagccataccctcctgcatgtccgggattggatggtggcgaagcatataccgaactatgagctgcataaggattataggcttggtctgcaaccccacctgcttgtgcctgagctggagccgcagcagcttctgccatgaaattctgtatcagttgctgagcagtttgaacttgtgaagcagttccacttatttcgactgtcatttcaccagggacaccccgggtttcttgaatggtgacagttgccccactagcacgtcgaatatagctaatacttgcaccagctg

SEQ ID NO: 13765 - DNA, 543 bp, Gossypium hirsutum
  Clone ID: LIB3829-014-Q6-N6-D7
gaaagaaaaaaaaaaccattaacagaagctttgagttataaatggattccggattttagacccttttatcatgcctgacagccatgtagaatagcttcattgctgtgtgttgacagttttcttgtttttcatccaactttgaaatgttgcagataatagtagatggatttcacagttaccacagacaatatatcttcgccctacaaactagacaaactcacagtggcttttgttacaatctaagttagcaaccctgttgcacctattgggcggatggggaagattttaatttttttcgtacttctcaaagattcagtacatgtacaacaagtatgtacgtgaatgcagtgctcatcctcgcatcaagtcaatatctgcgtgagggtttctcagaccaactggccgtgaaccgggccaagcactcatagaagggggaatgaaatgttgagttgaaggtgcagttgttggcatagttgagtcaccgcagcgctggggcacagcctcctctgcttttgggctagccagttgcttgttctttgtttt

SEQ ID NO: 13766 - DNA, 132 bp, Gossypium hirsutum
  Clone ID: LIB3829-014-Q6-N6-D8
ttttttttagcaacactattcaaactaaaaactatcacacaattttcagtttgtacaacacaataaatgccactaatggcagagttctatgctctacgataattcttacggttgatcaacattgtgatgtgc

SEQ ID NO: 13767 - DNA, 534 bp, Gossypium hirsutum
  Clone ID: LIB3829-014-Q6-N6-D9
ccaataaaaatttggtatttcattgagagagataatgtagcttaagaaatgctagcctcggataaagacacaaatatatcacctttgctctacggcatggcatcactcccattcgattgtcgatgggggcttcgatgtaatgtccagagtaacacgattcacacctcgaacattgttacaaatcttttgagaaacttctttaaggaaactgttttcaaaacagtaccaatctgctgtcattccatcttgacttgtaacagctcggagagtaacaacatatgaatgtgtcctttgatcaccttgaactccaacggattttacaggcaaaaatacagcaaaagcttgccaaattgaatcataaataccagcatctttgatggactgaatgaaaatttcatcaacctggcgcacaatgtccaaggcattgccttcagttacatcacccaagactcgaactgcaaggccaggcccaggaaatggatgacgctttaaaaatggctcaggaaccttcaatatcctcccgagttgccgaac

SEQ ID NO: 13768 - DNA, 526 bp, Gossypium hirsutum
  Clone ID: LIB3829-014-Q6-N6-E10
aatgaaaactctgaaatttatattgcattaataatattacaaaacatcagattgcataaaagattctgagaatgaagatgatgaatttcaggtgtcctgagaatctgattgaaggttaacaatttgagaaactacaagcttggagagttcattaatggcagcctgaacctggtaatcatctgattcactatggttttgccttgaccatccaggtaattgtgaatttaacctggtatattcatttgcagcaaccccggttttctttgatgtggcaagaactcgctccaaatcagcttgtgataatggccttggatctccagatgattttcctttcttctcctcatctaataagtccctaatgggaaagtatgcggctttcttgcagagttcgagaatatcggaccccgtgtacccttcacacaaactggctatgtagtcaaagttgatgctttcttcaatattctcacccttcaaaatcaccttcagaatctcaacccgctccctgcggtcaggtagtccaatctcg

SEQ ID NO: 13769 - DNA, 514 bp, Gossypium hirsutum
  Clone ID: LIB3829-014-Q6-N6-E11
gagggtaaattaccattactgcaatgttaaaacaaactcaaatggtttgattaccaacaaaatcttaggtcaaacagatgagcaattgcacaacactgatcagaaaatagttctttgatagagcataaatgaaagctagagagttgatatactaatcatcagttacataagtgcttcattcttccatggcgtcgcctccttcgatgatctccactttctccttaagcggtatgatttttgtcaagaggacctctgtcttcttgggaaaagaatagcctttggagctggtgtaagttcgaggattaggttgtagatggttcctcaagtattctttgccacccttagttattacacaaatatcaacattgcttccacttccgaggtcattgaagataccagagcatatagcctcagtgacaagttctattccttcatttctagtaaggccttccctgtattttgattcaaatactgccattgctgccagggaaccagaacccattgtagcaaatgg

SEQ ID NO: 13770 - DNA, 566 bp, Gossypium hirsutum
  Clone ID: LIB3829-014-Q6-N6-E12
tcgcgatcttcctccattaaagctcctctctatctcccgaaaccctacccttttattgttagcgtgaacggcgccgttcggaaaggaagcgaaaccctgttttaaaatcggctgttggagatgtctccgtcgttgacaccccaccgccgccgccgcctccacctcaagatgctaaatctgaactcatttcttctttgaagcttaaattactgggtgttgtttctgggctgaatagaggtcttgctgcgaaccaagatgagtctcgtgaaaagcagatgatgccgccaaggaactcgaaacggttgctggacctgtggacttattgaccgatcttgataagctgcaagggagatggaaactgatatacagcagtgcattctcgtctcgtacactcggcgggagccgtcctggacttcccactggaaggttgctccctgtaactctcggccaggtttttcagagaattgatgtcataagcaaagattttgataatatagcagaaattgaattgggagctccatggccattacctccacttgaagttactgctaccttagctcacaaat

SEQ ID NO: 13771 - DNA, 549 bp, Gossypium hirsutum
  unsure (1)..(549): unsure at all n locations; Clone ID: LIB3829-014-Q6-N6-E7
aatagnaaatttatttcattaacaaagcaagcttttacaagataatttattctctcagcatataatataaaactccatataaagaactcttttctcttttttttttttttgagagagagagagttctatataggcactcttgataaccgggaaaggtagcttaagtaggcacataatataacacatagtaggacaaaacattagagttttgatccttggatgggcaaatatacagcagcaacatttccttaagcatccaaatgaatcatgcatctcagacctataccctggagcatgtagtcgaatgccttgttaatatcggcaaaaggcacagagtgtgtgatgaacttgtccatatccagccccagctccttgttcaaatatttgtcgacaaccatgggaatatcagtgcgtggtttatagttgccataaaaagcacccttaagggtcctctcacttagtagattcattggatgagttttgaatgcatcgtctttctttggcacacccaccagcacacaaacaccccaaccatcatggacgcattca

SEQ ID NO: 13772 - DNA, 505 bp, Gossypium hirsutum
  Clone ID: LIB3829-014-Q6-N6-E8
gggccccggctggtttggctggtttaaaggtttaaagggagaggaggttatgctttggcaaaaaaaaaaaaaaagggggggccccccttttttttttttttaaccagcccggtgatcctggggggttttttttcttctccgattggtaaataacaagggccattgggcttaccctcaaggtcgggcctttttttggccattaaaccctggccccccccccaaaaggcccccggaaatgggtggaaaaaaccaaccaaggggggatgccccgaacctttttttaaaagcctttaccggaaatttccctttgtaaaggggaagggccagcttgcttagccgcataagcattgggggccctatggggggggggcttttaagggggggggggacccctttttttaataataataataccgggggaaatgccctggtttttgggggccttttcctttttcctgggtactacccaaacctgggttcccaaaacccttttccccccccccgg

SEQ ID NO: 13773 - DNA, 551 bp, Gossypium hirsutum
  unsure (1)..(551): unsure at all n locations; Clone ID: LIB3829-014-Q6-N6-E9
ctctgttccaaagttcacgtttatgcattcattcaacattangaaaaagcaacaattgcttcttcttttttcaaactcaagccaggttgttgacctccttttaagtcattttaggattcaaatgacagaacaaacattcatcatgcatagcccttttttaaaaaccagaattacgaaaaaagaaaaaaaaaagggggggggtttccccttgcacacaacaatgctcgttagcccatggcgtacttctgggtccagctccttgcagttgtctcgtacttgttcttgtcggttttgtacatgtgagcaatctccggcaccaatggatcatcagggtttgggtccgtcagtaaagaacagattgataacagtaccttggatatcgttagcgcaggactccactgttcctttaagatgtctaggcaaatgctcccattgctgttaatattaggatggaatactttcgttctaaatgccaccttgggaggcttgaagggataatctggaggaaaatggatggtcaccaggaaaacacccccagcataaggactgtc

SEQ ID NO: 13774 - DNA, 494 bp, Gossypium hirsutum
  Clone ID: LIB3829-014-Q6-N6-F10
aaggagccattttacttaataaagtccctatttttattacatttttttattccatttcgaaccaatcaaaccgggggtataggggacccaggacattacaccccggaggtcaggggccacaaagggggggggggggggaggggggaccaaacaggccaaaaggggggggggggaaaagggccaaaaataccaaaggccaaaaaaataagggggggggggggcatggaaccggagggggggggggaccgggggggggggggccggaacctgcaggggggcgagcggaaaaaagggggggggggggtaccagcgtggggaaacagggggaggggggggggccggggcgaaagggggggggggggagaggccaaaaaacaaacgagccgggagaaaaaaggggaaagccgggggggccaaatgggggggggaacccacacaaaaggggtgggggggaggggccaaaaaacaggcgggaaaacgggcgagccaggggg

SEQ ID NO: 13775 - DNA, 539 bp, Gossypium hirsutum
  Clone ID: LIB3829-014-Q6-N6-F11
ctaaaactcaaatctttgaaacttctgccgaataaacaacatgatgttcactatgagaaaacttcaactacaagcatactacaataagttactacaaaagagtaactacctcatatgttacaatcccacctattgaacatctaaaatgactacaattttataattctatttagaattgcaaatcaaatccctagagagagataaattaccggtcatataatttcctcaagtgagaactaggcatcatcatctccatcaccatctttatcagcaccaccacctgtgtcggcattctcctcactttcatccccttcctcatcctcatcagacatgttatttatcacatctgtaatgatatccttcacctcagcttttctgtgcatcaaatccaggtcaaagtgtgtacctagttgcctaaggatatcagataatgttgcagtgttgaagtccactttttttagaatatctacaactacttcatgaatctcttccctgctaggctcgggtttaggtttcttgccggttttgcttttaccttg

SEQ ID NO: 13776 - DNA, 304 bp, Gossypium hirsutum
  Clone ID: LIB3829-014-Q6-N6-F8
ctgttattatatttcaaattgtaataataataacatggcagtacatcctttctcattgctatttcattcattacctctcatatcatatgcatatgcatatatataaatttaatcaaatttcaaacccaaaaaaagaaattaaaggaaattgtaagaaaagcagactcatatggtagcagacagcagataagataaaccagacatagaatcaatgtgaagaagctccaattaagcatggaccttgtcccacttcagtggcttgacaacctcccaagtgaaatctgtgtcatcccgaccaaaatga

SEQ ID NO: 13777 - DNA, 484 bp, Gossypium hirsutum
  Clone ID: LIB3829-014-Q6-N6-F9
aaaaaaaaccaagacaaattttcatttctgtatttctcaaatcaagtgcatctcttatcacatgattatcaaacacaaacggataaaaacccataatcatatgatcatcgctgcagctccatcattctggagaagtcctcgaagcagacaaatccatcttcgttcttatcgacactcgctatcatgcgccgacaatcctctaacgtgcaccgctcatcccctattttgtccttaaaaaacgccatcaactcctccgccgtgatcttcccgtcatgatctgtgtcaaatatatcaaaagtctccctcagttccggttcgcaggcgggttcgtcgcaagccggtccaaccacctggttcatcaacgtttccaggttgatgtagccgtcgccgtcaccgtccacttcgctcaacatcaaggaaacctcgtcccggctgggcggctgccttgcgaccttgccaagcaaagcctcgagctcgcttctcg

SEQ ID NO: 13778 - DNA, 538 bp, Gossypium hirsutum
  Clone ID: LIB3829-014-Q6-N6-G10
aattatccaaaccattcagcatgaagcatttcaatagaacatggaagattaaatgacaacaaagataaatatcatctataataagaaaacacataaaaagatacaagtttggtttgattgaaaccctaacttggcaaattataatagaaagagcccaccagagactgctttgactattgttgttcttcttcctcgcgcttcgctgcttctttaatctcatcatcaccctgcatgtcggaggtccacagagtgagattgtcacgtagcagttgcatgatgagggtgctgtctttgtatgattcctcccctagtgtatccaactcagctattgcttcatcaaacgcctgtttagccagttcgcaagcgcgatcaggagaattgagaatctcgtagtagaaaacagagaaattgagggctagaccgagtcggatcgggtgagttggagccaattcggcgttggcaatctcctgagcggatttataggcagtgagagtactctcagcagcttccttgcgttcggcgctagttttgaattcag

SEQ ID NO: 13779 - DNA, 523 bp, Gossypium hirsutum
  Clone ID: LIB3829-014-Q6-N6-G11
caacccggatttattttatttcaaaacccgaactaattaacaaggtgttaaagacaaaatgttttgctcaattggtaagctccaaggtagtagaattctctataccaataccaatactgtttctgtaagcaaagctaaaacaatgtggtgtaagcatttgttgatgcagcctctgggtggtagtgaagcatctcactcaacatcatccccctaatcatttcttctcccatgttttcatcaatgtcgagattaatcgggactcgggctggtggattgcaccttggatcatatagtgttgccatgtaaggatgttggagtgcttctgtgacagtaattctcttggacgggtcgaaaataagcatcctttgcaacaaatctatggctaaaggatcggcttgagggtataaacgagacaaatggatgcccgtagagaaaggaagtgactcgatataccttctggctttgggattatcaataaactgaagatcagcctcctgctggcttccgaggacaccaataatta

SEQ ID NO: 13780 - DNA, 518 bp, Gossypium hirsutum
  Clone ID: LIB3829-014-Q6-N6-G12
gcaattatcagagtaccagctttcatttccccgagaccccaaaatggaagaacttagaagtacagttcattgattatactgaaccgctggacccatcatatttctattgaaaggggaaaaaattatgaaaatgaaaaggcataacaatgatttttctatgaaacagagctgtgtgacaacatattacaaagcagcagatcacggcaaggatccctcaatgagatgccttgaaaaacaaatgcggaggcatgatctacccattcttacaattttaccttttatatctatccatcagctgctcttctctcgccccatcttccaacacctaaacaaccaacaatctttcactacacctccggcaatttcatgttctgcacatacacttaaagtgtcagcgtctaggcctaggcacacaccgaaattcagctaacagagctatatgatcagaggaccactctggagaaggaagtgctgtatcttttctcaagctatcctcatccaagagttccaataatgac

SEQ ID NO: 13781 - DNA, 528 bp, Gossypium hirsutum
  Clone ID: LIB3829-014-Q6-N6-G7
aaaggtctccaataaaacccactataaataccttacatacttcataatacaaatatgcgttttcctatttttacaactgtaatatatattaaaaaatgcttaatgaaattcaaactcattgaggccctcagtatcagaaatttaatttcccccgccccttctcttttcatttccagttctatttacagagtttaattgttgctccacgtgataaatgaggcaaattttaacaacacgaagaaatcaacaactcaccatgcaggcagccatagcagaaatttataaaagaatccaaaaaccaccaaacccacctcaagaaaaacaccaaaatagttttctcaatctttggaaaagttgaaacaaaatagcccagaaaaaaaagggacctcggttgatacaaaactatatcaggggcagcctacggcatcttcagtgcctgtttcaattgtgtgaaagcggcaggatgcattctagccatagcagaattaaatgactccccatgaagggcagaacatgtttgaagatttt

SEQ ID NO: 13782 - DNA, 510 bp, Gossypium hirsutum
  Clone ID: LIB3829-014-Q6-N6-G8
caacaaactagaatagaaattgcaataatgttatttagggctttaaaacacaattcaatttctttaggataatgatttatgggtaatctagatccataaacatcaaggttgttctataatctatatgtgggatcaaaaaaactggagacattcttgaatgttatttggaaagcacaacaggggaatcgcttacagtttaagactgttcattacaccatttaagttcacccttttttaggcatggctgcaagtctggggtacattcttgccatggactggaatcccctcatatcaccagaccttaaaagattgccagaatcacaattaagagggctatcgggttctggatgagccattaaggctattatagccctacaaacagattgaagtgtccaagcaggactccatgcattcttcaatatatcaaggcagatctctcctgtcttaaaatgcacattggggtgaaaatatttttgtcaaaaaccgcacttgagggggttgcaaagggta

SEQ ID NO: 13783 - DNA, 415 bp, Gossypium hirsutum
  Clone ID: LIB3829-014-Q6-N6-G9
ggtggccaaacaaacattataacatataacagaaccaacgtagcctaaaaattgtcaaagggagccccagaaaaaacaaccttttggaaaaaaaaggaaaaccaacaaccaaaggaccaacaggaaaaaaaaaaaaaaaaagctttttaaaaaaaaagagaccaaaaaaaaaaagacccgacttaaaaaaaaaaaaaacaaattttttaaacatgaaagggagcaagagagcaactatcacaaaaaaaaaaatggggggggcaaaaacaaacaagaagggaaaaacaaagggctctctgggagcggcaacaagagtcggggggcccaaatggtaaaaaaggaaacaaaaaaagcccctttggagaaaaaaaaaaagggggcccccccccagcggaagaaaaccccctaaaccccc

SEQ ID NO: 13784 - DNA, 553 bp, Gossypium hirsutum
  Clone ID: LIB3829-014-Q6-N6-H10
aagactaaaatattaaatattaatttattaaattaataattgagtgaccagataatgatttttcagtcttgttcctactcaaaaactaaaatcactgttaaacttgtctgaaagaaataaccaatcagcaaatagctcaaaattgcatattaattcaaaagagcttcctcgtccgttcaacttagcgtgcaggctgcgcttgtgcgtgttcgagaagctggctgactagcttgtaggtccgccctttaagggccttagtgtggtcgatcagctgctcgtaaacattcaatcggttaggctccataacaacggttccagtctctgaatcaatctttgcatcaagtttcgagtttcggataagattcacaatccatctctcaccctcctcgtaatttaaattcagtttctcaaaaagcacccccatatcaatgcgctgatgaattctgcagtatgtctcgaagataaatagacgagcattctcaagaaactcatcttttaataggacagtagaaaagttgccctcttcaactctttttccaaggaagggatcatt

SEQ ID NO: 13785 - DNA, 523 bp, Gossypium hirsutum
  Clone ID: LIB3829-014-Q6-N6-H11
aatacatataaacccatgtatgagacctttatttaatatgttgatcctcagcaaaatcacgggcctcgttgttggaatagggagcccacatcgatgacctgcttaagctcgtccacgtctaacaacaacaggcgggatgaaatacccaaccacgcttttaaacataaacacgtgtggttaggacctaaagcatgggccggaaggccctcatggggaaaactactccagacctgaccttggtcactacaaagccggaacgtaaacatacctgctgtggcaacgcaaatcgaccccaccaccttgcggtatcttacttagatactaaaataggccaacaccttaaggttaaccagaactaaaccgaaagccgtagaaattgaaggatggcctgaaacagcaaattcagaccctaaagactgtatatgagaccttaccgtagagtaaacaattggagattacgaagggtgctgtactgcttaaacaaatctactccttggaatactccttggcgaccggtgaagaa

SEQ ID NO: 13786 - DNA, 537 bp, Gossypium hirsutum
  Clone ID: LIB3829-014-Q6-N6-H12
aagatcaaaatgcatgcttcatttgaaggacatgaggtgatagaaattcataatcaaaatggatgacaaacgccacacggttttgccttcatttgtagaacatgaagttattcgaatattatcacaataacacaacaatcaaacaccataatcattggggaagcgtcagagcgcttcacttgagcagccccttagacttcaaatattccacggtttggtcgtagatttcctcgatcccatacttaaagctgaacgtttcgctaataagcttctctgaggaaatgatcaacttgggtttggaggggaaatctccaaaatcggtagggactttgaagtcagggtatctttcgttgaggaacttagctagttctggcacactggtattgacagcactgcatatatatcgacccgatgcagattctttttcagccagaaaaacatgggctcggcatacgtcttccacatgtgtgatagagatcgaacctgacagcatctgcattcctttcaaagcatttatgaggaattcattgcctgaaa

SEQ ID NO: 13787 - DNA, 540 bp, Gossypium hirsutum
  Clone ID: LIB3829-014-Q6-N6-H8
atataagccaatatttactcatcatccattacaataccacagcatctgtttatataaacataagcccctgttcttagtgactgaaaacataccacacgttctaattatacatactatagtaatgcagttcttcatttctcagattcttgaacgcaaagactccaccaccttcattatttgctaaacccttttaattgctaattttgcagtttttctttgagttccttcaggaccttatgcagttcatcaaagtgaggatttgtagcatttcttgtgttctcgatccattgctgaactttcttgtaaggacccaataatctgttccaatccgtctcacccacaagcttaacttgcattatgtcacaaacgaggctaagatcggctattgatggttggttctcaccgagcaaaaaaggcctattatcgtcgagccaaaaagattcgatcttcgacagagctgcggacagaattttctcgccttcagcaactgcttctggattcaatggacggcgaaacacaggcgctagaatagaattctga

SEQ ID NO: 13788 - DNA, 531 bp, Gossypium hirsutum
  Clone ID: LIB3829-014-Q6-N6-H9
ggaccaataaataacatattagtcataaattctaaaccagcaaaaactttgggaaaagactctcagtcacaaagtctaacactggcaacacaaagcaaaaatatccgagtctttgataacaaaaaagtgattctaacttccaacagaagttaacatcagaatcccttacaaaataaaccaaaaaagacattaaccactagttttttaaaacaaaacccgagtttaggtttttaattcattctcctaattaactcgctgatgtaattctcacggttgccggaatttgcaccttcgacgtaatggttcctcttcttcttcagaccacccaatggcgccttgagcttaaatggccaaaggaagttgatggctttcttgaaaagaggccccacagtcattatctcgtggatgagatcttcaacacaatatgatgccgaacttgcctagtgcctgctcaacaattgcgttgtcggtcaaggcaactcgctggttgttcaaatttccaaaacctattttgtaaacgagttccctaac

SEQ ID NO: 13789 - DNA, 92 bp, Gossypium hirsutum
  Clone ID: LIB3829-015-Q1-K6-A1
tggtcctgcggtcctccgttcctcccccctccaattgtctggtttcacggatgggaaggggaaaatgtaatagcgagggagccttcttttcg

SEQ ID NO: 13790 - DNA, 600 bp, Gossypium hirsutum
  Clone ID: LIB3829-015-Q1-K6-A10
cggccgcgtggggcagtgtgtaacaattttgtagttaatagacagagagagagcgagagaggcagagggcatatgcccaccattaacgcttgtctttcaatccacacgcttcaaccctttgcaaagttattctttgttgctgttgttggtgatagagtgagttttctagagagccaaagttcaaaagaagagaaggacccagggccagtgagttagagagagagagagagagaagtctttaccttttctttgtgctcttccagatgctctttcaatggggaaaaatgaggacccagatctgcagcaaagagagcagaatcttgaatcagggaatgatcaagggcgtccagggagctgttggatgcttttctcaaggctttcaaacgacctcagtttcaaatgtgtttttgttttgtttcttagtttgtcggttttgttgccagggatcttctggatccttccttaccgttctataaccactggatttgatgccaaacaagctattaagctcagtgcctcagttcgtgcatactttaaacttcagaaaccagtttcagagcttgttcggtatgttgaaaagttagaatatgatatctatga

SEQ ID NO: 13791 - DNA, 568 bp, Gossypium hirsutum
  Clone ID: LIB3829-015-Q1-K6-A11
cccgtttacatctatagatggcaagacctcatgctccaccgttgacggtggtttggtcatgaacaaccctaccgccgcggcggtcacgcatgttctccataacaagagagatttcccgtcggttaacggcgtggaggatctgctggttttatctttaggcaacggtccgtcgtgcggaaggtcaaaggtccgtaacaacgatgaatgttcaacttcttccgtcgtcgacattgcgcttgacggtgtctcggagacggtggaccagatgttggcgaactctttctgttggaaccgtacagactacgttagaattcaggcaaacggagtggagactgaaaatacggttgggccgaaaacggaggcgatactgaaggaaagaggggttgaatcgttaccgtttggcgggaaacggttactaacggagactaacggagagagaatcgagtgctttgtgcaacgccttgttgctaccggcaaatccagccttcctccaagtccttgcaaggaatcaaccgttagcccacttgcgaccggtcgttagccactcttttcttcaaattactttttt

SEQ ID NO: 13792 - DNA, 571 bp, Gossypium hirsutum
  Clone ID: LIB3829-015-Q1-K6-A2
cacgaattaagcctgaactgggtctaccaggggatttaagtaggtcggccaacacaaatgagaatggctttcctggtaatttgaatttgtatgggaaccagcaatcctctaaagaggaatctatgccattttcaaatgcaccggaactgtctaggcttcttgatccaaggctagaaggctccaggagatctatgggttcagtcactgcacttaaagaactatgcatgatggagggccttggggtagtttttcaagcacagcctcctgcatctaatacattgcagaaagatgaagtatacgcacaggttgaagtagatgggcaggttttaggaaaagggactggtttcacatgggaagaggctaagatgcaggctgctgaaaaggcccttggaagtctaagatcaatgctcggtcaatttactcagaaacgtcaaggttctccaaggtcattgcaagatatgccaagtaaacgcctaaagcctgagtttccacgtgttctacaccggatgccctcttctggtagatatcacaagaatgctcctccggttccttgaagacacctcgatatggt

SEQ ID NO: 13793 - DNA, 561 bp, Gossypium hirsutum
  unsure (1)..(561): unsure at all n locations; Clone ID: LIB3829-015-Q1-K6-A3
ctngaaggcaggttggtaatcatcttggggggattccatactatggtccaaggagtgaaatatccgggccagatataaacaacagtttggctggaagtaagagaagtttttcagattcggcctttatgggtcatgaatctcttgagagcttgcatttgatgaagatgcttcgcaatggggctggaggagagcgacctagaaggtccaatgaggacgaaatattccttggtatgaagtcaatgaggccttcttctacatctgttatattgcagcctcccgctggtagcagactcgaaggtaatgcttccaaatgggaacggtctgtcccctcagcagtacagtatgcttctcgtggtggtcattttgtgccttttgtgcatcaagtatcttcaaacaggttcaaggatacaactgttggtccttctgttatctctcaagcagctgccgatgaaggatctagaactggaattaaaggccctggaattttgagttctattaatgctagcggtgttcccactgaaaagggttcatctgcgatagtgccaagtgggggcaggccta

SEQ ID NO: 13794 - DNA, 571 bp, Gossypium hirsutum
  unsure (1)..(571): unsure at all n locations; Clone ID: LIB3829-015-Q1-K6-A4
gnactcccttcccctctctttctctccggcggcgatctcaatcaccggtaaatcgcaccgtaacgcccgattactcgtcacctctgtgatctcctctgacacctcgtggtttcagtttattctaactcgtcgccatcatgaatcccgaatatgattatctgtttaagcttttgcttattggtgattctggtgttgggaaatcatgtctacttttgaggtttgctgatgattcatatctggatagctacatcagtaccattggtgttgactttaaaatccgtactgtggaacaggatggaaaaaccatcaaactccaaatttgggacactgctggccaagaacgctttaggacaatcactagtagctattatcgtggggctcacggtatcatagttgtttatgacgtgacagaccaagagagtttcaacaatgtcaagcaatggctaaacgaaattgaccgctatgccagtgacaatgtgaacaaacttttggttgggaacaagtgtgatctaacagaaaacaaagttgtgtcatatgagacagctaaagcttttgctgatgacattgggat

SEQ ID NO: 13795 - DNA, 594 bp, Gossypium hirsutum
  unsure (1)..(594): unsure at all n locations; Clone ID: LIB3829-015-Q1-K6-A5
cttcctatgnacgnnggcagctgattggnactacnttaaacagtacaaagttaagagggaagaggaggtcgtaactggccaaatctggtccatgcccaaatatgccagtaagaactaggggatttgaaggagaagcttggtcattcttatggttcccttcaggaaagaattcagacaactttttgagaacatggactccgaatttgagcagctcaatgaggatgagaagaacaagttgtatgaaagaaaggcttcagcatggtaccaagtcacttaccatcctgaatgggttcagaagaagttagagttccagaagcctgatggcgatgaaggcgttgtgatgttaagctttgcttggattgctgctgattacctagctcgaataaaagttaggcaccaggggactgaaaatcttgactttgctaagcctgtcaactctctagtaaggtacctagctgatcgaatataaccagtatttgactgttttggcagcaaattcttttgctggatcaggcttcttggtcgcaaagccactctgccattttgaaaaatgaagttgtaatgttggtttgtaatgcagtacatctctgctgt

SEQ ID NO: 13796 - DNA, 590 bp, Gossypium hirsutum
  Clone ID: LIB3829-015-Q1-K6-A6
ccccgcgtccggtccgagccctgtgcgcgaccctgacaactcgaagaagtgaagcatttactggagctacctaaagcagagacgcacttgactctttggaaagcagatttagctgaagagggaagctttgatgatgcaattcaaggttgtacgggtgtgttccacgtggccacgcctatggacttcgagtccgaggaccctgagaatgaagtcataaaaccaacaatcaatggagtgctaagcatcatgaaagcttgcgccaaagccaaaactgttagaaggttagtgttcacatcatcagctggaactattgatgttgcagaacaacaaaagccctgttatgatgaaacctgttggagcgatcttgaattcatccaggccaaaagaatgactggttggatgtattttgtctccaagacgatggcagagcaagcagcctggaaattcgctaaagaaaataacattgattttgtcagcataatacccacctttggtggtcggtccatttattatgcaatcaatgccgccaagcctcataactgcactttctcctatcaccgggaaccgaagctcattattcgatcataaaa

SEQ ID NO: 13797 - DNA, 582 bp, Gossypium hirsutum
  Clone ID: LIB3829-015-Q1-K6-A7
cattgatcttaaagattgttgaaagccagaattccgggtaaatttagtgaatgtgctgagaatcaagcacggctgcagcgaaacctcatgtacttggctgcaattgcagattctcaaccacaacctccagccgtacatgcccaggctggagggcactacatgcagcaacagcaacaaactcaacagatgacaccacaatcgcttatggctgcacggtcctccatgttgtatggtcagcaaccattttctgctcaccaacaacaacaagctctgcatggtccacttggcatgagctccggtggaagcacaggtcttcacatgctgcaaagtgaagctagcactacaggtggcaacggagcacttggagctggagttttccctggtttcaggcatggctcttctggagaaggcaagcaagacattggaagtgcagggtcagccgaagctcgtggagttctcggctgcgattgacggcctaatggtctgtctactatcctgatttagcatagttaagaagatgaatttaggggatatatatttttttaaaggaaattgtttctgatgcaaggaacaatgttagga

SEQ ID NO: 13798 - DNA, 575 bp, Gossypium hirsutum
  unsure (1)..(575): unsure at all n locations; Clone ID: LIB3829-015-Q1-K6-A8
gtcatcgttcatctttacccttcctcaagggttgatgggngaaacaagacaggcttcccaccatcattgtggtttggtcaatacttttagcttcaattctctctcttttatgggctcgagtcaacccctttgtttcaaaaggagatattgttttagaagtctgcggtttggactgtgactaaatacaggaaaagaaaagaaaaaaaaaaagggggtcgtagttcatgaagaaaggttgtcntgaaaattgcataaaatcaggcagccctttcggtggaaaatgaagacatgctgggatgcgacattgttgccctcagcatgtaataaggtaaagcaaaagggaaaaacatgttggcatgattgtagatacatagaactgcgatccccatatttgttctgttgagtttttcattgattctttcgatacatgtcgattttgtgagttggaattcataaaaagtccttgtaatttgcagaggagagaagattgatgcctatggtatcatattcccttctcaataagggactttgacatatatgccatgaattgtaaaaacttggattggaatttgttt

SEQ ID NO: 13799 - DNA, 591 bp, Gossypium hirsutum
  unsure (1)..(591): unsure at all n locations; Clone ID: LIB3829-015-Q1-K6-A9
ccttttaattaccccttttttctctttgtttcctttcttcctctcttcctcacaactcacttcaacgaatactatggtgatagcaccattaactgcaacttctcttctgctgtttgtcttcagttttttcctgcaaggcacctttggtgactatgggggaggatggcaaggtggccatgccacattctatggtggtggtgatgcatctggcacaatgggaggtgcttgtggatatggtaacctgtatagccaaggctatgggactaacactgcagcacttagcattgccttgttcaacaatggtttgagctgcggttcttgttatgaaatgaggtgtgacaatgaccccaaatggtgcctgcccgggtccattaccatcactgcaaccaacttctgcccccctaacttagcattgtccaacgacaatggtggnttggtgcaatccccctctccagcatttcgatttggctgagcctgctttcttgcagattgctcaataccgtgctggaatcgttcccatttcattcagnaagagtaccctgcatgaagaaaggaggaatcaggtttactatcaatggtcactcttacttc

SEQ ID NO: 13800 - DNA, 390 bp, Gossypium hirsutum
  unsure (1)..(390): unsure at all n locations; Clone ID: LIB3829-015-Q1-K6-B1
cggncgcgtggggcagtgttagtgattattgtgtccatcactgtgtttgccctgttgttgttgttaggtaccctgatgataaagaggcgggagtggtgagcctgtgattaccattaaggaggctgaagtggaggaggaagcttccaaagatgcttagcaagtccttggtaattgcagcttctttattgcgtcagtagcagcatagtagaaggcttccagttgtgaagagaactcaggtaaagtggattgtagggttctcattctcctggggtatatcctctttgtataaactcggttgttgtggttcttggtttcatttttatggcactgtgaggagatattgttgtactaatactatgatataaatataaagataaatccagtgtcaac

SEQ ID NO: 13801 - DNA, 519 bp, Gossypium hirsutum
  Clone ID: LIB3829-015-Q1-K6-B10
ctcaattgcctgagctgttgaagatcagcttcccaggatagtaattctgatatagcaaagaccccacctccaaaaagtagtacaattaattcttctgctgcagcaacaccagctgggagccatgtaacccctgctccactgaatcttccaccacatagtttgtctggtgcttcatctccttcagttcttccagattcaaattctgcccaaggcctcttggaaagcactggcaccaccaatcctcctcctgtaaatttatctaatgctacaaaggaagaagatatcacaaacttccctggccgtaggtcatctccatcccttgctgatactgaagtacgaggcattggtagaggtctatccggtcagccttcatctactataccccttgtttctggaagtgtggcttctggtaacggggcccttggtgctgtccctcctgcctctgacatggcaaaaagaaatattttgggagttgatgagagacttgggaatagtagcatggggcaatctttgacatca

SEQ ID NO: 13802 - DNA, 410 bp, Gossypium hirsutum
  unsure (1)..(410): unsure at all n locations; Clone ID: LIB3829-015-Q1-K6-B12
ccccgcgtccggcttgctaaaagactgttagtgtaggtgggagctcagataggaacatagatgagtttattgcaaagctgctaaagcctgaccagtaagtactaaagagaagagagaaaagatctgtccatgaaccgacctaggagtgtgccggccaccacaggctggtatttccggtgcacatcactaataaagttcatccatcaaataaacaacaaacctgcaggtaatcaaggacaaatcaggaagtccataattctcaaagtatatatctttataatctaatatgttaattacatgaataatatacagaagtttgaccaattgctaaaggtcaattgtatgtcttgtataatattnggaaagttaaaaaagagtgtaaggtcgtatcataaggataaggtttcaca

SEQ ID NO: 13803 - DNA, 575 bp, Gossypium hirsutum
  Clone ID: LIB3829-015-Q1-K6-B2
tgtttttaatcttttacgatttcttggaaggtgaagataaaacatttatcaatccttgtggcagcgtaaaccgattttccgaggcggaccataaaaaagagaagaacagaaaaaagcataatggcggtggcagacggtgtttgtcgcggcggaaacgtttgcctccggcgccgcgattctttcaatcttttcaacttccataatcagaatgctcgcccacgttgtttcatggtctcaggttcacaatcgtcatcgggatcaagaaaagaaaagatgctggcgtcgtctaaggtaagagtaagccttcttcaaccattgttgaaacaagaaaagacgagagggaaggaattttcgtacgagaaaatagacgagtggatgagagattcggtggctgaaatcgtgaagaggttgccggaatctcctttattggtcgaggtgttctccgacgtaaaaaataacaccacgagaacaaggacggaaaaggcggaggaagataagtggggtttggtgaaacaaaagtgggagaaaggggagagtccaatgcctgatgggctgatttttgtcgaacaaataca

SEQ ID NO: 13804 - DNA, 586 bp, Gossypium hirsutum
  Clone ID: LIB3829-015-Q1-K6-B3
gaaaaggaagagaatataagaggtggatgtttggatgaggtgagaagattaaggaattaattacaaataaatatataaaaatatatgggaagggattcagagtcggactcgaatggatggagtcgagctcgaggtttggtagtgaagacgctggtgttaattggaggcgcccttttgctcaagaggtttaccaaatccaccactcgttgggaccacgctagaatcgttgctcgttctcttagcggcgaaaagttctcgcgggagcaagcctctagaaatccagatagttacttcaacatcagagcacttacttgcccagcaacggagatggtggatggttcaaatgttttatatttcgaacaggcattttggaggactccccagaaaccttttcggcagaggtttttcatggtgaagccttgtccaaaggatttgaaatgtgatgttgaggtaagttcttacgcaattagagatgcagatgaatacaagaatttctgcgatcgtccaagggatcaacgcccactacctgaagaagttattgatgatattgctgaacatctgacaactatatatctcaaacgctgtg

SEQ ID NO: 13805 - DNA, 582 bp, Gossypium hirsutum
  Clone ID: LIB3829-015-Q1-K6-B4
aacttcccaggccatacccgttccctttctattcagcaagtcctttctcctattaccctttcccctctccctttctctctttcctcttcacctaaccttatcaaaggaacccagctttccatctcgctaccagacgacgatgttttgaactccttcttcactgttttctctacttccccttcttctcctgctctccaatggctatccccgccgcaaacgtttaataaaaaacacccttttggttatacccaataccagtatatccacgcacgttatgtctttttaatttgtaaccaagactatcaaggtccctgaaggcttcgattatgagctttacaataggaacgacatcaacaggattttgggtcctaaggattcttctatctctttcaaggattctgcttgtaggtgctttgggtacatggcttccacgaagaaatacatctataccattgatgatggctgctttgtttcttgtggttctccttgtagcatgctgctcatttgttgttattggtggtttcttgttcttcaactttaggtgctattggctggggtttacaaggagctacgtcaggcatg

SEQ ID NO: 13806 - DNA, 583 bp, Gossypium hirsutum
  unsure (1)..(583): unsure at all n locations; Clone ID: LIB3829-015-Q1-K6-B5
cggngaaccgatccgatgtccgacccataatacctttcgatgagttcgggttcactcacaacggccgccttgaactcaacctctctcagatcgatctctccgacaagaacaacctctcgattccgaactcgtcaaggtcgtcttcaggttcaaatctcntcgacgggaaaacgagcatcaaccccgttttccctgtaaacaacgctgaccagtacgccctactcttcgctaattgtttgactcaagtcaaagtatcgatgaccgtccgatcggcgatgtacaatattgaagggaagcaaagccgtgattatctctccgccggcaaaacaattctccctagggtttacttccttttatcccttgtttatttcagtctcgcagggatttgggtttactttctttacaaaaaacgactcaccgtgttccgaatccatttctttatgctagcagtcattgttttaaaagccttcaatctcgtgtttgaagccgaggataaatcttatatcaaacgaaccggaagtgctcatggttggggatggttttgttttacatattcagtttcttgaaagggatcatgcttttc

SEQ ID NO: 13807 - DNA, 560 bp, Gossypium hirsutum
  Clone ID: LIB3829-015-Q1-K6-B6
gaaaatctaatacctcgatatggatgggaatgattctgtagattcaaaacaggacactacggatatggcacttttcgtccagaatctacttcaacagatgcaatcaaggttccaaacaatgtctgattccatcatcacgaagatcgatgagatgggcagcaggatagatgagctagaacaaagcatcaatgatctcaaagcagagatgggtgcagagaactctcctcctccagttcctcctgcggtaaaagatgattccaagtcacccaatgaatcctaatgcgatagcttaaggaaattcggcatctaaagccagtaattcaagcctcctctaattgctattttcatagactacccttatatttgtaactcatccttttgttgaatgttgaaaaccatcagcaacatgcatcttattctttaaacagaactttaaggccatgattaggctttttaatctatgcatatttgaatactgtaatagctatgtctgacatgaatattcacgggtcacggatttctgaagcaatcaatctagatagaaaatagtactagtttgc

SEQ ID NO: 13808 - DNA, 596 bp, Gossypium hirsutum
  unsure (1)..(596): unsure at all n locations; Clone ID: LIB3829-015-Q1-K6-B7
gntgaatcaagtttaacaggggnaaagtgagccagtagtggtgaatgataaaaacccttttatgctttctggtactaagcttcaagatggatcatgcaagatgttggttaccactgttgggatgagaactcaatggggcaaattgatggcaaccctcagtgaagggggagatgatgagaccccactgcaggtgaaattgaatggagtagcaactatcattgggaaggtaggcctgttttttgctgtagtgacttttgccgtaatggtgcaaggactgttaaggagtaaactgcaagaagggactatctggagttggtctggcgatgaggcactgaaattgctggagttctttgctcaagttaattcctaagattcaggtgatagctcgatcttctcctatggacaagcatactctggtggctaaggagagtgctgatgtcatcattcttgatgacaatttctcaacaattctgacagtggccaaatggggccgttcagtgtacataaatattcagaaatttgtacagtttcaactgactgtcaacattgttgccttaattgttaacttctcctcagcatgtttgacagggagtgct

SEQ ID NO: 13809 - DNA, 588 bp, Gossypium hirsutum
  Clone ID: LIB3829-015-Q1-K6-B8
gctttttccattctgaaaaaaaaacaggttttcttttaagataacacccaaaatgtgtggaggtgcaattatttccgatttcgtcgcccccaaattgaccggaaattgaccggcgatgacctttggtctgaacttgacatattctccgacctcctaggtttcgacaacaatggcaaaagctttgtcaatcatcagtttcataacaacaacaacaacaagctcattaatccaaaagacaatcaacttaacaaagagagaagcgagacgattcagaagacaagccaagtcactaaaaaggttgaaaagactcagcgaactcggaaaaacttttacagaggaataagacaaagaccatggggcaaatgggcagctgagattagagaccctcaaaaaggcgtccgagtttggctcggtacctataacacagccgaagaagcggctcgagccttacgatgaagccgccaagcgtatccgtggtgataaagccaagctcaacttccctcaaacgcccaccaaaaatcaagcagcttcaccagctcttactctgcttcctcctgctaagaaaaggtgcatcgttcccgagttaac

SEQ ID NO: 13810 - DNA, 378 bp, Gossypium hirsutum
  unsure (1)..(378): unsure at all n locations; Clone ID: LIB3829-015-Q1-K6-B9
cgcatttggcgtgaccaagttcctggaacttggaacaagcatgagcttgccccaagcactttcaaacacacgtactgatggacttggggcgctttacganaagaacagcctcatttctcactcctggtgaataataggttcccattctcgactaagcaagttagggagacttttgttgcagcacttggttcaaacagcgctgcagcagctcaggctcgtctcttcaagcttgccaatgaaggccacctcaagcaaaggacctaagcaaacaccttttggtttgtcagtttcttgaagcattttatccactagtgtgtgctacttagattttatgttcctagtattcgacatctataatgctacagctttcatttggat

SEQ ID NO: 13811 - DNA, 553 bp, Gossypium hirsutum
  unsure (1)..(553): unsure at all n locations; Clone ID: LIB3829-015-Q1-K6-C1
gtgtttcttcgtcggagtcggagaagcatccctanaaacattaaaaagagcaaaaaaaacacacacacacacacacagattaagacagaagcatggccagccagatcgtaggaacaaagaaagcttgtgtcgtgggtggcagcggattcgttgcgtcattgctggtcaagttgttgctcgagaagggttacgccgttaacactacagtcagggaccctgacaaccagaagaagatctctcaccttgtaacactacaagagttgggagacttgaaaatctttcaggcggatttaactgatgaagggagctttgatgcccctattgctggttgtgaccttgtcttccatgttgcgacacccgttaactttgcttctgaagatccagagaatgacatgatcaaaccagcgacccaaggagtggtgaacgttttgaaagcttgtgccaaagcaaaaacagttaaacgtgtcgtcttgacatcatctgccgcagctgtgtctatcaacacactgaatgggacagatctggtcatgacagagaaagactggaccgatat

SEQ ID NO: 13812 - DNA, 579 bp, Gossypium hirsutum
  unsure (1)..(579): unsure at all n locations; Clone ID: LIB3829-015-Q1-K6-C11
cggccgcgtgggtttttgttccttttccaagggaagtgtgatctgttcttcttcacttcatttcactaacccatggctctttccgtcgagaaaaccgccgccggccgcgagtgcaaggtcaaggacatgtctcaggctgacttcggtcgtctcgagatcgagttggccgaggtcgaaatgcccggtctcatggcttgccgagccgagttcggccctgcccaacctttcaagggagccaaaatcaccggttctcttcacatgaccatccagaccgctgtcctcatcgaaaccctcaccgccctcggagctgaagtccgttggtgctcttgcaatatcttctctacccaagaccatgccgccgccgccattgcccgtgactcggcagccgtgttcgcctggaaaggtgagaccctccagaatactnggtggtgtaccgagagagcccttgactggggtcccaccggtggaccctgatctgatcgtggatgatggtggcgatgctactctgttgatccatgaaagagttaaagccgaggaggtttatgagaaaaccgggcagctcccagatccgtcttccac

SEQ ID NO: 13813 - DNA, 588 bp, Gossypium hirsutum
  unsure (1)..(588): unsure at all n locations; Clone ID: LIB3829-015-Q1-K6-C12
gnnagctcttctttgnaaatagcagnanaacaagggaaaattacaacaagttttatgaggcattctcaaagaacctcaagcttggtatccatgaggactctcagaacaggactaaaattgccgaattgctccgctaccactccaccaagagtggtgatgagatgaccagcttgaaggactatgtgaccagaatgaaggagggtcagaatgatatctactacatcactggtgagagtaaaaaggctgttgagaactctcccttccttgagaagctgaagaagaagggttatgaggtcctttacatggttgatgctattgatgagtatgctgttggacagctcaaggaatttgagggcaaaaagcttgtgtcagctaccaaggaaggtcttaaacttgatgagagtgaggatgagaagaaaaagaaggaagctttgaaggaaaagtttgagggtctttgcaaggtcatcaaggatgtgctgggtgacaaggttgaaaaggttgtggtttcttgaatcgtgtggttgactcaccnttgttgtttagtgactggcgagtatggntgggactgcaaacatggagagaatcatg

SEQ ID NO: 13814 - DNA, 567 bp, Gossypium hirsutum
  Clone ID: LIB3829-015-Q1-K6-C2
cttagccttcactttcttccctctgaaaccctaaaccgccgccgccgcccgtcaaacgccgacgaaaatggctttcgagggagtagttctccgcggcaccatgcgagcccacactgacatggtaacagccatcgccactcccatcgacaactccgatatgatcgtcacttcctctcgcgacaagtccatcatcctttggcacttgaccaaagacgaaaagacctacggtgtcgctcgccgccgtctcaccggccactcacactttgttcaagacgttgttctctcttctgactcccagttcgctctctccggttcctgggacggtgagcttcgtctttgggatttgaacgccggaacctccgctcgtcgttttgtcggccacaccaaagacgtgctctccgttgctttttcaattgataatcgtcagatcgtttcggcttctcgtgatcgaagcattaagctctggaacactcttggtgagtgcaaatacacgatccaagatggtgatgctcatacggattgggtcagctgtgttcgtttcagcccaaataatctgcagcctaccat

SEQ ID NO: 13815 - DNA, 566 bp, Gossypium hirsutum
  unsure (1)..(566): unsure at all n locations; Clone ID: LIB3829-015-Q1-K6-C3
atctttactaagggtngatttgaaggaagtcagtgaggaagtagctaaatcaaggttggagctcctgctcgtgttggtctggttgcacctattgatgtggttgttccacccggcaacactggtcttgacccatcacagacctctttcttccaggtgctcaatattcccaccaagattaacaaaggtactgttgaaattatcactcccgttgagcttatcaagaagggtgacaaggttggttcttctgaggctgcacttcttgccaagctcggaattaggccattctcatacggtcttgttgtcttgtctgtttatgacaatgggtcagtctttagccctgaggtgcttgaccttactgaggatgacctgattgagaaattcgctactggtgtctccatggttacggcattgtctctcgccatctcgtacccaaccctggctgctgcaccacacatgttcatcaatggctacaagaatgtattggccgttgctgttgcaactgagtattccttcccccaggctgataaagtgaaggagtacttggcggatccaagtaagtttgctgt

SEQ ID NO: 13816 - DNA, 585 bp, Gossypium hirsutum
  unsure (1)..(585): unsure at all n locations; Clone ID: LIB3829-015-Q1-K6-C4
ccccgcgtccgggnaaatgtaagatggctggttaccagggcagagatgactacgacttccttttcaggtggtgctgatcggtgattcgggagtaggcaagtctaaccttctctcaaggttcaccaggaacgagtttagcctcgagtccaagtccactattggcgttgagttcgctactcgtagcttgaatgttgatggtaaggtcatcaaggctcagatttgggacactgctggtcaagaaaggtaccgtgccatcacaagtgcctattaccgaggagctgttggtgcgctacttgtgtacgatgtgacccgacactccacgtttgaaaatgtggagaggtggttaagagagttgagggatcacacggatcccaacatcgtggtcatgctcataggcaacaaatcagatctccgacaccttgtggctgtcccaactgaggatgcaaaatcctttgcggagaaagaatccctctacttcatggaaacttcagccctggaagcaacaaacgtggaaaacgcatttgcagaagtgctgacacagatctatcacatagtaagcaagaaggcaatggagacaagtgatga

SEQ ID NO: 13817 - DNA, 577 bp, Gossypium hirsutum
  unsure (1)..(577): unsure at all n locations; Clone ID: LIB3829-015-Q1-K6-C5
cggccgcgtgggcnacgacaggacaaanattgtagattttacacagccttatatggaatctggactggttgttgttgcaccggtgaaagaggcaaagtcaaacccttgggcattcctcaagccatttactgcagaatgtggcttgtcactgctatgttctttctttttgttggagctgtagtgtggattcttgagcaccggataaacagtgaatttcgtggtcctcccagacgacagcttataacaatttgttggtttagcttctcaacgatgtttttctcgcacagagaaaacacagtgagcactttgggacgaatggtgttgatcatatggctatttgtagttctgattattaactcgagctacactgctagtttgacatcgatacttactgtgcagcagctaacatcagggattcaagggattgatagcttgatctcaagtactgaacctattggaatccaagatggttcgtttgcattgaactatttggttgacgagctcaatatagcacaatctnaggatagttaagttaaaaaatccagaagcatatctcagagcccttaagcttggaccg

SEQ ID NO: 13818 - DNA, 581 bp, Gossypium hirsutum
  unsure (1)..(581): unsure at all n locations; Clone ID: LIB3829-015-Q1-K6-C6
gnaaaaagaatagttcnatcaccagcgattcatcaatatcaactacagcaatcgttggaggaggaggagcaagtggtcgtactaatgctgctttggaggattcccatttcccttctgatcttatatccattcaagaccgcaaagatgaggccatgctcgttttaaaatctgatttgatggctgcactcaatgaagaggttaaatcattggatgaagataactggaagtttgaaggtcctcgttcccgcatccacctgatatcaagaccaggtgggtttctacagaagcagatggagtttacaaaaaactgtagcacagccccgaaaaaagatttcagatttcctgagactggaccttacagctaagagattggctttactcagacaacttcattatatctgtatattgctgaatttcactatgaaatcatgcacacatgtgaagaattacaagtatttccttctgactgttattgttaaacaagacagttttgcctttccatttttgagattttaatatcttaaatgctcatgtacgtagcacaagtccattgcggtgtggaattcgattcagattctaag

SEQ ID NO: 13819 - DNA, 578 bp, Gossypium hirsutum
  unsure (1)..(578): unsure at all n locations; Clone ID: LIB3829-015-Q1-K6-C7
atttcttcagtgacaccaattcttgggtgtggttcatgtggngaaagcacacaagcatcgaaagcctaagggaaagtcccctaaaggtcccatcactttgcctccccttgtgaaacctccaatcaagttgccaccggttgttcctccaatagttaagccacccattgacctccctccggttacggtccctccaattaaccttcccccagggacggttcctccagtaactaagccaccaagtgggaaaccctgcccaacaccaccaaccaaggacacttgccccattgacacactgaaattgggtgcttgtgtggatctgctgggagggttggtgcacattggactaggtgacccggttgtgaaccaatgttgtccggttctttcaggactcgccgagctcgaagctgcggtctgcttgtgcaccaccctcaaacttaaggttctcaaccttaaaatttatgtgccactggctcttcaactccttgtcacatgtgggaaaacaccccctcctggttacacttgctctctctaaaaccaagttgctaggttgatggactctatatgatggaatggacatg

SEQ ID NO: 13820 - DNA, 573 bp, Gossypium hirsutum
  unsure (1)..(573): unsure at all n locations; Clone ID: LIB3829-015-Q1-K6-C8
gcaacgtcagctctctctcccatccgaaaactttcccacctcctatcccacatcaagctcctcatccgccgcaaaaccgccgcgatcgctgcctcggatgccggcctatactcagaatccgtccgccatttctcgaaaatcgtcgacggccgccgccttgcctctcagggcttcctcgcagagtgttacatgcaccgagcctccgcttacaaggcctcgggtcgcatagccgagtcgatctcggattgcaacaagaccttagcccttgaccctacttccatccaagcgctcgaaaccagggccgaactgttggaaacaatacgctgtttgcccgactgtttgcacgaccttgaacacttgaagctcctttacaattcaatcatgcgtgatagaaagcttccaggtccaccatggnaagcgtcacaatgtgaggtacagggagataccggggaagctctgtgcgttaacggctaagattcaacgattgaagcaaagggtagcttcaggggagaccgggaatgtcgattactacgcattgattggtttaaaacgtgggtgctcgaggtctgaatt

SEQ ID NO: 13821 - DNA, 464 bp, Gossypium hirsutum
  Clone ID: LIB3829-015-Q1-K6-C9
atgaaaaccctcttttatatgtctcgagtaactcgttgctttcaatcctaaagccacgcaaatcctgtggggtgaaacagaacaccctcgtagtaactttacaccaaaaaggcaatgggaaaggagcaacaggatatggtcaccgaatggaaaatccaccaaggcacatagataacggcaagaagaacccggggtctggctcttctcctgctgatctccacatccctgaggacctaccacacacgtactgctgaagaccatggcaattgctaacaggaaggaacagagagctacagctgatagtctacacaacctgacatactgaaaatacctgcaccgcaaaacaactactaactgacaggtaatgcaagcaacgatttgaaggctaagcgtattacacctaagcattatgcaacttgccatcacgactgatgaagaacttgacaccttgatcaaatgaacca

SEQ ID NO: 13822 - DNA, 558 bp, Gossypium hirsutum
  Clone ID: LIB3829-015-Q1-K6-D1
ccccgcgcactgccacgcggtctcccacgctcactaccactcgtgctatcctcgtctcgtacgatcacactcctcatgtgctctgctttgttcttaataatgctggcatacaagtctgaccaactacaaccaaacaggttattatatctactgtaattatgactgtggagaaagcaataccaacttggaatagcgtgccatcatacttaaccgatttacaatactggggataatgcaattgttactaactgggaactatcattgtgcttcaccgttgacactctggggcgtgatacattattgattggtatttaactgctgactactacacgcgcgatgctgacagtccctggcctgaacttatcattgcctgcgggacaggatcctacaccaatgttgtatacagccttgctctaggtgacaactctgccagcatgccaagatcagccatcgctatcataattggccttacttttagctacactgctctgaacatgacagcagttgcctgtccttagcaatgttaagcaccattgctacctgtgctgccatgtgtgc

SEQ ID NO: 13823 - DNA, 594 bp, Gossypium hirsutum
  unsure (1)..(594): unsure at all n locations; Clone ID: LIB3829-015-Q1-K6-D10
ggattctcaaacaatgaaagctcgggnaaagggaaatccgtcaacccgatgccagtggatgaagaggtaatggtagagggtttcttgcagatagtatccgaagcaagattgtcagtgaaacagttgtgcaaggcacttgttgcacaaatggaagagagtgatacgactttaatggacaacttgaatttggtgcttcaaccatataaactttcattgaattccaagtactcgaagacggtattataccatttggaagcaatcataaaccaatcattgtaccaagattttgagaattgtgtgttccagaaaaacgggtccccaaagctgttggaccctcaacaagatcgccaagcccagttttcctcctatgttgcacttagaaacctcagctggaatgaagtggttaggaaagggactaaatattacagtgaagaattcagtaagttttgtgatcagaaaatgagtttaatcattncaacgttgaattggaccagaccctggcctgaacagctgcttcaagctttcttcgttgcagctaaatgcatatggttgcttcatttactagctntctcattcagtccaccattagggatt

SEQ ID NO: 13824 - DNA, 519 bp, Gossypium hirsutum
  Clone ID: LIB3829-015-Q1-K6-D12
cggcatcctgtgctgaagctgtatggacatacaatctcctacccttactgaccaggcttactaacaagccaggttgaccggccagcactgattacaccgctggcttttcttaccacacaaagctatagtaccgacctctgctgacctggccgagcataaaaatgctatccagctacagacctttatgcagtgactccccatttacccaacatgtcacaccagcatattcagatgacgtaccagctatcatctaatggtaccacatcacatgggagtgtggtctaccactcgcttaaccttactacctcaaagaatactatgtgcaaaatgtacaactgcaacgcatcaaccctcatactcctttaacacccataacacacttcctacctcactgtactcgctccttatctaatagttggttggacatatcaaggaaaaacgaatgaaaactccaacacaggtgggacttattctgcaagatcttgcctgagaatatgatccctgatactactatgacac

SEQ ID NO: 13825 - DNA, 582 bp, Gossypium hirsutum
  Clone ID: LIB3829-015-Q1-K6-D3
gtctctctctgctctttttttcccaatttttttatttctctctcttttaatatcttcatttcttcctaattagggtttattttttttgttaatttatgaactttttagtgactttatttcaataaatttaccaagtttctcaattacttagatcgaaactcgaacgagagagaaaaaagtagcgttcttttctcaacagaaggaaaaagaatggagtcaaattcatggaggtttcgattttccaattcttcttcgtcttcctcaaggcgtcatcagtctcgatctgatctgtttctgggtggaggatatgaagaatttgatggagacgaggatttcaaggcggagtttttatgtccgttttgcgctgaggatttcgatattgttgggctttgttgtcacatcgatgaggaacatcctgttgaagtaaaaaatggggtctgcccggtttgcgcgaagagggtcgggatggatatagttagccacattaccatgcagcatgggaattttcttaaggtgcagcgcaagcgaagattacgcaaaggtggatccaatttgacattttctatgttgagaaaagaaccg

SEQ ID NO: 13826 - DNA, 524 bp, Gossypium hirsutum
  unsure (1)..(524): unsure at all n locations; Clone ID: LIB3829-015-Q1-K6-D4
gnaaaatcattcccanananaaagattaagagggaaggagctgatggcagcaataacaagcgcggtgatagccatagcgggagtgatattgggatggatagcaatcgagatcgcttgcaagccttgcctggagaagggcgtgaagccattgaccgatctcttaaccctgattacgaccccgacgatgatctccaagcccctctcaaccctaacccagatccccaatctcaccctggtatttcttcttccacttcatccaaacccctacaaatttaagggttgttctaggcaaatttgtgtcgatttattttctaccttatttgtccaggtgatttggtattgttatgtttgaactttgaatgaatggtgtggttgaattgttatggtactactatgatcacattcaattgtaccgttgttggcctggttttggtttgtttcaagtgacataacttggtttatgcaaccatgcctttcaaacataacatactctacagattattgaattgagtgcaggatttttt

SEQ ID NO: 13827 - DNA, 571 bp, Gossypium hirsutum
  unsure (1)..(571): unsure at all n locations; Clone ID: LIB3829-015-Q1-K6-D5
caaaacanaatgggtttccccngagcatccgcaatcggcggaggcccggaacccgactctgaatccgccctcctcctccgcacatccctaaaaccagaagacaaattcaatttgggctacatcatctacttcactttgggcgttggctttctcctcccatggaatagcttcatcactgccgtcgattacttttcctacctctacccggaagcttccgtcgaccgtgttttcgccgtcgtttacatggtcgtcggcctcgcttgcctcttggtcattgtattttatgctcacaagagtgaagcttacatgcggatcaatgttggtttgggcattttcgtggtttccctggtcgtcgtgcctgttatggatgcggtttatatcaagggtcgggtcggattgtatgacggattctacgtcacggtcggtcttctcgctctggcgggtataggcgatgcgcttgttcaaggtgggctcattggagcggctggggaattgcctgaacgctacatgcaggctatcgttgcgggatccggcggttctggggtccttgtttcaatgctaaggatcctaa

SEQ ID NO: 13828 - DNA, 560 bp, Gossypium hirsutum
  unsure (1)..(560): unsure at all n locations; Clone ID: LIB3829-015-Q1-K6-D6
cggncgcgtgggcagnagcagatctttgtngaaaacccttactggtaaaaccatcacccttgaggtggaaagctccgatactattgataatgtcaaggccaaaatccaagacaaagaaggcattcctccagaccaacagaggcttattttnntgccggaaaacaactcgaggatggccgaactcttgccgactacaacatccaaaaggagtccaccctccacctagtccttcgtctaaggggtggcatgcagatatttgtgaaaacccttacgggcaagaccatcaccctcgaggtggaaagttctgatacgattgataatgtcaaggccaagatccaagacaaggaagggatccctccagaccaacagaggcttatctttgcaggtaaacaacttgaagatggccgaaccctcgctgattacaacatccagaaagagtctaccctccaccttgtccttcgtcttcggggtgggatgcagatatttgtaaaaaccctcaccggaaaaaccatcactttnggaggtggagagttctgataccattgataatgttaaggcga

SEQ ID NO: 13829 - DNA, 571 bp, Gossypium hirsutum
  unsure (1)..(571): unsure at all n locations; Clone ID: LIB3829-015-Q1-K6-D7
attctggntgtcatggcaagaatttcaaattcacttcagatcgatttatgtatgtcgggtctaccctcctgagatgcgatattctgttcatggacaatggcgtggttacagtgctggtggttgtcaagattataattcatggcatcaaaatccccaattcagattgagggcaagtggtccagatgcttcatatccaattcatgtattcatcaccttaactcagggtgttagcttctcaagaacggcagctggttttagaaattatcaatctagtcatgattcacagatgttctacattggaatgaggatcctcaaaacccgtggtcgtcgtgctgcttacaacatttacctacatgaatcagttggtggtacagattatgttaattctcgagaaatatcttgtgaaatggttttagagcctgaaccaaagggttacacaatagtgcctacaaccatacatcccggggaagaagcaccatttgtcctttctgtattcacaaaagcatctgtaatcttggaacctttgtagtttgcagtggtggattctccagtctgcttgtctttctggctg

SEQ ID NO: 13830 - DNA, 581 bp, Gossypium hirsutum
  Clone ID: LIB3829-015-Q1-K6-D8
ataatactttgacgtggaaacaatgagcgagcacgcaatcttacatggcaagctggagtctggtgcattgcactatgtgtgctcccaatgtggcaccatgtgcgcgccctcatgccgaaccatgggcacgcacactgagctttgaaactgacatagttgccatgcacatgaaggagcctctaaaactccaagcctagctgtgtcgctggagtataggtgcattactgaaacgctaaaactgcacaacatgtctttaaagatgtgggccacgcacaacaagaccgtaacttaccaaatgcttgaatgagatgagcactaggaacacatatgctatgcgattacttgtgcaagactctccccacatagcgacggccacagcggcctacggcactgaactctccattatgaaaagctccaccaggagttgggacattccagcactctgcttcagcatatttatggaactcacagggtgaatagctggtcatatgctgagggaaactgatttaaaggattgaccatgatgaggaaagatccatgagcgaagtcggctgcgtattactattactatcaaactgatc

SEQ ID NO: 13831 - DNA, 581 bp, Gossypium hirsutum
  Clone ID: LIB3829-015-Q1-K6-D9
gtaaactcagtgagtcaaatcacaaatcgctgatccaccgccattcttaacttttggtattcgtcccctcgatcacagctataaattccaatcaatttccctgattaaatccctattaccctcaaaataatgaagcttcaattttttctccgatccccaagtcaccaaaccctgaccgtaaccctagaatccacccaatccctaacccttcgtcaactcaaatcctctctccttccgaacccacaatccttctcctccttctacttcaccctcaatggaaaacccctctctgattccacccttctcccaaatccccaaatttcccatctttcaaccctttttctcctcccccgcgtctccggtggcggaggcgatggcggcgccactggagccgagtcccgcgactgttatctcaagatgtacgctgtcaaaaagcccgataaagtcgaccccaatgagaaaagcttggtaagtggctcaattgtgccttatctaatgaacctctaagagaaccttgtgtgattgataaattagggaatattttcaataaggaagctcttgttgaagctttgttgggtaag

SEQ ID NO: 13832 - DNA, 559 bp, Gossypium hirsutum
  unsure (1)..(559): unsure at all n locations; Clone ID: LIB3829-015-Q1-K6-E1
gtggntacgaaacttatgctgtggcttntaaaaatcaaggccccacctccccccgctaaacattggctccttcgaggaatagtagcaattcagcgtcgcatttggacccttcgcatcgtgcgcctatcgatttggttacggttcttgacgtcagcggtagcatgaccggcgctaagctccagatgttgaaacgcgccatgcgtttagtcatttcgtcgctcggctcggctgataggctttccatcgtggctttctcggctacttcgaaacggttattgcctttgcggaggatgacggctcagggtcaacgagctgctcggcgcattattgaccggctggcctgcggtcaaggaaccagcgttggcgatgcgttgaggaaggcaaccaaagttcttgaggatcggagggaaagaaatccagttgctagcataatgttgttgtccgacggtcaggatgaaagagtccaatccaacgcttccaatcaacggcaccattcaagccacgcctcgtccactcgtttcgcccacattgaaatcccggtccacgcgttcgggttcgg

SEQ ID NO: 13833 - DNA, 588 bp, Gossypium hirsutum
  unsure (1)..(588): unsure at all n locations; Clone ID: LIB3829-015-Q1-K6-E10
cggccgcgtgggttccagtacacgccgttgcagatgctccctcgtcgtctccatttctaaatcccatcaactgacgacgagaaagagctgcaggtggtttgtatggctcccgaggaagaaaaatgactcgtcgcaatcccctcgattttcccattgagtgggagaggcctaagcctggacgcagacctgacatattccctcaattcagccctatgaaaacaccattaccaccaccaatgccatatgatccccctgaagaagatgaagaagaggaagaaaagaaagaggaagaggaggaagatcctgaaaaggaagaagtacctgacaaccctgagaaacaataatggagtagataagatgtcacagtcagccattttagaacatggagttgagtggtataaccatatttgagttgaggggattttccaggcatcttcttgggattttattgtcttgttaggttaatatagagaaacttaggtccaagttcctgttttagagtgttgtaatccgtaagtctttcttacatgattatactagttgctttcgaataccttgttcttagttgntatgttcttgttcattttg

SEQ ID NO: 13834 - DNA, 541 bp, Gossypium hirsutum
  Clone ID: LIB3829-015-Q1-K6-E11
ggccgccctttttttttttttttttttttttttttttttacatcttaaaaaaccacttcaccaagtctgcagtacatagagaggaagtcacaaggatttcttagagctcttgtaactcagttttggatcatatctacatataactaatctaccaaaaaggaagaaagaacctctatagcttcaagtaaatattaacctactcaacagcgggactgcaaagataaacaagccacaagtacatacatacatatatatatattacagatatagctactaagggacaaggacattaggataccaagtttctgttagcattgacaacccaactcaaaacccgtctgaacattctcatcagggtcatttgcagacggtcttcaatctctttgcagcctgaacaaatcccacaatgacctgaagctcctttttgtaaatgtacaacattaaatcactagaagagcccttttctgcctcttcctttcttgctccttcctaaatggttgtcaaaagagtgttgctcaaataaattgctttatttttatcc

SEQ ID NO: 13835 - DNA, 578 bp, Gossypium hirsutum
  unsure (1)..(578): unsure at all n locations; Clone ID: LIB3829-015-Q1-K6-E12
aaagaataacttctcttgaaaaatttacaaatctgaagatgtggtggagatgatcaggtttgatggaactaatgattcagatgtaaggttattacangaaatatatgaatcatgctagagatatcctaagtaacgaacttcagaaaggtgaaattcccgtctttcgttcagagtacattgagcaagaaagaaaccaggtttctcaaagcagtttcgataacaatgagctatcaattgttccaaatatttctcaggttttggaggagagaactagtaaactacagacaataatggcagcacctactcccagtgaaactgttccacttttaaacaaagaaattatcatgaatgtgaacctcagcaaggattactcgagaaaatcgtgtggatttgctaccatgagattgaggtcccgtccggctgtaatcataattgctgctactatcatttgcttaggcatgtgtgcagtcattttccaccccaacagagttgngtgagtttgcagtaacaatnacgcaggtgtttgttcgacagggtatanagggggtatatggacaaaacaattagtgcatgcgacc

SEQ ID NO: 13836 - DNA, 577 bp, Gossypium hirsutum
  Clone ID: LIB3829-015-Q1-K6-E2
attttcctctttttttattttatttttatttaaaatttgaaactgctaacattattacattttcattagccttaagagaagaaaaaaaaatgtcatcgatttcaatgtctggttcatggacagccaacaaaacaaagattcgaagggctttagctgtttacgacaaggacacaccagatcgttggtacaatgttgctaaagctgtgggagagaaaactgttgaggaagtgaagaagcactatgagcttcttcttgaagatgttagacgcatcgagtcgggtcgggttcctttccccgactattggaccgttaccgggaatcgtcaagcatgaaaaattccgaaggtcaaatgaagaagaaaaaatggtggacttgcatggatctcacccttatatatgtctgtgtgtgtggcagtaattgtagtacttaagaatagccattaatgtatttaggaagaggaagaagagcttaatgtgtgatcattgtttcctcttttgtttttgtttttaattgaggaaggaatgttattgtaatatatatatatataattatgtagcatatgaagtgtttttatttt

SEQ ID NO: 13837 - DNA, 322 bp, Gossypium hirsutum
  Clone ID: LIB3829-015-Q1-K6-E3
gttatccactgcggccttagggttttggacatttgagcgccacaatgctcagctccgttgggatcctcagattagccaagtccccggccgcagggatccttatgatgaccttcttcaagacagttatgcgtcctccaccaaacgaaactgaggaatcagaagccattagcagatggtttggagcttgatctacaaatgggaagtggacattgaaaccttttttactgttggtttgaattaaaagattctgcttgttttgtagtgtacttttgaacatttcagttgggacactggtttatgaatgaaaataaattttccatgt

SEQ ID NO: 13838 - DNA, 582 bp, Gossypium hirsutum
  Clone ID: LIB3829-015-Q1-K6-E4
gtactcctctccctcgtgatgggtcggccttcaacaattccccgctgctactcagacgaaattgtttgagttgttgggaaaattgaagcaaaagaatgtcaatactttgactatcctagttatgggcaaaggcggagtaggaaagtcttctactatcaattctcttattggggagcaagttgttcgagtcactgctttccagtcagaggggttgagacccgtaatggcttcacgctcctgggcagggtttacattgaatgtaattgatacaccaggacttgtagaggctggctatgtcaatcaccaagctcttcagttgatcaaagggtttcttttgaataagaccatagatgttttgctttatgttgatcgcctggacgcctatagagtggatgacttggataagcagatcatcagggctatcacaaacagttttggaaaagaaatatggcgcaaaaatttgcttgttctcactcatgcacagctttgtccaccagatggactgagttatgatgttttttcttctaaaagatcagaggtgtcctaaaggcgatccgtatcggagctcgtattaggaaaaag

SEQ ID NO: 13839 - DNA, 513 bp, Gossypium hirsutum
  Clone ID: LIB3829-015-Q1-K6-E5
atttgcaaaggaaacattgacaggcaatctgcttggagaagattgtttgtcttgctatcaactcaggtattagcactccaggcatgtcagccagtcttgcctatttcgacacttataggagggaacgtgtaccggctaatttggttcaagctcaacgagattattttggcgcccatacttatgaaagggttgacatggacggatctttccacactgaatggttcaagatcgccaaaaagctaaaagattaatgttattcttgcagtactcttcagaacttccaataagtgtaataaaatctgctctggactctatgctacacagagctacaaccatgattatctttttgaaaatttatctcaacttcatttctcaaattgagctgcgaatttacaccctgttctaggattaacgtgcgtttatgttgtttccggatttgagttttcacccaatgtgggtctctgtggtttgtgaactataagagagtcaacttttttttcctttttgcttgat

SEQ ID NO: 13840 - DNA, 574 bp, Gossypium hirsutum
  unsure (1)..(574): unsure at all n locations; Clone ID: LIB3829-015-Q1-K6-E6
aaggggacagatccttggnaagagaagaaaatggcgngacatttggcgtcgatatttgggactgaaaagacagagtgaactgccccttctatttcaagataggcgcgtgccgtcatggggatcgctgctcgcgtctccacaccaagcccagcatcagccctactatccttctctccaacatgtaccaacggccggacatgatcaccccgggcgtcgacgcccagggtaaccccatcgatccccgcaagatccaacaacattttgaggctttttatgaggatttgtttgaggagttgagcaagtacggtcaaattgagagtttgaacatatgtgataacttggctgaccatatggtaggcaatgtgtatgttcagtttagagaggaagaacacgctgcaaatgcagtaaagaatcttagcggaagattttatgctgcccgtcctatcattgttgacttctcacctgtgacggacttccgagaggccacctgtaggcagtatgatgagaatacttgcagtcgtggtggatactgcaattttatgcaccttaaaagataagcagggagttgaggcgc

SEQ ID NO: 13841 - DNA, 78 bp, Gossypium hirsutum
  unsure (1)..(78): unsure at all n locations; Clone ID: LIB3829-015-Q1-K6-E7
gggnaagnaggnctgcttattgcaaaatttgtgtngaggctgagcttgnaaaaatgggccaaagtaccgtgtagcttt

SEQ ID NO: 13842 - DNA, 594 bp, Gossypium hirsutum
  unsure (1)..(594): unsure at all n locations; Clone ID: LIB3829-015-Q1-K6-E8
ccacgccgtccgnaaaaaaaaaaccccaacagnacatagcctaggacaggaggatctctcagggtttaggtgatggcttcaaagcggatcttgaaggagctcaaggatctccagaaagatcctcctacctcttgcagcgcaggccctgttgctgaagacatgtttcattggcaagcaactattatgggtcctcctgacagtccttatgctggtggagtgtttctagtcaccattcatttccctccggactatccatttaaaccaccaaaggttgcattcaggacaaaggtctttcacccaaatattaacagcaacggtagcatttgccttgatattttgaaggagcagtggagccctgccctcaccatatccaaggtattgctatctatctgctcactattgacggatccgaatcctgatgacccattggtgccggagattgcccacatgtacaagactgacaagagcaagtatgagacaacggctcgaagctggacccagaagtatgcgatgggttaacttgctactacgcatgtaaaaaggagggcttcattccaaataactttggtctttaaattaatgtgtatgaatcaa

SEQ ID NO: 13843 - DNA, 590 bp, Gossypium hirsutum
  unsure (1)..(590): unsure at all n locations; Clone ID: LIB3829-015-Q1-K6-E9
ccccgcgtccgggacaatactcttcaggccccgactcaggtagccacaagcgcaaatcgatgaccaggggccgccgtcttccgttggccggaggtccacagggttctcgtctccagattccgctcctcctccttcctatgacagcgtcccgccaccgcttgacggcatcgagatggccaagcagcgagctcaggagattgctgctcgccttacggcggcctccgctggctctgaagccaagcgccctcgtgtcgagaacggttctggcggtggttttgataacgagaagggatttatgtccgctccttctgatataaagcatatgtcaagctctgctccttcggcaatacctgtttcatatggtagctaccatggtactagcaaaaagatgcattccacaaaagggttggtgttataattggcaaagctggagaaaccattaaatatcttcaactgcaatctggcgcaaagattcaggtccagcgagatatggatgcagatcctaattccgtgactaggcctgtggagctcatgggtactgctgaacaaatagctaaggctgnagcagttgataaatgatgttctggcgg

SEQ ID NO: 13844 - DNA, 571 bp, Gossypium hirsutum
  unsure (1)..(571): unsure at all n locations; Clone ID: LIB3829-015-Q1-K6-F1
tcgcccacctccggagcctgtgttctgtgccaagacaaaactatgctaacgcttctgacaaaattgtccaacggcctccagaagtgcttgttgagcacaatttaaatgatctactattgttttctcctgaactgttggtcttaaagcagacagaccattattgtcttcaagcacactggctccaagaaatcagggtttggcttctgaatgcttttcgggaaatgcatgcataattgtcagctctcctactccgcagataaagaacagtgaaagccagtcaatttcatcagcaaccttggagaatttggctgataatgctgggaatggtgctgctattgaaaattacaatatctctcctactccgcagataaagaacagtgaaagccagtcaatttcatcagcaaccttggagaacttggctgataatgctgggaatggtgctgctattgaaaattgtaatatgttcagtgaaactccattaaaaagaagtatagaatccccatcagcatggnaagtctccttggtttatcaactcttttgttccaggcccaaggattgatacagaaataac

SEQ ID NO: 13845 - DNA, 581 bp, Gossypium hirsutum
  unsure (1)..(581): unsure at all n locations; Clone ID: LIB3829-015-Q1-K6-F10
ttcanatatgctaatacattgcttattgaatctcatcaaactctctgattactcttaaatcctgttcttatatgttttttcattatacctattattttacagcaaccttgagaaagaaagaagagcttgattcttgccagttttttcccttgatttggattaacacacaagtatgctttttttgtatgacaatttttttttacatgtttggaaaccaaatattcatttgtttgtatactatagcttcatcacactttgattgattcaaatctaaatttttgtgaacaaatattgttgtacaatattagttgcatcttctagtgtctttcctttttgcaatatataactgcaattgagtatagattgaaaatcgagtctatagctgtatacatttatttgaagaagcaatttgattgtcaagagttgttctaagtacttaggggcaatataaataagaaagataggagagattaatggnagatgttaactataggattaaaggtggagacttgtgacaaaagagccctgctttgctataggacagttctaagatacctgctttgctatacgataggggaatg

SEQ ID NO: 13846 - DNA, 550 bp, Gossypium hirsutum
  Clone ID: LIB3829-015-Q1-K6-F11
gttgggtcacctaacagtttgaaagatggaccagtgccatgagttgcttagatctaaatcagctaggcaacaaaggctggctgctgctgctgctgctgttggtgctgctcagataatgggctctggttcttttccatactcaccaaagtccatcaatttagtccttcaacagccccaaaatgatgctcagagggctgctttaatgatgggtgatgatatgaacaagttcaaccgttcaagtccagcttcaaggcagatatacttgactttcccagctgacagtactttcagagaagaggatgtgtcaaattatttcagcatatatggacccgttcaagatgtgaggataccataccaacaaaagagaatgtttgggtttgttacttttatataccctgagacagtgaagatgattttagctaaaggaaacccgcatttcgtttgcgattctcgggttttagtgaagccatacaaggagaaagggaaaatcccagacgagaagcaaccacaacaacagattgaaaatggaaccctaactggtcttgattct

SEQ ID NO: 13847 - DNA, 571 bp, Gossypium hirsutum
  unsure (1)..(571): unsure at all n locations; Clone ID: LIB3829-015-Q1-K6-F12
cggccgcgtgggcggncgcgtgggtttcattagcagcacttcacattttctccctcaaaaaacaccagcccactgcaatgtacggtgaccggtgctccaggcttcgaagtatggcctattttagccatagatttccctcttaactccgatttcgacgaagctaaagggagccgacggcctagtagcggggtacgggtgcatggcgcgtgtacgaggctgtactggcgtatggaggcgtgggcgtggcgttgctgaggcgtacggaggcagctggcagttgtacgacgcgagggctggggcttggctgcctggttgcaacgcaaaagtggggaagaaaccctagggtttctgttctcaaaacaatgggcctatcgggcttgtaatttgggtctaggtttagttattgggtttaggtttgaatttgggtctaggtttagttattgggtctaggtttagttattgggcttgtttgggtcttgagttatgtagttgggtttggggtttaatttttgtttattctgtattttggtgggcccgggcaaattggcccgtttacaataatnaataagta

SEQ ID NO: 13848 - DNA, 576 bp, Gossypium hirsutum
  unsure (1)..(576): unsure at all n locations; Clone ID: LIB3829-015-Q1-K6-F2
agaaactagtgtgaaacatggcgtcctcggatcttattggcaagctcgagactgatgtcgagatcgatatttctcccgaaagttccaccatatgtggtgccacnnaggccgcaccatgtncnncaccacactagnnctctgaaaaagtacaaggatgcgatttacatgaaggtgaatttggaactcccggcgtcgttatctgctggagatatgtgcatgatggaaaggctaaaactgcaaagcaggtagttgaagttatggaccatgagaaaaatcaataactttcaaaatgcttgaaggagatctgatggaggaatacaaaagcttcgtgattacaatccaaacttcccccaagagcgacggtaaaggcagtatagtgcactggactctggattatgaaaagctgcacgagggtattggacatcccgagtctctgctccagttctttatcgaactcacagcggacatggctgctcatctccgcaaggaaacttaattaatggatagaccatggcaagaaaatcccatgtcgaatcgtctgctattactattactatcagtactgatctaagaata

SEQ ID NO: 13849 - DNA, 470 bp, Gossypium hirsutum
  Clone ID: LIB3829-015-Q1-K6-F3
gcctgcttcaggccctctcttgccgcgaccagcccgctgggtgaggaacctgccgtgtaagccagcggattgagaaaaggtgcacctgttggcaagtgctgccctatgggcctaacactgcataccccgggcatgagcttccctgggaaggtccacgagcccggaaatttcacgaacatgaaagtcgaaatgactgttgagacctacaatatctacgtattcaacgtcctgaaacaggtccatgcacatattcggcgtctgcatgcgaaggtatgtggaatcatgatcagcttcttgaatgacatattcaacgaaactcgcccaaaaagtattgagactggccttgcacagcatgctgtccacgctctcttacagagagatccataccgatgttagacttgttcttcctggtgaacttgcggctcacgacgtgcccgaaggcaccgcagccggaaccaagtttactagtg

SEQ ID NO: 13850 - DNA, 577 bp, Gossypium hirsutum
  unsure (1)..(577): unsure at all n locations; Clone ID: LIB3829-015-Q1-K6-F5
cggccgcgtggngagnaacaaaaaacatggccaaagttctgttgttcattgctctatgtgtgcttccagctttggttagtgctacacgcattctgaataaccaattggtggttgaaggctatgtgtactgtgatacttgccgtgctggttttgaaacccctaagactagaaggctagctgatgccatggttaagctggtatgctccgacaggaagaccggcggagttgttttcgagaaggagggatataccgacaaaaccggaaaataccagattcgtgtatccgaggatcacttggatcagatctgtgatgcagttcttgtgaagagcccccagcttggatgtgccacaatgtcccccggtcgtgaacgtgcccgtgttatcttgaccaactccaatggcatttcatccaccacccgttatgccaatagcatgggcttcatggttgacaaggctgaagttggctgtgctgagatgatgaagatgtatcgggaggatgaggaggatgtctagtgtgtgggtttggatttatttgcatatgaaatgtgatgttgtctgctatttgttatgtgaattgc

SEQ ID NO: 13851 - DNA, 432 bp, Gossypium hirsutum
  Clone ID: LIB3829-015-Q1-K6-F7
cgatcatgctcggcagcagctacactgccaatgatccaggagtccatttggacatctcgggtgttggtgaacacgagggcaagaaaccagcagataagacaaggagaaggggaaaggaaaaaagagaaggattcctccaaaagtgaagggtgactagtaagttaatgcataaaataaaatctttgtattgctactatatccaagattatgtttgcatgaaagcatatgtatgtaaaaggtgaagtatttccatagcatagttatgtcttccatatagataccatatggcttgtattgctagccaaggtcttgggtgtcaaacatacaaataatgatgaaagtgttggaactttcaagttcatatgttgtttttttttagaagttgtttgagttttaactcaaaaatcactataattaaaactagattccaat

SEQ ID NO: 13852 - DNA, 576 bp, Gossypium hirsutum
  unsure (1)..(576): unsure at all n locations; Clone ID: LIB3829-015-Q1-K6-F8
cggccgcgtgggcggncgcgtgggcggacgcgtgggcggacgcgtgggcggacgcgtgggcggacgcgtgggtggccccaatacaaaatggaattcatcccatgcctgtcaacaacttaccgatgggataccctatgctacaacctccaattccggctgcagggcaacctcatcttgactctatgggcatatcaagctgtcatgtggtcaatggagtccctgcacccagcaattttcaacctatgcgtatgaattctgaaaaagacaatgccactgatgtaacacctgcagctcctccaaccactaccgtgtcatctatgtcagagatgcccgtgagccctacatcagtggcatcaagtgggaattttcccttcactgcatcagacatgtcagggataggagttgacacttcagcacttgattcagccttcacaacagatgtggcaagttcagtaggattgcagctgggacctgaaaatggagccgggaattctagagattcccttagatcattggatcagattcagtggaatttcagtcttacagatctgacagcagacttgtcaaacttgggag

SEQ ID NO: 13853 - DNA, 573 bp, Gossypium hirsutum
  Clone ID: LIB3829-015-Q1-K6-F9
attaaaagatgtttacaatttaaaaaaaaaaaaaagggcggccctcgcgactagagggggagaaagggagatcggtggaagagaaatacactcaatggaagtctttagtccctgtcctctacgattggctcgctaatcacaacctcgtttggccttctctctcttgccgatgggggccgcaactagagcaagctacttacaagacccgtcagcgtctttacctttcagaacagactgatggaagtgttccaaacacacttgtaatagccaactgtgaggttgttaaacctagggttgctgctgctgagcacatatctcagttcaatgaagaagcccgctctccctttgtgaagaaatataaaactattattcatcctggagaggtgaacagaatcagagaactcccacagaacagcaagatagttgcgacacatactgacagtcctgatgtcctcatttgggatgtagaggcccagcctaatcgccatgctgtgctgggagctgcagattctcgtccagatctgatattgactggacatcaagaaaatgctgaatttgctcttgctatgtgtc

SEQ ID NO: 13854 - DNA, 450 bp, Gossypium hirsutum
  unsure (1)..(450): unsure at all n locations; Clone ID: LIB3829-015-Q1-K6-G10
gccatgcctgattctgctgatacatacctgcacgggttggtagagctggtcggtttggcaccaaggtcttgcaattacatttgtttcatccgcttcagattctgatgtgctcaatcaggtccaagagaggtttgaggttgatataaaggagcttcctgagcagattgatacatctacgtacatgccatcataaatgaaggttcattgaacaataccagtctcgggccccaaatcatgaattggttagtgtggttgcggatgtgtatctgtttgtaaactaatgtgtaacgctttttaaatcagttgcttgggagggagcggcagatgcactatcacgtggttttgaactgctgcttaaaagagtattgtaggtttataaaaactcaattgaggatttagctatatcaataggtaaaacttcccttttaaggacatttgttttttcacana

SEQ ID NO: 13855 - DNA, 575 bp, Gossypium hirsutum
  Clone ID: LIB3829-015-Q1-K6-G11
ggccaacatgctgacaatctaccatcaccggcagccacggcaaagcttctccaatccacttcaatccaaaggtccgactgtacgggtccgacgccgcaatgatcaaggcgctagccaacaccggaattggcatcgtcatcggcacggccaacggtgacatccctgccttggcctccgacccgaattttgccaaaaactgggtggatacaaacgtagttgcttattatccagccagtaaaatcatcctgattaacgttggcaacgaggtcatcatgtcgggtgataacaatttgatatctcagttgttgcccgccatgcaaaatgtcaagaatgccctcgatgcggcttcgttgggggataaggtgaaggtctcgacggtgcattcaatgactctgttgaaacagtctgagccgccatcttctgggagcttcgacccggcttatggagacatgttgaagggagtcttagcatttaacaatgctaccgcttcaccttttgccattaacccgtaccctttcttcgcttaccggagcgatccaaggcctgaaacgctggcgttctgcttgttccaaccc

SEQ ID NO: 13856 - DNA, 576 bp, Gossypium hirsutum
  unsure (1)..(576): unsure at all n locations; Clone ID: LIB3829-015-Q1-K6-G12
attccccgtgattgtaccgctagtccaaagcacgaaacagaaagaagccgcggagtttgaagagaaacaagacattaagaggctggtcttggagtataatgacagggtagaggaagagaataatggactcggaacacagacattgaattggccaagtggaaatagcangagcttatggccgtgngaaactcatgggaaggatccagcggcaggggtggaggatcacgtcatcgccatcatagtcattcaggaagtggatcttattatggcagaaaaaagtgagattcatggtagaataatggaaaattctgaagactgggcatcatattgagcctccatttcaacacattagagaaagtttgagaaaaacattggcttgggctctcagagcaccgccagatgattgaatgatctctttctggtctgatttgaaatggaaatttgatgttacattgccctgtaactgcaaatccgcaatcacgccttcctgcagtatggctaatgttgcatcgattttctcatataggcaaggtacgtaatacatctaacctgctgcttttactagatgttaatctt

SEQ ID NO: 13857 - DNA, 445 bp, Gossypium hirsutum
  Clone ID: LIB3829-015-Q1-K6-G2
gtggcacacgatatcattccgtgtagggatgcacggctgtgctcgcctagcgcagactaccaccactaccgcttgtggctgcacctgaagtgtgcggatctgaggctccagggggtagaacatagaatagagccttgcacgaggatttttgcggcacaaggaagagtgcacccctgttttatatttggggagcaaatgctctagtgtgctccaaatacaattggacgtgtccaatccagattgactctcatttctctaacttggtgacgctgcaggctctgaaagcatacgtcacctcatgccgtgcgcccaatcacagaatgtgtgatgaaaagcttcacccgcacgctgaccaagttaatggtagcattcagagctcggccgagaacgatgacctgctcgagtatacggactgccaatcagatttgctgaaggcaacttgcca

SEQ ID NO: 13858 - DNA, 566 bp, Gossypium hirsutum
  unsure (1)..(566): unsure at all n locations; Clone ID: LIB3829-015-Q1-K6-G3
cggccgcgtggggcggntttagaggctgcacctgctgcattggctcgacttttctctatagattggtatagaaaccggatcaacggcaaacaagaagttatgattgggtactcagattcgggcaaagagctgggcgtttctctgctgcgtggcagttgtacaaagctcaagaggagcttataaaggtagctaagcagttcggtgtgaagctaacgatgttccatggtcgcggtggaactgttggaagaggaggtggtcccacccatcttgctatattatctcaaccaccggaaactattcacgggtcacttcgtgttacagttcaaggtgaagttattgagaaatcgttcggagaagagcatttgtgctttagaacactccaacgttttacagctgccacacttgagcatggtatgcaccctccggtttcaccgaaacctgaatggcgtgctttgatggatgaaatggcggtcgttgctacggaggagtaccgttccattgtcttcaaagaacctcgatttgttgaatatttccgcctcgtaagtgaacttgcatactcacattct

SEQ ID NO: 13859 - DNA, 463 bp, Gossypium hirsutum
  Clone ID: LIB3829-015-Q1-K6-G4
gggagttgatggaggctagtggagtaaaacaattgccagtggtgaatcgtgggggagaaccccacaaaggaaggaaacggagagtcattgctgttcttcattacgaatcaatctggaactgtctcagagaagagataaatcacaggaagtctgtgtatcagcatagccataggaaggataataatgaagaggagactataaattccaatggccattaattagtgcgtctctttctctcacacactctctcggcctgctgcctgcaactacttatatagaattagaacgacttagaagcaaattgtttatgctgtctttagaatcataattagaattgggtctgcaaatctggcactgagtggggatattacagaagcttttgctgtggatcctttgatgtaatttaccgaacaaaaaatatacatacatacatatatatacgtatgtctttgtaattgtactc

SEQ ID NO: 13860 - DNA, 578 bp, Gossypium hirsutum
  unsure (1)..(578): unsure at all n locations; Clone ID: LIB3829-015-Q1-K6-G5
cttgctttcaagcaatctaaaccttattttctcatcaaatcgctttgactatggctcgtaccaagcaaactgctangaaaatcaaccggtgggaaggctccacgtaagcagctagccactaaagctgctcggaagtcagcaccggcgaccggaggagtgaagaagcctcaccgtttcagaccaggaactgtggctcttagggaaatcaggaagtaccagaagagcaccgagctcttgatccgaaagcttccattccagaggcttgtgagagaaatcgctcaagattttaagactgatttgagattccaaagcagtgccgttgccgctcttcaagaggctgctgaagcttaccttgtcggactgttcgaggatactaatctgtgtgctattcatgctaagagggttaccattatgcctaaagatatccaacttgctaggaggattagaggagagagagcttaggtctgttagtttttagttgattgattcctagaattagaaatctgtactttctgttcattttgttgtatttgcagtctctgcaaatcattaatgaaattctgtggaattttaacggt

SEQ ID NO: 13861 - DNA, 608 bp, Gossypium hirsutum
  unsure (1)..(608): unsure at all n locations; Clone ID: LIB3829-015-Q1-K6-G6
cccgggtcgnacccacgccgtccgggnaaatggggccaatggccagnaaaagtctggnaaaaactcagggnaaaagaaacgaccggttaagggaggagcctgaaacaaacatgaatgaaataaaggctcttcctgcacctgagaattataacccacctcctccaccacctgaacctgaacaacctaagactgtcccaccgcaggttacagaggaccttgtgaatataagggacgatgcggtttcagctgatgagcaagggaacaaattggcgttggctttattctctggaccacccacctcaaatgctaatggttcgtgggaagcatttccttcagatggagagcgagatgtgacttctgcatggcaaacaccagctgctgagcctggtaaagcggattgggaattggtgttggttgagtcagctagtaatttatcgaagcagaaagctggattagcaggtggttttgatccgttgttactgaatggcatgtatgatcagggggcggtgaggcagcatgtgagctccagacagctaagtggtgggagtgcaagtagtgttgcgatgcctggccctggcaaggccgctactcaagtgctggctttgcct

SEQ ID NO: 13862 - DNA, 589 bp, Gossypium hirsutum
  unsure (1)..(589): unsure at all n locations; Clone ID: LIB3829-015-Q1-K6-G8
tttcgttataattcaatcgcctgaaattctgttatcgaatacgcttctacttttttttgtttcctgattttgattttagtgataacaactggaaattttgaatgctcgagctgtaatatgggatatttgaattcggttttgcaatcttcaagtcaggttcatgctgaatatggaccggttagcggcggaggccttagccagaatggaaagtttagctacggctgtgcaagctctcctggaaagaggtcttcaatggaagatttttatgaaacaaggattgacggtgttgatggagagatagttggtctttttggagtttttgatggtcatggaggtgcacgggcagccgaatatgtgaagcaaaaccttttcagtaatttgatcaggcatccaaagctcatatctgataccaaatctgctatagccgatgcatacaaccatacagattctgaatttttaaaatcagaaaataaccagaatagggatgctggatcaactgcttctactgctatacttngttggagatcgtttgctagttgcaaatgttggagattcccgagctgttatctgcagaggaggcaatgctttt

SEQ ID NO: 13863 - DNA, 594 bp, Gossypium hirsutum
  Clone ID: LIB3829-015-Q1-K6-G9
aaagggtgaaacccagtttgttgttggagtgaaacatgtctgtttgtgaagttaagaagtccagtgtgtagctgtgtacggaaaaaaagctggtttctgcatcagagattgcaacaaagttgaatctggcttcccaccctgaaggtggcttcttttctgaaacttttagggatagttctgttatgctctccacatctcaacttcctcctcaatacaaagttgatcgtcccgttagcacatctatttacttcttgttaccggctgggagcgtgtctcaccttcaccgtataccctgtgctgagacctggcatttttatttgggagaacctcttacggtcttggagttggatgagaaagatgggcaagtaaaactaacatgtcttggacctgatttgttgaataatcagaaggtgcagtacacagtgcctccaaatgtttggtttggtgcatttccaacaaaagatttcaacatttcgactgatggggcagtgacaaaaaatgatccaagggatgctgagagccattattcacttgtaggatgcacctgtgcacctgctttccagttccaagacttcgagctggcaaaacgatccg

SEQ ID NO: 13864 - DNA, 560 bp, Gossypium hirsutum
  unsure (1)..(560): unsure at all n locations; Clone ID: LIB3829-015-Q1-K6-H1
cggccgcgtgggcggccgcgtgggnaaaaaaagnaaaaaaaattactatcgaggaagcttatttagatcgctcgtaagaataatttggtggtggtggtggtgtttttcgtagtcgacgttgttgttctttgtgggttttcattttatttgaatttttattggacaaagaaagaagttgtagcaagatgatgctcaggattaagagggttccgactgttgtttcgaattaccagaaggatgagacggaagagactgctcgccgcagcagtgggtgtggaaagaattgccttagaagctgctgcatcccaggagcaaagcttcctttatatgctttcaggaaactgaacaatattgagagtgaaaaagttgtgcttggaattgagaataaagatccccctgttgcttttcttgactcgctcattcttggggagtgggaagatcggatgcaaagagggctctttcgctatgatgttactgcctgtgaaaccaaggtgattcctggtgaatatggcttcattgcccagctgaatgagggtcgccaccttaagaagaggccaact

SEQ ID NO: 13865 - DNA, 589 bp, Gossypium hirsutum
  unsure (1)..(589): unsure at all n locations; Clone ID: LIB3829-015-Q1-K6-H10
agcgttcaagcttttggagcagatcaatttgatacacaagaccctgaggagtgtaaagccaagagttcattctttaattggtggtactttggtatgtgtgcgggtaccttaacaaccctttcaattttaaactacatccaagataatcttagttgggttcttggatttgcaatacctggtattgtgatggctgtgggactggttgtttttctgcttggaacaatgacttaccggtatagtgtgaaaggggatgaggaaagcccaattgtgactgttggtcgagtgttcattttggcagttaggaaccggaaaacatcgtattctgcaattgcagcagaggaagaagcccgaggaattcttgcaactgaaagttccaagcaattcaaattcctcaataaagccttgcttgctccggatggttncaaaggagcaaggagaggtgtgtagcatcagaagaaggttgaagaagcaaaagctgttataaggcttgcaccaatatgggctacaagcttgatttatgcaattgcctttgcacaatcatcgaccttctttactaagcaaggggctaccatggacagatcaactgcaa

SEQ ID NO: 13866 - DNA, 580 bp, Gossypium hirsutum
  unsure (1)..(580): unsure at all n locations; Clone ID: LIB3829-015-Q1-K6-H11
gctttgagtgctttggtttatcccttgcttactcaanacgatttgtcccatgtgttttcatctgttaggagggacctcaattttattgatcataacaatgaccttgggtggaaagaagatcaacggtttcggcctattgttgttgacccggggctttacctagcaaggaggaccaaaattttttatgctacagagaaacgggcaatgcctgatgcttttaaaatattcacaggttcgccgtgggttgtgttaagcagatcctttctggaattttgcatctttgggtgggataatctaccccggacacttctgatgtatttcaacaatgttatgttatctgaagaaagctattttcataccgtcatttgcaattcaccagagttaaagaacactaccgtaaacagtgatttaagatatatgatctgggacaatcctccaaagatggaaccccactttctcaacatttctgattatgatcaaatggctcaaagtggagcggcatttgcaagaatgtttaaagaagatgatncctgtgttggacatgngtagatgaaaagatcctcaagcgcaagcgaaacca

SEQ ID NO: 13867 - DNA, 365 bp, Gossypium hirsutum
  unsure (1)..(365): unsure at all n locations; Clone ID: LIB3829-015-Q1-K6-H12
gnatcgtttgaggctcctatttttctcaacactgatggggcagtgcaattagtatctggaaagtagttgttggaggagtggttcgtgatgccaatggagattggatttttggtataaccgttaccttggaaaatttttatttttaatgctgaactttggggcattttgaagggactcaggttaattcaacgaagaggtcaccataaagttatcatacaatttgatagtaaaaaaaaaaaaaaaaaaaaaaaaaaaaaaaaaaaaaaaaaaaaaaaaaaaaaaaaaaaaaaaaaaaaatataaaaaaaaaaaaaataaaaaaaaaaaaacaagcaaaaaacaaaacatataatataaagaaaccaa

SEQ ID NO: 13868 - DNA, 576 bp, Gossypium hirsutum
  unsure (1)..(576): unsure at all n locations; Clone ID: LIB3829-015-Q1-K6-H2
ggtagttccgcggcaatgtcacatggagcatgtgggataccccccttgcttacaggtaacaaagcatctcaccagtccaaggattctcnatgtgaaattcagcattaagtcctttagaattccggaactttatatcgaggtgccagaaagtgcaactgtcggttcactgaagaggacggtaatggaggcagtgactgccttacttggaggtggaattcgtgttggggtactacttcaagggaagaaggttcgagatgacagccgaactttatcgcagactggtatttcctgcgaagaaaatctggattctcttggtttcactttggagcctggtcctgcgaaagctcctccgccagtgtgctcggaagaaccacatcttctgatgtcatgtgaaaaaggccctcaacaactaacaagccttccagccactccggttgtagatacagcgattcccgatgccacacctgacccactgttactaaccgatacagcacatcctgtggatagtaatcatgaaccggtttcctcccaaactgacgttctaactgatcaaagtctatcggagtctagagctat

SEQ ID NO: 13869 - DNA, 578 bp, Gossypium hirsutum
  unsure (1)..(578): unsure at all n locations; Clone ID: LIB3829-015-Q1-K6-H3
cagaaggtattgggtaaaaatggagagacataaaagcctataaaaaatatattttaagaaagactaagcctcgaagaaaaattgagaaatgtcccgccgggaatgctgaagtaccaatggggaaaatgcagttagattctggaattcaaagaaaggagaggaccgtgagtgagttggaacaagcagcaggcaaaaacaaaaattcacgcacacgacagggtctagaagttttgcttctgtagctgaggccgaggaagtcaaatctggacaaaaaattggacgccttcaactttttgagattacgcataggaagaaagatggatctcctatgacatccgaaactggagaaattatggagaaactaaaggagaagaaggtggaatatgaagtgattgcttcgactgatagttctgttaatcttgagaacattgataacaaaattatcacttgaagttttgnggtcttgaaaggtacgatcgggttagatttcaaggatctagtgnttaccccgacccaatattttggatccggctcccagcaatacatgctttccgaaagtcaagctcaagctgaagttc

SEQ ID NO: 13870 - DNA, 585 bp, Gossypium hirsutum
  unsure (1)..(585): unsure at all n locations; Clone ID: LIB3829-015-Q1-K6-H4
tggactcgtctaagtttgatctgatcccganagttttaatcgcagtactgctggttgtcaatttggtgagagctgccattttctgcactatgttcctggaggttacaatgcagtggcccagatgatgaaccttgcaccagctgttcaaccagcttctagaaacgtggcagcgacagctgcaatacctcatggatctgcctctgcggtcaaaactcggttatgcaacaaatttagtagtcccgaaggttgtaagtttggtgataaatgtcattttgcacatggagagtgggaacttggcacgcctattgctccatctcttgatgatccccgttccatggcacctcttcctggccgcatgggcagtcggatggaaccaccatcaggtcctgctgcaacgtttggtgcttcagcaactgcgaaaattagtgtggatgcttcccttgcaggagccattattgggaaaggtggtgtgcactccaagcagatatgtcgtcaaacaggtgcgaagctatctattcgggaacatgagtcagatccatcacttaggaacatcgagctcgaaggatcatttgagcaaattaaaga

SEQ ID NO: 13871 - DNA, 573 bp, Gossypium hirsutum
  unsure (1)..(573): unsure at all n locations; Clone ID: LIB3829-015-Q1-K6-H5
cgtcacttcctcccgcgaccaaatccatcatcctttggcacnnttaaccaagggacgaaagnacctacggtgtccctcgtcgtcgtctcaccggtcactctcacttcgtccaagacgttgtcctctcttccgattctcagttcgctctctctggttcctgggatggtgagcttcgtctctgggacttatctgccggtatctcagctcgccgttttgtcggccacaccaaagatgttctctccgttgccttttcaattgacaaccgtcaaattgtttctgcttctcgagatcgaactatcaagctatggaatacccttggagaatgtaaatacacaatccaagaaggtgacgctcataccgactgggttagctgcgttcgtttcagcccaaatactcttcaacccaccattgtttcagcttcatgggacaagactgttaaagtttggaacctgaccaactgtaagattcgtaacaccttggccggacactccggttatgtgaatacggtggcggtttcacctgatgggtctttgtgtgccagtggaggaaaagaggagtgattctgttgtggga

SEQ ID NO: 13872 - DNA, 127 bp, Gossypium hirsutum
  unsure (1)..(127): unsure at all n locations; Clone ID: LIB3829-015-Q1-K6-H6
gtttgcttagaacatttcttctagagtgctatctgctttggtaactggtanaagtgtatggaaagatttagcgttggaacttgacctatttgtttatggtatacaacctattgcttcttgtgagctt

SEQ ID NO: 13873 - DNA, 596 bp, Gossypium hirsutum
  Clone ID: LIB3829-015-Q1-K6-H7
ccccgcgtccgcgctcagctgaatctttgctaccggcgacctctgatatctctcatttggagatgcagaagagtagccataaagttcacaagcaagagaatcccaattgcttggaattgatggacgactttctggagatggagaagttggcatgtctgccaaatgatgctggtggagctaatgatgtttcaagccatccaggtaattatgggaattatagagcagaaggtaatatgtcacgcaatgctgtccaagatcaggacatcttctctgtgcaagagtttggttttagtccatcatcaaagcagggttcttcaagtgcaagatcctcaacaacagagcttcagcacgatgtggaaaatctgcccttccaaaagcttcagtcgatgatttctacgatatttgagtctcaaactaaggactcgaatttggggaaggttttggaggatatcaaatgtgctattctggaaatacaaggttctctgcctcagcactgtttatatgaaggagttcaagcaggtcatggtccctctgatccaaaggatgtatctggacagagtttgatattcttagatgaagagaatattactaagaaa

SEQ ID NO: 13874 - DNA, 572 bp, Gossypium hirsutum
  unsure (1)..(572): unsure at all n locations; Clone ID: LIB3829-015-Q1-K6-H8
gtttactcanaaaatatgtgattggaacgcttaatgttctttttgcaatgaaggaattcagagaagagtgccatcttgtaaagcttggaacaatgggagagtatggaactcccaacatagatatcgaagagggttatataacaattagtcacaatggaaggactgatactttaccttatccaaagcaagctagctccttttatcatctcagtaaggttcatgattcaaataatatagccttcacttgcaaggcttgggggatcagagccactgatctgaatcaaggagtggtttatggggttaagaccgatgagacttcaatgcatgaacagctgtataacaggttagattatgatggagtatttggaacagcattgaatcggttttgtgttcaggctgctgtcggtcatcctcttacagtttatgggaaaggaggccagactaggggttaccttgacataagagacacggttcaatgcgtggaacttgccattgcaaatccagcaaagcctggtganatttcgggtgttcaatcaattcaccgagcagtttntccgtcaatgaactggctg

SEQ ID NO: 13875 - DNA, 583 bp, Gossypium hirsutum
  unsure (1)..(583): unsure at all n locations; Clone ID: LIB3829-015-Q1-K6-H9
ctttagtcctttggttaatggngggcctggctgttcttcacttggagttggggcgttctctgaaaaggaccattcagaccaaatggagagtttctagttaaaaatgattacagctggaacagagaagctaatatgttatatttagagacaccaattggagtagggttttcttattccacaaacacctcttcttatgaagcagtggatgatgagatcactgccagggacaatcttgtgttcttgcaaaactggtataataaatttccaaattacaggcacagggatttatatattacaggagaaagctatgcaggccattatattcctcaacttgcaaaacttatggttgaattcaacaagaagcaaaatctgttcaatttaaaaggaattgctcttggtaatccagttctggaatttgcaactgatttcaattcaagggcagaatatttctggtcccatggattgatatcggactcgacctacaatatgttcacttccgtctgcaactattctcgatatgtcagcgagtactatagagactcggtttcaccgtcttgttcgaaagtgatgagtcaagtaagca

SEQ ID NO: 13876 - DNA, 545 bp, Gossypium hirsutum
  Clone ID: LIB3829-021-Q6-K6-A1
gcgtgggttttcatcaaccggggggcgggtgcgtacaaaacttgcttagaagaaaaagtcaaccttccctgactctttcactcaactcgccgacgactccttagactcttttgactctgttccacaccaggatgaagacggtgccggctacgccggatacgacccttctggagggtgggactctttcgccgaccactcggatcatgccaagggctccactgatgatgtgtttgcatcagattcatacacaaatggggtaggttttggccaagattttggcggatcggacggcccggttttgcctccgccggcggaagaagagcctgaggaaggtgttgctctcagggaatggagaagggagaatgcgattcggttggaggagaaggacaagagggagaaggagttattgagccaaataattgaggaagctgatcaatacaaagttgagttttataagaaaagggaggtgacctgtgaaaaccaacaggcctataacagagacaaagagaacatcttggtggccaatcttcgagaaattccatgcc

SEQ ID NO: 13877 - DNA, 428 bp, Gossypium hirsutum
  unsure (1)..(428): unsure at all n locations; Clone ID: LIB3829-021-Q6-K6-A2
ctcatcagtttccttccgccgggggggggggggggggcacaaaaaaaccannaaaaagaaaagcttgagccaaagaggggggcgatcagcttaccgacgatcagatctctgaattcaaggaggcctttagcctgttctttttttttttttatggntgcatnacttcttttgggggggggggggtnatncnancacttnnnncanaaccccactgaggcagaaaagaaagatatgattaatgaagtcgatgctgatggaaatgggaccattgattttcctgaattccttaacctgctggcgcgaaaaatgaaggatacagactctgaggaggagcttaaagaggcattcacggcgtttgtctttgttcagaatgggttcatatctgctgccgagctggtctctgtcttgacaaaccttggtgcacagct

SEQ ID NO: 13878 - DNA, 564 bp, Gossypium hirsutum
  unsure (1)..(564): unsure at all n locations; Clone ID: LIB3829-021-Q6-K6-A3
tcgcttcactcatcttcccggctgttggcctctcacaaataaatgtctctggtggcgaacgaaggctttgagggcattttgcgtgtactgaacaccaacgttgatggaaagcagaagatatgtttgctttgaccttctcaaggtattggaaggcgtttcgctgggggggggggcaagaaggctgatgtcgacatgaacaagagggctggtgaattgactgcacaggagctggacaatctcatgaccattgttgcaaaccccaggcagtttaagatacctgactggtttttgaataggcagaaggattacaaggatgggaagtattcccaagttgtgtctaatgctctcgacatgaagttgagagatgacttggagcgattgaagaagatcaggaaccaccgtgggctgaggcattattggggtcttcgtgtacgtggtcagcacaccaagaccactggtcgcagaggaaagactgtaggtgtctctaagaagcgttgaatgtttcatatatgttgtcaggcagagtgtttatttccttggtttatacgcatnctttgcaccagt

SEQ ID NO: 13879 - DNA, 588 bp, Gossypium hirsutum
  unsure (1)..(588): unsure at all n locations; Clone ID: LIB3829-021-Q6-K6-A4
ggnatttcagtttctgtcacggttggcaatggggatattcctggtcttaccaacactgttacagcgcgaagagggttgctgatcatattagcccgtttcatcctcaaacgaagatcaaatacatatgcgttggcaccgaagtcttgttctcgaaaaacgatgattggattaataaccttgtgccggctatgcggagccttcattatgccttgaataaagctggatttcaagacattaaggtcacgagtgctcatgcacttaacatattccgacgggatacaataccaagtttgatgcggttcatggtcggatatgatcaaagtttctttgcacccttactccaattccatcaacggaccaaatcacctttcatggtcaacccctatccttactttagcccggacataacgagaagattgaattatgcacttttcaagccaaacagcggaatctatgacaaatattctaagaaaaattacaccaatatgtttgattctatcatggactcgacttatactgccatgaaagcccttggctatggaaatgtggagattgccattggtgagactggttggccgacacaaggtg

SEQ ID NO: 13880 - DNA, 586 bp, Gossypium hirsutum
  unsure (1)..(586): unsure at all n locations; Clone ID: LIB3829-021-Q6-K6-A5
gctgcccgtgctatggcattgcaggggtgcgtgngnatattagttattaccccttacggctatgtggggctctgaaccacaagatgaaggacttgattctcgtgagcattggcagcgagtgatgcaagggcatgctggtgcaaatgtggtacctctggtagcttctaaccgcattggaaaggagataattgagacagagcatgggaagagtcagattacgttctacggcaattccttcatagcaggaccaactggggaaatcgttgcagctgctaatgacaaagatgaagcagttctcatagcacagtttgatcttgacaaaatcaaatccaaaagaagttgctggggtgtgtttcgtgatcgacgtcccgatttatacaaggtgcttctgacatcagatggaagcaaaacttcatcgtgattcagagctccccttttgtttatcatcactatgttgttgtggagataatcagtgagttcccttccatgccatgtatttgttttgactgcaaagaacgaaatgacatatatgtaggcaaacttccatgaatacaaaattaagaatatcaataagaagaaccgaaat

SEQ ID NO: 13881 - DNA, 553 bp, Gossypium hirsutum
  Clone ID: LIB3829-021-Q6-K6-A6
ttcgggcgcgtggggttacttcttgccacggtcaccaaggtatgtggggcaccttctgggtcaactaacttgaatcttagatcaatgcaaacagtatgaaaaccccaagccggatggaaagctgccctgaatcctagattttctaattacactggtggggagtttaagcacattcttggagtcaaaccaacaccgaagaaggaacttctgggcattcctattataaggcatggcaaatccttaaagatgcctgccaattttgatgctagaacagcttggccacaatgtagcacaattggaagaattcttgatcagggtcactgtggttcttgctgggcttttggtgctgttgaatcactatctgatcggttctgtatccattttggcatgaatatatctttgtctgttaatgatcttctcgcgtgctgtggctttttatgtggaagtggttgtgatgggggggttccaatatctgcttggcgatattttgtgcgctccggtgttgtctctgaggagtgtgatccgtactttgatgatattggctgttctcacc

SEQ ID NO: 13882 - DNA, 601 bp, Gossypium hirsutum
  unsure (1)..(601): unsure at all n locations; Clone ID: LIB3829-021-Q6-K6-B1
gcgttcggnaagttaacgatttaaatcccgcggaattggatacaaatccgctactctttttccatctccaacaacagagattggatagaattgattaggaacgngaaaaatagaagaagccttggagtttgctcaagaggagctcgcacctaggggagaagaaaatcaaagctttttagaggagttggagagaactgtatcgctcttggcttttgaagatgtttcaaactgcccagtcggagaacttctggacatatcacagcgacttaagacagcaagtgaggtgaacgctgccattcttactagccagagtcatgaaaaagaccccaagcttccaagcttgctaaagatgctgatatgggctcaaaatcaactcgatgagaaagctgcttatcctcgaataaacgatttgtcgaatgccactcttgaagatcctacggtttgaaaggcttgcaagtcattttcagggaatcaagttgccttgaacgatcctctagatcgtgacgaacgaagtggttttatgcttgtaacctcttcataatgactagctaggaatttgttggatttcatttgctaagatgtgattgatgttttattttca

SEQ ID NO: 13883 - DNA, 568 bp, Gossypium hirsutum
  Clone ID: LIB3829-021-Q6-K6-B2
tgcatcctgaccaaggcgtcaacaattctaaggcgagcaacctcatccgttatcaagtcaagtcttctaacgggggcgtgaaggagaagctatgcctcggttgctgtggggactgacattctgtctgccgcatcccaagttagtctccagaaagctcgaagctgggatgaggggggtacctccaatttctccactacttctgtcaatgacatcttcaaggcaagaaagttgtcatctttggactacctggagcatacacaggtgtttgttcacaacagcatgtgcctagttacaagaagaacatcgataagttcaaggctaaaagaattgattcagtcatttgtgttgccattaatgatccttatgttatgaatgcctgggcagacaaactgcaagccaaagatgtgattgaattttatggggactttgatgggagcttccacaagagcctggaattgggaaaagatctctctgctgctttgcttgggcctcgctctgaaagaggtcagcctacgtggtcgatggaaaggtgaaagctctgaatgtggagggtgcgccatctgacttc

SEQ ID NO: 13884 - DNA, 518 bp, Gossypium hirsutum
  unsure (1)..(518): unsure at all n locations; Clone ID: LIB3829-021-Q6-K6-B3
aatctgccatggctttctccaaacacgtgaagggggggggacatcaccaagctcgctgtacaagcacaacgctttcatgatatggtgacttccatttttttttatcgacacttgctgtataactggggggggggagcggaacctgctctctgttgaatacaaaaacgtgatcggagctcaaaccacatcttgcaggatcctgtcttcnattgatcaaaacgaagagagcaaatgtaatgagcaaaatgttaagaaaatcaaaacatctacgcacaaagtataatcggagttgtccaatatttgtaaagatattatgggtgtcattaatgatcatcttattccttcttgctccgttggagactctactgggttttattataaaatgaaacgagattattattggtacttggcggagttttatatgggtgattagaggaaagacgccgctgatcagtccatgaaagcatatcagtcttgaacaactacacccctaatctgagttgcactcctacgcatcc

SEQ ID NO: 13885 - DNA, 598 bp, Gossypium hirsutum
  unsure (1)..(598): unsure at all n locations; Clone ID: LIB3829-021-Q6-K6-B4
gcgtttcgggcatgcgcngaagcaaanagcctgacgctactagnaagcctgagcatagatgattgtgagatgatacaagaaatcatagcatgtgagggtngaagaaatacaaggcaacattgttttccccaaactgaagtatttgaaactaagttgtctgccaagtctagcaagcttttccttggcgcatcacttgttggagttcccagtcttggaaaccgtgaaggtgaaaaagtgccccaaaatgaagaatttctgtcaaggagagttaagcacaccaaggctggaaccagcgaacttaacaggagatgaggacggtgaactgcagtgggaaggcgatcttaacactagcataaaacatatgttcgatgaaatgaatgttcaaaattctcaagcggtcgaggttactgatcagttggggtccgtgtgagacaagctcagtttcatttcaattcaaaccaaatggttgagttgctctattggagtatgggggcgtccactttcctttattcagtttttgcaaatccactattgaactgttgcatttcacattataacctaagtgttgattttgaagtgcatcatgtttggcactggg

SEQ ID NO: 13886 - DNA, 564 bp, Gossypium hirsutum
  Clone ID: LIB3829-021-Q6-K6-B5
cgctgcgtcaagccaccaatctgtacggggatgttagccaccccaaaccaatgactgttttctggtcatctactgcccaaagcatgactaaacgcccaatgaagggaatgcttacgggccctgtcaccattctcaactggtcctttgtcagaaatgatcaaccgagattcgaggctgggtaccagattgccttggccatcaaggatgaagtggaggatcttgagaaagctggtatcaatgttatccaaatcgatgaggctgctttgagagaagggttgcctcttaggaagtccgagcatgccttctaccaaaaagggctgtccactccttcagaatcaccaactgtggtgtccaagacactacccagatccacacccacatgtgctactccaacttcaatgatatcatccactcgatcattgacatggatgccgatgtcataaccattgagaactcacgttcagatgagaagctcctgtcagtcttccgtgaaggagtgaagtacggtgctggaattggacccggtgtctatgacatccactctcccagaataccatcaaccga

SEQ ID NO: 13887 - DNA, 574 bp, Gossypium hirsutum
  unsure (1)..(574): unsure at all n locations; Clone ID: LIB3829-021-Q6-K6-B6
aaaaggagtccacaccaaatgtcagctcttcttttgctttgcatgcttttcatttcttcagtgacaccaattcttgggtgtggttcatgtggngaaagcaccacacaagcatcgaaagcctaagggaaagtcccctaaaggtcccatcactttgcctccccttgtgaaacctccaatcaaggtgccaccggttgttcctccaatagttaagccacccattgacctccctccggttacagtccctccaattaacctccctccagggacggttcctccagtaactaagccaccaagtgggaaaccctgcccaacaccaccaaccaaggacacttgccccattgacacactgaaattgggtgcttgtgtggatctgctgggagggttggtgcacattggactaggtgacccggttttgaatcaatgttgtccggttctttcaggacttgccgagctcgaagctgcggtctgcttgtgcaccaccctcaaacttaaggttctcaaccttaaaatttatgtgccactggctcttcaactccttgtcacatgtggngaaaacaccccctcctggttacac

SEQ ID NO: 13888 - DNA, 524 bp, Gossypium hirsutum
  Clone ID: LIB3829-021-Q6-K6-C1
attgttacagctggggaacattcaaatatggagaaagaatggagaattggatgatgagatcggggacatcctacacctatggatgcttggatgttattttaaataagcttggcatgaaggaagctacctttttgccgaccaataaagtaaccgatgatgagcagggtaagctatatgagatgggcgtttttgattttcgaacagccaccatgtttcttgctcctttggttacagtaattctcataaacattgcagcatttgttggagctgttgtcaaagctttggttgtagatgatgatggagatcaatattgggaaaagatgtttgggcaaatgtttctttcgtttttcatattgatttcaaattttgcagttattgaagggatgatcatcaggagagacaaggctaagattccattgtcttctactttgtggtctgttgtgttttcaatgtttatcttgttgatcggctctgtgattgtgggttaaattatggcattggaagaataaagaagactttaatct

SEQ ID NO: 13889 - DNA, 363 bp, Gossypium hirsutum
  unsure (1)..(363): unsure at all n locations; Clone ID: LIB3829-021-Q6-K6-C3
tgctgacaggaattaacatggggggggccgtgctnccgaccaacatcttgtgggttaaccctgactgtgggctcaagactccctttttttttgtggtcaaaccacccctaatcgggggggtggtggtccaanctctcctacccatataccccnccatagataaatctccgctgttgaaatgctatgcctaccacttctataataaaaaaaattggtgtaatgtgatctgtttatctttgaataactttgtttggtggttcgatctttgttacatgcccttggacgttctttgatttccttatttttgggttagcttttatctgatgataatgctccttttgtgtgattattatgtttatccgg

SEQ ID NO: 13890 - DNA, 585 bp, Gossypium hirsutum
  unsure (1)..(585): unsure at all n locations; Clone ID: LIB3829-021-Q6-K6-C4
cccggtcgacccagcgtccgctttggntaaactagtcatcctggtctcattttaacagtcgttaacaactgccctttcaccatttatcctgctatccaacccaacgcaggccaccctgtcctcgaacgaggcggcttcgctcttcataccctcacccaccgttccttccctgcccccaccgtccactggtctggccgtatctgggctcgaaccggctgcacctactccaacgggcatttctcctgtgccacgggagattgtggccaccgcattgaatgcaacggtctcggtggagccactcctgtcacaattgctcagttcagcctccaccacggtggccacaaagatctctcttcctacgaagtcagccttgtggacggttttaacatccccatgactgtgaccccgcacgaaggcaaaggcctttgtcccgtcgttgggtgcagggctaatattctggccacgtgtcccggcaagttacagtataggtcacctcctcatggtccagttgtgggttgtaagagtggttgtgctgccttcggaaccgacgagctttgctgcaggaaccattacaatagccctcaa

SEQ ID NO: 13891 - DNA, 574 bp, Gossypium hirsutum
  unsure (1)..(574): unsure at all n locations; Clone ID: LIB3829-021-Q6-K6-C5
tcgcggncgcgtgggcggccgcgtgggcgggcgcgtggcaaagttgctaacccttcaagcacaatctttagctgcaaatgctggacctccaaccccctcttctgttatgtctctcgaaactccatctacagcccagccaaaagagaaaagtcaaacctagatccaccttcttaaccagagggggggggacaccagaatccaaaaagaggggaccagaagaagcggtagttaaagagcttagactgactgtaaaggcattggaactagaaatggcaagaatgaagaaagaccatgccacacagttaaagcagaaagatgatattattcgcgagctttcaagaaagattgaaaaaacatcagaagtgggtgtgaagaagggtgtcacaagagctagcttgcggccgaaggaaccaaaccctggggaattgaagagcccaagtcatcgctttcgatcaccagttccgacagccaaaaaaagaagtttctgggatataacaacagctaacagcccttcagtcactacactcaatggaagaaaaactagaagccatgtcatttcaaaacctgttgcatc

SEQ ID NO: 13892 - DNA, 479 bp, Gossypium hirsutum
  unsure (1)..(479): unsure at all n locations; Clone ID: LIB3829-021-Q6-K6-C6
aaactcccgggttgacccagcgttcttttaactccncgaggttcagtcggggggtaagccgattaagaaggagatcaagagggcacctttgaagaagaaccactgggggcttgaatgctatgctgaagttgaacccttacgcaaagactgctagaaggatgtctcttttggctgaggcacagcgtgttaaggccaagaaggggagggtggacaagaagaggaagcctatatctaaggaggaagcaaccgcaatcaagtcagctggcaaagcatggtatcaaactatgatctccgacagcgattacacagagttcgagaacttctccaagtggttgggtgtgtcgcagtaaattttagtttctgcggagtggttgtatcagttttgttttcggtgtttttgacatttttatttcatttgatgatgtttggagttttggaagtaaaattagtggaatggcatggaccctatttctcttttc

SEQ ID NO: 13893 - DNA, 190 bp, Gossypium hirsutum
  unsure (1)..(190): unsure at all n locations; Clone ID: LIB3829-021-Q6-K6-D1
aaaaatattatcattgtgttgtagttgtggaatattaatattttagntctgctacccctagcacgntctctgtggggggggggctnggcaanccttaggtttttttatttgttttctggtttcgactggccgacattctcctttatttttttttttttgtnnatttttcacatcttttgtgggggggggg

SEQ ID NO: 13894 - DNA, 580 bp, Gossypium hirsutum
  unsure (1)..(580): unsure at all n locations; Clone ID: LIB3829-021-Q6-K6-D2
ccgcggncgcgtgggaagaaaatagcgcaattcaccccgcggttgcgccactgtcctacttgttgggcacatggnaaaggcgaaggcgaaggaggataccccaccatcaactccttccgctatggcgaagagcttcacttagctcaccctgcgtctgggaagcccgtcatagcctactctcacaagacctggaaactcgattctggtcagcctatgcactccgagtccggttattggcgtcctaaacctgatggctctcttgaagttgtcattgctcagagcactggccttgcggaagttctcaaggggacctacagtgcagaggacaatgtcatcaagcttcatagccaagtcgtagccaatgcttccaaggtgagggagataagtcgagtttacaagattgttaatggagatctacattatgttgttcaaatggctaccaatcttacaactcttcagccacatcttaaagctgtgctcaagaagctgccataaaacttcaaagtaagtagtttttcatttcgttggaccggatcagactattttttatataatatccctaaactctggtcccggtcaa

SEQ ID NO: 13895 - DNA, 576 bp, Gossypium hirsutum
  unsure (1)..(576): unsure at all n locations; Clone ID: LIB3829-021-Q6-K6-D3
aatctacgatcaagnacgtctttctcgtctgggtttctccgattatcatacataaaactcttcgattaagagatcactgttttcgattttgttagacaagatcggccgattagaatttcaggggattagagaagatggagtctcacgatgagacagggtgccaagccccagaaggccccattctttgtatcaacaactgtggcttcttcggcagtgcagctaccatgaatatgtgctccaagtgtcacaaagcaatgatcctgaagcaggaacaggcgcaacttgcagcatcatcaatcggaagcatcgtgaatggcagctcaactgggaacagtaaggaaccagccgtggctactgctttggatgtacaatctggaaacgccgacaccaaaatggtctcaacagagctacccattgacccatccggaaagacttcatgtgggatgaaaacgaaagagggtcctaacaggtgtaccaaatgctgtaaacgtgttggtctgacaggatttaactgcaggtgtggaaacctcttctgtgcagctcatcgttactccgacaaacatgactgccctttcg

SEQ ID NO: 13896 - DNA, 572 bp, Gossypium hirsutum
  unsure (1)..(572): unsure at all n locations; Clone ID: LIB3829-021-Q6-K6-D4
aatgggcgacttcatggnagaaagtctcggcttccgccgccgacaacgagggactcaccatcgaagaacgcaacctcctctccgtcgcttacaagaacgtgatcggcgcacgccgtgcttcgtggcgcatcatctcctccatcgagcagaaagaggagagccgtggtaacgaggatcacgtggccgttatacgtgattaccgggctaagatcgagtccgagctctcctcgatctgtggcgggatcttgaaactccttgacaccacactcatcccttcggcttccggtggagattcaaaggtcttttatcttaagatgaagggagattatcacaggtatttggctgaattcaaaactagcgccgaacgcaaggaagctgctgagagtactctcactgcctataaatccgctcaggagattgccaacgccgaattggctccaactcacccgatccgactcggtctagccctcaatttctctgttttctactacgagattctcaattctcctgatcgcgcttgcgaactggctaaacaggcgtttgatgaagcaatagctgagttggatacacta

SEQ ID NO: 13897 - DNA, 587 bp, Gossypium hirsutum
  unsure (1)..(587): unsure at all n locations; Clone ID: LIB3829-021-Q6-K6-D5
cgtggnngctttgaaggagaggactgggtcaagtcagtatgctatcactaaattcattgaagagaaacagaagaatcttgctggaaattttaagaagcttctgcttttccatttgaagaagcttgtggctgctgggaagttggtcaaggttaagaattcgtataaacttccttgggctaaggcttcgaagccggctacaactgcttctgctccggctaagaagaagccggctgctaagtccaaacctgcttcgaaggccaaggaagggaaacgtgctaaaacaacttctaaatccccttctaagacaaaggctaaagcggcggctaaaccaaaggctgctcctaaggctaaatccaccgcaacgaagacgaaggctgtggctgctgtgaagccgaaggcgagtgcatctgctaagccaaaaaccgtagctaaatcgaaggcgaagccaaaggaaaagccggctaaggcttcgaggacttcaacaaggacttctcctgggaagaaggcggctgtccctaaagctactccgaagaaggctgccgcgcctaaaaaggctccttcgaagagtgctaagccgaaagtgtcaa

SEQ ID NO: 13898 - DNA, 583 bp, Gossypium hirsutum
  unsure (1)..(583): unsure at all n locations; Clone ID: LIB3829-021-Q6-K6-D6
gcgttcgggnattccttagctaatgtttatattcaaaccctaagattccatccaaaaagctacatcattattatgaaagtttccagaggtgggctgccacttgngaaagaggagatgcaatgtccgaatgatatggatttactgtcagatccccgagtagaaaacgaagtctcttcatgtcgtgctggtgcagaaatttcttgtatcatcaaagatttgctggatgcttctactggcatggatggaactaaagcactggcaaaatacttgtccattgggaagcaattttaccgggaggcttctgagttggatgaaaaaaatacatcactttgaggctggcattcgaaggccttattttcatgtgaaggaacttgacatcagtcaattggagaactggcatgaatatttaaacttcgtagatatgcatggtgactttgattgggctgttaaactttatgagagatgcctaattccatgtgctaattatcctgagttttggatgcgttatgtggatttcatggaaagtaagggtggaagagagatagcaaactttgcacttgccagagcagcagaagtttttcta

SEQ ID NO: 13899 - DNA, 466 bp, Gossypium hirsutum
  unsure (1)..(466): unsure at all n locations; Clone ID: LIB3829-021-Q6-K6-E1
caaactgtgtctgcatctgtgcgggggtggaggggaggaaacccacaattgcaaagtcggtaaaatctactgctccagccaggcgtggaaagaaatagttaaggtctcaaaagtttgaagactgcaaaaacatctgcagtgggtatttttactggtcaattggtgggagttctgggggggggggggctgaagttgttggatttaggggacaagcttnctcgagcaagagagaatcgtttacaccaagttgattgtggtcaaagtttggaattctgaaaatggcttttaacatgtaatcaatcaataattgaaaaaaaaaatcatgttaaattcatctcttttatcttagcacttagaattgattgcagcacatgtatatttgtttttccactttgcacccttaaaggttagctgaggatgtgttagtgggagtttatattaggctggtgggcggaaaattcataca

SEQ ID NO: 13900 - DNA, 519 bp, Gossypium hirsutum
  unsure (1)..(519): unsure at all n locations; Clone ID: LIB3829-021-Q6-K6-E2
tctcttgcctctcaaccaaggtggggcatgaatatttgaaaactgcagggcaaggagcacagcagtacgctccagggggggacctgctatgtctgccacagcactgctgcagaaagctgctcagatgggagcaaccgtttctttgcatccttgcttcatggttttggtgggggggggggatcttcattatctgcacagcaagataatttacaatggggtcaaagagaagttgagcctgagaatacctctgttgtagcagggcttggccctgggcttcctcgtgatggaagttcaggattaaaggaattgatgatgggaactcctgtgtttggtcctaggcaagcaactctggattttcttggattgggaatggctgctggtggcagccccaatggtggcctgtcagctctaattacctncattggagatgaacttgatgttgttgcagcagcaacttcattcgggggcggagatttcaccagcaaggacattggaaggagctcataacatgggacaaat

SEQ ID NO: 13901 - DNA, 385 bp, Gossypium hirsutum
  Clone ID: LIB3829-021-Q6-K6-E3
gcgttctcggacgcgtgggaaaaatatcagtgggggggggggaggggtcaaaaatagctatttttgccaattaaaccctaaaatctttgggtgcaacaatgctccaattcgccttgttgaagaacaggacaagcaagcactcggtaccactattttatgtgccccttgagcactctaagcaaagaggagggggagtcaccagcccatctatctgactgggtaaccgagaaccaaaagttaccaatctgctgtgagaagtctgtgcgcataacagggtctacagactaattgccgaaataagtccttgttcttgaggaacgacttaacccacaacaagagaaagtccttgaaaagcaacctttaatcgatgatgatatagggtcat

SEQ ID NO: 13902 - DNA, 596 bp, Gossypium hirsutum
  unsure (1)..(596): unsure at all n locations; Clone ID: LIB3829-021-Q6-K6-E4
gtcgacccagcgttcgtnttttacaagcattcgagtccattctcggttctcccttgacaatcgaaattagatgtaaaatgaacaaagatgccacagctggttttcatggacttctcgttttaccatcttcccgggatggtccatctcatatgatcatggatctggagtccaattctcgaagtaggatacatgaggcaggttttcatgatactaacaaaagagttatgggagagagagattccggcatgcatcggaaatcacccgaagcaggaaggagcgaaattgttgaaattccagtttctccgagagaagccaaggacaacgaacatgcagcttttcaggagctgatgttggcatcctactcagggagacaaaaacccggggaactaaccccgagtcagagcattgttagaagtaagctgtccattgcacacgtaattcatcatggagatggatatacacaagagaacagatggtcaaatcacaaagcagtttccattgccgaaaagctcgaacaagagaacctgagactcgaaccaaggtcaagaagcttacttttctggaaaacatctaaagcaacacgtcggaagcgcttg

SEQ ID NO: 13903 - DNA, 526 bp, Gossypium hirsutum
  unsure (1)..(526): unsure at all n locations; Clone ID: LIB3829-021-Q6-K6-E5
cgtcaattgtttccgatggtggtgtcgaggaggactccgatgaccatgtgcttaatgcggagcaccacttcacgctgttcaaatccaagtatggngaaaacctacgcattcttttaggagcacgattaccgactgggagtgggggggggtaacctgcgtcgggccaagcgtcatcaggtcctggaccccagtgccgtccatggcgtcacaaagttttccgatttaactctatcggagttccgccgccagtatctaggcttgaaaccgctcaagctcccagcagatgctcaaaaggctcctatccttccgactgacaacttaccggatgactttgactggcgtgaccacggtgccgtcactggcgttaaagaccagggttcctgtggatcgtgttggtcgttcagtgcgacgggggctttggagggagcccattatttggcgacaggagagcttgtaagcttgagtgagcagcagcttgttgattgtgatcacgagtgtgatccacaacagtatggtgcgtgtgact

SEQ ID NO: 13904 - DNA, 612 bp, Gossypium hirsutum
  unsure (1)..(612): unsure at all n locations; Clone ID: LIB3829-021-Q6-K6-E6
gtcgacccagcgttcgcttattttggctggttttgagcaaagtgagtattactattcttctttcattaaaaagaaagaggtaagatggttattttactggtgtatgttaatgatcttcttatcactgngaaataacatagacaagattgctgacttgaagggattctgaaccggaattttaagatgaaggattgaggagaattaagatactttcttgggattgaaattttaaggtctccagaaggcattttgctaaatcagctgaagcatgcacaagaactcatccaagacactggtctaagtgacgcaaaggttgctcttacaccacttgagcagaatcaaaaactaacaacaacaaaatttgatgaagtcacttagcagcattaagaagataagttgttagaagataaaacagtttatcagagactcattggaagattgatctatttaacccatacaagacctgagatcacctttgctgttactcatcctagtcagtttatgcaaaatccaaaacaatcgcatatggaagcagcattgagagtagtgagatatataaagagggatccagggcttggtatttttttgaaggctaacaataaacaccaattg

SEQ ID NO: 13905 - DNA, 238 bp, Gossypium hirsutum
  unsure (1)..(238): unsure at all n locations; Clone ID: LIB3829-021-Q6-K6-F2
gggggggggggggttaaaaaataaaaagttttcatgtgatgggtaagtccgggggggggggnaacttacctttgtcaaatgaattcacttgactcgacatatagagaaacctcattttttttttttttccaccgccccaaaccctttgtttgggtggtggggggcaaaanctnccaatncnnnantttcattctattgagagaatcaaatccccntaggaattttattgttcantttg

SEQ ID NO: 13906 - DNA, 602 bp, Gossypium hirsutum
  unsure (1)..(602): unsure at all n locations; Clone ID: LIB3829-021-Q6-K6-F4
tctgccaccgtggnaagggcaagggcgtggtcaaagagggagcgccactcaaattcctaaaccctaataacctaaatagctttattgatcgattggctcgaattaatcgacgaaatgactagccaatcggtgtctctcccgccggcatcccgccggaattcttatagaagaggtccttctgcccctgagaagtctcacacatccgacaatgccaagccgacttctccttcctctgttggtggtgagaggacggtgaagaagctgaggttgtccaaagctctcaccatcccggaaggaaccactgtgtcggaggcttgtaggcggatggcagctcgtcgtatggatgcagtgttgctcaccgatgccaatggcttgctctctgggatcattactgacaaggacattgccactagagtaatagcagaagggttgaggccggagcagactgtggtatctaagatcatgacatgtagtccaatttttgtaacgtcggactctttggccatcgaggcacttcagaagatggttcgaggtaaattcaggcatcttcctgttgtggaaaatggtgaagtcattgccatgctggatattacaaaatgcct

SEQ ID NO: 13907 - DNA, 578 bp, Gossypium hirsutum
  Clone ID: LIB3829-021-Q6-K6-F5
gtccgattgtacaacactttgctgaagatgttgacttaaagaatgaatttcactgtgacatgaaattttattcagctgatgaacttgctcaacatgtgccaacttgcaaatatagatcaatgacctgccaaaatgaggttgttatgccaaatattcaattagccaaatggggaaccatgattcagtttgcctttataagatgattccttgtgaacaaaactgctcggctagcctcatgagacgtgatatggatagacactgcataactgtctgcccgatgaagcttgtgaactgccctttctattcagtgggttgcaaatctgccataccccaatgtaagattgaagaacatcgttcctcggactttcattctcacctgctatatattcttcaaggcattcacaaggaagcatctgtagaggttctaagaaaacgagtggagcaactactacagaaatattctagtaagctagcgaacatccgagatttgagatcactaacatacaaagtcaaggatcttgatgcaaagcttgggccgctgaaagtttgtgcaataaacgaagttgatgtagccacaa

SEQ ID NO: 13908 - DNA, 582 bp, Gossypium hirsutum
  Clone ID: LIB3829-021-Q6-K6-F6
tttctttgttgaggaaactgtacctccatggggataccgcaagcttctaggagctgttgttgtgatagcagcaaatgctggtggtgcttggactcctattggtgatgttactactaccatgctctggatacacggtcaaatattcacattgcagactatgaagggtttgataataggtgggcttgtttctctaactgttccgttggcgcttatgtcattgactagtgaagtaaacgggaaaggacaagattctcccaatattttggcatctcaacaaatggctccgagagggcaacttgttttctgtgttggtattggtgctttggtttttgttccagtgttcaaggctttaaccggtttgcctccttttatgggcatgttgttcggacttggagttctttggattctgaccgatgctattcattacggtgaatccgaaaggcaaaaactgaaagttccacaagctttatcaaggatcgatactcaaggagctcttttcttcctcggaatccttttgtccgtgagctgcctagaatcagctggtcttcttcgggagttggcaaattaccttgatgctcatat

SEQ ID NO: 13909 - DNA, 319 bp, Gossypium hirsutum
  unsure (1)..(319): unsure at all n locations; Clone ID: LIB3829-021-Q6-K6-G1
tttggntgntggcanaattctgggggggggggagggttgccaaaacatttgctgacatagatttggatgacagtaacggggggggagtgcctgtagactgcgacaatgaagaggctgaagagataagacaccacggctttttttttttttttgtcganggaggaagaaggtgtggggggggggggttnnnttctgngtttnattatttagtgagtcatgaatgcgaggccaaagcttttttagttaaaagtaagaagcataaaaaaatgggggttgaaaaatggggtgangggggaagatatgggtgcgtggatggggg

SEQ ID NO: 13910 - DNA, 458 bp, Gossypium hirsutum
  unsure (1)..(458): unsure at all n locations; Clone ID: LIB3829-021-Q6-K6-G2
cgtgggcaaattttcaggggggggggggggcctgctacaaacgtggagttggtcgtgtctttgtcgatcggggggggggcttnataagtatggggcaaaacacatccaaaattatggccccagagcattttttttttttttagacaactcaactccctttaggtgtttgttgggggctnctttnccancacctanatttctaaatttaaataaaaaaaaaaatttctcaggaccatatggggaagatgttgtctttattgcaaatgattggcacagtgctcttcttccatgctatttaaaaagcatgtaccagtcaaggggtatctacatgaatgcaaaggttgtattttgcatcctcaacatagcctatcaggcgaagatttgcctttgcagatttcaaacgtctcaatttgcctgaactgttcaagagttcattccctctcattgctggttataac

SEQ ID NO: 13911 - DNA, 590 bp, Gossypium hirsutum
  Clone ID: LIB3829-021-Q6-K6-G4
gcgtgggttcagaattatatgccaggattatgagtgcattgtacagtctgctcaatggatcgaccgataatacgaagtttgaggatgaatgccgagctataataggaaaccagtcatatgtgttattcacattggacaagttgatatataaattggttaaacagcttcaagctggtgcagcggatgagatggataataagcttcttcaattgtatgaatatgaaaaatcccggaaacattggaagacaatggattcagtttattacgagaatgcacgtgtcctcctccatgaggagaatatatatagactgaaatgctcttcttcgccatctcgtttgtctattcagctgatggacaatgtcattgaaaagcccgaagcatttgctttttccatggaacctaatttttcagccattttgcacagtgactttctgtcagtctttcccggaaagaaagaaccacatggcatcatactaaagagaaacaagaagaactacgcaaatctagatgaatttgatgctacttgcatggccatggaaggcgttgaactggttaacggtttagagaacaagatagcttgcaactcatac

SEQ ID NO: 13912 - DNA, 554 bp, Gossypium hirsutum
  unsure (1)..(554): unsure at all n locations; Clone ID: LIB3829-021-Q6-K6-G5
cgtaaaaaaatgngaaggactcggtgtttcaaagttcgaagaggaagacttaattcttaagttggagagtgcttggaggaacgtgtcaaagaaggtcttcacaccctacagatacccctcagttcacatccagttttcattcgattgagaacatccggagcaaaaatggggcgggaataggaagtgcagcctcctttagtgatgatgaagacacagcgcaaatattaagctccgccaataaaggccggaaaggttcttcagcagcttctcgatcatcacgtgatgcttctgaacttggtaaaagttccactagaggaaggggtagaggtaggggcagaggctctagtggcttaaagcagacaactcttgatgctactttggggtttcgccgttctcaaagatctacctcggttaaggttcaaagtattgctgatgatgaggagaacgttgactctgcttcaagtgaagaacatgaaattaatgaggttgaaagcagttcggaaaacaaaaatgatgaaattactaaaggtaggggacgcaaaagagctgcacca

SEQ ID NO: 13913 - DNA, 311 bp, Gossypium hirsutum
  Clone ID: LIB3829-021-Q6-K6-G6
cgttcgtgcatcctacattgccaaaatgtaccaaggtgcaggggctgacatgggtggtggcatggacgaggatgccccacctaccggtggcagcggtgctggacctaagatagaagaagtcgactaaatcaaatattaagatagtattttgccgatgtttaacagcttctgctggtgctataggggatgttttcagcaacctatgttttgatgtattgaaaaaatctggtttatttttgggaacattaccatcttaggtaactaatgttccccgttttaagaattatatcaacttctctatattaatgttt

SEQ ID NO: 13914 - DNA, 606 bp, Gossypium hirsutum
  Clone ID: LIB3829-021-Q6-K6-H1
cagcagttcctcactacataaacaagcacattatacctgtttttgataagcttccagagagcgaaaactagatttgctcaaggtttggcggaaatttctccttacacaacgccacaggattcacgccagattcttccttctgttgttcagcttttaaagaagtacatgcctcgaaggaagactggtgaagaaacgaactttacctatgttgaatgcttgttgttttcattccaccatttagctcacaaggctcccaatgccacaaatagtctatgtggttacaagattgtgactggtcaaccatcagataggcttggggaggacttctcagagtattataaggagttcactgagagattgagtagtattgaagacctaactagggccacaatgaagaaattgactcagggaatggctgagcacaataaagcaatggcagctgctaaatctgatgaagcaaaggagagcattaaaactcaaaagcagaataccacaactggattgcgtacttgcaataacattttagctatgacaaagcccttgcattcaaaaacacctgcatttattggggataagagtgtcaacctttcttggaaagaactgtaa

SEQ ID NO: 13915 - DNA, 557 bp, Gossypium hirsutum
  unsure (1)..(557): unsure at all n locations; Clone ID: LIB3829-021-Q6-K6-H2
gttctggtgaagtcagnactttgggggccggggtcaattcagttagtttagtgagtgcagatcttgttatcaatcgagcaactttcgagtggtggtccttccatattatcaattcatctgatatggttcactgtggaggtttcttttttccatggccgttgtagtatccgagggggggggggggcagggtattcttggagacacactaagcaaattcagcatttggggtctctacataacttttgtactagctgttggccggtttatcaggcttcaatgctccgacctaagaatgagaatacagtatgaaaacctgccttcctgtgacaggttgatagccatttgtgaggatatatatgctgcgagagcagagggtgagcttggagtcgaagaggtcctttactggaccctagtgaagatttacagatcaccgnacatgctacttgagtacactaaacctgactagtcaccatcactgatgcactttcggttgcaagagtttttacaggtattcacgaaacaagcctgataaaacatacgggcctacccggaatcaa

SEQ ID NO: 13916 - DNA, 601 bp, Gossypium hirsutum
  Clone ID: LIB3829-021-Q6-K6-H4
ttggcttatgaaagcattgcctttaatcgccgtggtacccttctcgccgctggatgctctgatggaagttgtgtaatttgggattttgagaccaggggcattgcaaaggagcttaaggatagagactgttccgctgctataacaagtgtctgctggtcaaagtatggtcataggattctagtgtctgccgctgacaagtcattaacactttgggatgtagttagtggtcagaaggttacgcgtatcgttctgcaacaaacgcctctacaagctcgtttacatcctggttcttcaatgccatctgtctgcttagcttgccccctgtcatctgctccagtgattgttgacttcagtactggagatacaactgcactcccagtcaccgttcctgatatgggaaatgttgttgctcctccttcacgcaacaagttccctgatggagctccttacacattgacggccgcatgctttaacaagaatggagatctggtatatgtggggaactcgaaaggtgaaatacttataattgatcacaaaaacgttaaagtgcttgctatggttccaatttctagtggcgctgttgtcaagaacattgttttca

SEQ ID NO: 13917 - DNA, 271 bp, Gossypium hirsutum
  Clone ID: LIB3829-021-Q6-K6-H5
ccggttcgacccagcgttcggtgggtatgtggggcaaacctatttggcgcggtgtatgtagcttttacgatgtagctgaaagcgcaaactcactatgttatggacagttggtttctgtgggttgtataatttgtctggaaattaccctttgtcatcccctttgattttttcagtgaacctgagggaaatattttctgggggagcaagcagctgaaattctatttgtgttttactttagctttcctaatgctatattgtatgttggcatggc

SEQ ID NO: 13918 - DNA, 574 bp, Gossypium hirsutum
  unsure (1)..(574): unsure at all n locations; Clone ID: LIB3829-022-Q6-K6-A2
ttttgggnacctgggctatcgctgttgatgggggcgctggtgtcgaccctaatctccctaagggaaanacaanacgaggctaagagactcctcactcgttgccttgatattggcatctctgctctccgctctaatgtccccgccattgacgtcgttgaacttgttgtgagagaactgggggggggcccgctgttcaactccgggcgtgggtctgctcttacggagaaaggaacagtagaaatggaagccagcattatggacgggcctaaaaggagatgcggtgccgtttctggcttaaccacggttaagaacccaatctccctcgcccgtctcgtcatggagaaatcaccgcattcttatttgaccaccccgggagccgaagagtttgccaagaaacagggcgtggagatggtggacaatgattacttcatcacagaagataacgtggggatgcttaagttggctaaagaagcaaactcaatcctgtttgattaccgtatcccgacagttggcacctgcggtgcagctgtggacagccatttgcagatgaacgggctcccgatcagcgtctacg

SEQ ID NO: 13919 - DNA, 582 bp, Gossypium hirsutum
  Clone ID: LIB3829-022-Q6-K6-A3
cgtgggtagtggtcttggggggattggccggagaatgattccgatcttggtgccattggtgacagcctcagtgggtgaacaaattctggaggaatgcatgatcaattatacaatatgcagatgcttgaggctgcatattacaaaattccccaaccgaaagactcagaacgggggggggggtacactccaaagcaccctgcggcaacacctgctagttaccctcaagttcaggcacccatagtgaataatcctgccttctgggaacgcataagcatggatggatatggcactggcactgatacactgtttgttgcattttattatcaacagaacacttatcaacaatatctagctgcaaaggagctgaagaagcaatcttggagataccatagaaaatacaacacatggtttcagcggcatgaggaaccaaaaattgctactgatgaatttgaacagggaacctatgtatactttgattttcacgtggcaaatgatgaccaccaacatggatggtgtcagagaatcaagactgagttcatctttgagtataactatctggaagatgaacttatagtataggag

SEQ ID NO: 13920 - DNA, 603 bp, Gossypium hirsutum
  unsure (1)..(603): unsure at all n locations; Clone ID: LIB3829-022-Q6-K6-A4
gcgttctgtctttttctccttctcaagagtgattcaggagcgacttgtngagaaggaaanaagagttttcagaagagggttcttatggaatgcttgccagaaggattgtggagactgaaatgccaatcatggttcagatacagcaattgatccgaggagcgaaaaatgctgtgtcacttgcgcagggagtggtttactggaaaccacccaaacaggctttggataaggttaaagcacttgtagaggatccttcagttagttgttatggtgctgatgaaggtcttcctgaacttagagaagcattgataagaaagttacgtcaggagaacaatttgcagaggtcttcggtgatggtcactgcaggagcaaatcaggcatttgtgaatcttgttctaacactgtgtgatgcgggggattcggttgtcatgtttgctccatactatttcaatgcctacatgtccttccagatgacaggtgtcactaagatattagtaggtcctggttatccaaagactctttatccagatgcagactggttggaaaggacattgctggaaaccaagcctgtcccaaagcttgttactgttgttaatcctggcaacc

SEQ ID NO: 13921 - DNA, 597 bp, Gossypium hirsutum
  Clone ID: LIB3829-022-Q6-K6-A5
cccgggttgacccagcgtctctgggaaatccggttatcaacagataaggatttcgaagctagcataagcactctaaacaacccatcttttctttcccaaggtgatgccctttctgggattgataaaatctaccaagcttatcatttttggaaatggggagctttgattcttgccctactggcctccttatctaccatagggaagagactcaagattctggttatcagattccgacgaaaccattctttaccatctcgacctcttctttatgacacagattttgatactgactcggagacttcatcatgttcatcatcggacaacgaagtagaatatgaggagccctcggcttctcaaaactggcgacaagttgatgaggattttcgagtgagaggatcgggtcattttattgacgatcaatggcggaacagtggctccaccctgcgaaagaggagaagcagcatcggcgatctgttttcgtgggctgaagagctaaccagcggaaaaagcgtggtgaagctgtgggacaacttaggattagggttccgtttggacctcgatgaaagcgacaacgttttaaatgtttacgacatcaac

SEQ ID NO: 13922 - DNA, 554 bp, Gossypium hirsutum
  unsure (1)..(554): unsure at all n locations; Clone ID: LIB3829-022-Q6-K6-A6
attttnnncagttgaaaaagaatgggtcgcggnagttagcaggtggtggtgggcgagagctcattaggttattntgtttggtagcgngagaagctcctaaagcagggacaaacaactcccaagctgctcccgctgaagcaccagctgtggccaaacctgcccctgctcctgaaccagtagatatttccaagcaaattccggctggtattaacagtatttccgcaaacaattacatgcgtgctgatggtcagaatactggcaatttccttacgcaggatcgaccttccaccaaggttcattctgcccctggaggcggatcttctctggactacctatttggtggacctggaggtagtaaatgagattgtgccttaataacatctttgataagggagagtattgtttgtggatttgggggaagcagtaaagctgtggatgaaatgctgttcttataatctttgaacatagaagcaatgaaaacatgcctgtctcttgtggtgtaatattgcaggtcttgtggtggttgttttgttgattcaatcaaatgagttcta

SEQ ID NO: 13923 - DNA, 539 bp, Gossypium hirsutum
  Clone ID: LIB3829-022-Q6-K6-B1
aaaacaaacattcaaagcctgggggctaataaaaggaaaacacagaaagcatttcgtctgttttaggaaaagaagaagatagagaagaaaggggctgaagatctagtcaagatcaagctagaaaatccaaaaaaagagaatctgtaagagaattgtaataattgtgatggggggggagactgacagaggtgcacatggatgttaagccaaacggtttagtgaaatcgattgttaatcgtgttaacttgcagggcaccgagccaaataacttaactgtcaaaaaaggaacaaccgaaaactcggtcattgaggatggtcaggaaaagcaagatgtgctatgtgttaaaaccacaaattttagtaccgacatccctgaagagaaaaatgaaaaggctgaagatcagaagtctgctgacaatatgttgagcactgctgaatctactagagttgaaaatactcattcgaatgacactacttcccgaaactggtgcaaatggcatggtaaactgttaactctacaccttcccctacttctgcaa

SEQ ID NO: 13924 - DNA, 613 bp, Gossypium hirsutum
  Clone ID: LIB3829-022-Q6-K6-B2
cccgggttgacccagcgtctggttggtctgtttgccctccttggggcagcttcttttcttggtggcactatgagaatgacagtttccttgtgtgttatactggttgagctcactaatgatctgttgctgcttccacttgtcatgctggttctccttatctcgaaaactgtgggtgatatgttcaaccatggggtctatgggcaaatagtaaaactaaaaggattgccatacatggaggctcatgcagaaccgtacatgaaacatttagttgctcgagatgttgtttctggtcctttaatcaccttttctggtgttgagaaggtcggaaacatattacatgctttgaaaactacagggcataacgggttccctgttattgatgaaccacctttcgcagatgctcccgagttgtgtgggcttgttctaagatctcatttacttgttttacttaaaggaaagatattttcatgggatagggtactttcaggagatgaggtagtacgtagaatctccaaatttgacttcgccaaggcagggtcaggaaagggagtcaaactagaggatcttgatatcaaagacgaggaaatggacatgtatgttgatctccatccaa

SEQ ID NO: 13925 - DNA, 483 bp, Gossypium hirsutum
  unsure (1)..(483): unsure at all n locations; Clone ID: LIB3829-022-Q6-K6-B3
cactcgaaacctttacnacacctccagtggtggggtgacttaccaatgntcctcatcattntntcccaatatntcnntttaaaatattttttttttcaaccancatcccacttttctggggggcgccttaccatnngcngcccaaatctgttttgggttccgatgataataaacttgtttacatttgtcgggacccgaaatatgctttcgtttccatgtttcactttgcatccaaccgtaagcctaaggaaaacgaacacattgcgatatgagacgcttttgagcttttctgtctagggatgtctgtttttggaccttcttgcgatcatattctgccttatcggatcgctagtcaacaaccacccgattaagttatgttttctcaatctctaacaattgttcaatgatagcgatttctatcttataaaaatcctttgccctttatacgctacccttcttaactttttctccatcacatccctt

SEQ ID NO: 13926 - DNA, 534 bp, Gossypium hirsutum
  Clone ID: LIB3829-022-Q6-K6-B4
gttctaacacctggggcatggggggacaacatgatttccctcaacagcacactgcaagcgtgcctttgggagaggggttctccttttcttccttgcaaaacacgcagtggtctccttgtagcaaaggctcactcttttatgatgtggttgaaggactcaccgttggggggggaccttgaattgaagaatgccccatctttcccggagctgaactcaatgcaactgattgaaggatgtttcattagacgcggtcttgtacctgcattcaaggacataactgagagacttggattggtgaggccaaagaaatttgctagactggctttgctatctgatgagaaaagagagaaagccattgaagcttatatagagggaggtaaggaaaagttagaaaagctgaagtcaaaagttgggagcaaaagaacaagggtggtgaaagaaactcagaaagagaaaatttataaggagacctttgtcaaatcctaattaaaaaaatggcctaacttcactaattttttttgggaattctacctc

SEQ ID NO: 13927 - DNA, 585 bp, Gossypium hirsutum
  Clone ID: LIB3829-022-Q6-K6-B5
ttgggctcgtcaatgcaatccgggcgcgcgaaagggaatcaactatcagtcgaacaaatccaaccgtgttgggttgcattggtggatcagctttattgaggaaggctgcagctcttgcttttgagcataaaaaaggtcaactcttaccaccgatatcatcgaacacttggggcagaggggggaagcgatttctccagcatcttgataatagacaccaatatagatgtctgtccccgtatgcactcggaaggctgtttcgatgacaaaagtctagtgtgctaaaaacttttctttcatgtaatggaatataataatatttcagtgtttgcatggaatgttgatgaacataatgtaaaaggtgagaggattctattatagggtggagagcaatgaagatctctactattttatcttgaggtgattaaagtaccttggttaagccgttgaccattcgggtactttcactttctagcgtcacgtcacaagccaatattgtcttcttttgagtacctgcaagtctctcaagatccctccattcggtctggcagggcaggtgggttacttgaagaagacaataccagtttg

SEQ ID NO: 13928 - DNA, 591 bp, Gossypium hirsutum
  Clone ID: LIB3829-022-Q6-K6-B6
ttttggggtggtcctgggccaaagatgaggggttgtctagaaaacaattgtggaaggaaccaagtcgtccttgaagaggctggatatggattatgttgatgtgctctattgtcataggccagacacacagactccaattgaggagactgtgagggcaatgaattatgtgattggggaggggggggcattttattgggggacaagtgagtggtctgcacaacagattacggaagcatggggagtagctgagaggttggacctggtaggcccaattgtggagcagccggagtataatctattgactaggcacaaggttgaatccgagtaccttcctctgtataccaactatggtctaggtcttacaacatggagtccgcttgcttctggagtgcttacttggaaaatacaacaaaggaaatataccatctgacagtcggtttgctttggaaaatttcaaaaatcttgctaaccgatcactaattgatgatgtgttgaggaaagttaatggactgaagccaattgctgatgaacttggtgtaccgttagctcaacttgcaatcgcatggtgcgctgcaaatcccaacatatcat

SEQ ID NO: 13929 - DNA, 499 bp, Gossypium hirsutum
  Clone ID: LIB3829-022-Q6-K6-C1
tttccctttatttcctttgccgcgcggtgggggttaattacattccacaatggcttctgcagatgtcgagtaccagtgcggggggggaggtctcgcatggaccatcaacgaccgtgctctcgaagaagccttcagtgcttacggtttgttcgtcgattcgaagatcattaacgatgggggggggggaagatccagaggctttggcttcgttactttccgtgatgagaaatcgatgagagatgctattgaaggaatgaacggtcggagtctcgatggaaggaatataaccgtcaacgaagcacaatctcgccgaagcggcggcggaggtggtggtggaggatttggaggaaaaggtgggtacaaccgtggtggaggcggtggatatggtggtcgccgtgaaggtggatatggaggtggtggatacggaggtggacgccgtgatggtggtggatacggtgatggtggatctcgttactcaagtggcggctggtcttgggct

SEQ ID NO: 13930 - DNA, 594 bp, Gossypium hirsutum
  unsure (1)..(594): unsure at all n locations; Clone ID: LIB3829-022-Q6-K6-C2
gccatgaacttatcaagncgtagggagatgggtggcccgcaacaaggcatggggcgggggcgcatgtcnnaaattcatcccgctgttcttaaccctgtggcaaatgccctgccccaaggnnataagtcatttttattaggnntttcttgnntgaggaacaattgtgtgtggggaggggtgggtgttnnagagatgtccaagnaagcccctgcgtttattgaacacttatacatttagcctacagctgtnnatgttaagaatgcaatnnactgtgtctcgtgtgccgatcccactcccacnngttgtgagagtcccgatcccgcaccccgataggaggaaacgtnngatccacccgcccgcttcattcagacgcaggngatgatatgnccaaagcctggntcagcctggtcaagcaccacgtccaggtgttgcagttcctgctcgtgcttaaggcctgtgaaagcttttaagataaattttctatattcttattttggttttaaatggctgcattaattttaagaacatggagacatgtaggaagggtttgattgcttcacagcttactaccatttgatacctttttattgttat

SEQ ID NO: 13931 - DNA, 467 bp, Gossypium hirsutum
  unsure (1)..(467): unsure at all n locations; Clone ID: LIB3829-022-Q6-K6-C3
ccgccctttttctaaatctccattacgtgtggtcggctcataaactttnccaaggtgccctcaaccaccaaggggggggggggggatcatataataaataatcacaaatttnaattaaaaaaaaaaaaaaaccaaaaatttttttttttttttttaacacccaaaacaaaacatttttttgggggggggggtccnnnnnnccccnnntttctttccnntcccattcctcctaaaaaaaaaccttttttctntnnccctctnntttcttttccattcccttttttctttcccctcttccttttttttttttcccccttccccttcccccctcctctctttttttttttttcttttccttttcctcccccttttccctttcttctttttcttttcttttttcctctttccccttcttcttcccctttcccttttccccctcctctttcttttttttcctctccccttcc

SEQ ID NO: 13932 - DNA, 607 bp, Gossypium hirsutum
  unsure (1)..(607): unsure at all n locations; Clone ID: LIB3829-022-Q6-K6-C4
ccggttcgacccagcgttctggtgctgtaccaaagggnaagccacttcagctgtttagcattcgaaggggacgcaaagagtaattttctcttagggttttttctgctacacttgttgttctttgggggaaacacaaatggtattgtcggatgatgaaatcaagaggctgtttcgaattcgaaagactgtaatgcagatgttgaaagataggggttatttcgttggagattttgagattaatttgtcaaaacaacaattcatttccaaatacggcgaaaatatgaaaagggaggatcttgttatcaataaaaccaagcggaatgataactctgatcagatctatgttttcttccctgaagaagccaaagttggtgttaagacaatgaagacatataccaaccgcatgaaatcagagaatgtatttagggctatactagttgtgcaacagaatttaactccctttgctcgaacttgtataaatgaaatttcttcaaagttccatttggaggttttccaggaagccgagctcctggtcaatgtaaaagaacatgctctcgtgcctgaacatcaggtgcttactaatgaggagaaaaagactttgcttcat

SEQ ID NO: 13933 - DNA, 512 bp, Gossypium hirsutum
  unsure (1)..(512): unsure at all n locations; Clone ID: LIB3829-022-Q6-K6-C5
acaggttggggtgttcgtgtgctggtgggtgtgccaaaaaaagagatgcattcaaaactcatccaatgaatctagtgaggggagaggacccttaagggtgctttttatggcaactataaaccacgcactgatattcccatggttgtcgacaaatatttgaacaaggtaagggggggtggctctatacanattacagaatatagttcatttcgatgatggttttgatgatattgttgcaggagctggggctggatatggacaagttcatcacacactctgtgccttttgccgatattaacaaggcattcgactacatgctccagggtataggtctgagatgcatgattcatttggatgcttaaggaaatgttgctgctgtatatttgcccatccaaggatcaaaactctaatgttttgtcctactatgtgttatattatgtgcctacttaagctacctttcccggttatcaagagtgcctatatagaactttctctctctcagaaaagaaaaa

SEQ ID NO: 13934 - DNA, 581 bp, Gossypium hirsutum
  unsure (1)..(581): unsure at all n locations; Clone ID: LIB3829-022-Q6-K6-C6
ttgtacttgtttaaaattaanaaaaagggatacgcaatgagcactgccggtcaggttattcgttgcaaagctgcggtggcatgggaggccgggaagccactatctatagaagaagtggaagtggcaccaccccaaaaacatgaagtccgtattaagattctcttcactgctttatgtgggacgggtgtatactactgggagtgtaagggttacactcctctgtttcctcgtatacttggtcatgaagcctcagggatcgtggagagtgtgggtgagggtgtgaatgatttgaaacctggggatcatgtgcttcctatcttcaccggagaatgcaaagaatgtcgccactgtctgtcagaagaaagcaataacatgtgcgaactgcttaggatcaactgcgaccgaggtgttatgcttgctgatgggaaaaccagattttccatcaacggcaagcctatctaccactttgttggaacctcgacttttacccaatatactgtcgtccatgttggccaggttgccaagatcagtccaaccgccccgcttgataaagtctgtcccattagctgtgggatatgtac

SEQ ID NO: 13935 - DNA, 503 bp, Gossypium hirsutum
  unsure (1)..(503): unsure at all n locations; Clone ID: LIB3829-022-Q6-K6-D1
cacgttaaaaagaaccaatgtcaacagtaccatattcccttgggcgggcttttaactggttccccactgtgtttttgtcttcttaacctacaataggttcttttatttcacttccactttgagttccgggggggggggtagtgacgcacaaaggcagtaccacccagatgatgaaacaaacccaaagtttgttagatctccatctatgttgcagaggctgaaatctatcaacttgtctgcttacagatctcaagaacctgttgttgctagtgctaccactgcctatgaaagtgtctctgatgtgggtgatttccatttctcttttcaacaacaaacccctcaacaacagcgccagccttcctttgagagatccccttctgttttgcaaaggctaaagtccattaacctctacggttacttctccccagagcanaccaaaagccatggaggttacccccattattctgcagaggtcgttcagggtgagggacttgatgaaaagg

SEQ ID NO: 13936 - DNA, 540 bp, Gossypium hirsutum
  unsure (1)..(540): unsure at all n locations; Clone ID: LIB3829-022-Q6-K6-D2
tctgtaaagttgcattatcttctggcgacgcgaggaacaaaaagnaactcagtaatggctaagccactcaaggaacaagcctttgctacaccagaagcagtggctgaacttgttcagaaggtacattcagctattcagcgagaacttccggttgtgatagcaaagatgaaactttatttacgggggggcatcaacaagaacaattcttttcaaacctatcaagacaaatattgtggaagcccatatccagattcaatctcttttaaaagcagagtattctccagaagagaaacgtacaatcaacatggtctcaatagaagaactggaatcacagcttgacaatctcttgtaaggagctaacaaaaggtcaatcaaattctttcaactcgactcggatttctttagtaaattttggctaatacacaccctggtttagtctgttcataaggttatactgatagataagtagaaaaaagtcctcatacaaaattgcccgctctttacaaatttcctccctcacttctatatcttgactcccat

SEQ ID NO: 13937 - DNA, 567 bp, Gossypium hirsutum
  unsure (1)..(567): unsure at all n locations; Clone ID: LIB3829-022-Q6-K6-D4
agtagntagtgtgtggtgatggganaatcaggttgatttcgccaccccatgtggatgcatttcgaccgtccctcggcttccctcttggcactgccctcctcttaatcatcattttcagcttgagtggtatcttctcctgctgctaccactgggacaagctcagatcactgcggcgatctcccgccgaccgcaccgatccccatcccgatatcgaagcttctccctccaaacccatgcctgatttcttggatttaaagaaaaaccaaagccaaagcctacctgtattaatgccaggagatgagatcccaaaattcatagcattaccatgtccgtgtcagcctccacggcaagacaaggttgaagtgaaaattgaaaagccacccaagccagcgcgttgcccagtaccttttggattggctatttgaccacttgttgtacataatttggagaaattagattaattttcccttttctccatgagtttttaccagtaaaagaaaaaagaagacgtgagtttgtgtgtacaatttcatgccatcattcccccaaggaagaagattccaattg

SEQ ID NO: 13938 - DNA, 549 bp, Gossypium hirsutum
  Clone ID: LIB3829-022-Q6-K6-D5
ggctcaaaccccaggggcgaggtccatactgtcagaaaagccatctcagtttgcaagtctcggctggagaggctggagaaatgaataaacaattcttcagaatcagcatcatctgtagctgcttctgaattggatgatggtgtacaacagtcctcaaatggctatcagactgggggatctgtcaaagataaagaagcagaaatcaaaacacttgctggtcttgctgaagacctggaaaagaagcttgaagatctacaacagctggtctccaatccaaagtcaattgttgcagagatcctgggaatggcatctgccagggcaaggggtagtgagaagagtgcatcaccttctgtgcttagctcttcacagatggctcctgctaacagtgatggtcattttgattctcctactgtttcaactgctaatacaaatggggttccggcggtcacacatctcggcattgtaggaagaggagtaaagcgcgttttgacaagtacagcaatggtagaatcaaacccgataaagaaacctgcaattgaaccttcatct

SEQ ID NO: 13939 - DNA, 573 bp, Gossypium hirsutum
  unsure (1)..(573): unsure at all n locations; Clone ID: LIB3829-022-Q6-K6-D6
agtctcacagnaagctgggcacccagggctggctcccttggatttcttccgaggaagcgagcttctcgtgacaggagggaaagtgaaggcatttcctaaggatgacccaagcaaaccttgcaagctcactgcctttttgggctacaaggcaggcatgacacacattgggcgggggggcggaaaaacctggatctaagcttcacaagaaagagacatgtgaagctgttacgatcgttgaaacccctcctatggtgattgttggggttgttggttatgtcaagacaccacgtggtcttcgcagcttgaacaccgtttgggctcagcatctgagcgaggaagtcaaacgtaggttctacaagcattggtgcaagtccaagaagaaggctttcaccaagtactcaaagcggtacgagagtgaagaagggaagaagagtatcgaggctcagctggaaaagatcaagaaatatgccactgttgttagggttttggcccacacacagattaggaaaatgaagggattgaagcagaagaaagcacacctaatggagatccaagttaatggtggaactattg

SEQ ID NO: 13940 - DNA, 336 bp, Gossypium hirsutum
  unsure (1)..(336): unsure at all n locations; Clone ID: LIB3829-022-Q6-K6-E1
aagtaccagtgntaaagttgggggggggggggtnnctnattctnatntaattnttnaaatccttgaagaaaaaaccctcanccttgtctcaaaacccctcctcaatttgcctctgttggatcaaacatatttggaacttttgtgacatttttgaagagcaaagacgctaatgatggatctgagcaggctttgcttaatgaactcaaggaattggatgaacatgttaaggcacatggcccattgattggtggggaaaagattagtggcgttggttttggtttgggacgcaagttttaccatgtcgggcctgttgttggcctttcggttaaatggact

SEQ ID NO: 13941 - DNA, 518 bp, Gossypium hirsutum
  unsure (1)..(518): unsure at all n locations; Clone ID: LIB3829-022-Q6-K6-E2
ttgtttcagaaactttatatctgggtggggggtgcatggatagatacttatctttaaatcctctcaatagacaaaggctgggggggttgggtgtatcttcaatgcttattgcctcaaagttgaggaaatcactcctccaaatgttttttatttttgctatataactgataatgcggggggggggggatgangtggtcaaaatggaaccaaatatacttaagtccttgaagtttgaattgggcaatcctacagttaaaacatttttgaggagattcactagagttgcacaagaagattacaaagcttcaagcttgcagctagagttccttgggtgttatcttgcagcagttgagtttgttggattatggatgtgtaaaatttttaccttccatggttgctgcttntgttatctttcttacaatgtttataattaaaccgaactgtcatccttgcagctctgccttgccacgaaacttgggttacaaagcatttggatctaaaacagtgtgaccttatct

SEQ ID NO: 13942 - DNA, 444 bp, Gossypium hirsutum
  unsure (1)..(444): unsure at all n locations; Clone ID: LIB3829-022-Q6-K6-E3
acgnaaccatatctatgttctgtggggaggggtgtggggtgcacttgattgttcctatcactccaaacacccaatggcatagataatttttctgcataaatctgatgaagaattcatgaataaccaatccatccattgcttgtattttgctcaagacatttctgtaggccacgaggggggggggtactccaaatctccttgacagcttgacagtcgcggaaggcatgttcaagagactcatcttcttgtgtacacctgggacaagcagcagaatttcgcaaccttcttttctgtaaatttatgtagatatggataaaatttctgtaggctctccaaaatgtaattttaattttttctgggagctctgtaagccttcttttttttttgtatacctgcttagatgctctctattgtaaggcaggctccacttcaaaaaaaacacaa

SEQ ID NO: 13943 - DNA, 587 bp, Gossypium hirsutum
  unsure (1)..(587): unsure at all n locations; Clone ID: LIB3829-022-Q6-K6-E4
gcgttcgcccagcgtccggngcaattctgggggtgcttgttctgctngaaaaaaagctggnaganacttcaagnaanaggggccaaataggagaagccattntcaacggaaacaaatgaagattaggttccctgagcgtggaagaagtgggagatctgttgttactattaagaatctggaatttggttaggagggaggagctgctagttgacagggcaagtctttcaattgaaagaggagagaaaattgccattattggtccaaatggttgtggaaagagtactttactgaagctgataatgggcctagagaatccaagtggaggtgaagtgttgcttggggagcataatgttttaccaaattattttgagcagaatcaggctgaggctcttgatttagataaaacagtgcttcagacagtggaagacgttgcagaggactggagaattgatgatattaagggacttcttggtcgttgcaacttcaaagctgatatgcttgacagaaaggtttcccttttgagtggtggtgagaaggcacggcttgcattttgtaaattcatggtaaaaccgtcaaccctgctagtt

SEQ ID NO: 13944 - DNA, 543 bp, Gossypium hirsutum
  Clone ID: LIB3829-022-Q6-K6-E5
taactcattggaagaagcttgaagttcatcagcaagactgccatagtggtttttcccattattgggtgggccatgtctatgatggggactattccattaaagcgcttgtttttgttgtaagccagttggagtgtcttgggggggggggggatcttatcgggaatggtgcctctgtttttttctttccagaaggcacacggagtaaggatgggaagttaggtgatttcaagaaaggtgcattcagtgttgcagcaaaaactagggtgcctgtcgttcctataaccttaattggcacaggcggaatcatgcctgcaggaatggagggtgtcgtaaattcaggatctgtgaaagttattattcataaaccgatcaaagaaactgatcctgaaatattacgccaaatagctagaaacacgattttagatacacttaagcttcgaggctgagaaagtggccactgtgacatcttttggttttatggttcatacttaatcctttattgctgatttgaggaacgtggtaccgaaggttctataattccaa

SEQ ID NO: 13945 - DNA, 501 bp, Gossypium hirsutum
  Clone ID: LIB3829-022-Q6-K6-E6
accgcagtcgagaagaggggcgtttgcctaacaccttgtgagaagtggctgctcttcaccttggaaagcggggggctaacctcaccaagctcaccaaggatcaggctgactacattagcgtccccattgagggtccttacaagcctcctcactacaggtactgaggggagagtacgagagagagagagggagagagttggacttagaaaaaggaaccatacaacgggatggtttgattgtttgtttttactaaaatttattgatgatttgtggttagatggttagattttgattttgataggagtttgcgtgtgggatggatggtaagttttggtggaaaagaaatgaggtctctgcttgaagaagaccaaatggggtctgaataaggtgatggggattgtgtgggagatgatatttcgccattggtgcagtccagttttgctgcatctggttttcaattaattaatcaaaaaaaagatgattttcactttctatttcatc

SEQ ID NO: 13946 - DNA, 509 bp, Gossypium hirsutum
  unsure (1)..(509): unsure at all n locations; Clone ID: LIB3829-022-Q6-K6-F1
aaaaatgtaagacaatgggaatagtaataccagggcgggagggagagcgtatagctcatcttgtttcaattggatctgaatcactatgctcgctatattttttttttttnnannnnaaannnnnnaatttgggggggggggggggnactnnnntnncnctttttnnnncnttcnctgcctgagagtatattgctgccncgtgtcttttgcctttgttttattgccgtgttgttgtgatctcccttccggttgctcgttgtggtgtttctttttcctttctgctcgttgccctgttcctttctgcttctcttcgttctttctttttccccttcccgttcccttcccgtttcgccttcctggttttttttttcctcttctccttgcgttctcttctcctctctcttccctttcctctcctttcccgtccctttcttgtttccctcttctccctcttcttcttctccttcctttcccttccctttccctctccctttcccttctcctttcct

SEQ ID NO: 13947 - DNA, 348 bp, Gossypium hirsutum
  unsure (1)..(348): unsure at all n locations; Clone ID: LIB3829-022-Q6-K6-F2
ggttcatgggttcccaactgagttcccctgcgggggcgactcttcctctgctctcggctctcctgttgagtccgttgntgggcctaccttttttttttttttgacnacgatcancnncttggggggggggggggcnactccctctctcaattactcataaactcactgttcctagattttcttgggacaaaaatgagaaaactggagctttggcgagttcaccccagtcaactctgagtgggttcgtaagctggtcagcttcaagcaatggcagcccaaatggtccttcccacgtcccttatncaccaacatctcctttggctgcccaaactgacacttgggatctca

SEQ ID NO: 13948 - DNA, 574 bp, Gossypium hirsutum
  Clone ID: LIB3829-022-Q6-K6-F3
aaaaacaaacttcaagcctggggggggtgggggaaaaaacaaaaagctttcgtctgttttaggaaaagaggagggggagaagaaaggggctgaagatctagtcaagatcaagctagaaaatccaaaaaaagatttttttttgagaattgtaataattgtgatggggggggggcggagcagagtgcacatggatgttaagccaaacggtttagtgaaatcgattgttaatcgtgttaacttgcagggcaccgagccaaataacttaactgtcaaaaaaggaacaaccgaaaactcggtcattgaggatggtcaggaaaagcaagatgtgctatgtgttaaaaccacaaattttagtaccgacatccctgaagagaaaaatgaaaaggctgaagatcagaagtctgctgacaatatgttgagcactgctgaatctactagagttgaaaatactcattcgaatgacactacttccgaaactggtgcaaatggcatggaaactgttaactctacaccttcccctacttctgcaaaggattcggcagccaaaccgtcctatgactcctttgatgtcaaa

SEQ ID NO: 13949 - DNA, 552 bp, Gossypium hirsutum
  Clone ID: LIB3829-022-Q6-K6-F4
gcgtctatggctcaccagggggtgggttggggaatcatgctgttgagcctttaaattttggatctgtaatttttggaaaacttggtgcaacagccaggccatattcccaaaggttttagaagccgtgtcaagtacttttttttgctcgacccaacaaagatttctaggtgggggggggaagtcttggatattgggctacttggacctctatttaaggttactttagaaggctgccctaccataaccttctcgaatgtgttgcctaacaaatgttgggaaatggtgctacagcaattaaatcaagaaatcttgaggaggaaaaacctaggagaaagtgggctgctacctttgcaatctctgcagagcatcaacgggctccaaatgtttggatttctctcaccatccataattcaggcaattgaagctctcgatccaaatcatcaatgttcggagtactggaataacaagactactcgtgatatcaatgaagtcaaaaagtacgcgcttggattgagttgctcggtaggcgaatcgaaagcaaaaattttggtg

SEQ ID NO: 13950 - DNA, 568 bp, Gossypium hirsutum
  unsure (1)..(568): unsure at all n locations; Clone ID: LIB3829-022-Q6-K6-F5
cttgnactttgccttcaagcttgctggaggagcttttcaacttcaagaaagacagagtggttactggaatggttgggggggaacttggcttctggtggtgcagctggtgcttcttcccttctctttgtctactccttgtttttttctcgaactcgtcttgcaaatgatggggggggggcaaagnaaggaggagagagacaattcaatggtcttgttgatgtctacaggaaaaccctaaaatctgatggtattgccgggctttatcgtggtttcaacatttcatgtgttggaatcattgtttaccgtggtctatattttggaatgtacgactctctgaagccagtgcttttgactggaagcatgcaggatagtttcttcgctagctttgctcttggttggctcatcacaaatggtgctggccttgcatcttacccaattgacactgttcgtagaagaatgatgatgacttctggtgaagctgtcaaatacaagagctcgctcgatgccttctctcagatcttgaaaaacgaaggtgccaagtctctattcaagggtgctggagctaaca

SEQ ID NO: 13951 - DNA, 582 bp, Gossypium hirsutum
  unsure (1)..(582): unsure at all n locations; Clone ID: LIB3829-022-Q6-K6-F6
gcgttcggtgaagcagaactganagccttgggggtcacgtaggacatgattcatttacatcataccagtctcacaatggatcagtccactcaaactcttcaccaagtagttctgctaacctgccatatggcatgtgcccgctgccagctatgatacctcaatggggtgtcatctaatggaccggggggggcatctgttgtgatgctgtatccttatgatcataattctgcttgtggttcccctgctgaaccgctagacaatggctctcttggaacgatgggtttctcaggtgtgaatgaagtatcacagctaagcaatggaaggagctctggtggagtatttgacaagcaaatatttcatggtacctctgctcaacgattttaaccagaccagccttcttctccccacctccaaaggggatttggttctattgccagatcagcggcccagaagatggggattccccccacccgcttgcttttaacatttgcgggaagaatttgatgatggtggaaccctatgaagagggaacccctccttaacacgcttttttgtgttctcaatctcactcatgaaagcaac

SEQ ID NO: 13952 - DNA, 581 bp, Gossypium hirsutum
  unsure (1)..(581): unsure at all n locations; Clone ID: LIB3829-022-Q6-K6-G2
tctctttacgtaccgtcttggggttctgcgctaagcaaaagcgtctcatccaaagccaagcatgggaggaaagggatgaagaacatggcggaaagcttcaaaatattgaaatctgaaatggaagaaataagcgaggaactatttttatcagggaagggcaaaggcaagttgggggggggggcggaatcatcgaatccgagtgcgaggaattgaagagggaaactaggctcataatccagcaaagtgcgagaactcaggttaaacttgctcttatgttccgcatactgaaagcaagggaagccggcgagttgaataccgntgccactctcactgaaatgcttcgtgaaatagtaggaagagagagggaggaaagcaaagctgacatctgaatgactatgataagcttataggcgcagctgctccaaatgttaagaaataaaagtgtgtgacaattaagcgcgtgttattaagtactgcaacttatatttcctatctacttcgtttcatgctcggtatgttaaacttggaactgatcaaacctcttttctgttgggtgtccaagggtgaataaacaaaatctg

SEQ ID NO: 13953 - DNA, 527 bp, Gossypium hirsutum
  unsure (1)..(527): unsure at all n locations; Clone ID: LIB3829-022-Q6-K6-G3
tttttaatcctcaaaatcttgttcaaaggggggggcgtgggtgatgggaaaaagaaacaccgggtggtctgaaccgacaaggcttggggggggnatcggnaaacaggatggtgccgataagaaggagaagaatttgagccggcggcacctttttttttttttgggccgtaagcaacnaattttgggggggggggggcnnnnncccnncttnctactntnacnccnnatactaagtgtaaactccnnctgttgaagctggagcgggtcaaggactatttactaatggaagaagaattngttgctaatcaggaacggctcaagccgnaggaagagaaagccgaggaagatcgatctaaagtcgatgatttgagagggttgncaatgagtgtgggtaatttggaggagttgatcgatgagaattatgctattgtttggtngtcggttgggccggagtattacgttgggattttatcgtttgttgtttaggatcatttggagcttggatgctcttttttggtgctcatcat

SEQ ID NO: 13954 - DNA, 546 bp, Gossypium hirsutum
  Clone ID: LIB3829-022-Q6-K6-G4
ttcgctcgctttcttatttcttccttttcactaccttggcactcagtctcgaaattcttcatttctcctaaatcccctccccccttttgtatatatacctcccgggttccctttgttaaatcatcagttaatattacaaattcatctaagcaatcgattcaaccagacaagctctcttgggaggccctttattttccctgtataattcttgtttcttgtctaacgcataagaatggcggccaaagctgaaggcaaggcaattgggattgatctcgggacgacatacagttgtgttggtgtatggcagaatgatcgagtggagattattgccaacgatcaaggcaaccgaacgacaccgtcttacgttgctttcaccgacaccgagcgtctcatcggtgatgctgctaaaaaccaagtcgctatgaacccacagaacactgttttcgacgctaaacgtctgatcggtcgtcgattctctgacccagcggtgcaagccgatatgaagcattggcctttcaaggttgttgccggccctggtgataagcc

SEQ ID NO: 13955 - DNA, 575 bp, Gossypium hirsutum
  Clone ID: LIB3829-022-Q6-K6-G5
ggttggtgagaaatgagtgaaagttgctgaaatgaattgaattgaaattgttggttgatgtaaaattaaaatacgaatgaagttaggtttatgtaggtgaggagtaaatactccttgtcgtcaagggtaatctgattttaaagatccttaaactatgattagatagagggggggtggactgtgatgatttgaatggtaattttaatttgaagttatgattgttttaattcaattttctaatcatgaatgtattgatggagtcttatgttttgattccttttgacttatcttttgatgtttttgtaagtgatcaaatcgttgtgttgtgttcgaagatctgttttaatcgcttgtaatttctttttttaggttgttgattttgtttaaaccaatgtgtgttacagaattaaagggataagtaaacaagattggtagaatggctctagttgctggaggatcgtcaacattgaaccccaatgcccctctgtttgttccggctgtttatcgccaagtggaggatttctcacccgaatggtggaaactggttacgacaacaacttggtaccgtgactatt

SEQ ID NO: 13956 - DNA, 533 bp, Gossypium hirsutum
  unsure (1)..(533): unsure at all n locations; Clone ID: LIB3829-022-Q6-K6-H1
cgtgggcggacactcgggcgggcgcgtggngcggacacataaaacagacgcgtgggtggtatttcatcgctgaggggggggttctanctgccanaacttgctttctgtcaaagaaggtggtttctttttacttctttttttttgtaagcttaagttatttgccttgggggggggggggcacttangatttttacctccatcattttgggtgagatgaacttatactataggtgccatagattctataagacacgattcagatctccattgttgattaaggtgttatttctctttcaatttatatttattctgatcccaaatgtgcaaatgatcatgccgtatggtaggatggtttttatggtattgcagttgagtgcgtgctcaaacaaatgactagtttaattttctagttgactcttggttctgctcattgggtgtgtactttaaacttcgggagacgttatccatttaagttgttaaattgtttactttacgaggcgtgctggctacatgtgatcctagttaatctttac

SEQ ID NO: 13957 - DNA, 567 bp, Gossypium hirsutum
  unsure (1)..(567): unsure at all n locations; Clone ID: LIB3829-022-Q6-K6-H2
ttctgcccgcattggnattctggggggggtggcgtccgcccaaagaatctagaataagtaaagagaggagcggtgggggggtggttgtgggttcgtatgttccaaaaacaacaaaacaggttgaagagcttcactcacactttttttatgttaaaaagccttngagtttctgggggggggggtgctatgaagtcatcanaagagagggaggaggaaattaatagaactgcagagatggcttctgtttttcttgcagctcgtaaagatactctgataatgagcagcagagaactcatcactggaaaaactgcttctgagagtttggagatcaatttcaaagtgagctctgcacttgttgaagtagttaggcggataactacaagacctcgttacattctggccaagggtggaatcacttcatcagaccttgcaacaaaagctttggaagcaaaacgtgccaaagtagtcggacaggccctagctggaatacctttgtgggagctagggcatgaaagtagacatcctggagttccctatattgttttccccggtaatgttggtgacagt

SEQ ID NO: 13958 - DNA, 582 bp, Gossypium hirsutum
  Clone ID: LIB3829-022-Q6-K6-H3
ttctgggtttttttttcacggggggggcgggggttcggaaacatttcttgttccattgatagcaattcaagctcctgacgagtatcatttcatggatgaagggtgaatatggtatttgggcagcattcttgggactgcttttttttctcttcttcttcattcctggtgaacgggggggggcatttctagcattactcttggtgattgtggcccctctccatgtaatgaacttaaggggaacacaacaaggcgctatcatttccttggtgattgcagcgtatttggcttaccagcatttctcaggtgctggcagcttgcagagagcatttgaccaaggttcaattattgccactgttggcattgtttgcatcactgttgtctcctgcttgcttttgatatgaatttaatgaagaatcaagacgtcttccaagttattgaagactcgtagaaggagagagtactgtaagaataacatattttccagacctatgttcttgtgttagcatgataagtccattttatgctgagaaaaataagacttctagatgaaattctatatatgctgaatgtgtatgttccttt

SEQ ID NO: 13959 - DNA, 566 bp, Gossypium hirsutum
  Clone ID: LIB3829-022-Q6-K6-H4
taggtttcctcttcctgtttcttgacttaatttagggttttcttaggaaaaaaaatttcgtttcttttttctactcatggattacagtagagagaacgtagttcatgtaattccgacaaatgataattgggtcccgaattcaagtgtcccatcagtttgggcaacagaagaagatggtgggggttggaacaaccaagaaacctccaccgacacgcttctttccaattccgaccagccaccgaacaagaaaccaagaaattcccaggatttaaacactaggtccagagccataggcaagatgttcttcaagaccaagctttgttgcaagttcaaggccgggacttgtccttacatttcgaattgcaacttcgctcacagcaccgaagagctccgccgtccacctcctaactggcaagaaatcgtggctgcacacgaagaagagaaagggatcctgtcggagccgagggaagaatttcaaatcccatctttagggtctaccagtttctcaggagaaacacagaggtcatataaaggaaggcattgcaagaagttctattcggaggaag

SEQ ID NO: 13960 - DNA, 595 bp, Gossypium hirsutum
  Clone ID: LIB3829-022-Q6-K6-H5
ccggtcgacccagcgttcggtccactcttattttcctggagaacttgtgtggtggagctcaagaaaggagaagaagtgtgccttttgtagtttgcagtgatccttccatagatggggcacttgcttctcaagcctcaattcattcatctttcgatgaaacggctcaaaatgaagcgaatcatgaagctattgtccggaatttgaggcacaaaagagtgttccttgaacagtctggtgctagctgcatagttatgccatgccatatctcaaatgcatggcatcaacagatatcagagggctgctcactgccattttttcatattggtgaatgtgttgcgaaggagctcaaggaagcaaaactgaagccacatggtactgggagtaatgtgcggattggggtgctggctgccactgaaactatagctgctgcttcttaccaggatcaactagggaatcaggggtttgaggtagttttgccagacaaagcaaccatggaacacattctaattccagcgatcgaatcattgaacaaacgagacaccgaaggggctcggaatctattaagaatagcaatccaggtgcttttgatcagggc

SEQ ID NO: 13961 - DNA, 586 bp, Gossypium hirsutum
  unsure (1)..(586): unsure at all n locations; Clone ID: LIB3829-022-Q6-K6-H6
gcgttcgcggncgcgtgggcttgattttctcaactggctgttgatgtatctctcantaaagagttgagaatttggccgaaggatgctcaagtggttgaaggttggtggacatattttcttcagggagtcttgctttcatcaatctggtgattgcaagagaaagaacaacccaactcactatcgcgagcccagattttacactaaggtctttaaagaatgccaagcaactgatgattctggaaattcatttgaactttctcttgttggctgcaagtgcattggagcttatgttaagaacaaaaagaatcagaatcagatttgctggatcttccaaaaagttgtttcagataatgataagggattccagcgcttcttggattctgttcagtacaaatctaatagcattctccgttatgagcgtgtctttggaccaggatatgtgagcacaggaggaattgaaacaacaaaagaatttgtggggaagttagatcttaagcctggccaaaaggtcctagatgttggctgtggcattggtggaggtgacatttatatggctgaggaatttgatgttcatgttgtgggcatc

SEQ ID NO: 13962 - DNA, 541 bp, Gossypium hirsutum
  Clone ID: LIB3829-023-Q6-K6-A2
cgaaaaatgtgcattactgaaatttaatttattatccatgcttttaagccttccgtggaagggttcttctgatcgctgtgcatccagttgaattctcaacagatatgaaactacttcagccatgctgagggtggtttccggttcttctgccaagcagtcaatgctcaatttcaacatctggcgtgcaagtttcatccagaggtgtcctttcagttccagcagaagaaccccaaaggcatatatatccatctcaggtgtcaccaagccatactcaatgtattcaggtgccttgtaaccctttgttccgagagaactccacatcgatgattttctgctatcttctctttctgctgatcgagctagactgaagtttgaaatcttggccctcaaatctcgatcaagcagcacgttgtcactacaaatatctttatgcacatatgctggagtggtgaagttgtgaagataatgaagcccattagcaacatctaaagcaatatgaattctataaccccatacctggaatttctggcaactcttgttt

SEQ ID NO: 13963 - DNA, 374 bp, Gossypium hirsutum
  unsure (1)..(374): unsure at all n locations; Clone ID: LIB3829-023-Q6-K6-A4
cctagtgggagagatgaaagctgttagctttatgtatattcgtccgcctggttataatgctgaaagtgccaaagcggccgagattactgatgagnaggaaaaaaactgatcataacaacgtatccgtatgatcattctaccgatgtgccttctacagaagagcggcgggaatctttgcccggtggaggtgctactactaaagagaaacggctggtgtagatggtcagttgtgggttttatgtccaatacttttccttatgcagggtttcgaggcatatgttggagtactactgctcaagacagcatttttttgggttgttcctgaatggcagataatttttgtggcatacttttggtttgtatgggctgttggg

SEQ ID NO: 13964 - DNA, 588 bp, Gossypium hirsutum
  Clone ID: LIB3829-023-Q6-K6-A6
gcgttcgctttttttttttttaatttttaatttttacaaaaagggatattgtaattttggcttatcctatagatctggagcattttccagcatcattgcttggaatgagtcaaagtcagggcttgatgaacaactgtgagtcagcttttctgaaagtggatggaagtattcttgtgagacttatgcctgagattttgaagacattattgaaggttttagcatgccaaccaccggtttccccaccaatgcagtggcatacagggtggtttttgagaaaggtacttcaatgtcaaggaaataagctcactgatgacaatatccacctattcaatacttcatatgagcagtcccgtgaatgtcttcaaaaggaacttgatggatgctggtttgatcatatcccagataccataggaaatgagtggggaagctgtaaaaaagctcttgaactacaattccatgttaaggatcccttatttacgctggagcttgaaatctgccagcaagcaattgatggcaattttaactcttgctttgcttgggagaggatggttgatgcagtgaaggttttgattctccatcttcaactca

SEQ ID NO: 13965 - DNA, 539 bp, Gossypium hirsutum
  unsure (1)..(539): unsure at all n locations; Clone ID: LIB3829-023-Q6-K6-B1
tccccaactgnatcatcacgaggaggaaaagtttacatggccaagctggctgagcaggctgaacgcttgaggaaaggtggagttatggagaagttgcaaaaactgttgatgttgaggagctgactgttgaggaacggaaccttctctccgtggcttacaaaaatgtgattggggcaaggagggcgtcttggaggatcatctcttccattgagcagaaggaagagagcagaggaaatgaggatcatgttgcacaactaaaggagtataggggtaagattgaagctgagctcagcaagatctgtgatgggattttgagccttcttgaatctcacctcattcctttggcctcatctgctgagtcgaaggtgttctaccttaagatgaagggtgattatcacaggtatcttgctgagtttaagactggtgctgagaggaaggaagctgccgagagcactttgttggcttacaagtctgctcaggatattgctcttgctgagcttgctcctactcacccaattaggctgggacttgctcttaac

SEQ ID NO: 13966 - DNA, 623 bp, Gossypium hirsutum
  unsure (1)..(623): unsure at all n locations; Clone ID: LIB3829-023-Q6-K6-B2
cgtggnggtcgcagaaccatgcaagcacatggatcgagnacgatatgcgccgacaacgaggatcccttctcccaaacgtcaccgagggggatgcttgtccaaagtccttngagtacctgcaagaaagcatgntcgatgctttgctgccgacaaggtaaaagtactttcccgatgacgaactcaaggctttggggaggcgtgatgtttgtcaaggggttgaccaaaatnnaccctctttgacctcagtcctggcagcgnaactatttctgaatatcaagagcttgcntgnnnacttgacctgccaaactgtggnctgatattgataaagggaaagacacccgaggagattcgcaagaccttcaacatcaagaacgatttcacccccgaggaagaagaggaggttaggagggagaatcaatgggcattcgagtgataggaaagcctttaaatttaatgttgatattattatagtttctatgcttttctcgctaggttttcaagttggggaaaaaaattaagaacattggctttcttttggcttattttgttatatgcattagtgtcttctattctagaggatatttaatatgaacttctcccctcctctattatcataatataaa

SEQ ID NO: 13967 - DNA, 544 bp, Gossypium hirsutum
  unsure (1)..(544): unsure at all n locations; Clone ID: LIB3829-023-Q6-K6-B3
ggcaaattaatgaatacgattggagaaagattgaccatcctagggggggggcatatggatgcttattttgagaggatggcgaagttgtcgaacaatatgaaattgtcttctatgtatcaggttcatgttgaaggatgctatgggtggtgagaaagaataaatggcagcagaggaggaaagttgaagggcctaaaaagattgagaagtgcacagagatgctgctcaagagcgacaagcacagtccggtaggcttgctcgtggtcctggcttcaatgctactganagaagagcacccatggattttagtccacgagggccaatgttatcttctccagtttctcaaatgagtagtttccgggggatgcagggtcaaccccatggttttggggctcaggatgttcgcatggatgacagacagtctttggagtctaggactctatcggttcccttgcctcaaagaccaactggtgacgattctattactttgggcccccacggtggccttggtagagggatgtcttttggaggaccacctgtaatgtcc

SEQ ID NO: 13968 - DNA, 551 bp, Gossypium hirsutum
  Clone ID: LIB3829-023-Q6-K6-B4
gtcgacccacgcttcgcgtacaacaaaccccacgtaaagaatctctttcgcttcctctccgttagactttcctttcctctcttcgctttcttttattatagtttcagctttttttctgcctcgaccccaaacgaaacagggggtggggttttattttcttgtggcccagaccacttttaggtttcagaggaatggcggagaaatcgtgtgttaagcgccttcagaaagaatatagagcactttgtaaggaaccagtttctcatgttgttgctcgtccatccccaaatgacattcttgagtggcattatgtgctggaagggagtgaaggaacgccttttgcaggtgggtattattatggaaagatcaagttccctccagagtatccctacaaacctcctggaatcaggatgatcacccccaatggacggtttatgacacagaagaaaatatgcttgtccatgagtgattttcatccagaaagttggaaccctatgtggtctgtatctagcatacttaccgggcttctctctttcatgatggataatagtcct

SEQ ID NO: 13969 - DNA, 515 bp, Gossypium hirsutum
  Clone ID: LIB3829-023-Q6-K6-B5
cgccacatgatggctgcacacttgtgctgaagagagaaagaaagatcattaaatgtctagaagcttcaattcatcgaagagtaagcgagggtctaagtctggagctttgtgcaaaggatagagttggtttggggggggaggtgacgaggattctccgagagaacggattgtcagtaagaagagcagggatctctacaattggggaggaagcagtgaatgttttttacgtgagagacacttacgggaacccagtagaatcgaagaaaatcgaagcactccgcagggaaatcgggcacacgatgatgcttaatgtaaagaaggatccaggcagtgccaaagcacccgaggctgaggctattagtactggatgggccaagacaagttttttctttggaaacttactggataagttgctggcatgatcaaagaaaatgaaatatctccatgtttgactgtaacagaaactctgaactgtctacaataaattcaagcttttgcatacccaccatgctaag

SEQ ID NO: 13970 - DNA, 591 bp, Gossypium hirsutum
  unsure (1)..(591): unsure at all n locations; Clone ID: LIB3829-023-Q6-K6-B6
ccggtcgaccccgcgttcgcccgaanaaaccttgcttaagtggtcgactggccatgcaattccctctgttgctgcatcaaaagcttcacttgagcttggtcagattcaggggaagagaggaatctggttctgtggctatgacttcaatcaggatgaactaaaggctggtatggatgctgcacatggtatcttgggaaagcgttcttctgttctgcatagtccaaagagtatgtcaccctctttcatggaaacaacggcacgcctctttgttactaaattctttcaacaatatatatctatgggctgtgtaattttcttagaggaaggaggcagaattttcactttcaaaggaaacatggaaaagtgtcctcttaaaacagttctgaaagtacataatcctcagttttactggaggatcatgaaagaagctgatataggccttgcagatgcatatatccatggagatttttcttttcttgatgaaactgaaggccttcttaatcttttccggattcttgttgccaataaagagaactcagctgcctcagggtcgaataaaagaaggacttggtggtcacctgctctgttaac

SEQ ID NO: 13971 - DNA, 576 bp, Gossypium hirsutum
  unsure (1)..(576): unsure at all n locations; Clone ID: LIB3829-023-Q6-K6-C1
atcttgactccttttgtctcttcaagagaggttttggaaacgcctcctgcttccccttcaagtccccagtgtcagtctccaggctacctatcagatgatggatcgccaaggcgaagagggaaagcagacttgtctgtttttaaggattttgttgaagattgccttgggtgtgaacccaaatcacttgagagacatgctaagccaaagccacagagttcaaatgatattcaagttgagaagttttcaggtttgcgtataaggaagcaattggtcagccctgcaaagctaagtgagcacttgtctgacattcgttttgttcggctaccgactttgaagaatttgttggtgggagacaccctttatggatgttgggcaaccataggagtactgattgaaaaggggattccaaagactagctctattgggaaaagctatagcatatggaaaattgggtgcttagataaaaatactgtttctcttttcttgtttggtgacgcttatgagcagaacagtaaggagcangttggaaccgtttttgcattattcagttgcactgttcgcaaagacaccaaggga

SEQ ID NO: 13972 - DNA, 562 bp, Gossypium hirsutum
  unsure (1)..(562): unsure at all n locations; Clone ID: LIB3829-023-Q6-K6-C2
cattggccanaaaaacgccttgggtcaagaagaagtgtagatggaatactccatatggtgaattcttccttacggggggctctcagatgctgttagacacggggcgagaattctatcgtccgcaacatcgatttttgactttgcatgtgtgaagatctctgtgaaaggggggggggggcactgncattatggaacccgatcccatgctcctgaactcacagatgggtactataacacaaggtaccgagatggttacctcccgatcgctcaaatgctagcacgtcatggtgccgttttcaacttcacttgcatagagatgcgggatcatgagcagccccaagatgccttgtgtgcaccggagaagctagtgaagcaagttgctttagcaacaggagcagcacaagttccacttgccggggagaatgcacttccccgttatgatgaatacgcccacgagcagatcttacgagcttcatcgttgaatgtcgatggctcagcagttgatagagagatgtgtgcatttacgtacttgaggatgaacccatcgctctttcatccgggc

SEQ ID NO: 13973 - DNA, 328 bp, Gossypium hirsutum
  Clone ID: LIB3829-023-Q6-K6-C3
cgttttgggtctgtcgttgagttggtgcagaggaaatgaggcgtgatatatagatttaattgaaaggtaggtcgattttatttgtgtgggagcctgtttttgaaaaattaaaatgatggagcggtgaaaatgagatggaataaggtagatatctatgttgtttcagttgggatagctttggggggggggagtgatcaataaatctattgataaatcagaggtgagactttgagcctagatctcgaagttcagttccttctgtctccttgcttcaccaccgtaaattgtaaattaaaaaataaaagtactttatagttgtagatttatt

SEQ ID NO: 13974 - DNA, 582 bp, Gossypium hirsutum
  unsure (1)..(582): unsure at all n locations; Clone ID: LIB3829-023-Q6-K6-C4
ttcgcaaaaactttcccanatcacgttttacttgaaaagctatactgccacaactactactttgttaatttactgcaaaaatgaggtgacgaagaaaaagatgatgctactgctcaaagagcatggaggctactgcgtctattcttgttatggactagaaaagtggggtgctcaggagacggcttatgatggagctaaggttggtgcctaagttcctcaagggtctaggacacacatccccttctcctcctggccaaatctattttaaggaacgccagctttcattcgatgagacacccattttccaggtgaagatgcaccgtcccgcttccatgcgcttccttcttccttgcatgagcactcaggatgtggatttcgattacgatttcggcatcgatggagaggacggagtttacgggtacgatagtggaatcaagagtcactcttgtgaaaagcaaggggaggaacaaggaaatgataaggacagggagaggactgcttgtacattaccgctggaggaagaagagattgattccaaggcgggtaagttcattgctaacttctatgagcaaatgaagttgc

SEQ ID NO: 13975 - DNA, 594 bp, Gossypium hirsutum
  unsure (1)..(594): unsure at all n locations; Clone ID: LIB3829-023-Q6-K6-C5
gcgttcgccacactcacgtgnanactgaaccttgcaaaaggcaatagcagtgcccatattaccatcgtcccagatgacttgttccttgtaagagtgagtgaaaggcactctctttcaacctccaacaactttccttttaaaaaaatccgggcttttaatggccgccttatcaattgggactcatttttcaccctcatgtcgtttcaagaaccgatctttgcacgcgccttctgtctactctttgcctagctttgggacttccctttatagaagcagagccccaaggttgcttagcaatggagttcttgctagagctgaggataaggccaggggctcttcttctccaagtcaacgacaagttcaacccaacaatgaagagcagattaaggggctgtcctcagaatctggaacatgtgatcccttatgttcggttgatgaaactagctcgctggagtttgaagctgcttaccagccaaagactgatttattgaaaactattgcggttttcacagctgctttaacggggactctggcaattaacctaacatgggttactgaccaccaggatattgctatggcattgctttttggaat

SEQ ID NO: 13976 - DNA, 561 bp, Gossypium hirsutum
  unsure (1)..(561): unsure at all n locations; Clone ID: LIB3829-023-Q6-K6-C6
cgccaaattcaagtttaccaaccttattgtttatttgttcgagagggggggtttttttgatcccctggcttcaaagcggattaataaggagttgaaagatctgcagaaggaccctcctgcatcttgcantgctggccgggggggtgacgatatgttccactggcaagcaacaattatgggcccagcagacagtccttttgctggaggactatttcttgtttccattcacttccccccagactatccattcaagcctcccaaggtttctttccgaacaaaggttttccatccaaacatcaacagcaatggaagcatctgtcttgacattctcaaggagcagtggagccctgcccttaccatatccaaggtgctgctttcaatatgctcacttctcacagatccaaatcctgatgaccctctggtgcctgagattgctcacatgtataagactgatagagccaaatatgagagcactgctcgctcatggactcagaaatatgcaatgaattaagggtcggtcaggcttaggatgctatgtttgatacctattactaaataata

SEQ ID NO: 13977 - DNA, 523 bp, Gossypium hirsutum
  unsure (1)..(523): unsure at all n locations; Clone ID: LIB3829-023-Q6-K6-D1
acagcaaagggtacttgctttgggagaatcagatgtttnctgggatgggggaggctgttcttgaaaaatagtgttggcaagcatgaataccttggtgagtacactggggaactgatttcacatagggaagcggataaacgaggtaaggggggggggggcngtgaaaattcttcatttctcttcaacctgaatgatcagtttgttcttgatgcttatcgaaagggtgacaagttgaagtttgcgaatcattctcctgatcctaattgctatgcaaaggtcattatggttgctggggatcaccgggtgggaatatttgcgaaagaacgaattaatgctggagaggaacttttctatgactatcgttatgagcctgacagagctcctgcatgggcaagaaagcccgaggcatctggttccaaaaaagaggaagttgctccttcaagcggacgtgccaagaagcttgcttaacccaacctttcatttaaatcctaaattcaaaattcttttgccattctttcacagg

SEQ ID NO: 13978 - DNA, 566 bp, Gossypium hirsutum
  unsure (1)..(566): unsure at all n locations; Clone ID: LIB3829-023-Q6-K6-D2
acctttcaanatgggggggggagggggggggccataaacaatgcaggagttttaaatggtggattgtgggccagccaaactcaacggatgcgaacatatacaaaggtacaaaagcgtggcttcttgtgggnaagaatcaatttttatttgtacnnccgctacnnaaagggtatgtatgaggggggggggggatctancccgcatgtttgntatcgaaggacagatggaagatacacaaagttctgactggaaattagtatatgttgaccatgaaaatgacatattacttgttggtgatgatccttgggaagaatttgtaagttgtgttcagagcattaaaatactgtcatcccttgaagtacaacaaatgagcttggatggtgaccttggaaatgtgccagttcccaatcaagcttgtagtgagatcgacagtggaaatgcatggagaggacattatgatgatacttcagctgcctcctttaacagataaaaaagtcaaaaacaaattgattggactttacataggctcattgctggatgcctttctattcctaagatcaatttaa

SEQ ID NO: 13979 - DNA, 592 bp, Gossypium hirsutum
  Clone ID: LIB3829-023-Q6-K6-D3
accccacttattgaaccggctcgatgcaaatttttctgatgggaatgcacttcttcaactgcttgaaaatgttacttgtcgagtacatgaacttggtagaggaaatttacaatttctactttgtgtaatgtcgtggaaggatgatggctacaaatgtcttaagtggatctctgagacaaaaattggtgtggtgactcagtgttgcttgtccaaccatgcaaacaaggggcaggaccaataccttgctaatcttgctctgaaaatcaatgctaagcttgggggcagcaatgtagagctgaatgaccggcttccccatttccatggtgaaggtcatgttatgtttattggagcagatgttaatcatcctggttctgataataagactagcccatccattgctgctgtagtagcaacaatgaactggcctcaagctaatcgttatgcagcaagggttcgaccccagttccatcgcaaagaacagatcctagagttcggtgaaatgtgtttggagcttgttgaatcttatgctcgtctaaataatgttaaaccagaaaaaattgtgctcttccgtgatggggttagtgagggtcag

SEQ ID NO: 13980 - DNA, 563 bp, Gossypium hirsutum
  Clone ID: LIB3829-023-Q6-K6-D4
ccgtcttgtcctgatttccaggggggcttttttcccccgaatccgttgatatctcatttcaaactctccatattttatcttcttcctttcatattcagtgtggttctcccgccctatccctttcttcttgcttttctgcagattcaggaacgcttcctaccagtaaatgaaaaagagagttccgacgatcagaaacccggtctcgtgataactgtgaccgaatccattcgcttgtttcttctctcagcctccattgaccgccgtctctctgaagaactccgagaactcgctctcactctttcctcagcagccaatgcaccgtacaagcagatccgaagcatatggatggaatcagcttttgactccaggcctggattgatttctctcttctccggatctaatttcattttcaccagtcctaaacccagagagaagagcgaagaattgaaaaagaggttaaggaagcttaaagaactagcagagaggaaagagtatcaagagcttgttaaagatatcacgccgaagaaggatctcaatgaacctttctctacttataaggatca

SEQ ID NO: 13981 - DNA, 583 bp, Gossypium hirsutum
  unsure (1)..(583): unsure at all n locations; Clone ID: LIB3829-023-Q6-K6-D5
tttggttctatgttttttcataaatgacatgcttattttttttactatatatatatatataattatctgttgctagtataggtgtgcagtcgcctttgaggttagattatncctgaatattagtaatttatatttgaagttttagcagtgagtttggtgtaaaaatattaacatggcctgggggaggggaaactccaattcctcaagctcctcgcagcttcagaactctgggtctgaagaggacctgcaccagcagaacatgatggaccaaagaaaaagaaagagaaaggaatcaaacagggaatcggcaagaagatccaggatgaggaaacagcagcacttggatgaattagtggcccaagtggctcagctcagcaaagataacaaccaaatcctgaacagcatcaacttcaccacccaccactatctcaacattcaggctgagaactcagttctgagggctcagatgatggaactgagtcaaagactcgactatctgaatcaaatcctcagttatctcaacaccatgagcgccagtgagttggtgtacgaaactgatcagtgctttgaaacaagtacttgt

SEQ ID NO: 13982 - DNA, 574 bp, Gossypium hirsutum
  unsure (1)..(574): unsure at all n locations; Clone ID: LIB3829-023-Q6-K6-D6
actctgggngaatgaggctgtgactcgtaagaccagaattttggatgtggtgtacaatgcatccaacaatgagggggttcgcactcaaactctggtgaagagtgctattgttcaagttgatgctgctccattcaagcagtggtatctccagcactatggcattgacattgggggcaagaagaaatcagctgcagccaagaaagaaggagaggaaggtgaaactgctacagaggaggtgaagaaaagcaaccatgtattgaggaagctggagaagcgtcaacaaaatcgcacgcttgacccacatattgaggaacaatttggcagtggtcgactgttggcttgtatctcttcacggcctggtcaatgtggccgtgcagatggatacatcttggagggcaaagagctggagttctacatgaagaagatccagagaaagaaggggaagggagctgcttaaaaatttattgcatgagttttcagctttcatatcagaatgccgccctgagtttttgcctttcacatttccagaacatttaaaattgtgttagcattgaacttttaatctggatccctg

SEQ ID NO: 13983 - DNA, 245 bp, Gossypium hirsutum
  unsure (1)..(245): unsure at all n locations; Clone ID: LIB3829-023-Q6-K6-E2
cctactctgcgagttaactcactggctcgcgcggggggcatcaccatcgactcgtcctcgtcgagttatcaaagttgcagcagcactcgactgtttttttttatccaannagancaccccctgtggggggggggggggataatnnnacctnnttntnattataaccattaacttataaaaataaanttccctaaanaccctnctccaacannatatcttatcatttntacctatcttaacactct

SEQ ID NO: 13984 - DNA, 580 bp, Gossypium hirsutum
  Clone ID: LIB3829-023-Q6-K6-E4
tcgctttctccatctttaagctaattggctacttaagcttcagtagttaagtttttttagcaaaaatgggggaaagaacattaaatccaccatttttttgttgaattagcagtcacctgctcaaacagtgatattgttgaagtgaaactcctgccatggctactagcagcaacaactccatagattcatcactgtccagccaaagattagtggggaaagtggcattggtcactggtggagcaaccggcattggtgagagcattgtgcgtctatttcacaagcatggtgccaaagtctgcattgttgatgtgcaagacaaccttggcctccaagtttgtcaatccctcagcaacggccctaacgtatgttttttccattgcgacgtgacaatagaagaacaagttcgggccgcggttgactacgcagttgaaaagtttggtacactcgatatcatggtcaacaacgccggattatcaggtccaccgtataacgatatccgcaactatgacttatctgatttcgataaagtaatgaatgtgaatgtaaaaggtgttttccttggaatgaagcatgctgctag

SEQ ID NO: 13985 - DNA, 561 bp, Gossypium hirsutum
  Clone ID: LIB3829-023-Q6-K6-E5
gttcataatggacttttgcgggggtgggggtgggttttgaaagcggagtgtgatatcttgaaggaattggtggagagaggggggcgattatactttgacgtttgcaggacattctcttggttcaggtgtagcagccatgtttttttttttggttgttcagcatcatgatagggggggggggggggcgacagaaggagaattaggtgttatgctattgcacctgcaaggtgcatgtcgctaaacttagcagtccgatatgcggatgtcatcaattctgtggttcttcaggatgacttcttgccacgaacagctacgcctttggaagacattttcaagtcggttttctgtttgccatgcctactttgtatgagatgcatgagggatacctgtataccagaggagaagatgcttagagatccaaggaggctgtacgcacctggtcgcctctatcatattgttgagcgaaagcctttcagattaggaagatttccccctgttgtgaggacagcagtgccagtggatgggaggttcgagcacatcgttctttcttgtaatgccacc

SEQ ID NO: 13986 - DNA, 242 bp, Gossypium hirsutum
  unsure (1)..(242): unsure at all n locations; Clone ID: LIB3829-023-Q6-K6-F1
tcgctgcctcgggggggggtgtttgatagttgggacatctattgttaccgtttaagacaccccaccaagccttttttttttttttttacncannaanncccnnctggggtggggggggggggccannnannaacccanatnntncttnccanggtcaagaaaataagtttccttcacccccgttgttttgtttttttgaaccttttgcgtttattgtgttggggttgatgtgttgtttgttg

SEQ ID NO: 13987 - DNA, 159 bp, Gossypium hirsutum
  unsure (1)..(159): unsure at all n locations; Clone ID: LIB3829-023-Q6-K6-F2
tacaatctactgggtgaggatgaaggggagggggggggtcaaagtgtctcatcaacttatatcaagggcactggagattccaggagctacttttttttttttttttcagcccnaaacccactttgtggggggggggcatntaactctnnnnnncccttc

SEQ ID NO: 13988 - DNA, 446 bp, Gossypium hirsutum
  unsure (1)..(446): unsure at all n locations; Clone ID: LIB3829-023-Q6-K6-F3
tttgttnnngttgttgtttgggtgggggggggggggaggggaaaaaatacaaaaaccaggtgggttaggtatgatgagtagtggtgggggaagtgaaacgattggagggttaagtagcggtgaagtgtcagttaccggtgaccagattttttttttttttgcggagatagctacacatgtggtgggggggggacttttancanctcatttntnttnttttnntgttgctacaccgattgatcagttgtctttgattgatgcacagttagcggagtcgnataacattttgagatcctatgcttgacaacaacaaggtgactgtttatgaccacatgaaagacaagagcttgataacttcttggnacattatttgatagngttgtgtgctttgaaagaacatgttcaacagcattttatattccatgccgttggatctgttattgttt

SEQ ID NO: 13989 - DNA, 573 bp, Gossypium hirsutum
  unsure (1)..(573): unsure at all n locations; Clone ID: LIB3829-023-Q6-K6-F4
taaggtgggggatgttaattttgataatgagaaatcaaanaagtgnngtttgaatttcggtgccatttcaagcgccgnaggnaagtgcacttttttaatgnagnaagccgagnnacgaacatnngttgctaatnngagtcctaaaaccgttttggaagcctcatacaacagggcttcatcaggggggtgtcgagactgggaagattgttactgaatggaagttcgggaaagatggaactgaaattacaatgagggatattgctaatgatagcaaaggagcacaattggatccatcgggggcaacatttttaggactcgacgataatcggctttgcaggtgggatatgcgagatcgaaacgggatagttcagaatcttgctactagtaccccagttttaaattggacacaagggcatcagttttcaagagggactaactttcaatgctttgcaacaacaggggatggttctattgttgtagggtcacttgatgggaagattaggctatattcaatcacttctatgagacaggcaaagacaggtttcccgggtcttggttcgcctatcactcatg

SEQ ID NO: 13990 - DNA, 511 bp, Gossypium hirsutum
  Clone ID: LIB3829-023-Q6-K6-F5
gcggtagctttcttggctgtcggcataatggggcgccggagactttcggatcaaaatcggatggtacaaaatctccaaatctctcctcattctttttttttttttcatctcctgagcttctcagggggggggggggctgccctttgggtcactttcatcggcggtatcatcatgttcaagaatctgcctaggcatcaatttggtaatctacaaagcaagatgttcccggcttatttctcgatggtgggggtttgttgtgccatatcggtggcggcatttggttatttgcatccatggaagtcagcgacgatgccggagaagtaccagcttgggtttttagtctctgcatttgccttcaatctatccaatttgttcgtttttactcccatgaccatcgagatgatgaagcaaaggcacaaagtggagagagaagcaaacattggtgatgaaattggatggtcgaagaatcaggaagctgcaaagactaatccaaagcttgcagccatgaaca

SEQ ID NO: 13991 - DNA, 561 bp, Gossypium hirsutum
  unsure (1)..(561): unsure at all n locations; Clone ID: LIB3829-023-Q6-K6-F6
cataatgnnaggggcagggatgggggagtagcagtgggaactccgaaaacgggnnattcagggaacccaaaaaaggggaagatggtgtgggggtgaatttcccaggtgccctaaagttcaaaactctttccaggtagggnnaagctttcccttggtgtgttgggtgtgtgctagtgccggnaaccccaaagtggctaggggcgagtgggcaggtggttggcaatngacaaaggtgatttgngactgcnntgactggtccccaaaggtagtaatattattatctacttggaggatagctgtagtgttaggtgtagggggtttagttttgaattcacaattgaaattattgctttgcttgctgaccgaataataaactgaaacatgtagttgtagttatagtgtatttgtacatgtataaattggatcaaaaagatacatctgatacgaccaatgtatctttttagtttgttctttggcatgaacattcatttttctgtattttgatcttcttgtaacaatagtactcatgttctcacgaatggaaacctgaaatttgtctct

SEQ ID NO: 13992 - DNA, 194 bp, Gossypium hirsutum
  unsure (1)..(194): unsure at all n locations; Clone ID: LIB3829-023-Q6-K6-G1
gcgtggggttccatgtgggggtgtcggggggggggttaaaaaatcctaagagagggggaagcccgtccgacagcgcgtgcagcgcgagcttcgaaagggatcgggtttaaattcctgaaccgggacgcggcggttgttttttttttttccgcagtcccgccacttttggggggggggggggaanacttatcttt

SEQ ID NO: 13993 - DNA, 568 bp, Gossypium hirsutum
  Clone ID: LIB3829-023-Q6-K6-G4
cacgcaaacgcagttttaggagcataaccatagttggggtgtccttgtttcttggtttatccattcctacttatttccaacagtaccaacccgagtcaattttgatgctgccaagttattttgttccgtatgcagctgctttagatggaccagtccacaccattaatgaggaggggggtttttctataaatgcactcttgtctatgagcatggtggttacactcttggtagcatttgtactcgacaacacagttccaggcagccgggacgaacgaggggtgtacatttggtcatgtgctgaagatgtcgcaactgatccatccttgcaattggattactctctgccaggaaaattttcctcactttgttgtcgttctagctgtttgcgggcataatactcagcagaaggtagcttgttcttcaacttgaagtttctttccgaaaaggtaagttttgttacggaagggcacttcctcaatagtacgcataaccaagctcgaagatggtttggctaagtgagagagatacaagtacatgataattcttttgcaacaatagaattagtaat

SEQ ID NO: 13994 - DNA, 621 bp, Gossypium hirsutum
  unsure (1)..(621): unsure at all n locations; Clone ID: LIB3829-023-Q6-K6-G5
tgcaaaanctggnaccactaggctgaggaggacccagcgtttcaactacgaagataatgggaacatatggnatatgcctgcacctggaatatgttagtgacnntggtcatctgacnntgcgaggagtgatgtataccagcttcggagttgtntcttttggtagcttttgtacgggnaagaaaaatctgttgtatgaggagggggacgcaagcaaggnnagcagaatnnttggtggattgggnngctcgcccaaaactnngaatgataagagaaaattactntcaaataattngacccaagaattggagaaccagtattcagcaagggnctgcccagaaggcatgcagcttggcatactattgtttgagccagaatccaaaagcaaggccgttaatgagtgatgttgttgaaacgctggaacctctacaatgcactggtggtagtgcagatgaagtctcctcgtctttgaactcaaaagtaacaggaggtagtgctggtccgtttgcaatgggtggagttccagattatcgagtgcgacacagattttcaaacaatgttggtccaggtgccatttgtaggtcgcctaatccaaattgttccccaggtggccctgcagcatgc

SEQ ID NO: 13995 - DNA, 598 bp, Gossypium hirsutum
  unsure (1)..(598): unsure at all n locations; Clone ID: LIB3829-023-Q6-K6-G6
ccgggttgacccagcgttttgggaaaggtggcagnacttcttcttggggtgggccaagcagnaactaccgttaagtcctacatgtgtagccaaagcttgcttaaccgtcttttccagatgttcgatcgcattgacccacctattcttttaaagattctgaagtgtattaattatttgtccactgatccaaactgcttaggggaggttcagcgagcagatgcaattaagtatttgatccccaatctagagctcaaagatggacctcttgtatcccaaatgcagcacgagataaataagaagagacaggaacaagcagcagaaaatggaatcgttccacacttgatgagtttcatcatatcagattctcccttgaagcaacatgcgttgccactactgtgtgacatggctcatgcatcacgtaattcaagggaacagttgagggtccatggaggattggatgtgttcttgagcttgcttgatgatgagctgtggtctgtgacagcattagatgcacttgctatttgcttggctaatgacagtgacaaccgaaaggtggaacaagctttgctaaagaaggatgcagttcacagattggtga

SEQ ID NO: 13996 - DNA, 341 bp, Gossypium hirsutum
  unsure (1)..(341): unsure at all n locations; Clone ID: LIB3829-023-Q6-K6-H3
ctctctctctatatatatatatatattgggggggggaaatanacttattaagttgataaaaaagaaaggaaggaaaagatgggnacacgttttttttttttttttcnaancaatgnncncatattgggggggggggggganncactnaaanaaancacccctcaatcccgttgcgggcagtaccttatacaggtggctgcgttnaaaaatccggagagctgggctaaattttctacttcccattgcttgctcattccccgttcattgctcctcctttttcttccatctcactccccctctcccttttcttctcccttttttttcctccctcacccttttcc

SEQ ID NO: 13997 - DNA, 565 bp, Gossypium hirsutum
  unsure (1)..(565): unsure at all n locations; Clone ID: LIB3829-023-Q6-K6-H4
gaaataacagtttatgtgcagggggtgaccttgtcaaaaaaagctggaatttttggaatatacagataattagtgccgaaggagttgtagaaaagccctaatttgtgtcggtccctttatttagtcctatataatgtatgttttttttacttgttgccttttaagagcttgctggggggggcagaccccccactctttatcttccctattttctacttgtttttgtgttcccagcacttgaagaatcttctcctttgcattctccaggngacccaagaaaaaagataattctggaattggagtcaagaggctgataatcggagttttagcaagaggtggttgcctgtcgaatctcgagatgtgttaatgtccattcctacaagattgtaaggttgtgtgttgggtgataagaacctgcatttgtaccaattcttgtttggtgtttccttttttttttttttctctggttaagttttatcaacaaaagtatggcttcacgagactttgttattgaaatggaaggatggaatatcgttagattgaaagtagggtaggaagttccttt

SEQ ID NO: 13998 - DNA, 670 bp, Gossypium hirsutum
  unsure (1)..(670): unsure at all n locations; Clone ID: LIB3829-023-Q6-K6-H5
tgaaagaaaaagctatnnactcatggcttnnncttcacaaaataagtgggaaggatggtnnaaagggccnngaatatattagnnatgagaaaggggggcaagnggtgtgnnctacacttnnnagcagcttgtcactttgtgnnttatgnannttgggncnnaataanatncctgacgtgtgtggggtgggtggnnagtgagncnnataaacnntttcgnntgatgtgnnaatggatnnggactgcacttnnncactgggctnngctttttgnntggcagagaagcgannnaccgttgnncaattcttagtcnntctgtgggaagcagnnctcctggnagccctcttacagnnacccnnatctccagnnaatttcnnctttgggcnnagaactcctnngctgacttggnncttctgcttnnnatggacacaaaggnannatctctggtnnntccttgcagnaaaatcttcctntgnannncagttacctnnttcttcactncnnacgatggatgaannncagaaggaagnnctgtaccaaaccagttnntctgnnatcgaatnnagcaactnntctgtnncaattattanngtgatgnnncgcaagnaaacatactgtncnnactgaaggnacnntcaattancctgctgtnnttgtaatggcttacacaa

SEQ ID NO: 13999 - DNA, 586 bp, Gossypium hirsutum
  unsure (1)..(586): unsure at all n locations; Clone ID: LIB3829-023-Q6-K6-H6
gcgttctggttngaggtcataggattctggcttggggctttagtaattcgaattcctcaatcggtaatgctttggtcactactaatttgccttcatttgtgccaccaaagnatcctgtgtttgaatgaacagggttcatagttggagttaccattggggctgtcttgcttgttagcttttgcatggcgaggtactttcttttggttagatttagaaggaaaagaaacggtaagaaagatgatattgaaacttgggaattggagtattggcctcacaggattggttatcaagagatctatgcagcaacaaaggcattttcagatgaaaatgtgattggttctggaggtaatgggaatgtctataaaggggtattgaaagaaggacaagaagttgcagtgaagaaaatttctcatgaaagtgagcatgggattagagagtttttggctgaggtttcaagtctagggagattgaagcatagaaatttggtgggactgagaggttggtctaggaacgataaagggagcttgattttggtctacgattacatggagaatgggagcgtcgataagagaattttcgactgtca

SEQ ID NO: 14000 - DNA, 432 bp, Gossypium hirsutum
  unsure (1)..(432): unsure at all n locations; Clone ID: LIB3829-024-Q6-K6-A1
ttctgcagnaacagnaatcaggtttgcaaaaaaagcagatgcttcgtgaaaaccctaacaggggaagaccataaccctagaggtcgaatccagcgacactatcgacaatgttaaggccaagatccaggacaaggaaggtattccaccggaccagcagagattgatcttcgctggaaagcagctcgaggagggccgtactcttgctgactacaatattcangaaagaatcaaccttgcatctggttctgagacttcgtggtggcattatcgagccttctttgatggcattggctaggaaatacaaccaggacaagatgatctgccgcaagtgttatgctcgtntgcacccccgtgccgtgaactgcaggaaaaagaagtgtggacacagcattcagttgaggcctacgaagaacattaagtcgatcacatatc

SEQ ID NO: 14001 - DNA, 348 bp, Gossypium hirsutum
  Clone ID: LIB3829-024-Q6-K6-A2
tctcttgaattgctttgaggggtggggaggcctaaaatggatcatagagacaggcagtctattgaacatcaaaagaaagacctcaacaacacccccacccatgttttactaatttcacaactcaccatcagcagcagaaatgggaagatccttccctattagattacagcaccggggggggacctcctttccaggcattcaacccaaactgtcaaaccaaatcttcatttgcgtgtgaccccaatgaccaaatgaaggtccctgaccctattttgaatgagttgcttcaagccagcggagtgcaagattgggatccaagtgctttgctgtgcagtctgtcattgttgg

SEQ ID NO: 14002 - DNA, 581 bp, Gossypium hirsutum
  unsure (1)..(581): unsure at all n locations; Clone ID: LIB3829-024-Q6-K6-A3
tgggtgactttgggggaggggggcaggttacaggnccatgtcaaaacgcagtacatttattggcactccacattgggtggcaccagaagttattcaggaaagtcgctatgatggaaaggttgatttatgggcacttggtatatctgcgattgaaatggcagagggactggggggaggagcagcagtgcatccaatgagggttatatttatgatatctattgagccagctccaatgcttgaggataaagaaaaaggtctcttgtctttcatgattttgttgctaagagccttacaaaggatccacgtctacgccctactgcatctgagatgttaaagcacaaattcattgagaaatgcaaatgtggagcttctgtaatgttgccaaagattgagaaggcaaagcaaataagggctgcgatggttcaacaagcacaaattcttgctcctacaatttctgaacctaatccaatggtaggttcaaatttaaatgatgattatggagatactgttccatcaaggcctcaggatatgggtcttcaagttgcaaatgaagcttctacaactggtactttgaataagca

SEQ ID NO: 14003 - DNA, 582 bp, Gossypium hirsutum
  unsure (1)..(582): unsure at all n locations; Clone ID: LIB3829-024-Q6-K6-A4
tcggtcgcttcctgnctgtcttgtttaaaagcctgtcgttttgggtttctttgtgggtcttatgatgctgggtttggttagctctgctgagtttcatgagctttttcaacctggttgggcaaacgatcatttcatctatgaaggagagcttcttaagctcaaacttgataatttttctggtgctgggtttgcatcaaaaagcaggtatttgtttggaaaagtatccatgcagattaaacttgtagagggtgactctgctgggactgtcactgcttactatatgtcatcggagggtccataccacaatgagttcgacttcgagttcctgggcaataccacaggtgaaccttaccttctccagaccaatgtgtacgtgaatggtgtagggaacagagagcaaagaatgaacctttggtttgaccccaccaaggacttccactcttactgtcttctttggaaccagcgccaagttgtatttctagtggatgagacaccaataagagtgcacaccaacatggaacacaaaggaattccttttcccaaagaccaagccatgggtgtttatagctcaatctggaatgc

SEQ ID NO: 14004 - DNA, 600 bp, Gossypium hirsutum
  unsure (1)..(600): unsure at all n locations; Clone ID: LIB3829-024-Q6-K6-A5
cccggttcgacccagcgtttctggnaagtttcggtgtgggaataatctcttacacggtgcctgtgtatatagctgagaagcacccgaaacttgagaggcagcttgggttctgtgaatcagttgtctgttacaactggaacaatggtagcctatttgctgggactttttgtggagtggaggatacttgcaattttaggaggtgttgcttgtacaattttgattccaggtctatttttcattccagaatctcctagatggctggcaaaaatgggaatgaccgaagatttcgaagcttctcttcaagttcttaggggtttcgataccgatatttctatcgaagtcaatgaaatcaagaggtctgtagcatcaacaaatagaagaacaacgatccggttcgcagaactcaaaaaaaaggagatattggtttccattgatggttggaattgggcttcttatgttgcaacaacttagtggcattaatggtgttatattctattccgctaccatattcgaaactgctggaattaaatcaggcaatatagctacctttggagttggcttcattcaggtcattgctactgctttaaccacatggttggt

SEQ ID NO: 14005 - DNA, 308 bp, Gossypium hirsutum
  Clone ID: LIB3829-024-Q6-K6-B1
ctcaagctcaacaggaggttgatgagggaagatgagacatgcatggtggtgcgcagagagtacaatgcgctcagcagtgataaaaaaccgatgtccgagacacagacggtggtttttggcgatggaatgtactgtgttttataaaaaaaaaaagacatttgagagtaggagggtcaaacattgttgtgttttggtagtcctttattttttgtttttaatagtgcaagtattttagtaattgcaatggtgttatatgttctgaaacctgatactaagtatgcaacgatttagatttggaacttgacctt

SEQ ID NO: 14006 - DNA, 545 bp, Gossypium hirsutum
  Clone ID: LIB3829-024-Q6-K6-B2
atcttgctcatgttttactgctcccaagaggtaggactggacttgttgtcggaatctagtcaagctgccaaatctgagttccatgatggtcaatgtcatgtgatttccagacaggctcagaattcgctggttgacccatataggttcaaaacctcccacgcatttcccaattctgctgcaaatggtgcaacaaaggaagagccatcagatgaatgcaataccaaagatatttctacttatgcagaagcaagttccattgtagatagtgttttggaagctgaagcaaacaagacaacatttgatcagatagaatacggaagtgaagatgatgttcctagcttttctgatcttgaagccatgatacttgagatggatttatgtccagatgaatctgattctttcattaggagcgaagtctcaagatatcaagatgagcatacaaggaagacactcattaggttggaacagtgtgctcggtccgctatgcaaagagctactacatctcgaggggcacttgctgttttatatggccgtcatatgaaaca

SEQ ID NO: 14007 - DNA, 599 bp, Gossypium hirsutum
  unsure (1)..(599): unsure at all n locations; Clone ID: LIB3829-024-Q6-K6-B3
ccgggtcgacccagcgtttctccggncttcccaaacaaactaaaggcggaatcaaacgccatttaaacctttattttgttcccctttcggctttatataagagggttaattttctggcttccctcttcgcttcccgttcttattctatcctcgctgttcgcagattcctcagagctccgattacgatggctgctggggggggtccaatgtcgtcgctctaaaacccgccgcgaggcttgctgatcctactgaccgaaaatttgttcagattcggcaatggtctccgatttccgccggattcggatcggttcaggctcggccctgcatcggtctccagtgccaatcgaaacgatcatttgcgtcccccggtgtaaaagctcaggttgccactgttgaacaagccagcattgaagcagctcaaaacgtagaagctcccgtagccatagttactggagcttctagaggcatcggtaaagcagttgcgttggctttaggtaaagcaggttgcaaggtcctagtgaattatgccagatcatcaaaggaggctgaagaagtctcaaaagagattgagtcgtatggtggtcaggctgttacttttg

SEQ ID NO: 14008 - DNA, 606 bp, Gossypium hirsutum
  unsure (1)..(606): unsure at all n locations; Clone ID: LIB3829-024-Q6-K6-B4
cccggtcgacccagcgtccggtccaactccacacccaccaccattggctgtttgtaatcatccgaaaaagatggtgaccgtgngaagaagttcgtaaggctcaacgtgcccaaggccctgccaccgtgttggccatcggcacatcaaccccgcctaattgtgttgatcagagcacataccctgactactatttccgtatcacaaatagtgagcacaaaaccgagttgaaagagaagttcaagcgcatgtgtgaaaaatcgatgatcaagaagcgatacatgtaccttacagaagagattttgaaagagaatcccaatgtatgtgaatacatggctccttcactggacgctaggcaagatatggtggtagttgaggtgccaaagctaggcaaagaagcagccaccaaggccattaaggagtggggccagcccaagtccaagatcacccaccttgtcttttgcaccactagcggtgtggacatgcctggggctgactaccagctcaccaagcttttaggcctccgcccctccgttaagcgcctcatgatgtaccaacaaggttgcttcgcaggggggacggtgctccgagtggctaaggacttagctg

SEQ ID NO: 14009 - DNA, 572 bp, Gossypium hirsutum
  Clone ID: LIB3829-024-Q6-K6-B5
tgggttccacgctcgtcttgccaggaggtggatgagacttgataacttctatcaacaactcattgatgaacatcttaatccgagtgggctaaaaccagagcaagaggacatactcgatgtgctattacagacatggaaggatcgtgattttctatttgatcttaccctagatcacggggggggtgttattatgaatgttctttttgctggaacggagacaacagcggttactgtgatttgggtcatgagcttcttgatgaaaaatccagattgtttgaagaaagctcaagaggaagtaaggggtctgattgggaaaaaaggatttctaaatgaagatgatgttcaagctttaacttacctacaggctgtggtaaaagaaacatttagattgcaaccagcagttccattgttgctaccacgagaaacacttcgaaaatgctgcataggtgggtacaaagtacctgccaataccttggtgcacgtgaatgcatgggcaataggaagagaccctgaagcttggaagaatcctgaagaattttgtcctgaaaggttcattggcagctctattgact

SEQ ID NO: 14010 - DNA, 589 bp, Gossypium hirsutum
  Clone ID: LIB3829-024-Q6-K6-B6
gtcgacccagcgtccggccgtttgtgcttctcaaaagctctgcttcgagttcacactgtgattgcaaatgccattgctgccatgggggattctgaaaagaacggacagataaatacagggaggaatgccaaattcttgtcccatctagccaatcttctaacatcattgggaaggcgggttcaactattaagaaactgaggggcaagactcaggccagcattaaagttactgctaaggatgctggtgatccaagtcattcttgtgccatggattttgacaacttcgttcagataattggtgaaccggaggctgttaagaaagcactttttgctgtttctgcaatcatgtacaagttcagtcccagggaagaaatccctcttgagacaacagtggcagaagctccttcagctcaaagtatcattatcccatcagatgttcctatttatccaccaggtggcttatatccgaatccagatcctattcttccttctagatcagttccacctatattgggtgctgcacatgtgtcagatcttcaaggatatggtgatacagggagtacctggcccgtgtactcatctgctcttcc

SEQ ID NO: 14011 - DNA, 547 bp, Gossypium hirsutum
  unsure (1)..(547): unsure at all n locations; Clone ID: LIB3829-024-Q6-K6-C1
ctccanataccattattccctagaggggcactggcaccctccttgtctctccccaaacccaaagaggctcttttcgtcttgctgctgaacttatnncaccaactctnngttccctcaagnaaaatggaaattatacctgtgngnngtgattttatgtacctaggaaagaggatttacatgttgtcagggctacaacaagtgtggatgaagcattggaggcacttgtggagaagagagttactggtttcccagtgattgatgatgactggaatttggttggcgttgtttccgattatgatttgttggcactcgactcgatttcaggtagcagtcaaaatgacacaaccttgtttcctaatgttgatagttcttggaaaacattcaatgaaatacagaaattgatgaacaaaaataacggaaacgtggtcggagacttgatgacaccttcaccgctcgttgttcgtgaaacaacaaacctggaagatgctggtaggctattgctcgagaccaaatattggcgactacccgtgggagatattgatggcaa

SEQ ID NO: 14012 - DNA, 532 bp, Gossypium hirsutum
  unsure (1)..(532): unsure at all n locations; Clone ID: LIB3829-024-Q6-K6-C5
gcgtgggnagatcatgcggggggggttcttcaacaaacatggaaaacaacccaggagcagcaggcccttcttctgcgtgggtggttccaagccaatcaatgagtcaaccactgatttctatcaacatgaattccacaaacctgagttcacaactggngatatctgaaaccagtgcgggggggggaatagttggacctgaatcagctccatggcaagaaaacaggttgcttgttgatgattcttcttttaggtgtgtgttcccttgtgaagggaacgagagaccaagtcaaggtctttcgctctctctttcatcaagtaatcctactagtatcgggttacagtcttttgaactaagacaaacaagccatagtaaccatgatgaccagccagatgatatgaggtttattggttcaagttcaagagatgggttctttggaaagccggcaattgttcaacaacatgaaggtcagttccaaataaggggttccaggtacttgaatgctgctcaagaacttttgaatgaattttgcag

SEQ ID NO: 14013 - DNA, 584 bp, Gossypium hirsutum
  Clone ID: LIB3829-024-Q6-K6-C6
ttcatctttacgccattgggagggtatcccaatcctgcttattacccttcaattcactactaacatggtcttgagcggagttgatgcaccatttgacaaccaaagaacattgagtacatcaaatcttcatgcagctccacaacttatcccagactgtgctatcgctcactgtggatctacgcaaacaaaatcgacaccagccccagattgttagtggatactgccctcaatgttaccctcaaggccagcaaatcaacttcaaggttgatggtgaagatctctagaatccacggtttgaggcctagggtagctgctgccatggcagattgcattgaggtgatcggtgactctgttgatgagcttcaacagtctatagaggaacttggtcacgttagccgctcaaattttgcgcttacaatgagtgatattcaaacttgggttagtacagcgctgacagatgaagatacttgcatggatggatttgcaggaaagtccatgaatggaaatgtaaagactatggtaaggaaaaggattgttaaaattgcacatttgacaagcaatgccctggctctcgtcaacaacta

SEQ ID NO: 14014 - DNA, 476 bp, Gossypium hirsutum
  unsure (1)..(476): unsure at all n locations; Clone ID: LIB3829-024-Q6-K6-D1
ttttcttccgccgttctaaatcacgagggggttgggagaaaaacttttggaggtgcaaaacatggggccgaagaaggtggaaaggtggctgtgcccgccaagaagaaacaagagaaggttgtcaatccgttatttgagaagcgttcaaagcagttcggcattggaggggctttaggtggggggaggatttgcatcgattcgtgaagtggcctaaggttgttcgtattcaaaggaagaagaggatcctcaagcagaggttgaaggttccaccagcattgaaccagttcaccaagactcttgacaagaacctcgcaacaagtctgttcaagttgctcctcaagtacaggccagaggacaaagcggtcaagaaggaacgtnttttgaacctagtccaggtccgagttgaaggaaaagtccccggatctaagaaaccaattgttgtgaaatacggtgttaaccatgttccttaccttgtc

SEQ ID NO: 14015 - DNA, 608 bp, Gossypium hirsutum
  unsure (1)..(608): unsure at all n locations; Clone ID: LIB3829-024-Q6-K6-D4
tccgcaataatgggnaatttatagtatctttcaagcttctaattcacccaccaaccataaaggagcagttgcagttagacagccttatatccggatagtgggaatggaagagacgaatgaagccagctctcgagggcctgccacattcacccaagaagaggtagaagagttcaaaaaatttgcctcaaatcaagatacatatgaagccatatgctccaaggttgctccttccatatttggtcacgaagatgtcaagaaggctgttgcttgtcttctctttggaggagccaggaaaaatttgccggatggggtgaagctaagaggtgatattaatgtgttgcttcttggtgatccttctactgccaagtcacagtttctcaagtttgttgagaagacagctccaatagctgtttacacttctggaaagggctcatcagctgctggtcttacagcttcagttattcgagatagtagctctcgagagttttatcttgaaggcggggccatggttttggcagatgggggtgttgtatgtattgatgagtttgataagatgagaccagaggatagggttgctattcatgaagctatggagcagcagacaatat

SEQ ID NO: 14016 - DNA, 577 bp, Gossypium hirsutum
  unsure (1)..(577): unsure at all n locations; Clone ID: LIB3829-024-Q6-K6-D5
ctttctaaaaatacaacaaatatgtgggtagnggtatgatggcaggatgattcagggnaagaaggaagagatgtcnaaaggtgaaaatcatcagcacaagtcatgtngaagcctgngaaaggatgataggaagaaaagaatgtcaattggttacttttgatctcccatatttggcattctattatgggggggagctgttgttttacaagtgtggggagtttgaggcgaaggtggaaaaactcaaggatgggctgagagtggttttggaggagttttatcagctagcaggcaagcttggtaaagatgagaatggggttttcagggtggaatacgacgatgatatggacggtgtagaggtggtggaagccaccgccatggagatcggcatagaggaactggcgactgaagacggcactgcctctttcaaggacttgataccctacaatggtgttttgaacttggagggccttcacagacccctcttgtctgtgcaggtaaccaagttgaaagacggagtggcaatggggtgcgcattcaaccacgccatccttgatggaacttccacttggcatttcat

SEQ ID NO: 14017 - DNA, 583 bp, Gossypium hirsutum
  unsure (1)..(583): unsure at all n locations; Clone ID: LIB3829-024-Q6-K6-D6
gcgttcggnctgatggattaaagctgcaggatggggtttgtaatttcactgaaggtgccatgtattcttttcctcaaaacactgaccagcaaaagctatagaagctgccaanacaggcaggaaaagtcccagatgttttctactgtctcaagttgttggaggcaacaggcatctccactgggcggggggtgcggattcggacaaaaagaaggggtgttccacttgaggactacaattctacctgctgaggaagacatgcctgaaatcatgtcgagtttcaagaaattcaacgacgagttcatggctcaatatgaagataactggaatcattcaaggatgtgaagcatgtttagaagtccttaatactgtatttatctattaactagctatggcaaaccactctataatacgttgtaaaactttgttcatgttctccttgtccttgagctgtaaacttaaatcctactgaagatttgcccctgcttctctctttcctttttctctaatgacatctctcatggaatctctactactgaattatggatctcttttgcaaaatcaaaaaaaaaaaaaaaggcggccg

SEQ ID NO: 14018 - DNA, 436 bp, Gossypium hirsutum
  unsure (1)..(436): unsure at all n locations; Clone ID: LIB3829-024-Q6-K6-E1
attgcaatcattaaaaatctggggggtgggagnaggcaatggactaaataacaaatcgaagaaccagtcaaccatggnaggtgggtggagggaggagatgaaagaccaaanaaaagtcannatcaaatggcggtaagaacgaaactaatggttacaatgtttttgttataaaanaacangtggtgtttatcaactggtgggggggggggaaggctttctcaaggcaatatgcatctgagatatggcctcacatcgagaaactggatgcagaggtattcactgaagatgcccatcctcttttccggaaagctgtttattctggccttcgccggctgagcaatgagttgtaactgcatgacttgctgtgtaacttaatccagtctgaacatgaatcggtactacccttctttcaccctacaatttttttgatgtgcat

SEQ ID NO: 14019 - DNA, 521 bp, Gossypium hirsutum
  unsure (1)..(521): unsure at all n locations; Clone ID: LIB3829-024-Q6-K6-E3
attaaaaacaaccgaatggggggggggggggggggtgagaaaacataaacacccagtgtggtggaccaacagggtttgggggggtctggcacantattttgctccctcattggtggtaaaatttttgctggagaaaccttcttttttttcgtccannaccaacccctcttttgggggggggggtctctncccttcttccttctttnactccncatactaagaataagttccagttgtttaanctggtgcgggtcaggttctatttacttatggatgaataattcgttgcttatcatgaacggttcaagccgtcagatgataatgccgatgaagatcgatgtatagttgatgatttgagatgtttgccaatgagtgtgggtaatttggaggagttgatcgatgataattatgctattgtttcgtcctcgtttgcgccggatttttacgtttggattttattttttgcggattcggatctttcggagcctgtatgcgcttttttgttgccctactcggttctt

SEQ ID NO: 14020 - DNA, 281 bp, Gossypium hirsutum
  unsure (1)..(281): unsure at all n locations; Clone ID: LIB3829-024-Q6-K6-E4
cactattttgtcacacgcttttgtggcttttgcatagtctattttctctttctgccggnagtcagnaaccaccacacgcaatgacccagnacccagggnaccaggtttaatggcaaatgnngagatattttcgagagatgaaagggatataaatagagaatattaaagacttacatttcaattatgtgttaatttcaagatttatgtaatatttttaattatgtagtgattcaaagacttatgtaatgtttttaattatgtagtgattcaaagatttatgt

SEQ ID NO: 14021 - DNA, 565 bp, Gossypium hirsutum
  unsure (1)..(565): unsure at all n locations; Clone ID: LIB3829-024-Q6-K6-E5
cacgcttgcgacatgnatgcgcgtgggccgttgggagaggagttgtgtccctttgatctggcgccggtcacttccactgggatccagatgctatttggcgacaccgtggctattgcgcttatgggagctaggagcttgactttttttcaatacgcggccaatcatcccgctggggagggtgggggaaaagccttattttcaaggtaaaagatgtgatgaagaagaaagatgagcttccaatttgcaaggaaggcgatttgataatggagcaactggtggagctgagtagcaaaggatgcggatgcttgctggttatagatgatgaatatcacttgcttgggacatttacagacggtgatttgcggcgtactcttattaaggccagtggagaagcaatattcaagctcagagttggagacatgtgcaacagagaaccgagaaccattggtccggatgcaatggcagtggaagccatgcaaaagatggaatcaccaccttctcctgtacaatttctgcctgttattgatcatcaaaatgtcttgattggcattatcacattgcatgg

SEQ ID NO: 14022 - DNA, 410 bp, Gossypium hirsutum
  unsure (1)..(410): unsure at all n locations; Clone ID: LIB3829-024-Q6-K6-F1
cctgctggcacctcaaaagggggggggggggggtgagacagcgcaacactaacgctgcgtaatgtctggccatggnacaggggagacagggtcagatcttctagtagtttgttttcatcattgcagcgcatttcttctgccaaatgattttttttttctgnggngagggaagattagggggggggggggggggggtgcatttgaagaccatacgacntatatttatctacatgttaactaaggccagatctagtaaaggctgcttaatgctgaaggctgaacactgaacacactagttttggtgatatcttgcctagtgcttggtcctgcaactgtgtacagtgtatgtgatgtgaagttgagtggtacgttgggtttggacttggttttggggattgagtgagtatgcc

SEQ ID NO: 14023 - DNA, 524 bp, Gossypium hirsutum
  unsure (1)..(524): unsure at all n locations; Clone ID: LIB3829-024-Q6-K6-F3
cccacnaaaagaaaatcttgtgtagttcttgtggggggtattttcttcatagccaagttgacccctttttcttttttgcgtgtcttacacatttttttttttttttcnccgcncaaactcactttggtggtcgttggggggntctctcanntctnccctctncctcntaacgattggtttgtatactgttggtnaacacagctttttccttctctgtcgttgatggcttgcttcgtgtccttccttctccctttccttgtccatgtctgctttgtgtgttttttttttgtttcctctccctttcctgatttggtttccttttctttttctctgctctctccttgtccccttcccttttcccctcccgtcgtttttttttcctcttccctcctctcctctcctcctttcttttctcttcctctccatttcctttcctttcccccttcctctttcccccttctctcttcttcttttcttctcttctctttccctttccttttcctctttcccttttccttcccctc

SEQ ID NO: 14024 - DNA, 587 bp, Gossypium hirsutum
  Clone ID: LIB3829-024-Q6-K6-F4
gcgttcgctctgtttgcctttgccttatgcatcttcctctttctttaaaacctcttcctatttaatttccgactaaacttgcgctgaattccatggctactgcagaggttgtatcagctcagactgcaatccatgagggagaaacctgaagaagtggtcaaggttggagaaattgcaacagaagagggaccggctgttgctcctgcagcagaacctgttgctgaagaaccaaaggaagcagtgcctgaagcagcatccggagaaccccaggctccagaaactgaagccacagttgaaactgaatcaaaggaggtggttaaagagcccaaggctgtgactgaggagccagaagttgagaaaaaagaagaagagactcctaaggaaacggtagcagagccagttgccgaggagtccaaggagtccaaggagacttctgagccaacagttgaagaaaccaaagaaagcacagagtctacagaagcagcagcagcagcagcagcagcagcagcagaagtaaaagcagaagccgaagccgccccagtggaagcacccaaagaggaagctgcaaaggaagaagagaaaccagc

SEQ ID NO: 14025 - DNA, 575 bp, Gossypium hirsutum
  unsure (1)..(575): unsure at all n locations; Clone ID: LIB3829-024-Q6-K6-F5
tgcggncgcgtgggtttgaattcggtgcattcaacgccgcagaaggcacttttaatgagagccgancgaacatgttgctaatgagtcctaaaaccgaagggaagcctcatacaacagggcttcatcagctagatatcgagactgggaagattgttactgaatggaagttcgggaaagaggggggcggaaattacaatgagggatattgctaatgatagcaaaggagcacaattggatccatcgggggcaacatttttaggactcgacgataatcggctttgcaggtgggatatgcgagatcgaaacgggatagttcagaatcttgctactagtaccccagttttaaattggacacaagggcatcagttttcaagagggactaactttcaatgctttgcaacaacaggggatggttctattgttgtagggtcacttgatgggaagattaggctatattcaatcacttctatgagacaggcaaagacaggtttcccgggtcttggttcgcctatcactcatgtcgatgttaccttcgatgggaaatggatattgggcacaactgatacatatctgat

SEQ ID NO: 14026 - DNA, 227 bp, Gossypium hirsutum
  unsure (1)..(227): unsure at all n locations; Clone ID: LIB3829-024-Q6-K6-G1
aaaaactaattggcgcatacaaccttttgactgggggggtcttaaatagcttttcagctgagagaaaccactcccgttgaattgccacccactgttttttttttttcnacnatngctnnnnaaagtgggggggggggggganataaananannaancttaaaatgcacaaagatagagataaagagaaggataaagagcataagaagcacangcaccgtggtgaaga

SEQ ID NO: 14027 - DNA, 98 bp, Gossypium hirsutum
  Clone ID: LIB3829-024-Q6-K6-G2
catggggtgccggccgtgttaagggtggtggtgtcggatctcgctggtgggctgctttttgctcctgaaggggcgggggtggtttttttttttttttt

SEQ ID NO: 14028 - DNA, 581 bp, Gossypium hirsutum
  unsure (1)..(581): unsure at all n locations; Clone ID: LIB3829-024-Q6-K6-G4
ttcggnaccaacttcttgattgtgtgacaaaattccttgctgatcctcagacagaaggcatcattctgattggtgagatagggggcactgcagaagaagatgccgctgcactgataaagaagtgggactgaaaagcctattgttgctttcattgctggactcactgctcctccaggacggcgtatgggtcatgctggagctatagtatcagggggcaagggcacggcacaggacaaaataaagactctaagagaagctggagtgacagttgttgaatcacctgcaaagattggtgttgcaatgcatgaggttttcaagcaaagaggtctccttaattagtgtgtgtgtgattttccctagaaaaagaaaagcaaaacaatatttcctggattagtttcaggtgacaaacttgttcgaaatgctttcattgtttttgtgaaaaatcaattttatactgaaatgagggaaaaacccaaccaaagaaaagcaacagtttgatggttgggtcgatgcaaaattaataaacctgagaaggttgagacttttgatgaagggagaaagttcattttcagccatttatt

SEQ ID NO: 14029 - DNA, 575 bp, Gossypium hirsutum
  Clone ID: LIB3829-024-Q6-K6-G5
ttctcacaggtttggtgccactgtggatgtggctcaacccaaaagggtcaatccgttgcaatatttggactaggtgctgtcggtcttgctgctgctgaaggagcaagagtttctggggcttccaggatcattggtgtcgatttgaacccttgcagattcgaactagccaagaacttcggggggacggagtttgtgaatccgaaagacacaacaaacctgttcaagaggtcattgctgagatgacgggtggaggagtcgaccgcagtgttgaatgtaccgggagcatccaggccatgatttctgcatttgaatgtgtccacgatggttggggagttgcagtgcttgtgggggttcccaacaaagacgatgcattcaaaactcatccagtgaatctactgaatgaaaggactctcaagggtactttctttggcaactacaaacctcgaactgatattcctgctgtcgttgagagatacatgaacaaggaacttgaacttgacaagttcatcactcactcagttcccttctctgagattaacaaggcatttgagtacatgcttgctggcgagggcctg

SEQ ID NO: 14030 - DNA, 577 bp, Gossypium hirsutum
  Clone ID: LIB3829-024-Q6-K6-G6
ccggttcgaccccgcgttcgctctctcatcctgcttctggtcaggcggcgcaagggctccccttttagctcacagctctctcgagttctgtaatgggtaaggagaaggttcacatcaacattgtggtcatcggccatgtcgactctgggaagtctacaaccactggtcatttgatctacaagcttggtggtatggggcgggcgtgtgattgagaggtttgagaaggaggctgctgagatgaacaaaaggtcatttaagtatgcatgggtgcttgacaagcttaaggccgaacgtgaacgtggtattaccatcgatattgccctctggaagtttgaaactaccaaatactactgcactgtcattgatgcccctggacaccgtgacttcatcaagaacatgattactggtacctcacaggctgactgtgctgttctcattatcgactcgaccactggtggtttcgaagctggtatctcaaaggatggtcagacacgtgagcatgctttgcttgcgtttacccttggtgtcaagcagatgatttgctgctgcaacaagatggatgcaacaactccaaaat

SEQ ID NO: 14031 - DNA, 383 bp, Gossypium hirsutum
  unsure (1)..(383): unsure at all n locations; Clone ID: LIB3829-024-Q6-K6-H1
tctttggttggtaacgttggttatatgggggggggcatcatttgggttttgcttcttctcactttgaggatagaatcttgctctagaattattttttttttgctggccctgntttcattgtggggggggggggacannantcaancnnnatnnttnnacctttgtactttgtgccctttatggatacttgattgggtttttttgatgctaattggacatggttttataaacttaaaacattgcgagttttttttggcgcaacaagggatctgcatactaattgaatatataaggacacccnatgttgttcatggtgcactgatggaagagttggatttggtctaaacccatggtcggttttttgggaagctgtttggtttttt

SEQ ID NO: 14032 - DNA, 526 bp, Gossypium hirsutum
  unsure (1)..(526): unsure at all n locations; Clone ID: LIB3829-024-Q6-K6-H2
ttttcattggcactctgcatctgtggtgggggggggttttctttatggctaatcattcgctttctgtttctcgcatctttatgtttttcaccgattcatacaccagtcgaaatcttttatctttgtgattgcaagaaaaaatttttgaaagatgggaaaccctcttcagcgggggggggggaaccacatctcccttgtgtgtagatcagttgaggaatccatgaacttttatcaggatattcttgggtttgctccaatcaggagacctggatcatttgactttaatggggcatggtaattattaccaaaaagaaataaaattgttcttcatgtnaagcttaatttgtttgatgaaattcccaagaaaccttgggttgatttttcagtatataatatgagtgggttatgatgcaggttgtttggatacggaattggaatacatttcctgcaatcggaggatccagagagtttgcccaggaaaaaggaaatcaattcccaggataatcacatttctttccagtgtgag

SEQ ID NO: 14033 - DNA, 354 bp, Gossypium hirsutum
  unsure (1)..(354): unsure at all n locations; Clone ID: LIB3829-024-Q6-K6-H3
gcctggggggggggggtgccaaaaacttgctgttaggttttctatataaagttggggggggggtagtttttatttttcttcttagggaaataaggtattatttagttnncaataaaccctttttttttttgtnnccgnattctcccntgttggggggggggggcgtttcaatnncnattttnnatattantntaaagaagagaatatgaaagcttggtagggatgaatcaacccaaaattaaaggaagagtgggtaaataccaagtgggaaggaccattggagagggaacctttgctaaagtgaagttcggangaaattctgagactggggaaccagtgggtcttatgatcctt

SEQ ID NO: 14034 - DNA, 586 bp, Gossypium hirsutum
  Clone ID: LIB3829-024-Q6-K6-H4
tcggccgccgcctgcgtctctctcttcatctctctgaaccaaaagtctttagcttttcgcttcgagagagaccatgttggtttaccaggatctcatctccggtgacgagcttctttctgactcattcccctacaaggaaatcgagaatgggatgctgtgggaagttgagggaaagtgggttgtgcaaggagctgtcgatgttgacattggtgccaatccttcagccgaaggtgctgatgaggatgaaggtgttgatgaccaagctgtgaaggttgttgacattgttgacactttcaggcttcaggagcaaccccctttcgacaagaagcagtttgtcgtgttcatcaagaagttcatcaagaacttgacaccaaaactggatgcggaaaagcaagagtccttcaagaaaaacattgagggagcaaccaagtttttgctttcaaaattgaaggaccttcaatttttcgtaggagagagcatgcatgatgatggatgcttggtgtttgcttactacaaggatggtgctgttgacccaacatttttgtactttgcatatgcattgaaggaggtcaagtgctgaggtttg

SEQ ID NO: 14035 - DNA, 579 bp, Gossypium hirsutum
  unsure (1)..(579): unsure at all n locations; Clone ID: LIB3829-024-Q6-K6-H5
tcgcctaatttacttcattttgtgggtctggggatgttttactacctactccaacagtttctcaacgcagctgtacagtgtggaaacaaagggatactaattgttaataatataaaaaaaaacgtcaaaggaaaaagagaactttttgttctccaacagaacgctattggagggggggggggggagttgcagagctctatttcggtttcagttatggttacggatcggagagagactatggtctgcccaaaaccacgtcgtttgggtctcttaaacgcctctttcaacgacctgccagttcggtccctcagatggcaacttagccatcaaactgagctttgtgattcgaaagcagggagtgatattttggatatgattcttacaaagggtggttgtagagcagaacaagtagcgtcgtcgcccccatttttttgtgggtcgccgccgagtagagtagctaacccattaatacaggatgctcgatttggggatgagaagatggtcaacccgccgtctccaaatccgccttctccttcgtctncgtcatcactttcaaggaaaggagggtgtattcgggcc

SEQ ID NO: 14036 - DNA, 599 bp, Gossypium hirsutum
  unsure (1)..(599): unsure at all n locations; Clone ID: LIB3829-024-Q6-K6-H6
gtcgacccagcgttctctcgattcccaagnaacctaatttttgtgggatttgtgattttgattcacctttgcaaacaaagatgtttgtgagggtggaagtcaaattagagatattttaaatgacttgagctctaagcttgagcttatttctatagagaaaaatcagcccctaaaaggaatattccagaatatggtggggccgagtcttcattttccagcatgtctgatccatctgatacctcatcaggttcgagtaagaatgttgtaggtggtgttcaggatgtagttgatttgcgtgaagatgtttatgaagaagagtcaaaaaagcttaatgtcaaattggtgtctgcaaggcaggtttttgattcaaatgttgaagaaaaagaagaaaagagtgaatcacagagtgactttaggaatgacacttttgttactagggtacatgaatctaagaaaaacttccaaaggctaaagaagaatgaacctaagaatgcatatgagcgattgatgtctgtgggtaggtcatttgcatcaaaacatggagaaaaagaggatgacaatgattgtgtagtattgagttcaaagcaaggatttaaaaa

SEQ ID NO: 14037 - DNA, 589 bp, Gossypium hirsutum
  unsure (1)..(589): unsure at all n locations; Clone ID: LIB3829-029-Q6-K6-A1
naaaaaaatgtgaatggaatctcccaacctggtgtggaaaattacccctggagaagtatttagcaccgtaacctatattgaaatgctacatactggtgatggatttcacttcaatattttaagattatttatttgaatttgcaggcaagctcatttattgaacgagttgtgcaagatgaaagccagatggaaggcttaccacacgactgctcaaaagtcatggtttgggaactaaatgttgaatcatctaattctttctatcccaaaaaatggtcaatgaagaataatttagacatcattgctccacttgcatgaaactcaatatgtcaaaggagttaattttgatcatcaaggtgagtgtcaatttctttttcaagtaatcaaagtaaatgctaaattttttttcttttttgttttgcctatgacatgctaaaaatctacatggaaataaaagtaattttatattaacttgaattccagtatattcatcattgaagtgagaagaaagaatatacagngaaaacaaacaacataatgaaaaaccaagctcttttagctgtattacctctttcatattttccttttccat

SEQ ID NO: 14038 - DNA, 607 bp, Gossypium hirsutum
  Clone ID: LIB3829-029-Q6-K6-A2
ccgggtcgaccccgcgtccgctcttgtcatctcctccgccaaactttagacccttgcggctctcagccagatgactcggaccttttggtcatcccaatctatggcaaatgttcaccattcaacccacccaaacctgactcatggttcaacacagtcatgaacatggcatcaaaagacccagcaagggtcaagtacttgtcgagccttctagcccaaaagaccactgcggttcccattgcttcaggccaacaagtcctaaatattggcaactatgtcgtccgggtaaagattggcactccgggtcagctcatgttcatggtattggacactagcaatgatgtggcttgggtcccatgctccggctgcaccaggtgctcagccaccactttctcacccaacacttcttccacctatggttcgttggattgcggtttgccccaatgcgcccaggtccatgggctgtcgtgcccggctacggggtctgcggcttgctcttttaaccaatcctacggtggagattcatcattttcggccaacttggttcgagattccttaggattagccaatgacattgtcccagattttgcttttggatgtataaacgcca

SEQ ID NO: 14039 - DNA, 590 bp, Gossypium hirsutum
  Clone ID: LIB3829-029-Q6-K6-A3
ttcaattcagcactagcatattttgtgaatttgaccaactttttggtcacaaaacacaccagtgccctgactttgcaggttctaggaaatgcaaaaggagctgtagctgtggtggtttccatcttaatttttagaaatccagtctctgttaccggaatgcttggttatacactcacagtctttggcgtaatactctacagtgaagccaagaaacgaagcaaatgaggcaacatcccgggaccacaatacatacgtgcaatttttcttattttattgcaaggacaacggtaaagcccaagaagcagttctggctgtgtagaagcctgtggtgccatggatttgcactatagattcaaaattttccctgtaagcctggaaaactaggttttatatatcatatatacatagatatctgtcagaaacatcagctggattataaaaaaaaaaaattagagaactcccataagtgaccgaacggtctctatcattcccagcttggggttttagaggaatatcttctttttcttttaaaaggaaaagtctgtagaattgacacacagtccatttgttatcaacattgctaatatttt

SEQ ID NO: 14040 - DNA, 599 bp, Gossypium hirsutum
  unsure (1)..(599): unsure at all n locations; Clone ID: LIB3829-029-Q6-K6-A4
cccacgccgtcccgtgtggtgggctgtttacttttggnacccctgcannagcgtgatgcatnnttctggctcatnngaagctacaaagaaggttcacnnatcaagccatnntgggttnnctcatggnaaatnntgcttgcactaggtnnncttcacatgaaactgttcaatnngtgaggaagnngcgtatcacgnnnatctttacaagnannaatcccttgaagaaaaatnngttgcgcnnaccataccaagggnagaagtacncnngcaagctnntttggtcccactttgnnttagtgcnnattccgatacccagggnagaaggnagnngtgaacatgnnnacactggcannaggtcggaggggcaaagatanccttcgtgagaaagaatatcagacaanngcagtaccagtgatgnaaggaggtcatcaggnaattgtaaccaacacggagtaagggcacangttaaatggctancctctgaatcattaccaatannctgcatttgggaaaatggctatcannacaaggaatttgaagggcnncgaccctgnaagaacnngaattcctnncaaatnntgctgagaagnnctgcaatc

SEQ ID NO: 14041 - DNA, 326 bp, Gossypium hirsutum
  Clone ID: LIB3829-029-Q6-K6-A5
ctgcgaacaatctagattggctctttgtgttagtaaagaatcgcgaactgctattgttcgctgttgggccgtgggatgtggtcagtgtaacctcatagcctgtctctagctacgctaaacccgtgaaacacctgaatgcccttgtgatgctgcgtaatcccaactctaaccgggcaaatggttaaccaggtaaccccggacaacagtctcccacacatctcctactacttcagaggtcctccgttcggtccgcctcccctcccccgtgatccttactcttgtctgcgtgtggacgacaagaaccttcctctctgaactggacctta

SEQ ID NO: 14042 - DNA, 596 bp, Gossypium hirsutum
  Clone ID: LIB3829-029-Q6-K6-A6
cccacgcccgtccgcaaaaaacgaaacacaagcgcatcgactatggatgacgcggagggaggtctcagcttcgatttcgagggcggtctcgatgccggtccccccgcccccactgcctccatgcctgttgtcaattccgatccttctgccgccaacaataccaacaattttaccgcccctggtggtgtccaggcttcgataaatgatcccgtcgcaaatcaaggtggtggagctggccgaaggagcttccgtcagaccgtgtgccggcattggctccgcagtctctgcatgaagggtgatgcctgtggtttccttcaccagtacgacaagtcccgcatgcccgtctgccgtttttttcggctttttggtgagtgccgggagcaagattgtgtgtacaaacacaccaacgaggatatcaaagagtgtaacatgtacaagctaggtttttgtcctaatggtcctgactgccgatataggcatgcaaagctcccaggacctcctcctcctgtggaagaagtcctgcagaagattcagcagttaagtgcttacaattataacaacaaattttatcaacagcggaatgctggcttccccca

SEQ ID NO: 14043 - DNA, 576 bp, Gossypium hirsutum
  Clone ID: LIB3829-029-Q6-K6-B1
ggttattgtagcagaaggtaatcatgtttttggtgtttgcatttgcagcaataagcagagggtatggacaagaatcaaccactcttgttcctgcaatcatcacctttggtgactctgtggtagatgtgggcaataatgactatctccctaccatcttcaaggctaactagcctccttatggacgggactttgccaacaaaaagcctactgggaggttttgcaatggaaaattagccactgacatcactgctgaaactctggggtttacaacttatccaccagcttaccttagcccagaagcatcagggaagaaccttctgcttggagccaattttgcttcagctggctctggctatgatgacaaagctgccatggtgaatcatgccatcacattgacccagcaattagagtatttcaaggaataccaggcaaagctagcaaaggtagcaggcagcaccaaatcagcatccattaccaaggatgcactgtatgtattgagtgcaggaagcggtgacttcctccagaactactatgtcaaccctctacttaaccatgcctatactccagaccagtacg

SEQ ID NO: 14044 - DNA, 589 bp, Gossypium hirsutum
  Clone ID: LIB3829-029-Q6-K6-B2
cttctgctatcaatttccatgaagccttctttattcttatcagtctggttgtctccgccgccgtttctccatttcgcgacgaacatagcttagaacagcacccagcagatatggtacttcggtgtgaataaccgtctttgatgccaagatctcgccccccacatctcgtattaccagtcccaaaatagatttggaagatcgcttgtcaaaggctgcatcaaaataaattgtcaccctcgttctcctttcagtttgtggcctctgtctatttttaagattgaccatagtccgcagcaaaagagacgacactgttggctagtcccctgactaaaaacccagataagccactcccacttgctttgaatgacattattaactacccaggatgatttaaattcatccatacttcaattattgtaggacaatattggaaaatttaattgttgtcttcctcagagttacgacatcggggacaatgaatttccacaaccacttttttatgcttgagattagttaaaatagagatataattccaggagattcttcatattgtaattttaactttcgaaggaagatgtaaattccatat

SEQ ID NO: 14045 - DNA, 563 bp, Gossypium hirsutum
  unsure (1)..(563): unsure at all n locations; Clone ID: LIB3829-029-Q6-K6-B3
aactacaccggtccacagttgngaggattattgaatgcaacatgtgngaaatgcaacagagctgataatagctttatttgctctctaccgaagcaaaaacatgttctcaagtactctcttctgggttccattctctccaatctcctccttgttcttggctcctctctcctttgtggaggcctagccaacctcaaaaaggaacaacgatatgacaggaagcaagcagatttgaactcttcgctgctgttgctgggattgctttgccacatgttgccattgatgtctcgatacgcggcagcgccaggggttttgattgctgactctacacttcagctgtcaagagcaagtagcattcttatgcttgtggcttatatcggatatatcatcttccagcttaaaactcataggcagattttcgactctcttcaggaagacgaagaagaagaagaggaggaagaaaaggcagtgataggattttggagtgcatttagctggttggttggtatgactctcatcatagctttgttatctgagtatgtggtgggcacaattgaggctgcttc

SEQ ID NO: 14046 - DNA, 574 bp, Gossypium hirsutum
  Clone ID: LIB3829-029-Q6-K6-B4
cccacgcgtccgctcttgagcagatccctttctggagaaggggcaatatggtccttcagtttcttcttttacaatagaaagttgaagcgtgttgtgagtttcagcttttgctgcttaagtaatttggtgggtgatggattccttgttgacaacttatgttctgaggaagatggtgaaatatttgataacatggacatgtaaccattaacatgtacatcctgcttgtacgtgtactgtagaaacccttagatatggtgtgtagttgtgtaattgcaatgttgctcacattgcgctagctgagtagattagctcttctatgtcgctgtgtacatgtagtaggtagttatgccatatgaaaatggaaaattgatattgatgtctgtaagaatgtgtggagtttgaatttaggttgatgaagatgttgaagacattataacttacctgactagctagctttgcgcctttgctgatagtcttatgtgctgatatatgttacaaacggcagctgattcttgtagaattgttggaaatgtagtgtgctattggatttgtgtcaaaaaaaaaaaaagggcgg

SEQ ID NO: 14047 - DNA, 566 bp, Gossypium hirsutum
  unsure (1)..(566): unsure at all n locations; Clone ID: LIB3829-029-Q6-K6-B5
gnagnaggggttgttatttcatggggcaacaatcgttgatctacgccttcgtggcacgaggcaccgtggtcttagccgactatacggagttcaccggnaaacttcaccggcatagcttctcagtgtctccagaaacttccttcttcaaacaacaagttcacttacaactgcgatggccatacctttaactatctcgtcgataacggcttcacttattgtgtggttgctattgaatccgttggcagacaggttcctatggcatttcttgagagaattaaagaggatttcaccaagagatatggcggaggaaaagctgcatctgcccctgcaaacagcctgagcaaggagtttgggccaaaattaaaggagcatatgcagtattgcattgatcatcctgaggagatcagtaagattgccaaagtgaaagctcaagtttcagaagttaaaggagttatgatggaaaacattgagaaggttctggaccgtggtgagagaattgagcttctggtggatagaacagaaaatcttcgttctcaggcacaagattttcggcagcagggaaccca

SEQ ID NO: 14048 - DNA, 565 bp, Gossypium hirsutum
  unsure (1)..(565): unsure at all n locations; Clone ID: LIB3829-029-Q6-K6-B6
ctaccactatgtctcanatgtcatgaatggatttgaccctgaatggttgccgtttacaagtctcttgtctcagaatttgctgtctttgatcggtggttcgcctccgtaccgtcatccacacaaccgaatcgtctgtacgtccactcggcgacgtcggcgggggcgacgagcaacattccggcactcctggtaaagggttatccccaaaggacgatcttcgagaacctggacgacgccggaatatcctggggaatatactaccagaacatcccagctacattgttctacaaaaacctcaggaaactcaaatacttatttagattccgtccgtacggtgtgacattcaaaaaacatgcgcaagaagggaagctgccgggctacgttgtggtggagcagcggtacatggacactaagctggagcccgccaacgatgaccatccgtcgcacgatgtgtatcaagggcagatgtttgtgaaggaggtgtacgagacattgagagctagcccgcagtggaaccaaactttgttgatcattacatatgatgaacatggtgggttttatgatc

SEQ ID NO: 14049 - DNA, 591 bp, Gossypium hirsutum
  unsure (1)..(591): unsure at all n locations; Clone ID: LIB3829-029-Q6-K6-C1
cggntttcagtattctcttcattcttttcccgggnacccanacaaactctaagaacagaaaaggcaccaaaagctgagaagaagccagctgagaagaagccagcggaggagaagaagaggtagctgagaaagcccccgctgagaagaaccaaggcaggcaaaaagcttcccaaggaaggcggagctgcggccggagacaagaagaagaagagggtcaagaagagtactgagacctacaagatctacatcttcaaggtcttgaagcaagttcaccctgatatcggtatctcaagcaaggctatgggaatcatgaacagcttcatcaatgatatctttgaaaagcttgcccaagaatcgtctaggctcgcaaggtacaacaagaagcctaccatcacttccagggaaatccagaccgctgttaggcttgtacttcccggtgagcttgcgaaacacgccgtttctgaagggaccaaggccgttaccaagtttacatcttcttgaaaaatgtgatttgtggttagggttagggttttcattttaaaagtagatcgcgttgtttttctcttccgttgtgaatcattctgctcttct

SEQ ID NO: 14050 - DNA, 600 bp, Gossypium hirsutum
  unsure (1)..(600): unsure at all n locations; Clone ID: LIB3829-029-Q6-K6-C2
canattcgagttgactcaacttctttctggtccatatgacaaagaagtgcagtcatctctataactgctggtgctggaggcaccgatgcacaggactgggctgacatgcttctcaggatgtacacgagatggggagagaaacagaaatataagacaagggttgttgaaaagtcattgggagaggaagccgggattaagtcggtcacaattgaagttgaaggcagatatgcttatggctatctatctggagagaaagggactcatcgtatagtacgacagtctcctttcaatgctaaaggtcttcgtcagacaagcttttccggtgttgaagtaatgcctcttctccctgaagattcggtagatgttgaattacctgaggaagaccttgaaatttcattttcaagggcaggagggaaaggaggtcagaatgtgaacaaggttgaaaccgccgttcggattactcacatcccgactggtgtcaccgttcgttgcacagaagagagatcgcagctagctaacaagatcaaggctcttaccagattaaaagccaaattattagtgatagccgaggagcaacgtgcattcgaaatcaagccaaat

SEQ ID NO: 14051 - DNA, 583 bp, Gossypium hirsutum
  unsure (1)..(583): unsure at all n locations; Clone ID: LIB3829-029-Q6-K6-C3
cggncgcgtgggctccatttcattttttattttatcttttttctttgttggaactcaatagtattgatttctttcatggcgaaaggccggcgactgtccaccagcagaagcgaacggtacctcgggagtttcggttacggtcacaaccaagtggaaaccgtcacggacgaaacggaactcggcgaggaagatgtctggtccatggttgataccgtctcagaccgacccgaccagggtgacggtaatccgcggagcgagtggactacacgcgtcgagcatgagagtaatgggaatgagcacctgggccgccgccgaatccctcgagatgagcgccacgtgggcgggttgtctttggctttcgaggattcttcttcgaccaagcctaggatcgtgcaccagtttcgcggccacgacaaggtggcagccgctgcttcgccacgtggacacaagatggccacttcagcgccagtgaacgtgcctgactggagtaagatttacagagtggactcggtggagtctatacatgactcggatgattgtgagtcggaggagatgatgccgccgcatgagtacttagcacgtg

SEQ ID NO: 14052 - DNA, 572 bp, Gossypium hirsutum
  unsure (1)..(572): unsure at all n locations; Clone ID: LIB3829-029-Q6-K6-C4
ctggctttctttgcacagaaggacatgctggtcaagggaatgacagaaaacatacaaagagtggatattgaagacaattgaggatacttggaatcttttccaccaaagtttaccgcactatgggacgaacacaaaaatggctctggggaggcttatcttcctgcaatttataacaatcctgagcttcagaaacttatacagngaaaagtatatgaaggaattgttccacgatactcttggttttggtgctgctaagatgataaggcgaattgtaggtgttgctcatgttgaggattttgaatcaattaaagaagctaacataagagcagattgcgagcgacgggctcttgaattaggcaagacacttctaaagaggaggcgagagtttgtgtctattagtgaagttatttcagccatgaagcacgtctaatcatgatggaaatgatggaaactgctgtgcacgtatccataaaacttttgcgcttaaatagatggaaggttttacaggatccataatttaataaagttttcatggtccttttagcataagcctttgattgtgtttaatgagc

SEQ ID NO: 14053 - DNA, 595 bp, Gossypium hirsutum
  Clone ID: LIB3829-029-Q6-K6-C5
cttttggggtctgttgttctgagcccaaatctccgtccccccccccgactctctctccgtctttctcctctcctgcaaaaccctagatctttcaccccttcaacgtcgttttccggccttcttctcgctcccagatcgcttctcgtttgggctgactgacaggaatggcagaaattacggaagctacaaatatggaaacaaccccggtggagaataacaatgagctggctctcatcactcctgaaacacagcctaagcgaaggaaaaagaagtccatggcctgggagtacttcaccattgaaactgtgagtgctggatgtagaagagcatgctgtaaccgttgcaaacaaagtttcgcttatagtactggttccaaggtagcagggaccagccacctcaaacgtcacattgctaagggtacctgtccggcactcctacatgaccaatataacaatcaattgaccccatataacccgaagaccggaggaagtgaaccacgaaagcggcgctacagatctcccagttcacctttcataccattcgatcaggaccgttgccgccatgaaattgcaagaatgatcataatgcatgagta

SEQ ID NO: 14054 - DNA, 583 bp, Gossypium hirsutum
  Clone ID: LIB3829-029-Q6-K6-C6
gctttgcatcaggatttgtcatctgattttctttgtacaagttaacaagtgacgattctatagttttcagttcgcgtctcacagagatacagattacagaagactgcggtaggaaatatattcaaagttcagtgtcctgcatgttcaagatggctggtgttaaacgaagaataattactgatttggatgtacgtgctctccataaagaactggatgaagtctcatgtccaatctgcatggaccatccacataatgctgttctgctgctgtgcagctcgcacgacaagggttgcagatcttacatttgtgacacaagttacaggcattcaaattgcctagaccgatttaaaaaattcagggctaattctagtaatggaagtcaaaatctgaatgaaaccaatagcatggcaggaggatcagaagataatatccgagagccaactaggaatcttgattcacaaggagaaggtattatagaaatagcagactcttactccttccggggaagatctgaatccgaagatgtagatgctgagaattttaaatctagtttgaaatgccctctttgccgagggaacgtact

SEQ ID NO: 14055 - DNA, 590 bp, Gossypium hirsutum
  unsure (1)..(590): unsure at all n locations; Clone ID: LIB3829-029-Q6-K6-D1
tggtcccccagnaaattcagaagnaaactagattaaaacaccgacggcgctccaggtcaaagtctactggatggaaaacatcgatccattgataaagtagatgaaagatcaaaacgtcatgacaaaaagcatttagcatctggtgaagctcagcctcctagaggaggcaggtcttcaccaagaagttctgaagacaatgattcgaggcacagaaggcattcaaggtcaaagtcagctgaaggggatgatggaatgctggtttcaaaagaggaggcttatgacttgaaagtttcagtgaatgatgatcaggagctgagaagcaaatatttaccaaaatttgacagtgatgaagggcactcaccaaatagcaaattgaatgcagatgaaccagacagacttgaaagatcaagtagtaagcagtggcttggtagtaatgggtcaggagatcaatccatttctcctcgtcagaaatgagccgtgggcttaatgtgttactgaacctggggattttttagactaaagctgttccaagctgtctgactcagtctcacctttagcctttgatcaattcaagcttgttcagatatgaa

SEQ ID NO: 14056 - DNA, 597 bp, Gossypium hirsutum
  unsure (1)..(597): unsure at all n locations; Clone ID: LIB3829-029-Q6-K6-D2
ctctcacccagttttgttggttcttccacaacanaagaggacttaattttcagtccattggctcaagaaggttatttttatatacgtgaacatcacgaagatgagtcgcagaaatggtcccaagcttgagttgaagctcaacctatcaccaccaaggtttaacccaagagtggaatcaccaagccgatcggctaccgtgtcaccgacatcgcctccaagctcatgcgtgtcatcggagatggaggatgacactggcagttgtagtgaggcaacaacaacatccatggttcttgtggggtgcccaaggtgccttatgtatgttatgctatcagaggatgaccccaaatgccccaaatgcaagagcactgttttgctagatttccttaacgacactgccaccgctgcctccaccaagacaagaaagagcagctagaacacactgcagcctcacccctgccctttccctaattttaatgttacagctctctttgatagtgctatttgctctccacctttagtttttgacctttttctttataaactccactaacgatagaaaaaaaacaggtggagcaccaatagcagtgatcttttcct

SEQ ID NO: 14057 - DNA, 581 bp, Gossypium hirsutum
  Clone ID: LIB3829-029-Q6-K6-D3
ccgattcgaaaagttgtcccttttgttaaatggctagacgatgagctctcctacttggtcgacgaaagaccgtgctaaaacatttcgaatggccggagcagaaggctgatgccttacgcgaggcagcattcggctactgtgatctcaagaaactagaatccgaggccgcatcatttagggatgacgctaggcaaccttgcggttcggctcttaagaagatgcaggctctgcttgaaaagctcgagctcggtgtttacaacctctctcggatgagagaatccgcaaccaagagatacaaaggtttcgggattcctacggattggatgctcgaaaccggaattgtgagccagatcaagctagcgtcagtgaaactagcaatgaagtacatgagaagagtatctgctgagctcgaagctgtcgggggtggacccgaagaagaagagctgattgttcgaggtgttagattcgcgttccgtgtacatcaggttaacgacattctcattaattcatacgagtttaatctaccaactttgctttttcaaggattgagaagacaattaaaaaaagaaaccgtatttttg

SEQ ID NO: 14058 - DNA, 573 bp, Gossypium hirsutum
  Clone ID: LIB3829-029-Q6-K6-D4
agcgtccggtcccctcgtctccactctttcagccaagagtaaaccaagttgcagcgcataaagacacgccaccgcttctgcagcaaaggcggatgttgtttgttgaaagcggcatcgaaattaattttttgtctcgatccaaccggaccaacccaacttcctacacagagacgttcaacaggacattcgtagaacaagtgttccctcgattccacaccgttttggcaccaactacagtagcagatcctctcaatctccgatattgtaggttactgaaagcagggaagaaattacgtgaaacacgccaaactgtaatctctattttagagggtagatctaagttccatagctttttgtaaaattgtttgtaatttgtctgtaagtcattctgatcattgtataagagaagtttatgcctactctgcaccgaatattctccagtcgggtcaccccgccaaataacaaagtcctcatgctcatacaaagacaaaggaatgcatagaatttgctccacttcctgctccgagaagggatccaagcgtcttcccaaatagagacatgcttgccattact

SEQ ID NO: 14059 - DNA, 507 bp, Gossypium hirsutum
  unsure (1)..(507): unsure at all n locations; Clone ID: LIB3829-029-Q6-K6-D5
gnacccacatcgtggtcatgctcataggcaacaaatcagatctccgacaccttgtggctgtcccaactgaggatgcaaaatcctttgcggagaaagaatccctctacttcnatggaaacttcagccctggaagcaacaaacgtgngaaaacgcattcgcagaagtgctgacacagatctatcacatagtaagcaagaaggcaatggagacaagtgatgaaggggctgcttcagctgttccatccaagggggagaaaattgatgtcagtaaagacgtgtctgcaatgaagaaagggggttgctgctcgagctaagggatgaagaagatgttaaaacctgcagtctctgattgttttaagggatgcaggcatggatggggatttcattgtaaaccttgggttctgtaaaatttttctcaaaaaggtaccctatagtaggatatgggtggactggagattgatttaatttacataaaaaaaaatcataatggctgttaatttgagtagac

SEQ ID NO: 14060 - DNA, 576 bp, Gossypium hirsutum
  unsure (1)..(576): unsure at all n locations; Clone ID: LIB3829-029-Q6-K6-D6
agnaaaagnaaggagggagttttaggcaagtggtggatgggattctattgctaacattcgtgtccatgtcggtggtgccagcgtgcttggacgcccaggtacttttgcctaaagcgcttttccccgatgtgctgggtcgtgtatattcatggtatacgaccacataccaagattatttgctgttggatgagcctcattttttcatggcacttatgaaattggagcttgttttagtattgccgcttgctatacttaacacttatggcttgttgacctccaagccctggttcaacaccacctgcctcatcttcggttctgctcttgttacctccacgacagctatggtgggagacatgctgggatccgacaaaccatcagcaggtaaactggcgtcgatgtactcgccttttataggatttgggttcctagccatactgcgagggctgctttcggaatcccccaacgcttccaaaaccatggccaacggaccaacgtcggctttgaaaaagaaagcctgaagttgacacatgaattataaaacatcatcttcttccttgaaatgcgatatccatgtta

SEQ ID NO: 14061 - DNA, 573 bp, Gossypium hirsutum
  unsure (1)..(573): unsure at all n locations; Clone ID: LIB3829-029-Q6-K6-E1
naaactttcanacatattacctgagatcctaactccatggtggtaggagcttcatttcatgaaaagnaacacaattttaatgaatcatttgatgcttcagagggagaagaaactaggaatttccctgcagtgtggattcggtggaaggagatgctaacctttctgttcttccatctcatgttgctgataatttggacatcaaggatcatgtgagcttagatgatctagctactggaaatgctcttgcagaaagtgtcgtcgtctctactgctgcttgtggttctgctgactttgatgatgctgttgataatactacttttcagacttcaaatttgattggttcggcatctggaaatctaatgtatttggaagagtctccttctggtgatggagatctatgtcaggaagaattggaatctaatgaggttatttctcaaggatgtcttacaggcttagagacacgagaagaaacaaatccagtggaaggtgctccagcagatatagtttccacttcatgcaaatcagtctctcacaactgttccaatttagaagaagatagtcagcatttatcac

SEQ ID NO: 14062 - DNA, 551 bp, Gossypium hirsutum
  Clone ID: LIB3829-029-Q6-K6-E2
cttcaatcaagtttgcaatttccttctggatcaagtatcgtataacttgatctcaggaaatcaaaaagatttcctttttgtttccgtttttctaataaaaatggatgataaactatcatttacaacagaggcactgggtagtagttcatcgagtagtactggtctggcttggaagcaccatcattgttgttttgagagcttcaaaagcatgtgtggtatgcagaataataatatagtatccaagaaaactattcccagataaatatttaagattgaagaggctgaagatatctttctggtatagaagcaccaacaggctcataagcagtttgttgtcgttgccggtggaccaaccatatgccaatagctgataaactgagaatcagagttgtgacggatccaactaacattatcagaaagcgatgttgccacgatgtcaacttcctttggggttcggcattccattccatcaacttataatttccaaatctctcaggtaactgtattctatgatcccttaagcgcaggatgatgctccttgcaatggtatt

SEQ ID NO: 14063 - DNA, 577 bp, Gossypium hirsutum
  unsure (1)..(577): unsure at all n locations; Clone ID: LIB3829-029-Q6-K6-E3
cactcattagcctgtctctcatggaacccatatgagaacaaatagagagtgcttcaaaaactttcaaagagatgatatctactctccctaaaganaattgttggggtattcctgaagctctatatcaatatcagggtttttggctcacccccccttttctacaaggagcattgtcggctcaacaacaattccaggctcaacccactgatatcatcctttgtagctctccaagaacaggtgcagcctggttaaaatccctcactttcgccactattacaagaacttcatacaatgattccaccacccctttactttccaagatgcctcatgatgttgtgcctttcatggagttcgatcatgcccagttttccactaatcgacatcttggaattcctcttttagccactcatcttccttattccttcttacccagatctataattgattctggttgtaaacttatttacatttgcagggaccccaaagatacatttgtttcattgcatcatttcaatgcaaggtacaacaaatcccaaaatactcaacccgttcaacttgatgaagcgttcgaattgtt

SEQ ID NO: 14064 - DNA, 555 bp, Gossypium hirsutum
  Clone ID: LIB3829-029-Q6-K6-E4
gcaaactcagggtctctatgaggagttcaaagatcatccaaactgtagccgtcttattgcggattccctagatccttctggtggagttttgcctgctcaagtttcaaacaagcttaaacagttaggacttaaagttgcaccaaagaaaaggataaggaatgatggtagaaatttcacttccagttctgatcaacaagggggtggaagcactcttaatgattcaaataatttagaaggaagttcacagaggcaacctctgaacaccaggaaaagagtctctgcctttagcaaggatcaggaggcaatgattaaagatctatttgagcaatttaaagaccataagagatgtagttacatgatcgcaaatgcattggatgctgataataagtttactgctgcccaagtttcacgcaaactcaagcaactcggtttatatgttcctaggcagaaaaagtctaaagagaatatgcatttgagggatgaggaattaaatgatttatctgcaaatgaaatgcatgactcggacaatgagacattgctatcatttaagaacag

SEQ ID NO: 14065 - DNA, 578 bp, Gossypium hirsutum
  unsure (1)..(578): unsure at all n locations; Clone ID: LIB3829-029-Q6-K6-E5
naaaacagttgcttcacaatggcctctacaaccatggctctttcttccccatcattcgccggtaaggcagtgaagttctccccttccacccctgaaatccggggaactggccgtgtttccatgaggaaaaccaccaagcctgttccttctggtagcccatggtacggtcctgaccgagttttgtacttgggtccactttccggtgagccaccatcttacttgaccggtgagttccctggtgactatggttgggacactgctggactctcagctgatcccgagacctttgctaggaaccgtgagctcgaagtcattcactgcagatgggccatgttgggagctcttgggtgtgttttccctgagctgttggctaggaacggtgtcaagttcggtgaagctgtatggttcaaggccgggtctcaaatcttcagtgagggtggacttgactacttgggtaacccaagcttgatccatgctcaaagcattttggccatctgggcttgccaagttatcttgatgggagccgtcgagggttaccgtattgccggtggaccactcggtgaagtgactgacccatt

SEQ ID NO: 14066 - DNA, 576 bp, Gossypium hirsutum
  unsure (1)..(576): unsure at all n locations; Clone ID: LIB3829-029-Q6-K6-E6
ctaanaagcacagtcccttcanaagactccatccaatgctccacanagtctgagatggttcctcaaccctaaagtgatgatgacgagaactcaaagggatggtgacggtgatggtaataatggagagatggaaggcgacactgcacttaaaggtacccttttggctggagttttacttgtgggtgttgttggtggatttgctagtgtcggatatgtctacaaggaccagatcaatgctttcttgaaccagttctccacttttattgaaggttatggacctgctggatatgctttgtttgtggcagtttatgcaggattggaagtccttgctattcctgccattccattgactatgtctgctggtcttctttttggttctgtcattggcaccattttagtctctatcagtggaactgtggccgcaagtattgcctttttgattgctagatattttgctcgtgagcgtatactaaaactggtagaggggaacaaaaagttccttgcaattgacaaagcaattggagaaaatggcttcagagtggttaccctccttcgattgagccctttgctcccgtt

SEQ ID NO: 14067 - DNA, 566 bp, Gossypium hirsutum
  unsure (1)..(566): unsure at all n locations; Clone ID: LIB3829-029-Q6-K6-F1
ataacctggcacgaagagtcaagttttgggttcctggccgagtccatttgcgatgaggcctaggattgcccttaacctcaaatccctcacctatgaatacanttgaagagaagttatgggaaggcaaaagcgagcttcttctccaatcaaaccctgtttacaagaaaatcccagtcctcattcacggcgataacaagccaatctgcgaatctctcatcatcgtacaatacatcgacgaggcttggtcttccggtccttctattcttccttctgacccctgtgaacgtgctgtcgctcggttttgggctgcatatcttgacgacaagtggttcccagcggtgaaaagtataggagtcgctaaaggagaggaagcaaagaaagcagcaatagcgcaagtggaagaagggttggctttgatggaagaagcatacgacaagtgcagcaaagggaagggttactttggtggggatgaagttgggtaccttgatatagcttttgggagcttcttgggatggcttaaagtgacggagaagttcaatgcgatgaagctgttggacgaggggaag

SEQ ID NO: 14068 - DNA, 314 bp, Gossypium hirsutum
  unsure (1)..(314): unsure at all n locations; Clone ID: LIB3829-029-Q6-K6-F2
attgacttagcaaattggcctgctacaatcatgatcaatgtttgctaagatatggttgagacttctgtagagattaaaatttgtttcccaaattattctggtatttaagattgaatgcgtagaatatgagatattatgtaatgttgtgataagngaaaataaatatgcgttactctttttcctttaaaaaaaaaaaaaaaaaaaaaaaaaaaaaaaaaaaaaaaaaaaaaaaaaaaaaaaaaaaaaaaaaaaaaaaaaaaaaaaaaaaaaaaaaaaaaaaaaaaaaaaaaaggggcggccctttttaaaagaac

SEQ ID NO: 14069 - DNA, 582 bp, Gossypium hirsutum
  Clone ID: LIB3829-029-Q6-K6-F3
ataaacagtgtcctcctgacacccaaggcgtctgctaaaggcttcacttttgctgaggttggttgtatacagacaagaaatagcgaagttacttgctgtcatttttcttctgatgggaaggtgctggctagtgctgggcatgacaagaaggtggttctttggaatatggataacctgaaaacagagagtactccagaagaacacaaattggttattacagacgttcgttttagaccaaattcatctcagttggcaacagcttcttttgataaatctgtgcggttatgggatgcagccaatccaggctattgcgtgaaagcatacaatagccatccttcacctgtgatgtcccttgatttccaccccaaaaagacggacttgttctgcttttgtgataatgacaatgaaattcgctattttaatcttaatacattctcatgcacccggatatccaagggaggtatggcccaagtaaggttccaaccaagaattggacattttctggcagcagcatcagataaagtagtgtccatctttgatgtagaaactgatagacaaacattaacatttcaggggcattca

SEQ ID NO: 14070 - DNA, 589 bp, Gossypium hirsutum
  unsure (1)..(589): unsure at all n locations; Clone ID: LIB3829-029-Q6-K6-F4
gnaaaaaagctctctcattaacactttttcttttcttcttgcaatgcctccaatctaggccgaaagggagaaaagaaagctgtttcagatcagtatcccacccacattatcctattatattcctatccttgttctccttgtcttcgccatcacccaaaatgctcacccagttttttttcattgccattctttcttcactcctactgcaggtggccaaaccagatcttgtcaccgacagagcttctcttttgagccttcgttcctcagtcggaggcagaaccctcttatggaacgtctcgaaccagagtccatgctcgtgggctggggttacgtgcgagcggaaccgcgtcacagtgcttagactacctggtgttgctctctctggccaaattccgactggcattttcgggaacttgactcagctgcgcaccctcagtctacgtcttaactcgttaactggaccactcccttcggatcttgctctctgtcaaaacctccgaaacctttacttgcagggaaaccatttttcgggtgagataccggaattcctgtttggtcttcatgatttagtgaggctaagtctttctgg

SEQ ID NO: 14071 - DNA, 587 bp, Gossypium hirsutum
  unsure (1)..(587): unsure at all n locations; Clone ID: LIB3829-029-Q6-K6-F5
cttccgttggngacatttctggnagacaaatttctagaagggaatcaaccttcactcccggtaggataattgctcgaaatcagaattctagaaaggaatcaaccttcgcttctgataggatcgttaccataaatcgaatttctagaagggaatcaacctctacttctgatggggtcattacgaaaaaccaaattactcgaaacgaatcgacttccatttctgatgggatcatttctagaaatcaacattctagaaaggaagctgctgctgctaatgatatgagtggaccaaacggtctatatactgaaaatcaaatttctaggaggggattcaattccggtaatgatcggaatgttactaatatcgaaagccaaatttcaaaggacgagtcgatatctactaatgacggaaacctgaccgaaagtctcatgcaaacgcatgatacattcgtaagtactcttcggtcacgcttgacaaagttacaggtggtgcggcatttttgggaaaagaagacattaaaggttccattggtgcactgcgtaaactgccagatcattctgtgcaagctgatgttatcggtgttctca

SEQ ID NO: 14072 - DNA, 584 bp, Gossypium hirsutum
  unsure (1)..(584): unsure at all n locations; Clone ID: LIB3829-029-Q6-K6-F6
ggctgagggctacaatatagctggcggcgagnatcaatttcagacagaagtagagacaataagtttagctgtgcatcgcaatcttctcagactttctggattctgcacgactgagaatgaacggctcctggtttacccctatatgccaaatggaagtgtagcatctagactaagagacaatattcatggtcggcctgctttagactggacaaggcggaagaggatagccttaggtactgctagggggcttgtatacttgcatgaacagtgtgacccaaaaatcattcatcgggatgtcaaagctgccaacatcttgttggacgaagactttgaggccgttgttggagatttcgggttggcaaagcttttagaccaccgagattctcatgtaacgactgcagtccgtggtacagttggtcacattgctccagagtatttatcaacaggtcagtcatcagaaaagacagatgtatttgggttcgggatcctgctcctcgagctaatcactggtcagaaggccttggatttcggacgagcagtaaatcagaagggtgtaatgctcgattgggtaaagaagctacata

SEQ ID NO: 14073 - DNA, 458 bp, Gossypium hirsutum
  Clone ID: LIB3829-029-Q6-K6-G1
cagcgccacacatcccagcaccgaaccacagtttgccaactatccaaacattttagccaaatgccatttgaatgtttctgtcacaagggacggagcagtaatgcctgcttgtgttccgaacctggctcctagtcttgtgctcactaattttacgcagtctcaatactctgaaaacctcaatgaaaccaagtatacaggaatcgggatcggttccgaaggagactggatagttgttgtcctaacaaccaatacagctgaaggaaactacgctacggctactactactgctactactagtgcggccaattcagtttccgagataatcataatttatcaccttctattgctcctcatggctgctttctacatgttatgagcagctaatcctttaaagactacacaaaaatcatatgttttcatgtactaataagcttggattatttttttccctttttggg

SEQ ID NO: 14074 - DNA, 587 bp, Gossypium hirsutum
  unsure (1)..(587): unsure at all n locations; Clone ID: LIB3829-029-Q6-K6-G2
ataaatcaaatgttgtntgaacttaatggaaaatctttatcaacagattcagaaaaagagaaaagttggggaagattgataaagccattcagaatgggagagaagtagacagaaggaacatcgagtatgctgcaatggaccaactagtacaaatggctaacaagaaacgtttggcttgtcgtgggagtaattcatcaaaaagtgcagttcgcaaggtttcgaaacaagttgcattatcttttattaagcgaacgcttgatagatgtcggaaattcgaacagacgggcaacagttgctttagcgaagctgcattacaagatatcatgttttctgtacatccatgcagcaatgaagcaaaatctgttgaaggtattggctctggaactgctagtaatacttgcaacgaaacatcgaaccatcaagccgaagccaggggttcaggtgctgtttgtggtacttttgagaggtacgattctccagatgcccttctggctgttcactcgacagagcatgctgtttccaagtacggatctacgttgaacaaaggtaggaagagggaagtattgattgatgatgtagttgggagt

SEQ ID NO: 14075 - DNA, 588 bp, Gossypium hirsutum
  unsure (1)..(588): unsure at all n locations; Clone ID: LIB3829-029-Q6-K6-G3
ngagctccctcctggnccattacccgtgccggtgttcggcaactggctccaatgggtgatgacttgaaccaccgcaacttgacagatttggccaagaatacggtgacatatttttacttcgaatgggacagcgtaatctagtggtggtgtcttcacctgagctagccaaagaggtgctccactcgcagggagtggagttcggctcaagaactaggaacgtagtgtttgatatattcacgggtaagggtcaagacatggttttcacggtgtacggagagcattggaggaaaatgaggcggatcatgacggtaccattttttaccaacaaggttgtgcaacagtacaggtttggatgggaggacgaggctgctcgtgtagtggaggacgtgaggaaaaatcccgaggcagccaccaacggaatcgttttgaggaggagattgcagctgatgatgtacaacaacatgtacagaatcatgttcgacacaagattcgagagtgaggatgatcctttgtttgttaggctcaaggctttgaacggggagaggagccggttggctcagagttttgaatacaattacggggatttta

SEQ ID NO: 14076 - DNA, 579 bp, Gossypium hirsutum
  unsure (1)..(579): unsure at all n locations; Clone ID: LIB3829-029-Q6-K6-G4
ggccatcatcacggtcaggctatggccgacggtggttacgtgatagacatgcgttccactgggngaaaaccatttcaatctcttgaccgtcaatggctccccttgcatcgacgtctccggcggggcattatgggaagacgtcttgagacggtgcgtttcgaggttcgggttggctcccaggtcgtggaccgattacttgagcttgaccgttggtggaaccttgtctaacgccggcgttagtggacaagccttccgttatggtccccaaacatcgaacgtaacggaactggaagtcgtaacggggaaaggagatataacggtttgctccgaaacccaaaacccggaactctttttcggagccctcggtggactcggtcagttcggtattattacccgagcaagggttaagcttcagccagctccggacatggtaagatggataagggtggtgtacgccgagtttgaggaattcactcgggatgctgagtttctggtgagtcagaaagaagacgagtcgttcgattacgntggaagggttcgtattctgcaacaacggacgatccagtcaatggctggccc

SEQ ID NO: 14077 - DNA, 580 bp, Gossypium hirsutum
  unsure (1)..(580): unsure at all n locations; Clone ID: LIB3829-029-Q6-K6-G5
cacctgcaaagcttctgagnactctactcgaacaactcaggatcgttgctcatcaacaacaacaacagcagcagcagcaaccacaacgtcgccatcatctgcgacaacaacggcgatatctgcgctcttggaattttctctaatggaatctctagaattgaaagagaataaccatcgcgttcctccaccaacatttgacatcgctaatctagactctgtggtgcctccaagctgcatgaaacttatcaatgaattgcagaaagagatccgcaagatctctgttgagagggagacattgaagcttgaaatgatgagtgctcaaactatgatcaacattctccattcaagaatagatttccttagcaaggagaacgaggagctaaagaggagcaactgagacgggtagcatgcgaagccttggtactcgcatttttatgcattgaataagagtacaccagcgcagttgtaaaattggtatgaacattagcatttggttctgtttgttgttgaacaatgttgtagctttcttgcattttttaagccctagttgcattttaaatctaaccaaataaacatgggt

SEQ ID NO: 14078 - DNA, 582 bp, Gossypium hirsutum
  unsure (1)..(582): unsure at all n locations; Clone ID: LIB3829-029-Q6-K6-G6
cgctattactcattgaactcgcctcgccttgacnactctcatcatggctttccgtttttccacttaaaacctccttcctttcttctcaaagtctcatctttaagtcctttttattgttattattgttctgagagttaaatagagagagagagagagagagagagagagtaaaagggagagatgtatgtggcgccgccaacccagcgatcggatccgagttccatcggcggcggaccgggtgatttacgggtttaccaatcctggaaaggcagcaatatatttttatttcaagggaggtttatatttggaccagatgtaagatcattagggctgactattttacttatattagctccagtctccattttctgtgtatttgttgctaggaaattgatggatgacttttctcatcatttgggcatttcaattatggttgttgctgttgtcttcactctctatgatttagttcttttactgctaacatctgggagagatcctggtataattccacgtaatgcacaccctccggagccagaaagttttgatggaaatgcggatgttggggctgggcaaactccacca

SEQ ID NO: 14079 - DNA, 591 bp, Gossypium hirsutum
  unsure (1)..(591): unsure at all n locations; Clone ID: LIB3829-029-Q6-K6-H1
gctagagttgcttgcttgctgattgaattggcaaattacatagctcgatatgttagctgcataatcagattttatgaatttctctacatgcaggcaccagcagnagaagagacacgtgtttgctcttgagctgcagagggctggtaatgcaggagctaaagtgctacgtgagctgggacagaaagttgaaaagatggaaaagttaagccccggagacatactgagggaagtacacgaggcaggagaggatttgcaaatgaagatagacgaaaagtcataccttctagtcaattcagaaagctgggcaactgcaccgcctcacagggaattggaagaatctgggagcatggctgatgttaaagacaatgagcataaagtgataaaatccctgagcgatatgtgggaagttcagcacacgattgatcctcgtgcgccggacttaattacctcggagagcatgctccagaaaccatcatggccccgtctctcgtttactgcagaagcattgctacagcaacaggaatctaaaatatatgaaagtgctagtgctttatccttagcaacgttcgcatcactattgattgagtttgt

SEQ ID NO: 14080 - DNA, 587 bp, Gossypium hirsutum
  unsure (1)..(587): unsure at all n locations; Clone ID: LIB3829-029-Q6-K6-H2
cggncgcgtgggnaaacgaatagcaaacactgnaaaccacccctattcgttttcgatcctaattttctttatgtttttccaatggaatctctttcgagttccctctccatctccatctctaatctacgcgagacctacccaattctcaacagccacttaccatcttcttctttttgtctgatcaaagcgccaaatcaacgaattggatctctcaaattcaactctgaaacctctcagtttcataggttttatctccaagctctacctcgagaggttcccgatgaaggtgaagaccagctgcagcctcttacccttaataatgggtttcgcttagtttctgaagacagtcaatctgtttatcagggtgattcaaatcagagtaaagcagcgaaaaagatgtagataagttaataaaggttgaactccatggaagtggagcaagtgggggtagcagagctggacttttcagaaccccaatttctggtggagtgcacagtgcaacttcagcacatggattacctcggccggccttagctgtccgtaatctgatggaacaagccagatttgctcatttatgcactgtaatg

SEQ ID NO: 14081 - DNA, 569 bp, Gossypium hirsutum
  Clone ID: LIB3829-029-Q6-K6-H3
gttttcaggcaactcaccaagttaggagtgaaggaaattgccgatataatgctcaaagaatgtttgacaggcttaaaagcaaagaaatcgagctccaatgaccgaaggtttagagaagggtggtggaagaagggtacaacccaagttatggagcaaggcctttaagaagagccataatgagacttctggaggacagcatggctgagaagatgcttgcaagggaaatcaaggaaggtgattcagtaatagtagatgttgactctgatggaaatgtcacggttctcaatggcagcagtggcacttccgagtcattgaccgatccgattccagttgtgtaaaccacatataagccactctagatatgttgttttgtaccctcttttttctttttcttctccttttgattgaactggctatactattatgaagtctgttttgttgggaggactagttgggcagttgaaattggaaggcattagttgctttttgcatttggaagtgttgaaactgtaaatcttttaacactgaatttgtgcatgcatggttggagtaggctttcaacgaggatg

SEQ ID NO: 14082 - DNA, 595 bp, Gossypium hirsutum
  Clone ID: LIB3829-029-Q6-K6-H4
agcgtccggcatgctctgcttgctttcactctcggtgtcaagcaaagatttgctgctgcaacaagatggatgccacaacccccaaatattcaaaggctaggtatgatgaaattgtgaaggaagtgtcttcctacttgaagaaggttggttacaaccctgagaagattccttttgtccccatctccggttttgagggtgacaacatgattgaaaggtccaccaaccttgattggtacaagggtccaactcttctcgaggctcttgaccagatcaatgagcccaagagaccctctgacaagccactccgtcttccacttcaggatgtgtacattggaggtattggaactgtccctgtgggtcgtgttgaaactggtatcctcaagcctggtatggttgtaacctttggtccctctggattgaccactgaagttaagtctgttgagatgcaccatgagtctcttcctgaggctcttccaggtgacaatgttggcttcaatgtcaagaatgttgctgtgaaggatctgaagcgaggatatgttgcttcgaactcaaaggatgatcccgccaaggaggcagctaatttcacttcccaagt

SEQ ID NO: 14083 - DNA, 402 bp, Gossypium hirsutum
  unsure (1)..(402): unsure at all n locations; Clone ID: LIB3829-029-Q6-K6-H5
naaaccctaaagtgtttttattattttctccattccctcactctccttgtttcctagccgaaggctagtttccaggccttcaacccccctacttgtaaccggcgaagcaaggtcctccacggtgtgagcacaacgcacggtgcgtgatcgagcacgactctgacgtggcgtgatagagtagcgcacgttgcggggtgatggcgtccggcgcgcgagggaggcgtgtggcctgttggaacggcgcaagaaagggttagggttggggtttgttttgggtttagggtttgggtttctatttttttttgtattttgggcttaaaaattggactgttttggtctcttttttgtttattgtttatgggtcttgggccgggcaattttggcccattacaatagtaatag

SEQ ID NO: 14084 - DNA, 544 bp, Gossypium hirsutum
  Clone ID: LIB3829-029-Q6-N6-A2
ccactaatatagttaacttacctccattcattttcacaattaaaaacttaaaaaaaatacatatataatcacaaaatggtgattttttttttgtgatgtttattaactaaacctatttttcatcatataaaaacactaaaaagagagcttacgcataaagacaagaaagcaaacaaagaacaaacaaaacaaaataaagccaataagaaaactaattgcaagcttcacgagcaattcccaagcgagaattgatcacatcaaagagaatcctatgattctgctgctgcaaattggctatcacattcatggcggcgttcacattgttggggaccggtgctatggccaagcatgcccgagacccggcactggtgtgcatgatgctgttttccattggcaatgtcatcgacacgccttcgaaatgtaatgttattaaaggtgcctcagcttctgctgttgcatcaaagcatgtttcaaatactccaattgttgtaaatggacctttcacatgcttcacaaactcatctcggattgccttgtaaatggg

SEQ ID NO: 14085 - DNA, 576 bp, Gossypium hirsutum
  Clone ID: LIB3829-029-Q6-N6-A3
aaacaaatgcgtttccttcttcattaattaataaaaaatattagcaatgttgataacaaatggactgtgtgtcaattctacagacttttccttttaaaagaaaaagaagatattcctctaaaaccccaagctgggaatgatagagaccgttcggtcacttatgggagttctctaattttttttttttataatccagctgatgtttctgacagatatctatgtatatatgatatataaaacctagttttccaggcttacagggaaaattttgaatctatagtgcaaatccatggcaccacaggcttctacacagccagaactgcttcttgggctttaccgttgtccttgcaataaaataagaaaaattgcacgtatgtattgtggtcccgggatgttgcctcatttgcttcgtttcttggcttcactgtagagtattacgccaaagactgtgagtgtataaccaagcattccggtaacagagactggatttctaaaaattaagatggaaaccaccacagctacagctccttttgcatttcctaaaacctgcaaagtcagggcactggtgtgtttttg

SEQ ID NO: 14086 - DNA, 569 bp, Gossypium hirsutum
  Clone ID: LIB3829-029-Q6-N6-A4
accgcagcaacacttatctctcgtattattgggaaatatatccacaaacacatcatctttgaacgttctaacacggaagcagcggcatacaaaagccatgttcacacaacccaaccaaacaaacataactcacacctcaaattgcaaactaaattttcataccaacaactcaatataggaaagcagctcagacgtctccagctccaatcaacgcaagcagcattttctcatagtctccagaggtatctccagcaatcgctttttccagggtcacactgtttcttcgctgatattcctccttaatacgcaccatgtctacctccgcccgagtggcgaccactctagtaagagcccattcatctgttcccagcttattgattgcttgacgtagcaccttctcaaaatatttctcagggacagtcaagcacttgattgcagctctcagcaatttgaggaattcgtcttcagggtcggccttcaaatccttgttgatagcattcccaaatgcagtattgtaatgattcagagtagcatttaactgtgccttactccgtgttgttacaatcctg

SEQ ID NO: 14087 - DNA, 402 bp, Gossypium hirsutum
  Clone ID: LIB3829-029-Q6-N6-B1
gtctcaaactcttaaataataataatgtcacaaaagtaaataaaaagtaccttcaaagacattgaattttgtggcacacatgattataaagggggtagggtgcaatatgaatcaaattttaataaggtaatggtaaaagagtagtggcaggcaggcttagaagagttgagaaaggccccaacagaatcaaatgagggcaatgccctgaacaatcaatgcatctgcaaggacttgattagcagcctgagatggatgaacactgtcccaaaatacatattggctggcattggaacaagttcctggtgcctttggattgcacaaaaatgcgggtgtctctactgttccaggtccacaacacccttttggtggttgggccgagccctagttggggggggatttaac

SEQ ID NO: 14088 - DNA, 368 bp, Gossypium hirsutum
  unsure (1)..(368): unsure at all n locations; Clone ID: LIB3829-029-Q6-N6-B3
ccacataaaaatttgtgcaattcattgttttttttgtttacacgatctgtccccaacaaatgatttattacatcaccacaaataaatgacaatttgtccctactttggcagcattcgattaatggcatagtttaatgaaaacatcagggacaaaaccttattaagggatcacaaagacagtttatttacaaacatatatatatatttcaaatgattggagaagttggttggatttcttgtcatatattgtcttgaaaatgggctgaagcattttggcatgtgtgggagtactcaaaagcggtgtngttgtgtagtattcaaaaaggaaaccaagatgtttttcgaacgttgggaaaatgaatgattga

SEQ ID NO: 14089 - DNA, 475 bp, Gossypium hirsutum
  Clone ID: LIB3829-029-Q6-N6-B4
gacacaaatacaatagcacactacatttccaacaattctacaagaatcagctgccgtttgtaacatatatcagcacataagactatcagcaaaggcgcaaagctagctagtcaggtaagttataatgtcttcaacatcttcatcaacctaaattcaaactccacacattcttacagacatcaatatcaattttccattttcatatggcataactacctactacatgtacacagcgacatagaagagctaatctactcagctagcgcaatgtgagcaacattgcaattacacaactacacaccatatctaagggtttctacagtacacgtacaagcaggatgtacatgttaatggttacatgtccatgttatcaaatatttcaccatcttcctcagaacataagttgtcaacaaggaatccatcacccaccaaattacttaagcagcaaaggctgaaactcaaacacgctttaact

SEQ ID NO: 14090 - DNA, 447 bp, Gossypium hirsutum
  Clone ID: LIB3829-029-Q6-N6-B5
gatccagaacacaaacttatattctaaatgcagtcttctgatatggttatacatgacccacatgtaatttcacaaaaaaagaaaagaaatctaactagaagaagcattagacattacttgtgattgcaataattctgatctgggagttgccgatggaatgtagagcggacatgcaattcatgaacatttgaagccgtgacaaacagacagtacaatgatgaggatcaaagcgaccaagattccgagaactataagctttaccttcatgttctgtaaccacatctttctcctcatctgggttccctgctgccgaaaatcttgtgcctgagaacgaagattttctgttctatccaccagaagctcaattctctcaccacgggccagaaccttctcaatggtttccatcataactcctttaacttctgaaacttgagctttcacttttgg

SEQ ID NO: 14091 - DNA, 416 bp, Gossypium hirsutum
  Clone ID: LIB3829-029-Q6-N6-B6
ggaacacgaccaaagctcattcatgtaaatataaattaactcaaaatattttctcttttcctatatactaaaatataaataagattgctacatattttcctcattccccataaaaacgtaaaaaaaaaatgtaaaaacaggttttatggatgttgagatgaaggttttgatgaacgagtagttagggaaggcttcatttgaacaatctgttcgccgtcgactcccattttcttagcataatggccagcctcgaagaaccgtttgactggatcttccatgtactctttaccttccttcaccctcatgtccttccctatcctttccgggtaacttgtgaggatatgatcccccctttacaccgccgccagctgcaccagctcttgcgggaactcgctaaacttggcgtgtttcattgc

SEQ ID NO: 14092 - DNA, 570 bp, Gossypium hirsutum
  Clone ID: LIB3829-029-Q6-N6-C1
aacagaagagcagaatgattcacaacggaagagaaaaacaacgcgatctacttttaaaatgaaaaccctaaccctaaccacaaatcacatttttcaagaagatgtaaacttggtaacggccttggtcccttcagaaacggcgtgtttcgcaagctcaccgggaagtacaagcctaacagcggtctggatttccctggaagtgatggtaggcttcttgttgtaccttgcgagcctagacgattcttgggcaagcttttcaaagatatcattgatgaagctgttcatgattcccatagccttgcttgagataccgatatcagggtgaacttgcttcaagaccttgaagatgtagatcttgtaggtctcagtactcttcttgaccctcttcttcttcttgtctccggccgcagctccgccttccttgggaagctttttgcctgcctttggcttcttctcagcggggctttctcagctaccggtttcttctcctccggtggcttcttctcagctggcttcttctcagcttttggtgcccttttcttgttctttagatttgtcttgggtcccggg

SEQ ID NO: 14093 - DNA, 567 bp, Gossypium hirsutum
  Clone ID: LIB3829-029-Q6-N6-C2
aacgataagttttttatatttttattgtataaaatgactaataagcatattcatatatccaacaaattaaataagattcatatggtactattcgaatggttagcagatgaatggactcggataacaaatcaattaagccgttccgaaaatttaaaaaattacaaatatccgagccgctgttattcgtaaataattcaaagaatttgagcctacctacacaaaaagggtattatataagttaatcatgaatcacaaaactctttaattaggcccctgttgtagttgcagttgcagatacattgatactgtgtttatatttaaggtaagctttgatgaaggcatccaattcaccatccatcaccgatacaatatccgaagtctcgaacccagtccgaacatctttcaccagtttgtaaggatggaatacgtagtttcgtatctgctgcccccactcggccttcactgcatctccccttatttgcttgatttcggatgcacgttgctcctcggctatcactaataacttggcttttaatctggtaaggaccctgatcttgttagctagct

SEQ ID NO: 14094 - DNA, 559 bp, Gossypium hirsutum
  Clone ID: LIB3829-029-Q6-N6-C4
tttttctttttttttttttttttttctcttttttttttttttttttttttttttttttttttttttttttttttttttttttttttttttttttttggggaaaacccagggggagaggcccagggggaaaaccccccggggcaacggggggggcccaagggcggggggaccccccaaaaaaaccagaacaacaaaaccaaagggggggggggaaaaacccccggcccggcccagcaatggggaaaaaaaaggggaccctgggccaaaaaaccccaaaaagggggttggcccaaggggcccgggaaaccttaaaaaaagggggggcccggaaaacccccccccctattaaggcccaaaagtttagggggcccggccccaggggtcccccccttccccaaaaggaaaaaacggccccggggggggaaaaaccccccaaaaaaaacaaaaaacggggccccttttaaaaagggggggggccaaaaaaaaaaccccggcgcccgaaaaggggttaaagggcggccccttaagggggacaaaaacccccgcggggggccccccc

SEQ ID NO: 14095 - DNA, 567 bp, Gossypium hirsutum
  Clone ID: LIB3829-029-Q6-N6-C5
aataggaacaactactctagcaattaaaggttttcatgtccatgcatccatacaaatacaattgttttttaattgtacaaattaaatccctaatagtcaaataacgtccaatacagcatcctaccataagtaaaacagctacatctaaaattccattttaacaagtgcattggattcttcagatccataatgaagccagtccttggcacagattagggcttccacggtctccggtcgtaaggagcttcggtactcatccagttgctttattatgatgtcaaagaccgagtccggagcagcagctgatactggaattgacaaaatgtcacgagccatcttcgaaagagttggatacttcatcttattgagcttccaccagcctaatacatcaaactcttggactcgaggcaacaaggactcttctaagtattgatccagctcagatttcatttgctggctgctagtctccataatgtacacatcgaaatctgtaagtccctggtctgaaagaagatttccttgttgggattcatcggtctttccattgtttcccgcattgccttcttc

SEQ ID NO: 14096 - DNA, 81 bp, Gossypium hirsutum
  Clone ID: LIB3829-029-Q6-N6-D1
ctctctctctctctctctctctctctctctctctctctctctctctctctctctctctctctctctctctctctctctctc

SEQ ID NO: 14097 - DNA, 348 bp, Gossypium hirsutum
  unsure (1)..(348): unsure at all n locations; Clone ID: LIB3829-029-Q6-N6-D3
acataacaangtgaaattatattaataaatttaactgttggatcggggttatgcacttgtaatgaattgaatgcgttgaatgtgtggataaataaatagcatctactattgtattcacaaacattagcaagggactcgctctgtagctgagtttgctacagagattaacatggtgttgacctgcaaatcaatttctggtgtgggttttggcattgtacatgggacgatctcgctttgtctctcaactcctggaagggtctcatagtttcgaagtggaatgcttcggaaaactgtgcataaaacaaaaatacgggttttttttttaattggattgtcaatccttgaaaa

SEQ ID NO: 14098 - DNA, 444 bp, Gossypium hirsutum
  Clone ID: LIB3829-029-Q6-N6-D5
ggctactcaaattaacagccattatgaatttttttttatgtaaattaaatcaatctccagtccacccatatcctactatagggtacctttttgagaaaaatttacagaacccaaggtttacaatgaaatccccatccatgcctgcatcccttaaaacaatcagagactgcaggttttaacatcttcttcatcccttagctcgagcagcaaccccctttcttcattgcagacacgtctttactgacatcaattttctcccccttggatggaacagctgaagcagccccttcatcacttgtctccattgccttcttgcttactatgtgatagatctgtgtcagcacttctgcgaatgcgttttccacgtttgttgcttccagggctgaagtttccatgaagtagagggattctttctccgcaaaggattttgcatcctcagttggg

SEQ ID NO: 14099 - DNA, 556 bp, Gossypium hirsutum
  unsure (1)..(556): unsure at all n locations; Clone ID: LIB3829-029-Q6-N6-E3
aactgataagattctactaacgagctccaactaaagatcggaggaatagtacaataaatcaatccccatcaatattactaaatgggataattacaaatcttgatcaagatgaccttatttgaagataatattattaaaaggcataattaccaattctgatctctgataaatagattgtggaccttcagttagacacttaaacctgaaccgcgaaacttttgcagtgttcgttggtctaaacgtcgagccatttcagttgtcaaataattcttccagtctccaaccttccctttccggaagaaaatgttattttccatcgccaaatctccttgcccgtcacgatgtttcccagttttatttacttccaagccatttaaattctcgaaactgcacagctgtacaatgttttcaggcaccccttgttgttgttcctctgacgagaaggataacccataaattctgctattttcttaanatacaaaacagtatcttcaatcagttcttcatatttcaagaatagtaacttgtctggatgttccaaacttgctttccagtt

SEQ ID NO: 14100 - DNA, 534 bp, Gossypium hirsutum
  Clone ID: LIB3829-029-Q6-N6-E5
gagcacacaaaattcacattctgctttcattgattgtgcaacaaatttacattcacaccaacaaataaaaacatgaacaagacaaatcccttttcactctctaagttcactttccggggacaaagttggtggcataggcccaagcattgttgttgactgggtcagcaaggtggtcagccaagttctccaatggtccctttccggtcacgatggcctgaacgaagaacccgaacattgagaacatagccaacctaccgttcttgatctctttcaccttgagctcagcgaatgcctctgggtcatcagcaagacccaatgggtcaaagctaccacctgggtacaatgggtcagtcacttcaccgagtggtccaccggcaatacggtaaccctcgacggctcccatcaagataacttggcaagcccagatggccaaaatgctttgagcatggatcaagcttgggttacccaagtagtcaagtccaccctcactgaagatttgagacccggccttgaaccatacagcttcaccgaact

SEQ ID NO: 14101 - DNA, 371 bp, Gossypium hirsutum
  Clone ID: LIB3829-029-Q6-N6-F3
aaacacccccatttcatattcagatttccgagaaagaaaataaaattcacacccttagaggactggaagcaaaatatgcttttgtctccacatatccaattcacacgtatttggatttttatcccccccccccccccctatttatatatttgggtgaggggtttaattatttccatagctttcccgggctatcatgacttgccggagcaacccttcctgggaccggcgactgggccgttggtgggggtgttttctcgggggctgagattggcatgcttttattctcagccctgttcccccgctcccatgattaaattcctccccccccccggggggggaataattggggtggggcccccccagtggaacgg

SEQ ID NO: 14102 - DNA, 462 bp, Gossypium hirsutum
  Clone ID: LIB3829-029-Q6-N6-F6
acagatgaatacaagcattcaacaactatcaacagcaatcacatatttttcacatttcagagctctgcaatagagtcgggaccatagtattcaaggcaaacattatgtcacctaggaccagaaagctccatggcttcgagcacaagtgatgattcttctataaaatccgagtaccgttgaggagggttatcgttatcgcatgatcggagcttcggcgtctttatcatttgtgatgcttcccatttctcggctaaaccatcaccttctagcatccttaatacttcagacatcctcggacggtgtaacggattgaattgagtgcacaatagggcaacttgaaccatttcttccaactcaatcctatcaaaatttccctttagatctttatccaccagcaggctcagtttaccatcctgatgtagcttctttacccaatcgagcattacacccttctgatttact

SEQ ID NO: 14103 - DNA, 372 bp, Gossypium hirsutum
  Clone ID: LIB3829-029-Q6-N6-G1
cccaaaagggaaaaaaaaatccaagcttattagtacatgaaaacatatgatttttgtgtagtctttaagggattagctgctcataacttgtagaaagcagccttgaggagcaatagagggggataaattatgattatctcggaaactgaattggccgccctagtagtagcggtagtagtagccgtagcgtagtttccttcagctgtattggttgttgggacaacagctatccggtctccttcggaaccggtcccgtttcctgtttgcttggtttcattggggttttgggtgttttgtgactgggtggagttagtggggccggattgggagccgggtgcgggacgcgtggcgggcgtttctgctccgtccttt

SEQ ID NO: 14104 - DNA, 539 bp, Gossypium hirsutum
  Clone ID: LIB3829-029-Q6-N6-G2
aattggattaaagcagcaaaattcttcaattacatacatatgacatctattatatataaaatgaatcataattagtccttacttgatcagattgcatcaaatgggccatcaaaatgcaaatttcaactctgagaggtcatccattggtatttctaaacctattgaatcatggtcttgcaagccatcttcatcaaagtttagccatgaactcaaatcttggggaccaccaatgtcatttgaaacacccaattcttccataggatctaaatcatttagttgcaagtttgcgaaatcatctggttcgtccgattctttcggacgaacattactcggggttggagataatgacctagcttctctttcagtcatcttgttagaattagccaaaggtggtagcaaaggatccgagagcctgccgttgaatccatgccctgacttctgtttgggctttgcttttgttctccggtcacccttggcaccgtctaatgatgtccgaccagccccgggtaccgaacttgtatttcttgaatctctttcgc

SEQ ID NO: 14105 - DNA, 539 bp, Gossypium hirsutum
  unsure (1)..(539): unsure at all n locations; Clone ID: LIB3829-029-Q6-N6-G3
ggaagggaaaatattaatcttattgcaaatcttgattgattcatggatttacattgtcacacctcacaaatattttcaactgaataatgtttcatactgtctttcaagagttcactaaaatggatagaagagaacaagttaaaattgccttggcttaccaacaatggtggaatgcttcaaaatatgaagactgaactgtccacctttctccgtggtatcaatttgagattgcccagggggaggcaagagctcaaaattctgtaccaaacgacccaaagtaataccaaggatgggcaatgcangaataattcctgggcaacttcttctccccacgccaaaggggaggttgcggaaatcattgccgttggcctcaaccttggcttcctcttcaaagaacctttcaggcctactttcttcgcgatttttccagttatcagggttgttggcgcgcgcccatgcattcaccaggattttgctctcaccgcggatatgataccgcccccaatttcgcattgtgcgaggttctgggggggcaccga

SEQ ID NO: 14106 - DNA, 581 bp, Gossypium hirsutum
  Clone ID: LIB3829-029-Q6-N6-G4
gactcaacaattaatagatgatatactttgatatatatatatgcgaagttaacaacaaattacaattgcctactaaattattattattgattagtccttttaaaaattctttgtccaggtgcaaggatggacataggatcaaaattggccttcctcttctcaagtctcgtccattgattcccaaaatgtcgtttccaatcctctttggcacggtagtgagggaggtatagcttgaaatccaatccctctttgatgcaccatttcactatctcacggttctccgctaccttcttctccaccgacggccccttcggagcaaaccggagcaacgccacgatgtaaaagatctccccttctggcaacgccaccgatgtccgactatcccatttgcttcgtaaaagagggtagattaacatgggcccaccgattccatttttcaccatctttttaaacaccgtccgatcgaattcaacgatgtctgatttggacacgaagaggttgagccaagggtgaggattgtcccaaacgccgttggctttcgcgtcttgctccgctcgtttcacacgcaataagaatcccat

SEQ ID NO: 14107 - DNA, 553 bp, Gossypium hirsutum
  Clone ID: LIB3829-029-Q6-N6-G5
ggttcaaatgagatgaaatttacagcaaaaaggtccgattcccagtaaggtacaacaagcaaagtccaaccgaacccactaccccataagctagaggagggagagagcaccgggaaacaataagagaggctgttgcacgcctctggtaaaggccatgtcaccatgaagccccaaaaaatcaatcccaaagttgccttggcatttggtagaccaccgatagaggtggagccaaagccgaacatcggctacaacagccaccagatgctaaatcttcaggtacgatgaaaccccagagaggtgccagcatcttaactccataagagcaagggaacttcaccaaccaaagataacagcaaacggagtccatcgaaaagcaaaggtcataacagagacttggggcaaacggacggccacaaccatgggaggtgaacccatgtttatttggttagatttaaaatgcaactagggcttaaaaaatgcaagaaagctacaacattgttcaacaacaaacagaaccaaatgctaatgttcataccaattttacaactgcgct

SEQ ID NO: 14108 - DNA, 595 bp, Gossypium hirsutum
  Clone ID: LIB3829-029-Q6-N6-G6
tgctacttccaataactcgatttggttcccccactctagctgccaaagcaagaacttcaggtgacatttcccattgaccacttcttctaccccaactagatcgcctgggatgaatactggcatgctcacccgtgccatctactgtacttctaaaatctggtgatagttctcctaattcaccctccttaacatttactcgctcacttgtgaattgcccttcgcaatcatcagtggtggccccattatcaacccacactgtcttcctacccatttctatgtcatccgtggccttccccatattcggactcataaaaccactggctcgtgttggtaacactggttccctcggcaccttcgcactgaagttgttcttggatgatggaatgctggagcaaaatatctccttgaagttgtcaaccactcctttgttataagggtttgctcgacgatcatatcggtatctgaaattctcatacgttgtctgatttgtactgattagatacaaatggaaggcagtcaaaccaccaacaaaccacattgaaatgaacgtgtaaactattaaaacaatggaagccggggttttaatcattgcttt

SEQ ID NO: 14109 - DNA, 381 bp, Gossypium hirsutum
  unsure (1)..(381): unsure at all n locations; Clone ID: LIB3829-029-Q6-N6-H1
gactgaaagcaatttcttaatcttctccaaaatcctggagcctccttttgaggtgattggtccacaggaaccttgaaatttgctttctcactaagctcttgaaatgcatccacgagattttggagccttgcaacaaactcaatcaatagtgatgcgaacgttgctaaggataaagcactagccctttcctatattttaaattcctgttgctgtagcaatgcttctgcagtnaacgagagacggggccatgatggtttctggagcatgctctccgggggtattaagtccggcgcacgaggatcaatcgggggctgaactttcccatttcggtcagggttttatcactttatgctcaatggcttttacatccggcctgctccc

SEQ ID NO: 14110 - DNA, 434 bp, Gossypium hirsutum
  Clone ID: LIB3829-029-Q6-N6-H2
aaatagtaaaccgatccttgtagaaaaacatataaaagaaaatattcgatacactagaaatcagaaaattactagttaagaaattacttgcggcaggaaaacaaaccttgtataacgtttctctatagtagtattacattcagtgatggctgagattcgcatcgtcttgcctttatgctccccggaaggccagaaagttgcagcttcttctatctctttagattttgcacttggcctttctttattactttccataaagctactttggcttcctccaatgtctcaacaccctgcccttcttcaaatgataacctctgtacgttgaactgtgcaccttgacggaccctaatgtcaattcccttgctgtcaattgatataagagccgcatcatcaacctcagcctctgctgatagcaactctttgaggggctttga

SEQ ID NO: 14111 - DNA, 372 bp, Gossypium hirsutum
  Clone ID: LIB3829-029-Q6-N6-H3
ggaccaaatttaaaacttttttattgggaaataaactaaccaaaacaacccttccaacccccatcctcgttggaagcctactccaaccggggcggcccaaattccgggttaaaagatttcccggttccccccttcccattgccaaaggcaactaaggccttccaatttcaactgcccaactagtcctccccccaaaacgggcttcttttttgtttacccggttcaatccaaaggggaagaaaaagaaaaaagagggacccaccaccctatttaaagggggttaaatgggggttacacaactggaatcggatggggcaagggctccgaagtgcccctggtgccattggggaaccgggaaatttccctcggggg

SEQ ID NO: 14112 - DNA, 407 bp, Gossypium hirsutum
  Clone ID: LIB3829-029-Q6-N6-H4
aacagaaaaacaaactagttttgactgtatataaatgtttgatagaacacattcaagcagaaaagcccaggaccagacctaaaactcctgagctgattgccataaataatgggaacacaagacaccattcaaagtttataattactctcacagacggcagactctgaaaaacacaaaagcctcaccaccgtctatcaagaacccagttctgtgaacaacatcctcgacaagatggtgatgacttaaaactattaccatcaaaacacacaactaatcgtccaatgatggctgacctactaatgagaagcaatgttttattgtagtaaccataaaatagtttggttggatcaactgaaacccacacggttcacttcccacccttcttggcagcagacttcgtcaccttg

SEQ ID NO: 14113 - DNA, 402 bp, Gossypium hirsutum
  unsure (1)..(402): unsure at all n locations; Clone ID: LIB3829-029-Q6-N6-H5
tttttttttttttttttttttttttttttttttttttttttttttttttttttttttttttttttaatncaaaaaatttctaaaacaaagggaaggggccaaaattgcccggccccagacccctaaaccattaacaaaaaagagacccaaaccggccaatttttaagccccaaatcccaaaaaaaatagaaacccaaaccctaaacccaaaaaaaaccccaaccctaacccttttttgggccggtccaaaagggcaaaacccttccttggggggcggaagccattacccccaaaagggggctttttttttaccccccgtaaaaaacgggcctgataacccacccgggggtgggcccacacccggggaggaactttcttttcccgttaaaaaaaagggggttg

SEQ ID NO: 14114 - DNA, 543 bp, Gossypium hirsutum
  Clone ID: LIB3829-029-Q6-N6-H6
aaagacataaggaattatattaccgttgtttttgtggtctcaattatgcaatttgccatgagacaatcttcttacaaaggagaaaaaagggaaaaaagaaacagggtattaatcaattatatttcctctaacaagtaatttacacctttccagacccgcttataacagggatcggttgtatattatgtcaaacttccagggcaggctttgaaaccaggtttcaatgttttttagtggccaatttagctctcaattcctttctcagaatttttcccgacggtgcctttggaatggcttcaatgaagaacacacggcttattctcttgtaatacaccacctgtttcgaaatatactgtttgatttcatcctcactgatttctgatttgcctgatttcaccacaaacgcaacaggaacttcgccaaccgcctcgtgtttcattccgaccacagcagcatcgatgatatcaggatgtgcaatgagcatggctttaagctcagcaggggcaacctgaaagcctttgtatttgatcaattccttcaatc

SEQ ID NO: 14115 - DNA, 595 bp, Gossypium hirsutum
  unsure (1)..(595): unsure at all n locations; Clone ID: LIB3829-030-Q6-K6-A1
ggnaccggttgccatggcaagnaagccgttggcgaagattgttacggatgataagcagggaaacgggatgtgtcacgatgatagtgcaaaaggcgttaaggctcagactattgatgagcttcactttttgcaaaagaagagatctgcgccaactacgcctctcgaagggaaccagggtgccttcgctagcttgcccgacgacgagcgccgcaggcagcagcttcagtccatcagtgcatctttggcgtcgctgacgagagggacaggccccaaggtggtaaggggagatccagcagcgaagagtagtcaagcggtggagcatgtggcgcaccgccaccaccacgtggaagcacccgccatcagcgtcagtgacgacagttctttgaaattcacccatgttttatacaacctctcccctgcagagttgtacgagcaggctgtaaagtatgagaaagggtcttttatcacgtcgtcaggtgcattagccaccttgtcaggagccaagacggggcggtctccgagagataagagggttgttatggatgacaccacccaaaatgagctttggtgggggaaggggctcacccaacattga

SEQ ID NO: 14116 - DNA, 585 bp, Gossypium hirsutum
  unsure (1)..(585): unsure at all n locations; Clone ID: LIB3829-030-Q6-K6-A2
cttttctattaccatttccctttttccttccaccttctccttcttcaaaaaccgaccaggctccaaatctgtctacttgactcaccaccatcgtcaaagaatcaagctgtattgggatttcaccagggctgactttgctngaaaactcagctgagcctgagtcttccttctacattgccatttcatgcaatgggaagctagaattcatccttggtgatctcatggatgaactcgccaagaggtgttctgggttgtctatggctcgacaggtactccttgaaccaacgctcttgtctaggagagaacatgtttttgggcataagagttatgtttcgagggctaagttcttggggtctaaacatgagatagggatagattgtaatggaggggttctgaaggtgaaagttgatggccaaacaagccttgtcataaagcgattggcttggaaatttagagggaatgaaaggatttatgttaatggaatcgaggtggaatttttttgggatgttttcaattgggtcaatagtgagaataataataataataataataataccaatggccatggtgtgtttatttttcaag

SEQ ID NO: 14117 - DNA, 255 bp, Gossypium hirsutum
  Clone ID: LIB3829-030-Q6-K6-A3
aagcaaaagccaaatagagctttccttcattcattcataagttataaaacagggcagtaacacaacaaagctagttaaaatactttcatttcactatacataccaagcaaccatggatacaagaagcaaaacacctaatgaaccatggctgctttattctaataataaaaacccaaatacatcatatattatttagatcagcttccataatatgcttcggtttttttttccccctttaacacagggggggggggg

SEQ ID NO: 14118 - DNA, 583 bp, Gossypium hirsutum
  unsure (1)..(583): unsure at all n locations; Clone ID: LIB3829-030-Q6-K6-A4
ccccgcgtccgctgtgttccaacatctcgggtcaaatcttgccgtcttgnatgagtccccaaagttggagatgaatcctatgaatcatacagtgctgaaagagatggaatcctctcatctttagccaggcgtgcaaagacactggaagatgcattcaacaaattggaaggtgtaacatgcaacaaggcagaaggtgcaatgtatctgttccccagaattgaccttcctgaaaaggcaatcaaagctgctgaagctgcaaaaaaagcacctgatgcatactactgtcaacgcctccttgctgctactggaattgttttggttcctggttctggctttgggcaggttcctggcacttggcattttaggtgcacaatactcccacaagaagaaaagattccagcaatcgtcacccgtctaacagatttccataaaagtttcatggatgaattcagaggctgagtctaagggaaagaattcagctgaatcagacgtgtctcttttccttttcatacagaataaatcgaccctgtgttaatgcttgtacacccgtcttcaactgtagctggaactgttgttgctatct

SEQ ID NO: 14119 - DNA, 582 bp, Gossypium hirsutum
  Clone ID: LIB3829-030-Q6-K6-A5
gcaacggttgcttcctggcggctgttgcaacaccaccaacaacaacctttgagaacccaaggtgggctttctttcaccaaagcctgttcctatgaaacatgtctcttccaccccaccaaaagctgcgaagctttataggggtgtgagacagaggcattggggcaaatgggtggctgaaattagactccctaagaaccgaacacgactttggcttggcactttcgacacagctgaagaagcagccttggcttacgacaaggctgcttataagcttagaggagagttcgctaggctgaattttccccaccttaagcaccaaggagctcatgtttttggcgagtttggtgactacaaacccctccatgcctcggttgatgctaagcttcaggctatctgtcaaagcttacaagcacaaggcaatccagtgaagacgaagaccctccccaaggccgctgagtttcattaccccatcaaaaccgaggagtttgatcataaacaagacaactcatcatcatcatcatcatcatcagttgatgaatcatcattagcaggatcattatcttcaccagaatctgatatcac

SEQ ID NO: 14120 - DNA, 566 bp, Gossypium hirsutum
  unsure (1)..(566): unsure at all n locations; Clone ID: LIB3829-030-Q6-K6-A6
cggncgcgtgggtttttgttggtttttttcctcggcatggctgacgataaggaaagtctacccctgttgttgaccggaacgatcccgtcaccggtcacataatttccacaactattggtggcaaaaatggagaacctaaacagaccattagttatatggcagagcgtgtagttgggacaggatcattcgggattgttttccaggcaaaagtttggaaacgggagaaactgtggctataaagaaggttttacaagacaggagatataagaatcgtgaactgcaattgatgcgtgtgttggatcacccgaatgtgatttccttgaagcattgtttcttttccacgacaacgaaaaacgagcttttcctcaacttggttatggaatatgtaccagagagcatgtatagggttttgaaacattacagcagtgctaatcaaagaatgccacttatatatgtgaaattatacacatatcagatattcagggggcttgcatacctccatagtgttgttggagtttgccatagggatctgaagcctcaaaatcttttggttgatcctctgactc

SEQ ID NO: 14121 - DNA, 596 bp, Gossypium hirsutum
  unsure (1)..(596): unsure at all n locations; Clone ID: LIB3829-030-Q6-K6-B1
tccgcttgttctcttctacttcagcgaagggtgctctgagaaacataccaaatggtgaaggccgttgccgtccttggcagcaatgaaggtgttagcggaactgttttcttctcccaagaaggagatggtccaactaccgtgactgggaacctttctggtcttaagccgggactccatggcttccatgttcatgcccttggggacacaactaacgggtgcatgtcaactggaccccattttaatcctgctggcaaagagcatggtgctccagaagatgagaaccgccatgctggtgatctagggaatgtcactgttggtgatgatggctgtgcaagcttctccatcaccgacaaacagattcctctcacaggcccaaactccattatcggaagagctgtagttgtccatgcagatcccgatgaccttggcaagggcggccatgagctcagcaaaagcacaggaaatgctggcggcagagtagcttgcggtattattggtctgcaaggctaaaatctgagccaagatgcggttgnaagatgcaatgggctttgagaactctttatgtgaagtagaaagaacttggttataataataaa

SEQ ID NO: 14122 - DNA, 589 bp, Gossypium hirsutum
  unsure (1)..(589): unsure at all n locations; Clone ID: LIB3829-030-Q6-K6-B2
cggncgcgtgggnaaaaagtgaagcaaaaatacttgcatcaaacagatggcaaccatggagaaggggttagagtttgagaacaagaatttaggcctcaagcacctaaacttcgtcagggtggctacaatccacgccttggtttgcgtctcgaacctttacgattactctaaacagaactcggggccgttgagatccaccgttgacgccgtcgagcatgccgttaccactgccgtcggtcccgcctacgggaaatttaaggatgttcctgatcattttcttggatttcttgataacaaggtagatgaggtttcacacaaatttgacgagcatgctccagcaccagccaagcaagtggttaacctggcccacgatttggtccaaaaggcaacccaaaaggctcagaaactagtagaggaggctcgaaccaatggagcacgaggggctttgcactacgctgcagctgagtacaagaacttggtgttggtaagctcgaccaagttgtgggttaaactgaacagcaacttgactttcaactcagtgacagaaaaggttgttcccaaagcagctaatttgtgtgagaaatacaac

SEQ ID NO: 14123 - DNA, 569 bp, Gossypium hirsutum
  unsure (1)..(569): unsure at all n locations; Clone ID: LIB3829-030-Q6-K6-B3
cggncgcgtgggaaagactctttcagnatttccttaaagaaaagagagaaagagaagaagagttgctggggaagaggccnaaggccacctatgaaaagaaccacaagcatgacagagatcacttttgatctaaacaccaccgccaccaccaacgccgaacctccaccctctgatccacataacccttttaacaactaccccaaacaggcttcccctttcggtggcgcagcaccttctgtagctgttgctggcagtggtggtggacttgaagggttggatcaacggttgttggcgacggtgtcacctagagttcatagaaggcattcagctgattttatggaaacacctcatttcctaaggtcttgcggtctttgtagacgtcgccttgttcctggccgtgatatctacatgtataggggtgatacagcattttgcagactagagtgcaggcaacagcagatgaaccaagatgaaaaaaaggataaatgttcaatagcatccaagaaacaagccgccgcctctcctgccgccagatccagtgtctcaaccaaaggagagacggttaccgc

SEQ ID NO: 14124 - DNA, 605 bp, Gossypium hirsutum
  unsure (1)..(605): unsure at all n locations; Clone ID: LIB3829-030-Q6-K6-B4
gntaaattatataatgctgagctctatggcaaagttggagtaccttttgttatgggcaccactggtggagacagggatcgactctataagactgttgaagagtcaaaggtttatgctgtgatctcgccacaaatggggaaacaggttgttgcatttcttgcagcgatggagatcatggctgagcagtttcctggagccttctctggatattccctccaggtgatggagtcccatcaagcaggcaaattggacacttctggtactgctaaggctattatttcttgctttcagaaattgggggtgtcatttgacatggatcagatacaaatgatccgggatgccaagcagcagattgagatggtgggagtaccagaagagcatctgtctggtcatgcctttcatttgtatcatctaacatcacctgatcaaacagtgtcgtttgagtttcagcataatgtttgcggcagatcgatatacgcggagggaactgttgatgctattcttttccttgctaagaaggttaagtcgaaggcagacaagcgtttatataatatgattgacgtattgcgagaagaaagaagatgaaaggcagcttatcttgagta

SEQ ID NO: 14125 - DNA, 584 bp, Gossypium hirsutum
  Clone ID: LIB3829-030-Q6-K6-B5
gtacctcccaagcccatttgttcatatttctctccatcctcctgtacttgctcttcctcctcctccatggaagcccctcctcaggttacaggagaaatgtgggtatttgtctcatcaactcctccaaaaagatttttcggcctcgagactagacattcccagtgcttggcaaatgcctcagggtgggattgatgacaatgaagatccaaaagttgcagccctcagagaattaaaggaagaaacaggtgttaggtcagctgaagttctcgcagaggtaccttattggctgacatacgacttccctccagaagtcagggaaaaactgaaacatcagtggggatcagactggaagggtcaagctcaaaagtggtttctccttaaattcacggggaaagaagaagaaatcaatcttctgggtgatgggagtgagaaacctgagtttggtgaatggtcttggatgacaccagagcaaatagttgagcatgcagtggatttcaagaaacctgtttacaataaggttttggaagttttcactccctacctccattgatatttgcaaacatcaccatttctaatgtgttgag

SEQ ID NO: 14126 - DNA, 601 bp, Gossypium hirsutum
  unsure (1)..(601): unsure at all n locations; Clone ID: LIB3829-030-Q6-K6-C1
ngacaacagcagcagcagcagcaatcatctcaacaattactctccccagctggatcactgttgcagcctcaaatgttgcagcaacagccgacccatcaacagagccaaccattgcagcaattgcctctttcacaaagccaatcacaacctcttggcagcaatggcttctcaacgtcaatgcctgttcaacctcaacaggtttcagtgaaccaaccccaaattcacaagccatttactgctatgagaactcattctggtcttactgacggagatgctccatcatgttcaacctcaccttctaccaataactgtcaggtttcctcattgaactttttaaacaaaaatcagcaagttccatccatattggtgtcagatcctcttgttgagcctgcaaataccctggttcaagagcttcagagcaagcctgatattagaatcaaacatgaactacccacttctaaaggaccagaactatcaaagtacaaaagtactgtgacagatcaattagaagcatcctcttctgaaacatcatactgcctggatgcgggcaccatccagcataatttctccctccccacctttttggaaggtgatcttcgat

SEQ ID NO: 14127 - DNA, 582 bp, Gossypium hirsutum
  unsure (1)..(582): unsure at all n locations; Clone ID: LIB3829-030-Q6-K6-C2
gcgagcagggcgagnagcagagcgagnaacagagtgagagagagggagacaattatgggagcctgggctattgcagtgcatggtggcgctggtgtagacccaaatctccctaaggaaagacaagaggaggctaagagactcctcactcattgccttgatataggcatctctgctctccgctctaacctccccgccattgacgtcgttgaacttgttgttagagaactggaaacagatcctctgttcaactccgggcgtggatctgctcttacggataatggaacggtggaaatggaagccagcattatggatggcccaaagaggagatgcggcgccgtttcaggcttaagcactgttaagaaccctgtctcccttgcccgtcttgtcatggacaaatcaccccattcttatctggccttctccggtgccgaagactttgccaagaaacagggagtggagttggtggacaatgaatattttattacggaagataacgtggggatgcttaagttggcaaaagaggcaaactcgatcctgtttgattaccgtatcccaacgattggcacctgtggtgcgggggca

SEQ ID NO: 14128 - DNA, 103 bp, Gossypium hirsutum
  unsure (1)..(103): unsure at all n locations; Clone ID: LIB3829-030-Q6-K6-C3
ctcnctctgcacccatcatcaaagcaagctgcagcaatagtagccatggtagcccagctttctcactataaccccactcaccacactctccttctgcactgtc

SEQ ID NO: 14129 - DNA, 596 bp, Gossypium hirsutum
  unsure (1)..(596): unsure at all n locations; Clone ID: LIB3829-030-Q6-K6-C4
ggncgatacanaaaaaacaaagcgatgagactctgctatgaaatccttaaagttgcagttgaaccaagtggagccatagggcttgcaggtgtattatctgatagcttcaggaacaaccctgcctggaaggaatgaaaccaaataggattatactttcaggaggtaatgtagatcttggaagtgctgtggaattcatttagcaaatgaaatttaccattgttattgctactcctatttaaaacttttttttcccttttaaatttaagtttgatctctaaatgctgatatgtaaaccaattactttggtggcaactattaatcctagtatgatgatatgtcattcaaccattcgtgcaaatatagatgtagcactgtaaattagtataaagaagctgagcaaggaactccaacaaataagcatggaaaatattcaatatcaacagacgctatcgctgtcaatactctccaaaagagaaagaaactgcacttaccaatagtcgcaactccaggaaacgcataagcaagatagatatgaatggcatggctgcaaaaatttatatatactgaatatgtagggaaacctttgaaatgggggg

SEQ ID NO: 14130 - DNA, 581 bp, Gossypium hirsutum
  unsure (1)..(581): unsure at all n locations; Clone ID: LIB3829-030-Q6-K6-C5
gccaaactacctttcagaatggntgttcaaatgatgttgccataaacgatgcaggagttttaaatggtggattgtgggccaaccaaactcaacggatgcgaacatatacaaaggtacaaaagcgtggctctgtgggaagatcaatcgatgtgacccgctacaaagggtatgatgaactcaggcatgatctagcccgcatgtttggtatcgaaggacagatggaagatccacaaagttctgactggaaattagtatatgttganccatgaaaatgacatattacttgttggtgatgatccttgggaagaatttgtaagttgtgttcagagcattaaaatactgtcatcccttgaagtacaacaaatgagcttggatggtgaccttggaaatgtgccagttcccaatcaagcttgtagtgagatcgacagtggaaatgcatggagaggacattatgatgatacttcagctgcctcctttaacagataaaaaagtcaaaaacaaattgattggactttacataggctcattggtggatgcctttccattaagaagatcaatttaatgaagttcttccaaattca

SEQ ID NO: 14131 - DNA, 371 bp, Gossypium hirsutum
  Clone ID: LIB3829-030-Q6-K6-C6
ctatgatgatggtgatgaagaattttgaatcttaagaaagagaatgggcagtgatctatgatgagactgcgtcagagagggagatgggcaagatgtccacatcctctgtcctgatggtttatccgaatgtctcaaaagaagaaagcaaaagcagctgatcaaccaagcaagaaagctaagatggatgctttgccaaaaagggtggaggtgcttcatctggaaatccaagggtgctgtcacaaagtctggtcaaaaaacgaaggaagatggtaaagaggatagctccaagagtgtggctaaatcagaaaatgttaccaaagccaagcagcatacccctaaaaggggaagtagatcagttgatggcgcttcaa

SEQ ID NO: 14132 - DNA, 370 bp, Gossypium hirsutum
  unsure (1)..(370): unsure at all n locations; Clone ID: LIB3829-030-Q6-K6-D1
ccccgcgtccgcggncgcgtgggcggacgcgtgggctaactaagtaattctgaaccggaattatatgtgctgtagctttcttcataatccctatatcttttatttacctttttgcactcttcattctcttttaaacaacacaaccctttcaagcttcactcttngtnattagcgcggtgtgggtgctaacccccagcagtggatgaatattgcatgagaagggggcagataccagtatttggagactgggacattgcagatgagctggctataactcagtactttgaatgcgctagacatgcgggtttgattggtttgagctgttggtgtggggaatgtaagggttatgttggtgntnatgacttgtatg

SEQ ID NO: 14133 - DNA, 581 bp, Gossypium hirsutum
  unsure (1)..(581): unsure at all n locations; Clone ID: LIB3829-030-Q6-K6-D2
gctgttggtaccattttgtgtgcttcttattggtctgcttggactgctagagaagttgctattgagcaagacaagctgctaaaggatgcatcangaagaaattctagaagttggtgcaggttctagtggttttgttgacataaatacaatgtcagcagttctctttgttgtggctgcttcatgtttcctggtcatgctctacaagcttatgtcattctggtttgttgaggttcttgtggttctgttttgcatcggtggagtagagggcttgcaaacgtgcttggtgactttgttatcatgtttcaggtgttttcaacgctttgcagaatcatttattaaagtacccttctttggagctgtttcgcatctgacactggctgtctgtcccttttgcattacatttgctgttgtttgggcagtgtatcgtcgtatctcctttgcctggataggtcaagatattcttggtattgcacttataatcacagtccttcagattgttcgtgtgccaaatctcaaggttggaacagttcttttgggttgtgctttcttgtatgatatcttctgggtgttcgtttccaaat

SEQ ID NO: 14134 - DNA, 274 bp, Gossypium hirsutum
  unsure (1)..(274): unsure at all n locations; Clone ID: LIB3829-030-Q6-K6-D4
aggtttataagnagtcccacacacaatataactgtctcaaaattcttataaaccctacaatagtaatgaagccaagatagcaggaacaaaatcaccaagtacggtccaggggatcaacggtagcggtgaagggagagtgtgttgtttgtatgttggcttgattactattgtagggtttatgggaattttgagacagttattttgtgtgtgggacattttatagatttttggacgcgtggttggtactgggatttttggaccggtacttgctggc

SEQ ID NO: 14135 - DNA, 578 bp, Gossypium hirsutum
  unsure (1)..(578): unsure at all n locations; Clone ID: LIB3829-030-Q6-K6-D5
nattccggtgccattctttttcgaggaacactttaccagtcaactacangatgggaagaagtttgttgatgtcttgcacgaccagnaaaatcgtacctggcatcaaagtagataagggtttggttcctctacctggatcaaacaatgaatcttggtgccaaggcttggatggattgtcatcaagatctgccgagtactacaaacaaggtgctcgatttgccaagtggagaacggtagttagcattccttgtggtccttctgctctggctgttaaggaagctgcatggggacttgcacgttatgctgccatttctcaggacaatggtcttgtgccaatagtggaacccgagattcttctggatggtgatcaccctattgggaggactcttgaagtagctgagaaagtttgggcagaagtcttctactacttggctgagaacaatgttatatttgagggcatcttactcaagcccagtatggtaaccccaggagctgaacacaaggagagggctaatcctgagactattgcaaaatatacgctcacaatgctgaaaaggagagttccaccagctgttcca

SEQ ID NO: 14136 - DNA, 534 bp, Gossypium hirsutum
  Clone ID: LIB3829-030-Q6-K6-D6
accctgtataagaatctctttgctgctcagatctttgcagtaaagagcctaagaagcgggaagagccaatcagcacggaaaaaagaagctggagtgtatgctgatcaaagtcccatcatctggcgctggtatcatcttctgcattgtaaatggtataggattatacggagcgcatggaagatatctcaaagaaagagcatttgactcctgaatttgctgaaatccattccatgaatcagctggctgccattgctgacggaaaattttaagttgtttgagagccactccattcttatatatcttgcttgtgcgtttcctggagttgcagatcattgctttacatctaatcttttctggagaagtatgatgcattcggtgttgtattggcattactccttcttacgtcgtgctgcagatacatatgttactaacactactatattacccgcgcttggcacatgcatcaaatcatcaaccagttgctgtacctgagaaacttctcttctcatgtttgtcaaagatagagtccttttg

SEQ ID NO: 14137 - DNA, 665 bp, Gossypium hirsutum
  unsure (1)..(665): unsure at all n locations; Clone ID: LIB3829-030-Q6-K6-E1
cccgggttcgnacccacgcccgtccgttcgnagggtcacctgttactttaaatttcgaaaaatgggtgtcccaaaccattgnatnngtgttgaagnaacgnnagctgcctcttagnagcaggnnagcttnngtggttttnngcctgaagaatgttgtcacttgggcccttgnnttcttgtnncgatatcatnncaatggctttctgcacttgnntcggtgctttggaaacctggccccaagnnagaacccaacagacaaatattcaggaatgatcagcngaatcagtgaggctttggcaagacttttttctgcgacaagaaattgccttgttatggncgtttctttgattctcatcatcctgacaagcccgaggatccttatcctcctcactgcattcaaggcaccgatgaatctaatttggttccagctttgcaatggatacaaaacgaaacaaacgtgacaatcaggcggaaagattgctatgatgggtatctgggttccatggaagctgatggttcaaatgtttttgcggattgggtgaagaacaatcacattgaagctatattggtagtaggggtgtgcacagatatatgtgtgctggatttcgtgtgttcgacattatcagtgaggaatcgaggatttctggctccgctcaaggatgtta

SEQ ID NO: 14138 - DNA, 572 bp, Gossypium hirsutum
  unsure (1)..(572): unsure at all n locations; Clone ID: LIB3829-030-Q6-K6-E2
caaaacagttgcttcacatggcctctaaaccatggctctttcttccccatcattcgccggtaaggcagtgaagttctccccttccacccctngaaatccggggaactggccgtgtttccattgaggaaaaccaccaagcctgttccttctggtagcccatggtacggtcctgaccgagttttgtacttgggtccactttccggtgagccaccatcttacttgaccggtgagttccctggtgactatggttgggacactgctggactctcagctgatcccgagacctttgctaggaaccgtgagctcgaagtcattcactgcagatgggccatgttgggagctcttgggtgtgttttccctgagctgttggctaggaacggtgtcaagttcggtgaagctgtatggttcaaggccgggtctcaaatcttcagtgagggtggacttgactacttgggtaacccaagcttgatccatgctcaaagcattttggccatctgggcttgccaagttatcttgatgggagccgtcgagggttaccgtattgccggtggaccactcggtgaagtgactga

SEQ ID NO: 14139 - DNA, 158 bp, Gossypium hirsutum
  Clone ID: LIB3829-030-Q6-K6-E3
ctccgtttcacttctgggcttcaaacgtctcaaatctaactttccccagttcaatcccttttccgaacttgacaaatacgagggacgaagtgctcattgtttcggcacagttaacaaagtggtacatacacaaggtttctatgctttcgtcatttcca

SEQ ID NO: 14140 - DNA, 584 bp, Gossypium hirsutum
  unsure (1)..(584): unsure at all n locations; Clone ID: LIB3829-030-Q6-K6-E4
cgccgntagnaaaaacaggcagcggctccgttcccagtttgggaacattggtgacgatatgtcgagttacttgcctngagggttcatctcaaggacccgagacaggggagtgattgttccacaatgggccccacaagtggaaatcctgagtcatccatcttgtgggggatttttcacgcattgtggttggaattccgcaatagaatgcatcaccaatggattgccaatgatcgcttggccactatacgctgagcaaaggatgaatgctacattgctgacggaggaaatgggcatagctcttcgatctgaaaccttaccatcaaagggtgttgtggggagggaggagatagagaagatggtgaggaagatttttgtggatgagggtggacgtcaaatgagggccagagtgaaggaactgaaacttagtgctgagacagcttggagcaatggtggttcatcatatgatgcactagctaaaatggtgaaacacagccagaaaaaagctatagaaatcgatgtttaacggcaatgtgtgtctccaaaataaaatttgtggcaattatcatgccaaaggaatatttcct

SEQ ID NO: 14141 - DNA, 434 bp, Gossypium hirsutum
  unsure (1)..(434): unsure at all n locations; Clone ID: LIB3829-030-Q6-K6-E5
cggncgcgtgggccagnatgtccatctcagtgcacaagnaggtgtagccagaaacagtaccataaaccatgcatgttcttctgtcagaaagttgcaggacatgcctttgtgttcctccagggtattatgggaacaaacaagtttgcccttgctacaacaactgngaaaaccaaggaaggaggccccaaatgcccttaaattactcaaaagaagacccttttttttttacattattatccctataaatttcctatttgaaattcaagtcatttaagcataaggttgcactgtaatactaactatatattttatgttgttagttgttactagtggtttaagtgttttgtttttttgtaccaaattgtcactccattaaaatgagagtggctaaactttgctctattttattaatgaagatggtgttgtttaattac

SEQ ID NO: 14142 - DNA, 562 bp, Gossypium hirsutum
  unsure (1)..(562): unsure at all n locations; Clone ID: LIB3829-030-Q6-K6-E6
gtgaaccgctgcagactcactacggnacagttgttcttggtgcaaccctttttccagaacatgaaaaatggatcatcggacagtgattccagtgctatcttaaatgaagacatcatcctcaacaccaacaccaacaagggcaatagccctaacaacgcggctttttcatcatctggggtgttagagctagacagccaacaccaccttttgatatcatcttcttcgtcaccaacatcctccatggattgcttcaatttcacaaaaacaagctatcaaccccaccagtacgtgaagatggaagaacataatttcttcactgcagatgaagcttgtaatttcttttcagatgaacaagctccaagtcttcattggtattctcctgaacaatggaactaaaatgaagctccaagatttttgtaagatgggaattatgtaagaagttaaaaattagtacccaataccatgatcttcagccagtgatggaagtcaataatgcagaaaagaaaagaagggaatatggagaagaagaggaagaccggggggggggggttcacgtgggatg

SEQ ID NO: 14143 - DNA, 357 bp, Gossypium hirsutum
  unsure (1)..(357): unsure at all n locations; Clone ID: LIB3829-030-Q6-K6-F1
tatgcgnnnatattttngnngtgaatnnaacactgnngcattcnnaaaagctnnccagctanannacagtgtntnngacttaaaggggnanntgagggnntgcaaagnngcaattggctgnnagttgttgaagaaaaaattcaacccttacnngtgcccttgaactcaataacaatatngatagactanttctggatttacaagnntttagcgggagcactttcttgagaataagaactanntccgcaattttcaacctaannatggtaattatggtgggtgctctgggnggctaatggcattgggccaaagggactcgagggggaacaanngtctttacgggaacttcatgtacat

SEQ ID NO: 14144 - DNA, 573 bp, Gossypium hirsutum
  Clone ID: LIB3829-030-Q6-K6-F2
cggccgcgtggggcaactactagcaaaaaaatcactaaaagctggaagaagagtgggtatgccattgtcccctgttgcttctcagtcattgaaagcatccaatgggttttctgatagcaagattgatgaagctcctaaagaagttctttaagagggttaggaaaaccggaagtttctgctacacaaaaggtttctcatacggttgttacaagcactgtcaagaagccttttggtgcaaagaagactgggaaaactggggggcttggtgcccggaagcttacttcaaagccaagtgaaatcctctatgaccagaagcccgaagaaccagttgcccctgttacttcctcaactaaaaacactgtgcccgttgcctcatcttttccatcgcgttttgagtatgtagaaaatggtcaatcttctgaatttaattctggtggcccacaagtggttagccacattgctcctccaaaatcatcaagcttctttgctgattttggaatggacagggggtttcagaagaattcaatctcaaattccccaaaagtgcaagttcaggaaacagatgaagctaga

SEQ ID NO: 14145 - DNA, 578 bp, Gossypium hirsutum
  unsure (1)..(578): unsure at all n locations; Clone ID: LIB3829-030-Q6-K6-F3
ggnaaagtngaagctcttgaacacaaagtcaatggcaaagtccgtcttgtcatgcgccaatctaaaacccttaagatctgtgctaaccatttcgttattccaacaatgacagtgcaagaacattctggaaatgataaatcatgcgtttggcacgccgctgatttcgctgatgggaatttgaaagaagagatgttctgtatcagatttccttctgttgagaattgcaagaccttcatggagacagttcaagaggttgcntgaaagtcagggaaagaaagaggaaaacaaagacgccacagtcactgctgatctcctcgacaagttgagtgttggagaaattaaaagtgatggtaaagaagatacggtcgttgcctccaacaccaaggaagccgtcaaagatgaagcaaaaacagaggaagataagaaagatgaggctgcttcaaaagcatagacctgaaagagaaagcaacaatatactcgagtaagtttattatatataattaatatttagtggtttaaggagaaaatatatatatattcccactcaggttacgtagttttcttaatatttgcaaaac

SEQ ID NO: 14146 - DNA, 381 bp, Gossypium hirsutum
  Clone ID: LIB3829-030-Q6-K6-F4
tacacatattcacataatcccccgtaaagcagtgattgcttgtggacttctgagagtttgcatcggcggaccctaaggtagaccaggaaacgtcgggtcttgcgaatcgagttcgagaattgctgctaaacatttctgaagagaacaaggatcaagtgtctactctgtcttgaaacttttgggggatcatttacatatatacagctttagctttagcttatgtaccatagaagtagatagttcattctttcaagaatctcgtcggtccttcgcaatggtgtgattttgcttgttcaagctggtatggaagattgtttcactatttaaaatgtattaaaattttaaagaacattttggtaataaattttaaatttaaccagt

SEQ ID NO: 14147 - DNA, 578 bp, Gossypium hirsutum
  unsure (1)..(578): unsure at all n locations; Clone ID: LIB3829-030-Q6-K6-F5
gtgacactcacctagncagtcttgtgggccaagcattgtttggtgatggtgccgcagctgttataatcggggcagaccccatgcccgaaatcgagaagcccatgtttgaactagtctcagcagcccaaacgatcttgccagatagtgatggtgcaattgatggtcaccttcgtgaagttgggcttacatttcaccttcttaaggatgttccggggcttatttcgaagaatatagaaaagagcctggtagaagcatttcaaccattggggatatccgattggaactcccttttttggattgctcatcctggtggtccagcaatattagatcaggtagaagccaagttagcactgaagccagagaagctacgagccacaaggcacgttctttcagagtatggtaacatgtcaagtgcttgtgttctatttattttggatgagatgaggaagaaatcaagggaagatgggcttcagaccacaggagaagggttggagtggggagtgctctttgggtttggacctggcctcactgttgagactgttgtgctccatagtgttgctgcttaaagttaaacaaac

SEQ ID NO: 14148 - DNA, 594 bp, Gossypium hirsutum
  unsure (1)..(594): unsure at all n locations; Clone ID: LIB3829-030-Q6-K6-G1
cggncgcgtgggnaaacctttgccttctgtttcttcttcttccatggcggatcctagcaacttctcaactgtatccgccgaagagaggcgaagtatggcttcacgcgcgaggagatgtactcgagtaacctcgctggcaccgtcaatccttacgaccgtcacttgttcctccgccataggtcctataccgattgggcttcccgcgttgaagaggactccctacctaagcttttctcctccactcttaagtctcgcaaaaacgacatccctgttaagacactgttgacggttattgaaggagagcaatctgatggagatgtgctgattttccctgaaatgatcaaatacaagggtttgaccgagggtgatctggatggctttgttgaggatgtgcttgtgaatggcaaaccatgggcttccggagtgcaggaaacgtttactggttcttatgtctttgtgtgtgctcatggtaatcgtgacaagagatgcggtgtatgtggaccgatcctgattgaaaagctgaatgaggagattgcattgcgaggattgaaggatcaggtgtttgtaaatgcttgctctcacattggagggcac

SEQ ID NO: 14149 - DNA, 584 bp, Gossypium hirsutum
  unsure (1)..(584): unsure at all n locations; Clone ID: LIB3829-030-Q6-K6-G2
gtgaaatctatcaaaggnagaatactcgagaatgaagggacgtattggtaaatgttgtgaaatggatactttaaacaggtatgtacttaacgctcgggttgaaaactcgacataacaacaatatggtaagatggtaaatgaaaatgtgatatgaatgtctcagtgatgattatacaaacgatgttatattaattttgtgaacaatgatcatgaatgagtaatttagccttgacagatttgagttactgcagtagtgtaactttgaaaatacactaaaaatagtggaaaatgagttagaggcagaataaaatatgggattaaagcttaatgagtctattttcacatgaaagaaatagaggaagaaaaaaaattccatattgtgtgatatttgaattcttgtgaaacaggatctgaatgaattcgagatcccctattctgaatttagaaattcaccaaaaattgtacaaaaattattaagagtcataccttacattcatagattccttatttagtctatttttaggggaaataaacggcatggtcgttggaattttgtacagggagaaattcggtttgtagtgcac

SEQ ID NO: 14150 - DNA, 480 bp, Gossypium hirsutum
  unsure (1)..(480): unsure at all n locations; Clone ID: LIB3829-030-Q6-K6-G3
aaaaaacaaatcgaaaggaaaaaagaaatctcaaatcacctcttagagactgtttctctttttattcaaacttttgaatcgattttgtatagactcgtcccttccccttttacatcctttcattcagttttatagcccgaaaaataaataaaaataaaaagaaaaagaaaataaaaaaaatccttgttattcttattcctttactgtcaattgctatttgttattccgttttgcaggtgtgtatggcatggagtgaagctgtttgtgggcgtgctggcgtggaggaggcagttggagactgcagcaactgaagctcttagggtttgctgagtagtttttttttgttttgggctgggatttgggttatttgttgggtccggtttattcttggttttaggtctaaagtttgggtttgtattttatgactgcaaacaatttaattttatttagtttatttatttatttgttgtanntannnna

SEQ ID NO: 14151 - DNA, 589 bp, Gossypium hirsutum
  unsure (1)..(589): unsure at all n locations; Clone ID: LIB3829-030-Q6-K6-G4
ggnagnatgaagctttggtgctgcagctcagggcagaggaagaggcagaggaanatgtggccccctcacatgccactagcccgtggtgccagacccatgcctggaatgcgaggttttccaccgatgatgatgggtggtgatggcttttcttacggaccagttacacctgatggttttgggatgccagatctttttggtgctcctcgtccttttgcaccgtatggacccaggttttctggagattttacgggtcctgcatctggcatgatgtttccagggcgacctccacagcctgggggaatgtttccatctggtggaatcgggatgatgatgggtccagggcgtgcaccatttatggggggtatggggcccacaggtgctaatcctgctcgaggtggccggcctgttggcatgcctccgatgtttcccctacctccagcacctgcctctcagaactctggccgggctattaaaagagatcagaggacaccaaccaatgacagatctagtgcaggatcagagcagggtagaggtcaggaaatgggtggtccagggggtgggttggaagatgagacacagtatcagcaag

SEQ ID NO: 14152 - DNA, 578 bp, Gossypium hirsutum
  Clone ID: LIB3829-030-Q6-K6-G5
ctccggtctccgtcgagccgagcctcggtccttggcttcacgcgcccatgcgccgtcaccgactcctccccgttcggtggccgaagacccgaaaccccgatttttctacgcaaataagggttcgacctttttcttttcattatttacagtatataagtacatatatgtaaaatattttacctttgtgtatctcaattaactgtagtatcctactttgtgtacgtatgtaaaaataagatttttattgcatctatgtatgtatttcagaaacctcaaaatcatccctttacatcctctcaatttgggctttttatagccactgaaaaagaaaaagaaagaatctttacaatctttggtttatttcttgccatatttgttctgtttctgtcgttttctttctatttttgcaggtatttgcgagaaatccagcggtggcgaaggcttcgatgatggcggtgacggtcccggccttgactgcattgatggcctcgattcggggaactagacagacactccccaaagcttccagaatcctttacggcgcgagtaaaaaaaaagagaattaggaagaaacccta

SEQ ID NO: 14153 - DNA, 203 bp, Gossypium hirsutum
  Clone ID: LIB3829-030-Q6-K6-G6
aacgtaaaagtttttttatagggcaaccaaaattaaattaattggccggggtttaaaaacgtcggaactggaaaaaccctggggttaccaaattaaatcgctttgaaaaaaatccccttttcgccagttggcgaaaaagcaaaaaggcccgaaccgatcgcctttccaaaaagttgcccaccctgaatggcaaatggaacccc

SEQ ID NO: 14154 - DNA, 297 bp, Gossypium hirsutum
  unsure (1)..(297): unsure at all n locations; Clone ID: LIB3829-030-Q6-K6-H1
gcanagtggttagaaggattgaaaagaaggaacatcaatttggcttttctaagtactccgcaacatcgactctggaatcagcataaaaaatctataggaataaatgtatccaaatttcaatagctttactattttgacatatatttgattaattcataggcaacttaggaaatggctctataattagataaactgagatacataccttggcttatctcttgtgtgattcatcttattttttatgctctcgcagtgtacagcatctgtgtcaaaaatttgcattatcctttggatttc

SEQ ID NO: 14155 - DNA, 583 bp, Gossypium hirsutum
  unsure (1)..(583): unsure at all n locations; Clone ID: LIB3829-030-Q6-K6-H2
gnaactagcaatggagtcacttttctgaattcatnntgtgacataaaaaacctgataactgaacttgacctccctgtgactgagtgggatgaaaaaggatggatgtgtacctggatatcagtgtgaagttgcttgatattagtattgcttttacctctgagcttacacggcttaaccaaggccatctcttacttcaatatggtctgcacaagttggagtcggattccccagaactgttcagtcgggcctcttcctcacttaatagctggaaacagcacattggctccaaaaatcccagagttgaaacttgtcgacctatcttggacaaccttgttgagtcactaaacttgcctaaggtaaaaaactcttccaaaggaaaagtattgatgcgtgctatgtatggagctaaggtggcaactacttatatatgtagtgtctttgctgcagctctctctggttcttccaagaatttattggacttaactgttcctaacacgctaccatgggcacaagttttttctgatgtccaaaatactgtgaatgtagagattagaaatatattttcttgcggaaaatttacagt

SEQ ID NO: 14156 - DNA, 543 bp, Gossypium hirsutum
  unsure (1)..(543): unsure at all n locations; Clone ID: LIB3829-030-Q6-K6-H3
gcgttcgcggncgcgtgggcggncgcgtgggnaaaaaaaaaaaaaaaaaaaaaaaaaaaaaaaaataataaaaaaaaaaaaaataaaaaaaaaaaaaaaaaaaaaaaaaataaaaaataatataaaaaaaaaataaataaaattaaattaaaaaaaaaaataaataaaataaaaaaattaaaaaaatcctttcgtttttttaaattaatacaacttttatcacatcttttttttcagggatttaatttttttttttttgagttcaaaaattttttttccttgccaactttttcaaagtttgaatgtggaataaaacgcgccttgtaacgttttattacttttttcaaatgtctttttttcgctttttgttgatctttaaaattgccagaaacctacctttttttcatttttttttcttcccttcctttattttaaattcccccttttttccccctttaactctaatttgttggctttttttccgctttttatctactttttttcggcagttttaccccataaaactttttttttttgattttt

SEQ ID NO: 14157 - DNA, 599 bp, Gossypium hirsutum
  Clone ID: LIB3829-030-Q6-K6-H4
ttctacaaaaactcatctttaatctccatcctgtattgatgttgattggcttcattatcttaggaggtgaagccattatgagctacaagtctttgccactgaagaaggaagttaagaaagtcatacatcttgtgctccatgccactgctctgattctaggcattattggaatctatacggcattcaagaatcataatgagagttcaatacctaatctctacagcgtgcattcttggcttgggattggaatcattaccctttatggcattcagtggatatatgggtttctcatattcttctaccctggagggtcgaccggattaagaagcgaatcacttccatggcatgtactgttggggctgtttgtatacatcttggcagttggcaatgccaccttagggttcctggagaagcttacattccttgagaactcagggcttgataaatatggtgccgaggcataccttgtaaacttcacagctattgtcacaatattgtatggagccttcgtcatatttacagttctctcccagggtcctcaggaagatgactacagctattcagctatataatttcatgtaatatatctgtacctatgt

SEQ ID NO: 14158 - DNA, 581 bp, Gossypium hirsutum
  Clone ID: LIB3829-030-Q6-K6-H5
cattatttacgttaagttcaaagaatggctgatcgtgtgatcactcgcgtccacagtctccgtgagcgtttggatgagacccttcttgctcacaggaacgagattttggccttgctctcaaggatcgagggcaaaggaaaaggaattctgcaacaccatcaaattattctagagtttgaagctatccctgaagagaacagaaagaagctcgctaatggtgcattttttgaagtattgaaggctagtcaggaagcgatcgtgttgcctccatgggttgcacttgctgttcgtccaaggcctggtgtttgggagtacattagagtgaatgttcacgcccttgttgttgaggaactcactgttgctgagtatctccacttcaaggaagagcttgttgatggaagttcaaatggaaactttgttttggaattggattttgagcccttcaactcatcattcccccgcccaactctttcaaaatccattggtaatggtgtggagttcctaaatcgtcacctttcggcaaaattgttccatgacaaggagagcatgcaccctttgctcgaattcctcagagtccattg

SEQ ID NO: 14159 - DNA, 453 bp, Gossypium hirsutum
  Clone ID: LIB3829-030-Q6-N6-A1
agtaaattgaactattattattaagatgtgacttatattcaagcttttagttccacatgtaaagaaaccattttacataagaattaaactcaggactacatttaatattgcaaacaaaaacccttatttgtgtcactttccatcagtttattcgcaacgttattggttcttgaattaaaagtttggaccggctgctaagatctcttgagtcagcttggtgtccttgccaatcttgtaatttgtgaaggtctcaaagttgttcttgaacagacaacctaatttcaacaatgtgtttttgtatgccttcttgtcaccccaggtgttctctggacgcaggatttccgacggctctccctcgatctcagtggggatctctagcccggacacgtcgattttctcataagttgccttccggaggcttccggggtgaatagcatgggtgatttttcgggt

SEQ ID NO: 14160 - DNA, 588 bp, Gossypium hirsutum
  unsure (1)..(588): unsure at all n locations; Clone ID: LIB3829-030-Q6-N6-A3
ggccgcnnccttttttttttttttctcttttttagttacaatttggtcacaattaagattcatgtgaacttaggtttaagcatagatgaagcattactttgaaggtgcacgggaccgagcttttgaatccgatgaagaagccctttcttatggtcttggcaagttaggttcggtaccgaattcagggttccgtcttgattaaatgatgactcgaattgttccaacacttttactatctgccagaattctggccttttttctgcgtgtaatgaccaacattgctcgattaatgctcgcatggcaggcggacagtctcccgggactaccggtctcaaattcttgttcacaactgcaaatgcagcttggataggattcatatcctcgtacgggatcgtaccggctaccatttcccacaagattagtccaaagctgtaaacatccactttccgtccatacggtttccttttgatcatctcaggtgccatccatcgataggtccccggatcatctactaatagatcacaatgtgcctcctcacaggctataccggaaatcagcaattttcaagtgggaattcctcgttgataa

SEQ ID NO: 14161 - DNA, 546 bp, Gossypium hirsutum
  Clone ID: LIB3829-030-Q6-N6-A5
aacaataatggaaccaaacataaacagttgaagcactccaacggccattgctaggataattaaaaaacagtaccagcaagaccagtgtctttagaaaggagatacctcttgcgcttacaacatatatattttttaacatgatacaaattctaaactgatacccctaatttaaaaacctccattgatcttccacaaatgtcaaaaatcccattgtagacagaccactagagacactaaggaaaaaaacatgacgaaggtaaaagatgcttagacctaagaaaatacaagaaattacatgatagttgtgtttttagggactcaaatggcttcccaatcgatttccagtgatgggaacttatctaaactgaagttttcaatttcattgtcttcccatttggaatcagagaaatcaaagaaagtgatatcagattctggtgaagataatgatcctgctaatgatgattcatcaactgatgatgatgatgatgatgatgagttgtcttgtttatgatcaaactcctcggttttgatggggtaatgaaactc

SEQ ID NO: 14162 - DNA, 529 bp, Gossypium hirsutum
  Clone ID: LIB3829-030-Q6-N6-A6
gggagaaaaagataataacattacttggaacaaatagtaacaacaattgtctgcaattttagtcagccaccagaattaacttaaaacaaagaacagatgaaagtaaccaaaccgaaaagccatccccttttagctttgggtacatttcctaaccacaaatagacttcttaacttttcctcgactagcagctttccggttcatccatcttactttttagtatctaacatgttacatgtacacaactaaaaaaaaagcattttgacaaaaagtagactcatagaatacaagagcaagagagacatcattgacatatatggatcgagagaaggcagccaccacactaccaaaggctgtatgtgttatggaagcgtacaaaatgatgccggataggcctcaaatcaaccgatgataatccaaagatagtaattctttttgtgtcacgcatcaaactacagacatcgaatttgaaaacggttttgaagtctcatgtcccaggcggatgcatgaaatgttgaagtcctatttgcc

SEQ ID NO: 14163 - DNA, 332 bp, Gossypium hirsutum
  Clone ID: LIB3829-030-Q6-N6-B1
gaatactgaatacggagatagggatatatattgaaaagtgcagaaaatgaagaaagtaggggcaaacataaagcattcaacaaaaggtattttaagattcagaggacactcttccttagagttacaaacgacaaccgacacacaacagaagtacacaaacaaaggattcttttaacctttttattattataaccaagttctttctacttcacataaagagttctcaaagcccattgcatccttcaaccgcatcttggctcagattttagccttgcggaccaattttaccggatgctactctgccgcccgcctttcctgtgcttttgctgggc

SEQ ID NO: 14164 - DNA, 417 bp, Gossypium hirsutum
  Clone ID: LIB3829-030-Q6-N6-B2
ctaaacgaaccaagtcatattagattcaacatgtagccaatttacaatggcaaagcatcacattgcctctctactaacacactcagaaaccaaacacctaatctgaatctgattcagatttatgatcatccgcatttgctttctcttttccttcagcttccttaacagccttcccaaaggcatcaacgggaatcgatggtaaatacccaaccacaggataaccttttccgctcttctcctttaaccaactgttgtatttctcacacaaattagctgctttgggaacaaccttttctgtcactgagttgaaagtcaagttgctgttcagtttaacccacaacttggtcgggcttaccaacacccagttcttgtactcagctgcagcgtagtgcaaagcccctcgtgctccattgggtc

SEQ ID NO: 14165 - DNA, 456 bp, Gossypium hirsutum
  Clone ID: LIB3829-030-Q6-N6-B3
ctctaagactactgccaaaaaacattaatgggatcaaaagaaaggaaattaggaataagtacagattttaaatcttattttttgtataaaccatccccccctccctttgattcacatgaaataacttgtccaaaacttgttcccagtagcattacaaagttaaacatgcacttctcttacataatcttaattccttctagtacatgcccctttttgagcttagtaaaaacaacctttttgggccacggggattaatatttatacgggggtaaccggctctcctttggttgagacactggatctggcggcaggaaaggcgggggcttgtttcttggatgctattgaacatttatcctttttttcatattgggtcatctgctggtgcctgcactctaaggtgcaaaaaggtggatgaccccctatacatgttggatattaagggcagggaacaagggg

SEQ ID NO: 14166 - DNA, 431 bp, Gossypium hirsutum
  Clone ID: LIB3829-030-Q6-N6-B4
agttaaatctattgattgatttttataataatatgtagaaataacaagctgacatagtattacacatgccataatatatttgccgcatcaaattttaaaaataacaaaacctatcttaatgaatttaattgctaccatttaatctcatgttctatgttcccttgaagttgagcaccttgatccactaaatcttcctctttgtatagcctcctcaagcacaagcaaatggcaaccccaactaatatacccacacttgccactggaaccatgatccaaacccacagttgattgccatttcctcctatatcagtatcagaaaacgcccacgatttcacagagttgagctcagtttcattgcttgttgaaccaaagaatcccatgaaaacctcctgcggaagataagtagagagatctacaggctaagaacgcac

SEQ ID NO: 14167 - DNA, 445 bp, Gossypium hirsutum
  Clone ID: LIB3829-030-Q6-N6-B5
gttccaactctctctttaattcttttttaagtacccatattcaatatttgtgtcccacataagtatggagatatgaacctccaatgactttccaatttcatggaagaacttgaaaagaaaaattatacatccaagtccaagtaaaataaacaccaaccaaccgggccaaggtctagattccaaaattcatggagcatttattttacagatagtaagaactaacctcttaccatcaaaccgtagtaatcgtgctcagtcctgactctgaatccaaattattgtatccaactatgatctcaacacattagaaatggtgatgtttgcaaatatcaatggaggtagggagtgaaaacttccaaaaccttattgtaaacaggtttcttgaaatccactgcatgctcaactatttgctctggtggcatccaagaccattcaccaaactcag

SEQ ID NO: 14168 - DNA, 384 bp, Gossypium hirsutum
  unsure (1)..(384): unsure at all n locations; Clone ID: LIB3829-030-Q6-N6-C2
ggatcgatactgcaacctagtttattattggggcatttcaattacaaaatgcacttcacttagttataaccaaacaaagagatattgtgaagtacaagagtaacataacctaaaaacaactagcttaatgtattgtaaccccaagacattttaccagacaccaacctccatgaacccatcctcagtggcacagcccctgaacatcccggtggtgttnancccacaagcatcctcaccgttctttgantcaggantcancccagctttgcctttctccntcctattngttgtctctttttctcctccctcctgcnggttctttcctttgttctccctcactgccccttcttccctcgccnggtgcttnttttgattgcttctcct

SEQ ID NO: 14169 - DNA, 532 bp, Gossypium hirsutum
  Clone ID: LIB3829-030-Q6-N6-C3
ctaaaatcaattttctattcataattaattgaaattagttggttttaaagccaaattactggattcaataagtaacttctaaaacacttacaacccattgcaagtaactaatgtgtaggaaaagcaaacaacaatggccgaagaccaagctggtttctttatattggtgtcaaacccacaacaccacatgccaatcttccacctgcatttcctgtcgttaggctaagttcatgtccaccctttccaaggtcatcctcaagctcatgaactacaaatgctcttccaatgacagaatttgggccacttagtggtatctgcttgtccacgactgttgcctctgccactccatcagcattagcaactatgtttcccaggtcacccgcatggcggactttgtcctcaggagcaccatgtgtcatacggttaggattgaaatgtgctcccgttgacatgcatccatttgttgtgtcaccatactcttgaaggtggaacccgggaagccctggagtgggaccaggtacacgaacattcc

SEQ ID NO: 14170 - DNA, 566 bp, Gossypium hirsutum
  Clone ID: LIB3829-030-Q6-N6-C4
gttcgacgaaggtattctttcattcttaattatttcacctttcaaattataatcaattaattattgttatgaaattatttgtaggaaactggacatgttcagtttttattcctatgattttgttgcagcaataaatctcatgcaaaagctgcctgccattgctgatggaagatttaagttgtttgagaggtatttaaaaagtatttcatataccccttgcttttttccccccatttcaaaggtttcctacatattcagtatatataaatttttgcagccatgccattcatatctatcttgcttatgcgtttcctggagttgcgactattggtaagtgcagtttctttctcttttggagagtattgacagcgatagcgtctgttgatattgaatattttccatgcttatttgttggagttccttgctcagcttctttatactaatttacagtgctacatctatatttgcacgaatggttgaatgacatatcatcatactaggattaatagttgccaccaaagtaattggtttacatatcagcatttagagatcaaacttaaatttaa

SEQ ID NO: 14171 - DNA, 580 bp, Gossypium hirsutum
  unsure (1)..(580): unsure at all n locations; Clone ID: LIB3829-030-Q6-N6-C5
gatgctaattgtatctttaactgagcaatagctacaaacactacaaatcttgctgataatgtcagatcagccttttaaaatatggttatattatacatcaatgataaacttgccccaaagctcccttttgcaccttacctcgtagtaaaactagtgattaaagggcaaagtcaaaaaaagtggatgctaaagttagaacaagatccatccttctgccaattccatggcagtggttttaacacctctgaatttggaagaacttcattaaattgatcttcttaatggaaaggcatccaccaatgagcctatgtaaagtccaatcaatttgtttttgacttttttatctgttaaaggaggcagctgaagtatcatcataatgtcctctccatgcatttccactgtcgatctcactacaagcttgattgggaactggcacatttccaaggtcaccatccaagctcatttgttgtacttcaagggatgacagtattttaatgctctgaacacaacttacaaattcttcccaagnatcatcaccaacaagtaatatgtcattttcatggtcaacatatactaattt

SEQ ID NO: 14172 - DNA, 565 bp, Gossypium hirsutum
  Clone ID: LIB3829-030-Q6-N6-C6
agaaaaaggtaatcaacaccactgctttaacaaaggttctacattaatccatctaagcagctctgtaatcaaaagacaaaacaaaggctaatccaatctatcctgatgctgcaccttaaataacaggaatttctttcacccaaccgaaaaaaaaaacactttgacccctacaaaacactagtaactgtgaatatttgctagccacaagcctaagcatatgtcaatactaaatgcatggctagctgcactgtggacatttaaaaaggctccaatgaaaactaggattcagataagttcgacaatggacaagaaccatcttggctggctatgacggttcaggtgaagtggcttttggctcatctcgcagcttttttgcaggcttgggatcatttccctgtcccttagatgaacttggggttttccgctttgcagtttccacaacctcagctgaatcaggtgagctctcttttatgctctcgccttctttcacctttgatgaaccagatttcaatttaccagtaccattagtgtctggtttaccatcattttttagaggcttatcctt

SEQ ID NO: 14173 - DNA, 453 bp, Gossypium hirsutum
  unsure (1)..(453): unsure at all n locations; Clone ID: LIB3829-030-Q6-N6-D1
aacgcaaagtctccatatagtgtaagttcattggtagacaagggacaaaatctccagttcatagtcatttctcattgctagtcaaaacatttttagatggaacaaaaagaaataaatcactagactgactacctatctttgtctatataaacatgaaatcccttccttttaaaacaccaagcgataaaaatttcatgttgcacaagctggtaccaagcaggaaaagaatcctggcatcttctttcgcttggaagagtgaaggagctcaggggggattttgtagagatcttcatcaacaggtttaggaggtcgaacaggtnctctcttgggaataggagggggaacggcctcgtatttggagggcttactattgctgcttgtagtgttggcattattaattggcaaagacagatggtgggggggattttggtggtgtttccttggggggtcggg

SEQ ID NO: 14174 - DNA, 336 bp, Gossypium hirsutum
  Clone ID: LIB3829-030-Q6-N6-D2
agcttcaaactagtctgttttactggttaatttctaaacgtgtcgcaataactattctgcaaatattacatttgtagcttctctacaacctaaaagagcaaaaaggtttatcaactggcacacatttgagggacttaattggacagggttttattaccattattctctctgttctaagggctgaagttggacatgcgggcaaggcctttccggttctcctcttgtccagagaggtttgagatcacctctctttttccccaatgtaataaatggcccaagaatgaaaggaacaatgtaaagcaacccagggtggccggggccctccctcaagttcaa

SEQ ID NO: 14175 - DNA, 234 bp, Gossypium hirsutum
  Clone ID: LIB3829-030-Q6-N6-D4
ggtaaaatctaaaatcccatttctagtatttaataaaaaatactcaaacaacacaacctcaatatgacaatagcattggacattttcagtgagcacataaatctcaatagcctctaacatagaagattttcaagatgtcccacacacaatataactgtctcaaaattcttataaaccctacaataggaatgaagccaagatggaaacagcacactctcccttaggcggtaccgt

SEQ ID NO: 14176 - DNA, 416 bp, Gossypium hirsutum
  Clone ID: LIB3829-030-Q6-N6-D5
aacccgaacttgaaatatcttcaaaaaaaaaaaaacatcgaaatacaaaatcatccaagcctaaaattgattgaaattgatctgccagccaaataaactatcttaaatatgaacctgtttcgttcaaaaggcgtcaagggaagtgattcgaggattgtttcttctactctcccaagtaacttattcaacctccctagtttcaggaggcataacaataatatgtaaaaaacttatctaacagcaagtaataatcctcgcacaaaaagccatagatgcccaaaaaccagatattacagtgtcttacgccttaataggtatagcccttaacaaacattcctttcttggcttcttcactttcaccctcggcagagtattttccgagttgagccagagagtttgcctttgcacgcaccaaa

SEQ ID NO: 14177 - DNA, 334 bp, Gossypium hirsutum
  Clone ID: LIB3829-030-Q6-N6-D6
ggaggaaatccaatttatgcactaatgataaaatcataagagcgtattatattttaaattgaatttgcaagaatgaataaaagaatatcgtaccatttgacattttgatatgccataatgtcaatcacccttcttgccaataaattatttaaacccccttgaacaaaggataatgtatgatttgttaccagacaccaaccgggttggcatgattccccttttatttcctttcagattaattactgaaaggtcttgttcaacaaactctcccgtacatatggatgggaatttgctaacaaagggtgattctgcaaaagggccgagagggtttaaa

SEQ ID NO: 14178 - DNA, 473 bp, Gossypium hirsutum
  unsure (1)..(473): unsure at all n locations; Clone ID: LIB3829-030-Q6-N6-E1
aagtgagaaagagagataattgtgcttattaacaacaaatacacggcattataattttgaaggcccactatgtaagagtaaatgttcaacttaacagttcatacatacttgatctctatccaaaagaaactcgagcttctaaattcaagatacgctatttcaggcctcctactagcttatgaacttattttaaagcaccaaacaagacttcatttgcaatcttggctcccctttcttttgccatgtaaagccctatatggtgcatcaattcctgagggtgaggcagagctccttttgtgtttgtggcgatgtgaagaggaacatcaaaggttgcgcaggcacgcgaatacccgataacatccttgagcggagcccgaaatcctcgattcctcactgatgntgtcgagcacacgaactccagcncacatattttctgtgcacacccctactaccaatatggcttcaatgtgatt

SEQ ID NO: 14179 - DNA, 467 bp, Gossypium hirsutum
  unsure (1)..(467): unsure at all n locations; Clone ID: LIB3829-030-Q6-N6-E2
gagcacacaaacatcacattctgctttcattgattgtgcaacaaatttacattcacaccaacaaataaaaacatgaacaagacaaatcccttttcactctctaagttcactttccggggacaaagttggtggcataggcccaagcattgttgttgactgggtcagcanggtggtcagccaagttctccaatggtccctttccggtcacgatggcctgaacgaagaacccgaacattgagaacatagccaacctaccgttcttgatctctttcaccttgagctcagcgaatgcctctgggtcatcagcaagacccaatgggtcaaagctaccacctgggtacaatgggtcagtcacttcaccgagtggtccaccggcnttacgggtcccctcggcgggtcccatcgggatccttggcctgccccgttggcccntttgctttgagcatggattcagcttggggttcccc

SEQ ID NO: 14180 - DNA, 543 bp, Gossypium hirsutum
  Clone ID: LIB3829-030-Q6-N6-E3
aagcaaaagagaaaccaacaccgaaatcttattccgacaaacaacgggccgaaccgtactattacaagctctatatacaccagactacattcttgcatacattaccccatactacactataagtttcacatttgaaagacctaagcatgcaaacagtaccaaaacccatttgatttgtcgccaaatatgggagaggactcatatctcacacgtcgtaaggaggacgagggctccttggtccaacctcgttagccttctcgtatgcatccgatgtggaccttctccgaaaccgatatgattctctgccggaaaaaggagataccggaggggtcgatccggccggcgaaaccggaggcgatccgctctggtaaccaggcggttttacgatcataatactacgtgtcactctcgtcgcttcctccggggcttcatcaccgtacgatcttacactcccgccatccgattccttggcagagttagggccggaaagggaaagtggagtgctttgggagcttggcgggacccttatcgggtcgggggccc

SEQ ID NO: 14181 - DNA, 433 bp, Gossypium hirsutum
  Clone ID: LIB3829-030-Q6-N6-E5
gtaattaaacaacaccatcttcattaataaaatagagcaaagtttagccactctcattttaatggagtgacaatttggtacaaaaaaacaaaacacttaaaccactagtaacaactaacaacataaaatatatagttagtattacagtgcaaccttatgcttaaatgacttgaatttcaaataggaaatttatagggataataatgtaaaaaaaaagggtcttcttttgagtaatttaagggcatttggggcctccttccttggttttccagttgttgtagcaagggcaaacttgtttgttcccataataccctggaggaacacaaaggcatgtcctgcaacatttctgacagaagaacatgcatggtttatggtactgtgtctggctacacctccttgtgcactgagatggacattctggcccacgcgtccg

SEQ ID NO: 14182 - DNA, 569 bp, Gossypium hirsutum
  Clone ID: LIB3829-030-Q6-N6-E6
aaaggagcaatgatgattaatgttcattattaataataataatattattatgggttcagcttctctccattaaaggaagtttcactttccaccaatggattatggagaattttccatttacagcagaagagagaaattaaaaggtcccaattacgatctaatcattcccgcacgccccttctttttggtgtttgtcaccttttgcccccatcccacgtgaacccccccccccggtcttcctcttcttctccatattcccttcttttcttttctgcattattgacttccatcactggctgaagatcatggtattgggtactaatttttaacttcttacataattcccatcttacaaaaatcttggagcttcattttagttccattgttcaggagaataccaatgaagacttggagcttgttcatctgaaaagaattacaagcttcatctgcagtgaagaaattatgttcttccatcttcacgtactggtggggttgatagcttgtttttgtgaaattgaagcaatccatggaggatgttggtgacgaagaagatgatatcaaaaggggga

SEQ ID NO: 14183 - DNA, 570 bp, Gossypium hirsutum
  Clone ID: LIB3829-030-Q6-N6-F2
gaaatgccattttggcaagctttgatttttgattttcattgtttcaggtccccagtacacacacactatccgctctgtgctgtggaggtttttaaccatcttatttctcactgtcaaccaattgtatgataaacccacttttgctcttcattcactacaaaaactcgtatatattcagacccaaaacactacattacagcattctatcctgcaggtccgacataaaagtggatgcaaatgagctaagtttctttccagtctcccctgcaatgttcttaaggttcgacatatcgtgttgtgccctggaaagagaatcggttgatgaggtcactagcggggaggccctgatctgcgtctttacccaataggacagccctggagatggctggtggtcctggagaattctgcccagggacttgagcgtcattgtctgctggtcttggctggtcccccaaaaaagggcctcggtgaaatagattggggtttcaagaactttttttgggtttgtgttgttgcctgagccttgggccttttgggggggttgggggatggggttttttttgaaccccc

SEQ ID NO: 14184 - DNA, 422 bp, Gossypium hirsutum
  unsure (1)..(422): unsure at all n locations; Clone ID: LIB3829-030-Q6-N6-F3
attgttcaaattgaatacctctgtattaataatggtanaaccagaataaaggattcattcaattctacattgaaattacttttagaattgtgattttaaatccaactagaaagcaaatttccatcaaaacatcggtttgcccttcaaaccaaacgtaatacctttagattttccatgcagacaaacaaacaaacaaacaaaccctcccatccacaggttccaacataatttgattgttttgcaaatattaagaaaactacgtaacctgagtgggaatatatatataattttctccttaaaccactaaatattaattatatataataaacttactcgagtatattgttgctttctctttcaggtctatgcttttgaagcagcctcatctttcttatcttcctctggttttgcttcatctttga

SEQ ID NO: 14185 - DNA, 385 bp, Gossypium hirsutum
  unsure (1)..(385): unsure at all n locations; Clone ID: LIB3829-030-Q6-N6-F4
actggntaaatttaaaatttattaccaaaatgttctttaaaattttaatacattttaaatagtgaaacaatcttccataccagcttgaacaagcaaaatcacaccattgcgaaggaccgacgagattcttgaaagaatgaactatctacttctatggtacataagctaaagctaaagctgtatatatgtaaatgatcccccaaaagtttcaagacagagtagacacttgatccttgttctcttcagaaatgtttagcagcaattctcgaactcgattcgcaagacccgacgtttcctggtctacctttaggggccgccgatgcaaactctcagaagtccacaagcaatcacctgctttacgggggattatgtgaatatgtgtacc

SEQ ID NO: 14186 - DNA, 417 bp, Gossypium hirsutum
  Clone ID: LIB3829-030-Q6-N6-F5
gcaaaggaacttattattgccataaatttaatataagttgatacatgaattgaataggcgttaagcttcccgcccacaccatcaaagacctctagtctttaacaataaacacacaaattcatgggatttaaataatctaaaaaggaaaaaagaagaagataaaactgcaagccaagtggagcacgaccaattacttaaaaagcatgtttgtttaactttaagcagcaacactatggagcacaacagtctcaacagtgaggccaggtccaaacccaaagagcactccccactccaacccttctcctgtggtctgaagcccatcttcccttgatttcttcctcatctgatccagaataaatagaacacaaggccttgacatgttaccatacctctgaaagaacgtgccttgggggctcg

SEQ ID NO: 14187 - DNA, 473 bp, Gossypium hirsutum
  Clone ID: LIB3829-030-Q6-N6-F6
aaagatcttattttcgttgaaaccttcaataaatgtttcaaaaacccttcatccaagccagatggcttacatccatacttcctttcatttccaatttattcataccaagacaacacaaaagctggggactccatgatttattcagttttctttcacatgtcatattcttgaacgcaatcgcttttggatgtcaagcgcacctccatgatttgcttccattaacggcttattttttagtttttctttgactttcatgaggatattatgcacgttgtcaaagtgaggactcgtagcattccttgtatgcttaatccactgctgaactttcttgtatggacccaaaaacctctcacgatccttctcatccaaaacctcaaggtgcattagctcacaaacaaggctaagatcaactatggaggggtgattcctaccccgcaaaaaagggccattacccttcaacccaaaggactcta

SEQ ID NO: 14188 - DNA, 558 bp, Gossypium hirsutum
  Clone ID: LIB3829-030-Q6-N6-G2
accacattcatactataatcattataaactcatcacataataccatagcacatgcatgcataattaaattagatttacaatcccataatcaaaataggccaacacatatggttaaagccatatcacttactctaatatttaaactcctatacatgccataggctcaaagtacttgaaatcactacaccaatagcgttagcttgacagtgtgataatatctctgacggcttccaacccgagctaacctggaaactctagaaaacatgggaaagaagaggggggtaagcttttgcttagtaagttcatatgaaaacaataagcaactcattaatttgttttatcaatgtttacaacatattctcaagttcactacaagctgtctttctgagcaacgatcactaaattctttatatctggagctacgaaactccgaattaagttccgttaattttccctgaaactagacttgttttcctttcttccataaaatttccagaatttttggttaagccaaatagtacagtttattcctcaaatatacccctgattcactgtctg

SEQ ID NO: 14189 - DNA, 473 bp, Gossypium hirsutum
  Clone ID: LIB3829-030-Q6-N6-G3
acaacaaataaataaataaactaaataaaattaaattgtttgcagtcataaaatacaaacccaaactttagacctaaaaccaaaaataaaccggacccaacaaataacccaaatcccagcccaaaacaaaaaaaaactactcagcaaaccctaagagcttcagttgctgcagtctccaactgcctcctccacgccagcacgcccacaaacagcttcactccatgccatacacacctgcaaaacggaataacaaatagcaattgacagtaaaggaataagaataacaaggattttttttattttctttttctttttatttttatttatttttcggctataaaactgaatgaaaggatgtaaaaggggaagggacgagtctatacaaaatcgattcaaaagtttgaataaaaagagaaacagtctctaagaggtgatttgagatttcattttttccttttcgattttgttttttt

SEQ ID NO: 14190 - DNA, 533 bp, Gossypium hirsutum
  Clone ID: LIB3829-030-Q6-N6-G4
gcttcaaaattttgcattattaacaatgccaataggaataccaagaaagaaagaaaaaagaaaagaacaatggcaataagagcaaaaggaagctgaaatgggtataaatcatgaaacattaaatatcatgcatccaactccaatgaaaagccttttctttttccttttacttccatgtcctaacccttccaacatgaaatcttacataagatatagcatgtaggctaaatacctttcttgacaatatatattcacccttctcgtgatctggtgcatgatcatacacaataaacaatatagttcagtttggagcaaaactaatgcaccaaaacataatctaaacctaggtttttctgcagctctccaatatgtcaattgtgagatgaaaccatctacatatgcaaagtcagttgcttaaaaatgttcaacaatggcatgcaagacaacgtggttgagaaacgtggttgagagcaaggcagcgatcctaacatcctccgaactgtaagcattgcatctagtgatcagaagcagtg

SEQ ID NO: 14191 - DNA, 539 bp, Gossypium hirsutum
  unsure (1)..(539): unsure at all n locations; Clone ID: LIB3829-030-Q6-N6-G6
tttttttttttttttttttnttttttttttttttttttttttttttttttttttttttttttttttttttttttttttttttttttttttttcgggaacccgggggcccccccggaaaacccgaaccggcccccggggggaaaccaccttccccaaaagggaggcaaaaaaaagcgggggaaaaaaagggaaaaaagggtccccgggggaaaaagggaaccccccaaaaatcccaaaaaaaaaaaaacccgaaaaaaaaaagggaaaacccggggggcccaaaggagggaccaaaccaaaaaaaaaggggggggcccaacggcccctttccaaagggaaaaaccgggcggcccaccggaaaaaaaaaaacccccaacccccggaaaaagggggtttgcaaaagggcccccaggggggttttttttttccccagggaaacgggaaaaaggggatggcccccaacccccgggccctaaaaaaagaaaaaaaggggcccacccgggttccccccaacaggaaaaaacccggttggagggggg

SEQ ID NO: 14192 - DNA, 600 bp, Gossypium hirsutum
  Clone ID: LIB3829-030-Q6-N6-H2
gcaaccaaatatgatacttgtatataattttcgatatataagattacttgtacaaccaaagtaattactaccctaagacaccactcatactagcatatgaccccatggttgtatacgcctactggtcagaaaacacaggcctcatacctaaaccatctgtatacagaaacgtttagcattacattcgtgattcacctcacacttatcttatacatttttccctatcactgaatctggtacggcaccaccagccttccttagattacaaagcaaagcatcacgccccatcaaaactactttgaaaaagctatctatcaccttcaaaagattatctagcccttgggataatttctcttccgtctttctcaaatctgaaacagaattcttgaatgactccctttcacttgttcccaccccatcttggagcaaagttgacaattccttgacgcatgcatcaacagcatccagttctcttacaactgtaaattttccgcagggaaataaatttctaatctctacattcacagtattttgggcattcaaaaaaaacttgggcccatggtagcggggtaggaacaggtaagtccaataaatttttgg

SEQ ID NO: 14193 - DNA, 360 bp, Gossypium hirsutum
  unsure (1)..(360): unsure at all n locations; Clone ID: LIB3829-030-Q6-N6-H4
ggnccaatacattgccattgccaatattattgattactacacaatttgatgtctacaaataccgataataatagatcatacaccagacattcagcaatacataggtacagatatattacatgaaattatatagctgaatagctgtagtcatcttcctgaggaccctgggagagaactgtaaatatgacgaaggctccatacaatattgtgacaatagctgtgaagtttacaaggtatgcctcggcaccatatttatcaagccctgagttctcaaggaatgtaagcttctccaggaaccctaaggtggcattgccaactgccaagatgtatacaaacagccccaacagtacatgccatgga

SEQ ID NO: 14194 - DNA, 430 bp, Gossypium hirsutum
  Clone ID: LIB3829-030-Q6-N6-H5
ggaaaaacaaagtcaccatatttaactggaattgacgggcgcacaaccccatgttcaaacaatgccggcgaaaaaaggaaaaggaaaagacaagatgaaatacaaaggagcttctccaattgaaattacaaaacagaatattattctccaaaaaaaaccggcccaatgttatttaacagcttcaatttactcctctgccaatggaactgattcagccagcttacggtacttaagagcataaaacatttcaaggtaacgacgactttcacggggttaaaggttggaaacatgcttccagaatccatacactcctggaagggtcaatagtctctcccgagaaatcttccatggatacttcctcctctattcgtttcaagcctccttgggaggactttatcccagggagagggaactttttcacactttttaa

SEQ ID NO: 14195 - DNA, 345 bp, Gossypium hirsutum
  Clone ID: LIB3829-030-Q6-N6-H6
ggggaaaaaacaacctttttattcattaattctcagccggtccattggaaatcccaaaacaaaacaaaaaaagacccccagcccaataactcaactaaaaaaaaaaaaaaaaaaggggggggggtttggggggcttaatttaaggcccacttttaaacaaaagggattccttgggggggaggaaacaaattaataacctttaagcttgtagggcatgaaactaatggcctggcctttacaaaaggtgtcgaaccccaagattttaaaaaaagccttgggggattcctttttggatttcccaagcttctttaacacccggaccggagggggggccccccaaaaggg

SEQ ID NO: 14196 - DNA, 601 bp, Gossypium hirsutum
  Clone ID: LIB3829-031-Q6-K6-A1
cggccgcgtgggcaaaaccctaacatggcagccgccgccgcccgtcctctggtttcggtgcaaaccatagagtccgatatggctaccgacgctacgcctactgttcctctcgctgatgtcatgaaagcctcgatccgaccagacatcgtcaccttcgtccacgataacatttccaagaacagccgccagccttacgctgtctccaagcgtgctggtcaccagacctcagctgaatcgtggggaactggccgtgccgtctcccgtatcccgcgtgttcctggtggtggtactcaccgtgctggccaaggtgcttttgggaacatgtgtcgtggaggccgtatgtttgctcctaccaagatctggcgccgttggcaccggaagatcaatgttaaccagaagaggtacgccgttgcctccgcaatcgccgcttctgctgttccttcactcgtgatggcacgtggtcaccgtatcgagtctgttccggagatgcctctggtcatatcggacgctgtggagagtgtggaaaagacctcggctgcaattaaggttttgaaacaggtcggagcatatccggatgtggaaatggctaaagacagtcaag

SEQ ID NO: 14197 - DNA, 580 bp, Gossypium hirsutum
  unsure (1)..(580): unsure at all n locations; Clone ID: LIB3829-031-Q6-K6-A2
tccgctanaattataaccaanagttctacttcanagaaagctgatctaagtcctagttatgcagcttctggtccagggtgaggaattcgctgctgataactctggtcaccagtatggttttccaaatgctacaagnaaaaactgatgaagaagatgaactgaagtggaagtcccactttaagagtggtatccctcctccttatgttaaaccaagtaccaaaccaaaggatcacaggcatgatgccaatgtgggatcttctcttgctggttttgacagcaatggggtgtccgatgatccttcaacacatgacagggcatatgtggttaataggacagataagtacaaggaagggttagatcatcctggtaaagaagagcagataattccgcctgttagagtgaatagtcatgatcgtgatcgtgagaaagattattactatnatcatgatgcaagtgatgcccctgtaccaagacgaagatcatcgagaaggcgacattcgaaatcaacttctggtcttactgaagttgataatgctgaagatactgaatctgcaaggagaaaacacagaagcaggaaaag

SEQ ID NO: 14198 - DNA, 594 bp, Gossypium hirsutum
  Clone ID: LIB3829-031-Q6-K6-A3
tcccggttcgacccagcgttcgggcaaaaagcattgatcactggggcagcaagcggtatcgggaaggcagctgcagcaaaattcatcagtaatggtgccaaagtcgtcattgctgatatacaacaccaactagggcaagcaacggcgaatgagcttggacccaatgctacttttataccctgtgacgtaacgaaagaatcagatgtatccgatgctgttgactttaccatctccaaacacaaacgactggatgttatgtacaataatgctggggtaccttgctacacgcctccgagcattgtggaccttgaccttgccgtttttgacagagttatgggcatcaatgtgcgaggagtcttggccgggatcaaacacgcttcgcgtgtgatgatccctagtagaactggctccattctgtgcacagctagcgtaaccggaatgatgggtggactatctcaacatacttacagtgtgtccaagtctgctgtcataggaattgttaagtccatggcagctgagctatgccagtacggaatccgtatcaactgcatatcaccttttgcagttccgactccatttgcactagatgagttg

SEQ ID NO: 14199 - DNA, 601 bp, Gossypium hirsutum
  unsure (1)..(601): unsure at all n locations; Clone ID: LIB3829-031-Q6-K6-A4
ctgnttcttcattatacaggaggagcaagagtaagaaagagaccagcacagctgatgatcaaatgcttgaactatgggagtctgctgagcatgaatgtggtgttgattcaaaaaccaatgacatgcaggtacgggcttttgtaccgggggagatcattgcttgtatcagtccagtgatctagaaccggaaaaccagagttctttgggagcattggtggagaaagagttgagcgttgataagttagagatatctaccagcattagagagccaaagaaacgagctaaaaaccgaaaggtcttagacagacttgcttctgatgctcataaattgatggctcttcaaacctctgtcaaacaactgaaaaagagaatggaaatcaagaagaggaagaaggcattcgatttagaatacggacaagtcaaagaacaattgcaagaggtggaggatgcaatcaaggagttgtgcaacgtcaatggtgaattgaccaaggatgtcgaagggagttcatctttagacggaacaaactcaatggaattggaaggacctggaaagggcaacttgaaaaacgtacgtgagcaggcacaaaaagggtctgaaaag

SEQ ID NO: 14200 - DNA, 578 bp, Gossypium hirsutum
  unsure (1)..(578): unsure at all n locations; Clone ID: LIB3829-031-Q6-K6-A5
ggcacggttcattgggctttctcccggggaaaagacctcccgacatcgaagnaaaagtaaaggctttccctaaagagatccgactaagccatgcagattaactgcattcttgggttataaggctggaatgacccatattgcgagggaagttgaaaagcctggatcaaagcttcacaagaaggaaacttgcgaagcagttaccattgttgagaccccgcctatggttgttgttggagtagtcggatatgtcaaaactccgcgtggtcttcgtactttaggcaccgtgtgggctcagcatttgagtgaggaggttaaacgaaggttctataagcactggtgcaagtctaagaagaaagctttcaccaagtattccaagaagtttgaatccgaagatggtaaaaaagatatccagtcacagcttgaaaaactgaagaaatattgcactgtgattcgtgttttggctcacactcagataaggaaaatgaagggtttgaagcaaaagaaggctcatttgatggagattgaagtcaatggtggaactcttgctcagaaagttgactttgcttacggtttctttg

SEQ ID NO: 14201 - DNA, 570 bp, Gossypium hirsutum
  unsure (1)..(570): unsure at all n locations; Clone ID: LIB3829-031-Q6-K6-A6
cggncgcgtgggnaaaattcgatcatttcaccgtttaaaacagaaaatcttaaaaaaatcagttttctttctccctttccattgtttaattttcccggaaatcaaaatgagaaacgacgaaggtggaaccatggttatggagcagcaaaccggtctccatagccgaccaaatatggggactctgttccaacaatcagaacctccgtcgttttctgacgacgatgacttccataatcggaaaagcaatgcttcattgtctagtccgaggtattccaccacaacaagcggcgacggtgaagtctctccttatatgatgtcaccatggaacagccaaccttcttcatggcatcttcaacatcatcagccatgtccatcggagaacgattttggtcaagacggactcattgggtctatcgtaaaagaagaaggtcatatttattcattggctgcttccggtgatatgttatataccggaactgatagtaaaaacatccgtgtatggaagaatttgaaggaattttcgggttttaaagctaaaagtggattggttaaagctattattatactggg

SEQ ID NO: 14202 - DNA, 608 bp, Gossypium hirsutum
  unsure (1)..(608): unsure at all n locations; Clone ID: LIB3829-031-Q6-K6-B1
nacagnacagtatagaacagctcagggccagtggctgatgcatcagccatcaatgaagcagataatggccattatggctgaacgagacgcagctattcaagaaaggaatttagcactttctgagaagaaggcagctattgctgagagagatatggcattcttgcagcgagatgcagcgattgctgagcgaaataatgctatagcagaacgtgataatgccatagcaaatctgcagtatcgagagaactccttggcatctggcaatatatcctcttgtcctccagggttccatatctcacgtggagtgaagcacatgcaacatccacagcagcacgttcaccatctgccccacattagtgaagttccttataactcaagggaaatgcatgcaagtgatgtcctaccagtgacgccaggtacctctgaagctgcaaagtcaagacagggtaaacgagcaaaagaggccaaggtaattgcatctaacaagaaggctacaaagcctccaaaaaaggtaaaacaagagaacgaggactcggataagcttatgtctggcaagtcacatgagtggaagggtggacaagatgtgggtggtgcaagtgatgatctca

SEQ ID NO: 14203 - DNA, 600 bp, Gossypium hirsutum
  unsure (1)..(600): unsure at all n locations; Clone ID: LIB3829-031-Q6-K6-B2
ccgtccggcaacatncagaatnagtggaaaacggnaagccaagtggnaaacgatctctaattcaacaaccgacgactcagcatccgagtcatcagtagagtagaataagaatgtataagtaagtgctgaaaacattgttttccttttcttttctttttttatgttttctcttcatagcactcccgttatggattcgaatttgattgcaaagattgttgtatgacattacagaaatcggggtgttcatgcaaatcttgcaaaaaaaaaaaaaatgcaaatgcctatgtgaatagcgaatttcccttctttttttaatctccttttctgctcttctgacaatctgtaactatgtggttctcatataaagtgattgtaaggcaatgccatctccttattgtaactatgtattaactaaatagagcagtgtttgtggagctatgttattgaaacgcggatgagcgtagaaaatatcttgactgggggacagctaatccgctcctcatttgacttttcatgccaggctccaaaaagaagcgaggaaaacaacggtggtcccctaccaaatttctcaaagtagctttagaccttcttcagctcaat

SEQ ID NO: 14204 - DNA, 545 bp, Gossypium hirsutum
  unsure (1)..(545): unsure at all n locations; Clone ID: LIB3829-031-Q6-K6-B3
gagnattgggtttcttctcctttcttcttttttggttcagcagcagcatgcggtggtggttcagtcaatcggttgatgtgtttcgaaagttatctctttgaacttgtattgtagagtgattctgtaattccccccataatcagcaaacaaagccctttttttagccattcactctttagtcttacactattctatatatatcttccatgggatccactttcttcattgttgttccttgttatgttcgtcagattagctgattagtgaatcatcttcaaaacccatctctcaaatttgtgttccaaaagttttcattttagtttgtggaagatcctctttgtatattgaagggttggggggaaacgtagttatggtgtgccaagcagctagccaaacaagattccgggcattgaagtatgaaaatggtattgcagggagtgccaccattgtagttagagttatagcatgctttcaacctcttcaagattgccaggctgaatattttcgtcatttgcttaagcctgttacgtagattgggttcttta

SEQ ID NO: 14205 - DNA, 597 bp, Gossypium hirsutum
  unsure (1)..(597): unsure at all n locations; Clone ID: LIB3829-031-Q6-K6-B4
ctcgnaagnacagnatccggcaggccttatatcctcctcctccctctcatcgagggccctttcagggcttcgcttcagcccggaacagacaacaacgtcgacgtttgtgtcgaaagcggctcgacgaaggtggccgcagccagcttccggagtgttgtttacgttcacgtcggcgaagatccgttcattttggtgaaggatgccatgaaagtgattaggactcaccttggaaccttcaagttgttagaagagaaaaccccaccagggatcgtggacaaatttggttggtgcacgtgggacgcattttaccttaccgtgcaccctcaaggtgtttgggaaggtgtgaaaggtcttgtcgacggtgggtgcccaccagggctggtgttgattgatgatgggtggcaatccattagccatgatgaggaccccatcactaaagaaggcatgaattgtgccgtggccggggagcaaatgccatgcaggctcttgaagtttcaagagaattacaagtttagggactacgttagcccaaggagtttggctaatggttccactaatatgggcatgggtgcctttatcaaanaccttaaggaggaa

SEQ ID NO: 14206 - DNA, 581 bp, Gossypium hirsutum
  Clone ID: LIB3829-031-Q6-K6-B5
gttggatttcaggcctaagcttatcatttgcggtggaagtgcgtatcctagggactgggattacgctaggttcagggccgttgctgacaagtgtggtgctctcttgttgtgtgatatggctcacattagtggccttgttgctgctcaggaggcaaacaatccttttgagttctgtgacattgtcacaaccaccacccacaagagcttgaggggtcctagggctggtatgattttctaccgcaagggaccaaagccaccaaagaagggccaacctgaagatgcagtgtatgactttgaagacaagatcaactttgcagttttcccttcccttcagggtggtcctcacaatcaccagattggtgccctggctgttgccttgaaacagtccatgacacctgggttcaaggcatatgctaaacaagtgaaggccaatgcagttgcccttggaaagtacctgatgggcaagggataccagcttgttactggtggaactgagaaccaccttgttctttgggatctccgacctcttggattgactggcaacaaggttgagaagctttgtgacctctgcaacatcactg

SEQ ID NO: 14207 - DNA, 561 bp, Gossypium hirsutum
  Clone ID: LIB3829-031-Q6-K6-B6
gttcttatgagataaagggatagtttgccaacaattcttcttatgatgcagagttgtttttatgatgaaggaggtcttaaggcagaaggaatatttcggattaatgccgaaaatgtcaagaagagtatgttcgagacaagttaaacaaaggtatcttaccgcacggaatcgatgtccattgtttagctggtttgataaaggcatggtttagagaacttcctagtggagtgctcgattgccttacaccggagcaggtgatgcattgcaacacggaagacgattgcgttgagcttgtgaagttgcttccttcaacagaagctgctttacttgattgggctatcaatttgatggcagatgttgtggagtatgaacaatacaacaaaatgaatgcacgcaacatcgcgatggttttcgcaccgaatatgactcagcattgattcacgccgtgcaagtgatgaacttcctcaaaacattgatcttaaagacaattcgagaaagggatgagtccgctaccaaggacaggttgcttccatcttgctcagattgtcctacaggcataac

SEQ ID NO: 14208 - DNA, 578 bp, Gossypium hirsutum
  unsure (1)..(578): unsure at all n locations; Clone ID: LIB3829-031-Q6-K6-C1
cgnagnaaaagaatctgacggtgacatttcaggtcttggtccattcgaattggacgcattgcaggattgggagtacaagttcatgagcaagtacgtgaaggttggaaccatcaagaagacaacagttccagtaaccgaaggggatgccagtggtgaagcctcaggagctgcagaaactgatactaagccaactgaagatggtccatcacaaactccagttactgggtcagaggaaaaatcttctcctgcagatactaaggaggagtaacatgttcgagctttagctgtttctgtttcgaacaggtgatcactctttgtactggacatgccggaagagacagcattgtgttgttcgaatgaatgtgaatcgtcttctatatataaactcaagttagtgcagatactgtttctagcaaaacttgcctcaatatttagttccatcaaaaaaataaatgttaaaaaaacctgggattcagacaaatacttattatgatgaactgatatgtgtgggcaggaattaattactttgttcaacaaaataactagttgttgctactgctgctgcattataaggtatt

SEQ ID NO: 14209 - DNA, 579 bp, Gossypium hirsutum
  unsure (1)..(579): unsure at all n locations; Clone ID: LIB3829-031-Q6-K6-C2
gcggctaaaatttccctgttgttngaaattgtnnggatctgaaaatcagatcattggcggcggatccttgattcttcgtgtggaagcgtagatgtcggggccactcgatcgattcgctagaccttgctttgaggggttttcaggtagtgatgagagaagagagaggaaatctgattttgagaactccgaggatgaaagacgcactaaaattggatcattgaagaagaaagcaataaatgcatctactagatttaagcattctctcaaaaagaagagcagtagaaggaaaagtgatggccgtgttagctctgtatccattgaagatgttcgtgatgttgaggagctacaggctgttgatcaatttcgacaagcactgattatggaagaactgcttcctgaaaaacatgatgactatcacatgatgttgaggttcctgaaagcaaggaagtttgatatagagaaggctaagcacatgtgggcagatatgctccaatggaggaaagagtttggtgccgacactatcacggaggattttgagttcaatgagttgaatgaggttctaaggtattaccctcatgg

SEQ ID NO: 14210 - DNA, 581 bp, Gossypium hirsutum
  unsure (1)..(581): unsure at all n locations; Clone ID: LIB3829-031-Q6-K6-C3
caagttgctttatctaatcttgcaataacgctaaccatgactgtctcggtagctaacggccgtgccctcatagtcggagcaaccggctttattggtcggttcgtggctgacgccagcttggatgctggtcgacccacttatgttctggtcaggccaagttccgngaaaccaatattccaaggacaaagtagccaaagcccttcgggacagaggcgccatactgttgaatggattggcaaatgacaaggagttaatggtgaaactgctgaaagagcaccagattgagatagtaatatcagctctgggtggcgccacaatactagatcagctgtctttggttgaggcaattcactctgccggcacagttaagaggttcttgccgtcggagtttggacacgatgtggaccgagctgatccagtagagcctgggctcaccatgtacaaggaaaagcgtcaggtcaggcgtctgattgaaaagctggagatcccttacacctacatttgttgtaattccattgcttcttggccctaccacaacaataggcatccttccgaggtcattccacccttggatcatttcc

SEQ ID NO: 14211 - DNA, 595 bp, Gossypium hirsutum
  unsure (1)..(595): unsure at all n locations; Clone ID: LIB3829-031-Q6-K6-C4
gtttatgtaacaaanaagtacaaacactgtaataatttagctgagtctcttttttcatacaattttatagatggtgattattggaattttaactaacacaggttcctattttttatgggtctgcaaatgcttgggtagaggcaatagaacaagttggcagaaaagaggccttggatcggggctttgggatgtagaaaacgacaatgatggccaacaagaaggctgcgttttgcgggttatatcccagttttagtcattctatctaaaatgttctttgcagcgattgggtttaaagtagaggttgtacaatacaacaacatcaagtttcaagtatgggatttagaaattcatatgttggaaatctttctcttttttatgaaatagaggagaagcttaagcagggtcacaacgttgtacttatatcaaaccatcatactgaagctgacccaatcatcatctcattgttgcttgagaaagcaaatccgcatattgctgagaacatggtggttctctcttgaattaatttctcattctgagcctactgtagtagccttcatctatgcccttgaggccttgactgtacttgggtttttgg

SEQ ID NO: 14212 - DNA, 571 bp, Gossypium hirsutum
  Clone ID: LIB3829-031-Q6-K6-C5
tccgcggccgcgtggggcagctgcaccacggagaagagagaaaactgaaaaggggaaaaaagcgtcgtcgtttttgcttcttcttcttctttttcttcttccctctctctctttctcagaagctcctctttcgttcttttgttcactaagtattgtaaaagatggccgacggtgaggatattcaacccctcgtctgtgataatggaactggaatggtgaaggccggttttgctggtgatgatgctccaagggcagtttttcccagtatcgttggtcgtccccgacacactggtgttatggttgggatgggtcagaaggatgcctatgtaggagatgaagcacaatctaaaagaggtatccttactttgaaatatcctattgagcatggtattgtgagcaactgggatgatatggaaaagatctggcatcatacattctacaatgaactccgtgttgctcctgaggagcaccctgtgcttctcacggaagcacctctcaaccccaaggccaatagagaaaagatgactcagatcatgtttgagaccttcaacgtacctgctatgtatgttgc

SEQ ID NO: 14213 - DNA, 576 bp, Gossypium hirsutum
  unsure (1)..(576): unsure at all n locations; Clone ID: LIB3829-031-Q6-K6-C6
ctgttgctcaaaccccacctggnttccctcaaacgggtgctccggacagatggagattaatccgagctcatggnaaatgctgtagggcttccgacagaggatgacatggngaaacagtgaagtgggtcacaatgctctcggtgcaggccgcattttcgctcaggggctaagcttgttgatcttgctcttgcctcggggaagatctatgatggtgaaggatttaagtatataagtgaatcttttgagaagggtacccttcacttgatcggattacttagcgatggaggtgttcactcccgtctcgatcaattgcagttgttgctgaagggagctagtgagcgtggtgctaaaagaatccgtgttcatgttctcactgatggtcgtgatgttttggatggttcgagtgtaggctttgtggagactctggagaatgaccttgcaaagttacgtgaaaaaggtgtagatgcccgcatcgcatctggtggtggccgaatgtatgtcacaatggaccgttatgagaatgattgggatgttgttaaaagaggatgggacgctcaagttcttggtgaagcccca

SEQ ID NO: 14214 - DNA, 592 bp, Gossypium hirsutum
  unsure (1)..(592): unsure at all n locations; Clone ID: LIB3829-031-Q6-K6-D1
aacctaaacccccanatcctaccctgagaaggggaaggaagacagaagtatttactgataaagcagctaagaacgaagaatgttgaggtccattgcaaaacgagccacgctcttaaagccacgagctgattcacctataatccctcccctcatctcttcccaatccaagctctattcttccaagaacgcaaaggcctcccacgggaaatccaagaaaggcgatcccaagtccaagaccaagtccaagaccggcggttcctcttccaccgtttcctcctccactggtgatgacctcgattctgccggcgccgacgacttcgaggctgctcgagcccgccgcctggtcgaggacgagaatgacccttctctagatgtgggtcccaatggacgtcccttgttcacttccactccctcactttccctgctcactcggaaagactgttgctcgtacatgaagttcagtgagaagggattgaaccaagtgttgccggagggtttgccgacggggatggtgacggagttcaaggagtcgatgaggccggcactccttgttcgacagagtttcttggatctttcggataattttagacgc

SEQ ID NO: 14215 - DNA, 595 bp, Gossypium hirsutum
  Clone ID: LIB3829-031-Q6-K6-D2
ctccagctttgtcaggcagctcaatacatatggttttagaaaattgaccctgaccgctgggaattcgctaatgaggggttcctacgaggtcagaaacatctattgaaagacttaagagggacaagaatgttctcatgcaggaacttgttaggttgaggcagcagcagcaaacaacggataaccagttgcaaactgttggccagcgtgtacaggtgatggagcagaggcagcagcaaatgatgtcttttcttgccaaggctatgcaaagtccgagtttcttaggccagcttgtgcagcagcaaaatgaaagcaacaggcgcattactggagcaaacaagaagaggagactccccaggcaggatgaagaaaatttagctggtgaaaatggtgccgtatctgctaaagggcagattgtaaagtttcagccttcactgaatggggcagcgaaggcgatgctgcaccagataatgaagatgaatacatcacctagtttggacccttcgataaataattcgggttcattcttgattgatggtgttcctccttccaatgcaccggacagcaggagctcgtccagtcggatttcaggtgtgac

SEQ ID NO: 14216 - DNA, 601 bp, Gossypium hirsutum
  unsure (1)..(601): unsure at all n locations; Clone ID: LIB3829-031-Q6-K6-D4
cgnatttcgagcttatttaaactttagaanananaaactcaaggggaaaatccgtgtgatagctctggaaaatttatacagattacgaagtcagagctgagtttaactcgatctcgagttgtttcctggactctgctggttttgggagatcgagtttcttttgtttcttcgagaggagaaaagtgtcttcgttgagcagggaattggtgtttctcatacttcagtttctggaggaagagaaattcaaggagtcagttcataggcttgagaaagaatcagggtttttcttcaacatgaaatactttgaagagaaagttcaggcaggtgaatgggaagaagttgagcggtatttatcaggttttacaaaagttgatgataatcgatattccatgaagatattctttgagataaggaagcagaagtatctggaagcacttgatcggcatgacaaggcaaaggctgttgaaatattggtcggtgatttgaaggtgttttctacatttaatgaggaactctacaaagaaatcactcaacttttgaccctcaacaatttcaggggaaaatgagcagctggtccaaatatggggatacaaaaactgct

SEQ ID NO: 14217 - DNA, 598 bp, Gossypium hirsutum
  unsure (1)..(598): unsure at all n locations; Clone ID: LIB3829-031-Q6-K6-D5
tcgcggncgcgtgggcggccgcgtgggaggaatcggagatgaatgcgtcgggagaaaaaaccgagaaagtgataatcagaggaaagatgaagaagaaataaggtttcgacgagtaaaggcgacgaggaaaccgtcagtaaaagagaggagcctaaagcagttaaaacaggctctaaagatggtgataagggaagaaaatcgtcaataaaaggaaagagcaacaacaacaatcaaggcactcgaaaagtgaaggtggattggacgccggagcttcaccggagatttgtacaagcggtggagcagctaggggtggacaaggcggtgccgtcgagaattttagagcttatgggaattgattgtctcactcgccataacatcgccagccatcttcaaaaatatagatctcataggaagcatttactagctcgtgaagcggaggcggcaagttggatacacagacggcaaatatatggcagcgctacgccggttggtggaggagggaagcgagatgtgaaccattggcttccacccacaatgggtttcccgccatcagcttcacccatgcaccaccagaaccacctttttaggccattgcatg

SEQ ID NO: 14218 - DNA, 574 bp, Gossypium hirsutum
  Clone ID: LIB3829-031-Q6-K6-E1
accgacgcggtacggacgccgcttccgcacatcacctacgtacttacgaaactcattatcgaaaagcaccatcaagacagtctctaatcaggcctattatctgccgaactatactctgaactccacttttacttaacaccatacttaaacatgtatggaaccaccgcccagaagtcctccagctcttccacaacctcctcacataccaccactcctatgtctacttcgatcactccttcgaccacgccattgaggtccgcgattacgtccgcgactacaccatcgtctacagcctgctctatcgtatgctctatctcagtctccatactactgccataattttcgacaggattgtcgacaggtgtgaacccgatggaaaacccaaaaaagtactgaaaatgtttttgcatgggcgttaacatgattggcgtcatgataagacaacttttaatacaatatgtgaagctatatgtgaagataaaccaggggacaaagcaaggatacttataaaaaggcttaaaggtaaggttgaagctgatgatgctagtgataatgcaagtggttaaggttggag

SEQ ID NO: 14219 - DNA, 572 bp, Gossypium hirsutum
  unsure (1)..(572): unsure at all n locations; Clone ID: LIB3829-031-Q6-K6-E2
gcaacacgccggntgtcttgcaagaatctcagcttctagccattgatgttgcggctgcagtgagagttgcttggaagggctctgataggggatgaattagctagaaaaagaaaagaaagccctccgcagaaccctaactgatttagcatcagttgttccaattggttttttgatgcttcttcctgttacagctgttgggcatgcagccattttggctgccattcaaagatatgtcccgtccctgataccatccacatatggatctgaaaggttggatctcttgaggcagcttgagaaagtgaaggaactggaaaccagtgaagccaactctgaagaaaatatagagcaagtagcctgaatagcagtggagatcttgcacagtcttcaaaattgaaacaattctctccatatatggtaacacaaatggcttcaatttatttgtttttatttcttctcttttttttttttgtgctggtggtcctccatcgcagtttggggattacctctgtcaagccaggagaatttgaaggaaaatgataatattctctaaaaaaaaaaaaaaaagggcggcc

SEQ ID NO: 14220 - DNA, 592 bp, Gossypium hirsutum
  unsure (1)..(592): unsure at all n locations; Clone ID: LIB3829-031-Q6-K6-E4
cggnacgcgtgggacagcagctaaggcaacanagagctcttcagcagtttggtatgatgcaacaacatgcatggaggcctcagagagggctgcccgaaagctctgtttcaatacttcgtgcttggctatttgagcattttcttcatccctacccgaaggattctgataagatcatgctagcaagacagacaggcttaactagaagtcaggtttcgaattggtttataaatgctcgggtgcgtctttggaagcccatggtggaagagatgtacaaggaagaatttgatgcagaaatggactctaattcttcatctgataatgtagtcaaagcagcaacaaaaggcgatacaatgacctctgaggacagaggtgaagatttgcaacaaagtgggagttcatcagtgacagagagatgtagcaacggacagttgatggattccaaatccgagaatgttcacaatgcagatatctcagggtcaactattggagccggattcctgaatgcctcgtgtggagaagccgaaaccgaatacatgttacagactctaagggaggagcagaggcttactatggatgactctaatatcttccc

SEQ ID NO: 14221 - DNA, 562 bp, Gossypium hirsutum
  unsure (1)..(562): unsure at all n locations; Clone ID: LIB3829-031-Q6-K6-E5
gggnaaatagggtagagcaaaaaggcgagnacatcatccagcaaagaaaagctcaagctttattccattctcttcgctctgcttatgctgccactccagtcaatctcaagatcattgatctgtatgtgggtttcgcagtcttcactgctctgatccaggtggtttacatggctagtgtgggatcatttcctttcaactcttttctttctggagtgctttcttgtgttgggactgctgtccttgctgtttgtcttcgcattcaggtgaacaaggaaaacaaggaattcaaggatctaccacctgagagagcttttgcagattttgttctttgcaacttggtgctccatttggtgatcatgaatttccttggataaaatcataatttccaggttttgccggactgcgtgttttctcagtttccggccgtgattcataattttagcatgaaatgaagttcttagatcatcattatgagcttgagcatacatccagaactgtagtaggaatttgatattttatctttggctaaagagtttcaagataacttgatgagaaacaaaag

SEQ ID NO: 14222 - DNA, 571 bp, Gossypium hirsutum
  Clone ID: LIB3829-031-Q6-K6-E6
gttaatggcttccactaccaattccccatcaaccctcctcacccttcctaatttctccattcaaacttcaacattccttcccaaaacatctcaacgttccattatttcagaagaaaaagcctttcaactttaactccaaaacagtagtgtcatgcaaagccagcaatgggaaacaaaacgatgcagatcacacttcttttctcaataggttcgatagaagggacatccttcttggccttggagggggtctctacggtgcgaccagccttgttagagacccatttgcattggcagtcgtcccaatcgagcctgaactgtccagctgtggggaatcaaccgtagataccggtaaaacctgcatgaatgtcccttgctgcccaccagagttaaaagattcaaagatcatagacttcgaaccacctttaggttgcaagatccgttatcggccggcagcacatttagttgatcgtgattacctgtataagtttgaattggcaatggagagaatgaaagctctccctgtggatgatccacgtaatttcatgcaacaagccaatattcattgtgccta

SEQ ID NO: 14223 - DNA, 602 bp, Gossypium hirsutum
  unsure (1)..(602): unsure at all n locations; Clone ID: LIB3829-031-Q6-K6-F1
caagtaggtacatatagaggaaacananagaaccttgttggcgatgcgcccttaaccaccacagccagtcaaatagagaaaggcccaaaagatgcagctatgagaccagtggggggtaatcaaacagagaggggaagaatgggggatattgcaaagctaccgaacaaggaagagaatatgttgaaaggataggcacgacgccaaagagatttgaccatgagatagacatgagtggctacgatgtgatgttgatggagccccctcgtccacctcctcctccgcctccgcctcccccacctccgccccctccacctcctccggcacttgctgagaaggtcattgtgaaacccattgtgcctaatgaagtaactgcagggccttctgccaaaacaccaaagccatctacatttgcgaggtcgttcaccattgcagcccttcaacaatacaaatagcttttctcaagaaaatcttttggggggtggcatgcttggaagtgtctatagggcagaacttccggatggaaagttacttgcagtcaagaaactgggagaagagagttgcaagccagcagaaggatgatgaatttattgaactggtggaaa

SEQ ID NO: 14224 - DNA, 604 bp, Gossypium hirsutum
  Clone ID: LIB3829-031-Q6-K6-F2
ccggtgcccagcgtcaaaagtgttttgattttaaatataaacttacgacatctggaaatggtgacctcagtgctacctagagtagaaagcttggcaagcagtgggattcagtcaatcccgaaagatatatcaggcctcaagaagagcttacaagcataggtaacgtgtttgaagaagagaaaaaagaggaagggcctcaggttccgaccatcgatttgacagaaatcgagtcggaggacaaagaggtccaggagagatgtcggcaggagctgaaaaaagctgccatggaatggggtgtgatgcaccttgttaaccatggcatctccgaggagctcatggatcgtgttaggaaagttgggcagaaattctttgaactccctgtggaggagaaagagaagtatgccaacgaccagagctctgggaatgttcagggctatggtagcaagcttgctaataatgctagtgggcagcttgagtgggaggactacttcttccatctaatttttcctgaggataagagagacttgtcaatttggcctaaaatccccagcgagtacactgaagttacaagtgagtatgcaaggcaactgcgagccctagcgag

SEQ ID NO: 14225 - DNA, 599 bp, Gossypium hirsutum
  unsure (1)..(599): unsure at all n locations; Clone ID: LIB3829-031-Q6-K6-F4
aagaatttgtggcgnaattggatctaaagcctggccaaaggttctagatgttggctgtggcataggtggaggtgacttttatatggcaaaagaatttggagtctatgttgtgggcatcgatctgtccataaatatgatatcttttgctcttgaaagagccaatggactcgattgctctgtggaatttgaagttgctgattgcactacaaagacttatccagataacagctttgatgttatctacagccgtgacacgattctacacattcaagacaagcctgcactatttagatatttctacaaatggttgaagccagggggcaaagttcttataagtgattactgcaaaagcgcaggagcttcatcgcccgaatttgcagagtacatcaagcagagaggctatgatctccatgatgtaaaagcttatggccagatgcttaaggatgctggttttgatcaggtcattgcagaggatcgaaccgatcagttcatacaagttctgcagcgtgaattagacaaagttgagaaggacaaggataccttcatcaccgacttttctcaggaagactacgacgatatcgttgggggatggaaggcaa

SEQ ID NO: 14226 - DNA, 589 bp, Gossypium hirsutum
  Clone ID: LIB3829-031-Q6-K6-F5
gccaccacaggtgtattgggcttgggccggggcccattatccctcctttcccaatcccaaaatttgtaccaatcaacattttcatattgcttgcctagcattaggtcacctaacttttctgggtcattgagacttggaccaagtgggcaacccgtgaggatcaaatacaccccgttgcttaagaaccctaggaggccctcactttattacgtcaatttgattggaattagggttggaagaaggattgttgatatcccaccaagtgccattgctttcaatccttccactggtgctggcaccattattgattctggtaccgtcttcacccggctagttgagccagcctatgtagctgtccgggacgcattccggagacgagtaagggtggcgaacgtgacatctctgggtgggttcgacacatgttactcggtcccaatcaatgcaccgaccataacatttatgttttcgggcatgaacgtgacactgccacaagagaacctactgctccacagcacagcaggcagcatcacatgtcttgcgatggcatcggcaccagcgctgaatgtgatcgccaatatgcagcagcaga

SEQ ID NO: 14227 - DNA, 590 bp, Gossypium hirsutum
  unsure (1)..(590): unsure at all n locations; Clone ID: LIB3829-031-Q6-K6-G1
cggncgcgtgggttttatttcccattttgattcagaaatcgaagcttgccaatggccaacagtaatctccctcgaagaacatcaaggaaactcagcgtctcctcagtgaacctgctccgggaattagtgcttcaccatcagaggataatatgcgatatttcaatgtgatgatccttggtcccacacagtctccatatgaaggaggggttttcaagttggaactttttttgcctgaagaatatcccatggccgctcccaaggttcgatttcttacaaagatatatcatcctaacattgataagcttgggagaatatgccttgatattctcaaggacaaatggagtccagctctgcagatccgaactgtacttttaagcatccaggcactcttgagtgctccaaatccagatgatccactctccgagaatattgctaagcactgggaaatcaaacgaggctgaagctgttgagacagcaaaggaatggacgcgtttatatgcaagcggtgcatgaagaccggtggaaccgtttgctctcataaaataacatttttatgcaatgtgagctattcaatgtcaatttcatatggg

SEQ ID NO: 14228 - DNA, 536 bp, Gossypium hirsutum
  unsure (1)..(536): unsure at all n locations; Clone ID: LIB3829-031-Q6-K6-G2
gctaattgtgggggattgtgaagtccattgtggatttgtgtatgaagttgaatgagggaaatatgtgcttgtgaaggatccatcaaagcctcaagttaggatttatgaggtcccagctgatgcttttgagaacgattatgtgngaagaaccattgccagaagaggagcaggttcagccccctgcggaggatactgaagctggggagccgaatggcactacaaatgatgttgaggcaaaagagactgagacacaaacttaatggtaatggttccttgggatttttcttaatatattcctctgcattttgtgttgtgccactagactattatctcaaagacttccatgcaagttaatttcccttgttcttatgttagtacttggcatgttgtatggatccaaatattattgagttaaccacagtaccacatactagtatttataacttgattttctttctttttttaatgtacaaaatcgtttgtaatcatatgaaacttggtttttcatgttatcttatcctcccttaatgatgttc

SEQ ID NO: 14229 - DNA, 570 bp, Gossypium hirsutum
  unsure (1)..(570): unsure at all n locations; Clone ID: LIB3829-031-Q6-K6-G3
gnactctgcacattggctgggtcattgttcactttgcatggctctcaaattcgtattggtttgcctaccctcactgataaagacaaggaggttataagtacttggggagttcaaaacaaaattgactttctctcactatcatacacacgacatgcagaagagttcgccaagctcgtgaattcctttcaaagttgggtgacctctatcagacacaaatatttgcaaagattgagaacatagagggattaaaccattttgatgagattcttcaggaagcagatggtatcattctttcccgtggaaatttgggcattgatctcccacctgagaaggtgttcttatttcaaaaagctgctctttataagtgtaacatggctggaaagcctgcagtcgtcactcgtgttgtggacagtatgactgacaacctgaggccaactcgtgctgaggcaactgatgttgccaatgctgttcttgatggaagtgatgcgattcttcttggtgctgagaccttgcgtggattataccccgttgaaaccatttctactgttggcaaaatttgtgctgaggcag

SEQ ID NO: 14230 - DNA, 523 bp, Gossypium hirsutum
  unsure (1)..(523): unsure at all n locations; Clone ID: LIB3829-031-Q6-K6-G4
gttaagttgggatgttgtctaatgctggtcccggnactaacggatctcagttcttcatttgcacggctaagactgagnntggctcgacggaaagcacgttgtgtttggacaagttgttgaaggcatggatgtggtgaaagccattgagaaagttgggtctagcagtggaagaacttccaagcccgttgttgttgctgactgcggacagctctcttagagaagaaaaagagaactatgtgttaagttgggatgttgtctaatgtctagaatatttaatgtctgtcatttagactcttttatggtgctgtttttatcgtcactgggtttggtggttttcaggaacttgctttatgtagtttttacgattaactaccattaaataagatactctttttcgtcatcnnnnaanaaaaaaaaaaaaaagaaaaaaaaaaaaaannnnaaaaaaaaaaaaaanaaaaaaaaanananaanaaaaaannaaaaaaaaaanaaaaaaaaaaaaaaaaaaaaaaaagggggg

SEQ ID NO: 14231 - DNA, 551 bp, Gossypium hirsutum
  unsure (1)..(551): unsure at all n locations; Clone ID: LIB3829-031-Q6-K6-G5
naacatcttcaaattggacagcatggggaggagcagttggagcagaggagtgggaaatttgagatcattcataggtaattcaatgggaggtcttagaggaggtgccaatttagcttcttgggttgttgctggaactctcgcttatttcctttgggtgaaaccttctcaagatctcaaaaaacagcaacaggaaagggcagctcttgcagcttcggatccttatcgctatatagagaaacgaaaaccaatccctgatccccaggaaaatggattgatatacggcaacaagaagaaaactgatagtaaaacagaggaataatgtctgatattactattttgtaagtttgggttttctcttataagtttcctgaagctatgtgaatcgggatggaatgttgatcgtgtagtattaattatgataatctcatgatagctaattcattatccactgtacttagaggcacttttaacatccattaccgttccttgctacaaattggaacaagtactgtgattatctgcaaaataagtcaataagaatttcttaatac

SEQ ID NO: 14232 - DNA, 557 bp, Gossypium hirsutum
  Clone ID: LIB3829-031-Q6-K6-G6
agctccgggacgcgtgggtgaaattgaagaacttcagaaggtgtaacaacagcaatgagtgaggacaaccacacttttttttacaagacaggttgcaaaaacaaagcaaaagttgctcttgaagagtcttttggtattgtgagtgagaggctccggaagacaatggaggagaacaggattgtaagacaaagaaccaaaatgcagcatgaacagaacaaagaagagatggatttccaagagcaattcttcaaggaacgaatcaaatttatccatgaagccagggatgagaaggaagagagttttgagaagctgcagcagcaacagcgtgagaaggtcaagcagtctaaccccaatccttcaaatacagaggaatacaggcgcagggcggatgaaattgcaaaattcataaagttccaggatgaagagatgcaggcttttgtggcagagagggacaagctgatcaaagcacacgaagagaagatggttggcatgagagagaggcattggcaggaagaagttgagcttgaaaaggagtttgatgctgaattgagccacct

SEQ ID NO: 14233 - DNA, 606 bp, Gossypium hirsutum
  Clone ID: LIB3829-031-Q6-K6-H1
ggagccttcgccatgcctcctaatgagatgttccgttggttgaagctggttgtgtgaatttggctaggcatattataaacacaaaggcctatggtgtgaatgttgttgttgctgtgaacaaattctcaaccgacactgaagcagaaatgaatgctgttatgaatgcagctatggctgccggggcatttaatgctgtaatttgtactcaccatgctcatggtggtaaaggagcggtcgaccttggagttgcagttcaaagggcttgtgcgagtgggaatcagcaactcaaatacctgtatcctttggatattagcattaaagagaaaattgaggcaattgctaagtcatacggtgccagtggtgttgaatacaccgaacaggctgagaaacagatcgagatgtacaccaaacaagggttttcaggtttaccaatctgcatggcgaaaactcagtactcattttcgcacaatgctgctgagaagggagcaccaggtggatttatcttaccgataagggatgtgcgagccagcataggagccgggttcatttatcctttagtgggtacaatgagcacaatgccagggctaccaacaaggccatgctttt

SEQ ID NO: 14234 - DNA, 572 bp, Gossypium hirsutum
  Clone ID: LIB3829-031-Q6-K6-H3
gctatccacagcactatggtgcacctatggctcttgcacctactccacccttgcaataaggtgtgacattggctcttcatgctaggagacttcattccaagcttatgatatcacatttcttcagctgctctaaagtcttcaaccttgggcctaaccatggttcttttttctccctctatctctatctaacttgaagccccccgtaggggctataaatcacctccaaaaaatggagaatcatgcatgttttttttccattgcatcttgtcaacaagggttccttataagagaaccaaagcatttttttatctaaatgctcaactttagctattggatcagctaagttggggtaactatcttttttgtactgtcagcccttgaaaaggccaagtaaaaacagacttttttttcttacttttagcctaggcaaggctaataaatagaaaaatggtttgcaaaatttgtaaatttagcaacactaaaaagcaagccactcatctttttcaaatggctaatcacctatttgtcaatgaggaatgccccctagtttctttttttgtgcattgacatct

SEQ ID NO: 14235 - DNA, 543 bp, Gossypium hirsutum
  unsure (1)..(543): unsure at all n locations; Clone ID: LIB3829-031-Q6-K6-H4
cggncgcgtgggcgaggcatcaacgtcatgtgttgtgttgcctcatttccctaattgtcatgcatcttattatttgaccacctctaggtccaattccaatactacttaatatgggttaaattttgataatgaaaactcgtatattcctatgcttgtagggaccacatcttggtgtcctgactttggggatacacatcatgtatgttggtaggctaccactttacacgagtccatcccatactcagatcaagaaataccgaatccgaacctagaccaagggaaagctaagcaaatcgactaaatcgactagttgccacattttgtaatccgagtgctgcctatctagcttaatgatcaacggaagttagagatatcgatcacactatcaatcgaagcattcggtatagtttgatttaaatttttgaatatggcatgtatagggaactagacttgtgttttgtgttggtttgggataaattgtaacaccccttactcgagaccgtcgctggagtcgagcacgaggcgttactagacttatcttaa

SEQ ID NO: 14236 - DNA, 367 bp, Gossypium hirsutum
  Clone ID: LIB3829-031-Q6-K6-H5
ctgaaaaagcagcattcccttcaaaagactccatccaatgctccacagtagtctgacaggtttcctcaacccttaaagtgatgatgacgagcaagctcaaaggggatggtgacggtgatggtaataatggagagatggaaggcgacactgcacttaaaggtacccttttggctggagttttacttgcgggtgttgttggaggatttgctagtgccggatatgtctacaaggaccagatcaatgctttcttgaaccagctctccacttttattgaaggttatggacctgctggatatgctttgattgtggcagattatgcaggattggaagtccttgctattgctgccattccatgactatggctgct

SEQ ID NO: 14237 - DNA, 458 bp, Gossypium hirsutum
  Clone ID: LIB3829-031-Q6-N6-A1
ggataaaacactgcaaagcaaacatttcaataacataaatataataatccgaccaaccagtcttgtaaactatttcaatgctagttctcattttcattgaaactattcccctaatcataaagagtgaaaacatggtggagatggctaaatgaaaagagaaatagggttcatgccattccactaattttactttcaaaactccaaacatcatcaaatgaaataaaaatgtcaaaaacaccgaaatcaaaactgatacaaccactccgcggaaactaaaatttactgcgacacgcccaaccacttggagaagttctcgaactctgtgtaatcgctgtcggagatcatagtttgataccatgctttgccagctgacttgattgcggttgcttcctccttagaataggcttcctctttttgtcaagcttctcctttttggccttacacgttgtgcctcagcc

SEQ ID NO: 14238 - DNA, 578 bp, Gossypium hirsutum
  Clone ID: LIB3829-031-Q6-N6-A2
accaccttaatcatgtaaaataaaaagaatcagcaagtatataaatgctagttacagccgttggtcatagaagtagtaataaaagtgctataagcacataagaaaatatactcaaactaccaagcaatagcaatggcaagcgatggaccaacaatatgcaggcaggggtactagaagacagcagcagcgccaactcagctaagcaaataaatgaagttttaagatggaagcaacgcaatagtgattggagaaaaaaatgacacagaaaggtccaaagctttatctccctttcattgctgcaaagtgagcggccaaatcatcataatctggtaactttggatgcacatgctgggctgcactcgacctatcagactcgaatgagctagcacgagcataaactttggttccttttgattcagctgtttgtgcaggagggagagatattgaacgggctggacgggaaatggtctcggacatatcatcggatgtatccctacttgatttctgaggagcttcacacacatcacttcccatatgatgtgcatgacgacttttagactttcttcttatctttccct

SEQ ID NO: 14239 - DNA, 442 bp, Gossypium hirsutum
  Clone ID: LIB3829-031-Q6-N6-A3
actgaaattcatttctgtttactctaattgttgttccccagactggcaaaacctaaaaaaaacttgaaatttaccacgtacttcaatttccaagatatatccattgggcagcatttataaaactttagcttttaggaagtcccaatctcttaaatgatgtaaaacctccctctaccaccaaattatgcccactaacatactttgcatcatttgatgcaaaataaactggggcctcggctacatcacctggttccaatgttgctttgcctagcccaccaaaactttgtttcattttgacaagctgctcggcttcaatttggggataattcgggctcacctcatctagggcaaatggagtcggaactgcaaaaggggatatgcagttgatacggattccgtactggcttagctcaactgccctggacttaacacttcctatgac

SEQ ID NO: 14240 - DNA, 561 bp, Gossypium hirsutum
  unsure (1)..(561): unsure at all n locations; Clone ID: LIB3829-031-Q6-N6-A5
gccataaaacacatcaattgatataataatagattattgtccaaaactcatcatggtttaaacgaaaaacaaaattcaaagttgtngggcacatcagaaaaatggaacaatccctccataaaaaaaacattcctatgtggtcaagctttaagcttcccatagaacttagccttttcttgtgttgtctggaaacgaccatgaccgaacttagatgaagtatcaatgaacttgagcttaatctcttcaagtgcaacccttgatgtttgattcaacagtgattgccttaatgtcacaacacgtttctttggtccaacacaaccccctttaatcatcaaataatcttctttcaccactccataatgggggaatccaccaattggtgtaatatccttctcagtcctgtcatagtcagtcatggcagcatgtgattcattgccagccttcccaagcttgtagattttcttgttcatctcagtgcggtgatggtaaccattatgaccagctcgggcaacggtaaacgaaaccctagccggatgccatgcaccaatacaagcaacctta

SEQ ID NO: 14241 - DNA, 575 bp, Gossypium hirsutum
  Clone ID: LIB3829-031-Q6-N6-A6
caaaaaaaaaaaactttttttcaatataatcaattaaatacattcaaacaataatacaaagatagaacccttaacttaaggcaacatcccacacacattaaggctccattattcatgcaaaaacattggattttacattaatggaaatctcccacgttaaaaattgaaataaaaaaacaaataaaataaaaagtcatttaccaaatcagaaaacattggaaaatcgaaaaataacttctttcacttttctgacgtggcatcatggcattggttaaaagcatttagttcttaacacgtggcaccgtccatacccgccgagattgaatcagtgtggtccatgaacgaaaggacagcttagtggatatggtaagtttccttaatctcattcatggtcggcgcgtgttcagacacgcgccacaccttgacggacttatccaagctaccactgtagacaatccatttccggttagtctcagtcgacatctggtgatcttcttcaacggctaagcattttaatggaccggtatgacccgttaaaaccgacaagcaagcatgaataccgccttcttctcgcc

SEQ ID NO: 14242 - DNA, 418 bp, Gossypium hirsutum
  unsure (1)..(418): unsure at all n locations; Clone ID: LIB3829-031-Q6-N6-B1
aataaactgaaacttgattcaagtacaacaagacgtttgaggtacaatacttttacaattaagtagagagctacagccaacatagtgccaagttgacaaccccatcatttttccaagcttggatgtgccaatggtaatggatgctttctcctctcttcaaataccaggcttgctaatggaagatcgagacatatcagagtttccagggaaacccgaaattaagttggcattacccacctactactattccttactacaggtatttccggatcatttatttttcctacnctgctnccntgacttncggaagaaacatgagccctggatgactcttctctacttctccctaccatcccatttgcattttggttcttgggcaacctacttgatggggatgtagcggtttgtcccctgcttg

SEQ ID NO: 14243 - DNA, 473 bp, Gossypium hirsutum
  unsure (1)..(473): unsure at all n locations; Clone ID: LIB3829-031-Q6-N6-B2
gatgtcaatagagcgcactaagaatatatatttttaaaattcatgaaagtcaagaagaaagtcaatcgtaaataaaataataatataaaattaaattgagctgaagaaggtctaaagctactttgagaaatttggtaggggaccaccgttgttttcctcgcttctttttggagcctggcatgaaaagtcaaatgaggagcggattagctgtcccccagtcaagatattttctacgctcatccgcgtttcaataacatagctccacaaacactgctctatttagttaatacatagttacaataaggagatggcattgccttacaatcactttatatgagaaccacatagttacagattgtcngaagagcagaaaaggggattaaaaaaagaagggaaattcgctattcacataggcatttgcattttttttttttttgcaagatttgcatgaacacccccatttctgtaatggc

SEQ ID NO: 14244 - DNA, 447 bp, Gossypium hirsutum
  Clone ID: LIB3829-031-Q6-N6-B5
acataaaattagtacatacgttttatgcaaactcttataaagacagaacagcaaaaacttgacaaagatcatatcaaattgaccagtaaatgaagacgcttaaaaccgtacgtggaaggcatttgcatccttctcttttccctttctttttcctttcactcataagacatcaaatgggggcaacccaaaaagtggcagatgctgataataacatcaattagatcgtatggttatttagatctaatccttgtacttcatttcggacatcttgaagccaggcatatcgaatgaggatgagaacttctcaacatcaaccttcagctcttggatctccttggtgttgtccaaccctttgttgaagtccttcaaaagcttaccatattgcttttggatgttcaaagtgattgtcacggctcggtggaggaactcgcctatctgttcaaaggc

SEQ ID NO: 14245 - DNA, 435 bp, Gossypium hirsutum
  unsure (1)..(435): unsure at all n locations; Clone ID: LIB3829-031-Q6-N6-B6
ggcagaaaaaaattcagttcattacttcttcaatactggccatcatacccttgtacaaggggtataccattataatgcatattacccaaacaacaatcaccattggtgtttattatacccaagcttttccaccttttcctttagtatttacaatcccgagattccggggcttttttgggggcttactcaactggaaaatcgggggcccgcataatcgccttacacctttttttaaacttaaccgggcaccggttttatatccacttttacattcaggttnaacatttcccatttccccttcatttaaaaaattggggcccggaaagggcccaacttcctcttttctgttactatcctgacgggtccattggttctttttggggggccttttcggggtactcaatgggggaaccctcaaaaacttaacaagggggg

SEQ ID NO: 14246 - DNA, 501 bp, Gossypium hirsutum
  unsure (1)..(501): unsure at all n locations; Clone ID: LIB3829-031-Q6-N6-C1
aataccttataatgcagcagcagtagcaacaactagttattttgttgaacaaagtaattaattcctgcccacacatatcagttcatcataataagtatttgtctgaatcccaggtttttttaacatttatttttttgatggaactaaatattgaggcaagttttgctagaaacagtatctgcactaacttgagtttatatatagaagacgattcacattcattcgaacaacacaatgctgtctcttccggcatgtccagtacaaagagtgatcacctgttcgaaacagaaacagctaaagctcgaacatgttactcctccttagtatctgcaggagaagatttttcctctgacccagtaactggagtttgtgatggaccatcttcagttggcttantatcagtttctggcgctcctgaggcttccccactggcctccccttcggttactggaactgttgtcttcttggtggttccaacctttccgttccttgctcatgaac

SEQ ID NO: 14247 - DNA, 532 bp, Gossypium hirsutum
  Clone ID: LIB3829-031-Q6-N6-C2
atgaaacacccttatatttaagaagtgcagcaaatcaaacatttacactgaaaaagaagaagggaatttaaataagttaacagagttcgattacagtttttgtgcatttctgtgcagaatgatttgtactcggaatggcaaatacgttggttaaagacttataacctccacaagatcgatatagggagttgtatgttaaccagtgaagtggaaacagattgacgatagattagtggtttttgtaagctctccatcagcagcaaaagcatcaccagcaaaacttctttttctgcagtttcagaaaattggctttctcttgacggtcaatttcagcaagcaattcttcatgtctcatcaaagcattgtaaagtgcctgcttggtagcaatcagctctgcttctagggcatcaacacgacatacggcagcattcaacaattcctctttctcgtaaggcatctcagatggctttgcttgtagtatattaactttctcctcaaggtcaccccatcttttgagaacagaggataaaag

SEQ ID NO: 14248 - DNA, 539 bp, Gossypium hirsutum
  Clone ID: LIB3829-031-Q6-N6-C3
aaaataaaacagccaggttggtgttctttgtttctcctccttctgctacaccttccttttatagctggaacagattttgttttactaattagagagccttaaagactaaacactcagtcctcttattcaaatacaatttccctaccacaaggtaaataaaggggaataaagaagtgatcacacccatatgaaatcgacttgacatctctacatgaatgaagtaaagaaaaggatagtttggtgtcgatatttttaacgtcaagcacatgttgctgtgatggcgaaggcttcgactactggctttgggggggggatttcgttactttgcttcgtgttttcgtcgctttgcttcatgttttcatccttcatctttgctaaaaagtcgttgaagcagtcatccaatgttcggaatggctcattcgggtacaaactgcaggcttcggtttcattcgggccttcgattgggaagttgatttgacaaccctttatgaaaatgtcatggggtgaatgatgcaacaacactctgtgggataatattc

SEQ ID NO: 14249 - DNA, 574 bp, Gossypium hirsutum
  unsure (1)..(574): unsure at all n locations; Clone ID: LIB3829-031-Q6-N6-C4
acttacaagcagaatgcttacgattgttttctcacaaagggaatatagctgtacaaattcatccaaatgaagtaaataaaagcttcactccagaggaagttaaaatcaacaaagataatggaatagaacctgttggcatctaagatgaggatctgaggaaacccaagaaaataatgttccatcttcagtaatagccatgctatgtaccatcccggcagctattgcaaccacaaaacccaagtacagtcaaggcctcaagggcatagatgaaggctactacagtaggctcagaatgagaaattaattcaagagagaaccaccatgttctcagcaatatgcggatttgctttctcaagcaacaatgagatgatgattgggtcagcttcagtatgatggtttgatataagtacaacgttgtgaccctgcttaagcttctcctctatttcataaaaaagagaaagatttccaacatatngaatttctaaatcccatacttgaaacttgatgttgttgtattgtacaacctctactttaaacccaatcgctgcaaagaacattttagatagaatgacta

SEQ ID NO: 14250 - DNA, 539 bp, Gossypium hirsutum
  unsure (1)..(539): unsure at all n locations; Clone ID: LIB3829-031-Q6-N6-C6
ggtttttgggtttttttttttttttttttttttttttttttttttttttttttggggggggtttttttttttttttttttttttttttttttttttaaaaaaaaaaccttaaaattcaaaaaaataattggggggaaaaaaaccaaaaagggggggggggggggaggaaaaaaaaaaaaaaaaaaggggcaaaaaggggggggggggggcccccaaccaaacataaaaaaggggcccccttaagggggaaaaattggggggcaatttaaaaaaaaggggggaagggaccccaaggttttcggggaaaaccctccacccaaaaggggaaaaaaaaaaaaaacggtttgggggccccncgggaccaaaataaaaaatttggacccttttttaaaacggggggggggggtcggggcccgggccttttttgtaaacgggggggggaggttctttgggggggccttgtggggggccccctgggggggggggggcggggtgtttttggggggggggggggggccgggggaggggggggggggggg

SEQ ID NO: 14251 - DNA, 430 bp, Gossypium hirsutum
  Clone ID: LIB3829-031-Q6-N6-D1
cttaatgaaaaaattatcaattgcaagagaaaaataaacaataattttcttaaagatgagagcactagtcgactacattatctgggaatataaaatgacatcttcaaccaaatatctcaccagatttttttgagaaaagacaccatgaccgaacaagctagtctatcaatgcaggtctttaaaacttgtagaggccattttatgttctctatctatcttattttaccgcatcaaaggaagtaaccatctcatttctgctccgtttccgttggataagtagtacacttttttccagctttcctctgaaaatgcttcccttcttacaagcctttgcctgacatagtaatggcaaacagttgctgcctcatcaggactgtaacgaggcatgttaacacgggccccaacagggacatctgggcaatctaaacga

SEQ ID NO: 14252 - DNA, 369 bp, Gossypium hirsutum
  Clone ID: LIB3829-031-Q6-N6-D2
atagtcgagaaacatcatacatatgtatttggataaccatttccaatgcatttatgttattggtacatgtagtaacaccaaaaataacccctttcaacaacaaaccatttctctttgaattaaaaagcttttcttgaccgcatcatagatcatcatcaacctctgatctgtccatttgatgaaagaaggcccatttgctcggtaagatggttcatatgatgaattccatcccatccgttctcttgcctcaccggtgcttgctgttgttccaggtttgcaccattttcaagtgagcttgaactaatttcatcggtgtcccccgttaaagggcttgttgcaagaaacttctcccaaaaaacgtcattaatt

SEQ ID NO: 14253 - DNA, 590 bp, Gossypium hirsutum
  unsure (1)..(590): unsure at all n locations; Clone ID: LIB3829-031-Q6-N6-D3
tttttttcattgtagtttagataattgatttatacatggnaattaatttcaagtgttgttgtttacctctgatcctataggctataggtaaactgatataccacagacttgcttttaccaaagttgaaaactaccctcacagccgttaatgttttaacaaagaataataagacatgatgcaactatctaaaatgatgttggttcgctcccggtcgggtcatcccacatcttaaccaccggagcatactcatcattctcttccaagtggatttcctcaactggacttttctgctggaactcccatccttaactatttttaagcccctcttttaattttcttgtccctgggagaagatctcccttcccactttaagattttgccctttcgaaaagaaaacctttgtaaggcggtggccnaaaggttttctgtggaaaaccctgaattatccaataatnctcggtgttccaacctctcccacccttcgatttttttttggttgcctttttttttttggttgttgttgagccttttgaaaatttttgggaaaccccacccctttttttgtttagganaacttgaagataggggg

SEQ ID NO: 14254 - DNA, 472 bp, Gossypium hirsutum
  Clone ID: LIB3829-031-Q6-N6-D4
aaaaaaatcaaacttacaacagggttttattaggaaataaattcaatagaagtcgatacagccattgttttgaaaaagaacagcactccaaaggttaatacaagtaaataaaactagtgaacaactatcaatcaagtaggaggattatacaagaattggggcattcttaatcattcagggttttacctttttgggacatatggaacactaaaaagtaagaacctaataatctacatttcataaatctatctttgtaattgatctggtgtgtgattgcttgtggtagatgatgatgtcgtcctaccgttaagctggacaccgttatctgctggtggactcactccccatttcccttcagattcggagggctccagtactttcacagttccatcgctcaacccgattgcaaattggtttgcttctatcgggtgtgcagccacaacaagcgggtacacagtttgacttcctttta

SEQ ID NO: 14255 - DNA, 380 bp, Gossypium hirsutum
  Clone ID: LIB3829-031-Q6-N6-D5
aaatccaaataaattatctcaattcattaaaaccattaccaaaaaaactggtttttcattacaagacaatggatcgattaggcaaccttaattaataaacctgtcctcgcacgggaacaaaaacaacaaccaagttgctccgcaactttagccggaaaaaaaaaaaaacccttttgaaggattagatttctacatgaatttaacgtcgagatatgtcgtcggatttaacagttttccccgctgtgggccggaagcggttcaagcacaaaaagggggtatctttgggactccttgacgttgtagctccaccaaaacgccatccgttgatggcggtttcagcccgataggaagcggcagccacggtttcgataaaacgtctc

SEQ ID NO: 14256 - DNA, 551 bp, Gossypium hirsutum
  Clone ID: LIB3829-031-Q6-N6-E2
agagaatattatcatttttccttcaaattctcctggcttgacagaggtaatccccaaactgcgtatggaggaccaacagcacacaaaaaaaaaaagagaagaaataaaaacaaataaattgaagccatttgtgttaccatatatggagagaattgtttcaattttgaagactgtgcaagatctccactgctattcaggctacttgctctatattttcttcagagttggcttcactggtttccagttccttcactttctcaagctgcctcaagagatccaacctttcaaatccatatgtggatggtatcagggacgggacatatctttgaatggcagccaaaatggctgcatgcccaacagctgtaacaggaagaagcatcaaaaaaccaattggaacaactgatgctaaatcagttagggttctgcggagggctttcttttctttctctgctaattcatcccctatcagagcccttccaagcaactccactgcagccgcaacatcaagggctagaaactgagatccttgcaagacatcccggccttgtttc

SEQ ID NO: 14257 - DNA, 546 bp, Gossypium hirsutum
  Clone ID: LIB3829-031-Q6-N6-E4
cttaaagctaaactaattgtacatattttctctttcaccatatgaagaaaaattatatgtaatttttacatatatgcagaatggccaatcaatttcttcatatattacaactgtgtttttatagttttccatgttggagagggaggtgagaatgtctggctcttgtgcttcatgttcaagcacgtatcatgctacaaaatcatgcaacaactgagaggaactcaacctgtgctgccggttactaggattcatgcattcgaaatccccggtttcagttggtatatgattgtacatatcatcccctctcattgcaacaaaattttgatgatggcttccacccgacatagatatgctaccatcctcgtaatgctgcaatcctaaagtgagagatacaccgcttccaaacctccccaattccgacacattgtaaccggaagcagccataaaccggtgactaccaccatccagatgaacacttgtgtcagggaagatattagagtcatccatagtaagcctctgctcctcccttagagtctgtaacatgta

SEQ ID NO: 14258 - DNA, 558 bp, Gossypium hirsutum
  Clone ID: LIB3829-031-Q6-N6-E5
aaagaaatcagaatgatcaaatctatactcaaatgtcttttgtttctcatcaagttatcttgaaactctttagccaaagataaaatatcaaattcctactacagttctggatgtatgctcaagctcataatgatgatctaagaacttcatttcatgctaaaattatgaatcacggccggaaactgagaaaacacgcagtccggcaaaacctggaaattatgattttatccaaggaaattcatgatcaccaaatggagcaccaagttgcaaagaacaaaatctgcaaaagctctctcaggtggtagatccttgaattccttgttttccttgttcacctgaatgcgaagacaaacagcaaggacagcagtcccaacacaagaaagcactccagaaagaaaagagttgaaaggaaatgatcccacactagccatgtaaaccacctggatcagagcagtgaagactgcgaaacccactacagatcaatgatcttgagattgactggagtggcagcataagcagagcgaagagaatggaataaagcttgagcattttctttgc

SEQ ID NO: 14259 - DNA, 558 bp, Gossypium hirsutum
  Clone ID: LIB3829-031-Q6-N6-E6
gagcaagataaagctgccgctgcttttgttatttttattaaaaaaaaaaaaaagaacatgcggagaaacaaattgatgaaccccatcaatccgatctagcggagaacacaaaggatgaagcaaaatattcaccccccaaatcaacaaacgtagtcgatcttaatgttaccaatcgaaacttccccttctttaggcaccaaagtcaccacaataaagcgatcttcagatggaatcttcaaatcctccagcgcatctgataatggcaaatacagatttgtactaagcatcgcctcggagtggcaatcatctccgtgcggtaaattcgaaaagctccccacgaactccgcatcttccggtttgcaagggttgtcgtcgtcttcatcgtcattaatggagacatcgaattgcactgagtcatttctgtctagctgtatgttttgaagaaccaatacttcttctttatcatcttttttcttatttattgggctcctttggccttagaatctcaatgcgtacgggcccccttgcctcacactttaggaaaccccctggggtatt

SEQ ID NO: 14260 - DNA, 364 bp, Gossypium hirsutum
  Clone ID: LIB3829-031-Q6-N6-F1
caaataaaaaaacacacaatctattcaggaaattatgttcatatgttgtacacatcaatgatccattcaagaggaaaaaaaacaaatgaaatgggaacaaaatcataatgaatcattagtaacaaaataatagttatcatgaaacaaatgggttagcatatttatgccatagccaagactttgttacctgatttattgaccacccgaatgatccccggttgtccggacctgaaaattcaaactgttcctagtccccgcgggggggtttttactgaatgaccgccaaaccttgtgcctgagctttggatgtgaaatttcgcgcagctgcctctttgccatgggtgtgttttccccccctcggtgg

SEQ ID NO: 14261 - DNA, 436 bp, Gossypium hirsutum
  Clone ID: LIB3829-031-Q6-N6-F2
aaaagaaccaaatcagttctcattattcaaataaaacaggtaaaggggagccaaggagtggagacagacgccacaaccaagggtttaacccccaacgaaatatagcattcatcagagtacagaaagaaatagattatcgcgacaaataaaaatactagtttcagttggacagattatcctgggtcttcctgaacagcttatgctcgatatgctgagcaaaggtacgaggagggaacagtggaggttcggtctcggagacagtctccgggagtggcttaaggatgatcttatcctttggtggctcacaaaaaactggccacgagatcctaaccttctccttattaaccagacccctgtggagaatgctcttgaactttccattgctgaggatctccatggggtctccaatgtgcatgatgatggagttaggaacaca

SEQ ID NO: 14262 - DNA, 401 bp, Gossypium hirsutum
  Clone ID: LIB3829-031-Q6-N6-F3
aaccaaaactgtttccgataaaatgcattataaagtagaaaaatccacaatgaaccaaacacttcaaaagatttcaagtaaaaacatacttgaacatagtagtctatgggcaattacactaagcattaaacaaaacaaatgttctttcaacaagacgagtgaataagataactattaagactcagccaacttgttgaggatcgtcagatcttaaacggcagcatggaggaatgctcttcctggctcccgattggctagaggtccatgacatccaaggagcttagcattaacaccatcagggacaatgcgattctctgacttatatttcaaataatcagttcggttgaacttcgtgaaaccccacttcctggtgacaataatcttttggcgaccagggaact

SEQ ID NO: 14263 - DNA, 566 bp, Gossypium hirsutum
  unsure (1)..(566): unsure at all n locations; Clone ID: LIB3829-031-Q6-N6-F6
tttgttttttttttttttttttttttttttttttttttttttttttttttttttttttttttttttttttttttttttttttttttttttttggttttttttttttttttttttttttttnnnnngccntgttttgtgggtttgtggggggggggggggtgtggnnnnttttntttttgtggtggtggttgtgtgttttggtggttgtnntgggggggggggtgggggngtgggggttggggggtggggtgtttatggggttttgggtgggntggggnggnnnnnnnnnnnnnnnntgtgctgggggggggtnntggggttttntgtgntgtgggtgtggggnnnnagggtngnngggnttttgggttgttgggtgtntggggtnnntggtgtggggggggggggggtggngggggtggggtggtgggggggggggggggggngnnnggggggggggggggggnngggggggggggggggggggggggggggngggggggggggggggggggggnggnggggggggggngnggaggggggggggggnnnngtgggggggggngggg

SEQ ID NO: 14264 - DNA, 487 bp, Gossypium hirsutum
  unsure (1)..(487): unsure at all n locations; Clone ID: LIB3829-031-Q6-N6-G1
gcaaatatcaaactgtttcaaactgtcattcgtccagatttccatatgaaattgacattgaatagctcacattgcataaaatgttattttatgagagcaaacggttccaccggtcttcatgcaccgcttgcatataaacgcgtccattcctttgctgtctcaacagcttcagcctcgtttgatttccagtgcttagcaatattctcggagagtggatcatctggatttggagcactcaagagtgcctggatgcttaaaagtacagttcggatctgcagagctggactccatttgtccttgagaatatcaaggcatattctcccangcttatcaatgttaggatgatatatctttgtnngaaatcgaaccttgggagcggccctgggatattcttcnggcanaaaaagttccaacttgaaaacccctcctttcttatggagactggtgtgggcncgaggatcatcacattggaaatttcggatattat

SEQ ID NO: 14265 - DNA, 535 bp, Gossypium hirsutum
  unsure (1)..(535): unsure at all n locations; Clone ID: LIB3829-031-Q6-N6-G2
gaacatcattaagggaggataagataacatngaaaaaccaagtttcatatgattacaaacgattttgtacattaaaaaaagaaagaaaatcaagttataaatactagtatgtggtactgtggttaactcaataatatttggatccatacaacatgccaagtactaacataagaacaagggaaattaacttgcatggaagtctttgagataatagtctagtggcacaacacaaaatgcagaggaatatattaagaaaaatcccaaggaaccattaccattaagtttgtgtctcagtctcttttgcctcaacatcatttgtagtgccattcggctccccagcttcagtatcctccgcaggtggctgaacctgctcctcttctggcaatggttcttccacataatcgttctcaaaagcatcagctgggacctcataaatcctaacttgaggctttgatggatccttcacaagcacatatttcccctcattcaacttcatacacaaatccacaatggacttcacaatcccccacatatt

SEQ ID NO: 14266 - DNA, 96 bp, Gossypium hirsutum
  unsure (1)..(96): unsure at all n locations; Clone ID: LIB3829-031-Q6-N6-G3
tctctntctctctctctctctctctctctctctctctctctctctctctctctctctctctctctctctctctctctctctctctctctctctctc

SEQ ID NO: 14267 - DNA, 550 bp, Gossypium hirsutum
  Clone ID: LIB3829-031-Q6-N6-G4
cgccctcttttcttttcttttttctttctttctttctttctttctttcttttcttttttcttttttcttttttcttttttctttttcttttttttttcttttttttttttttttttttttttttttttttttttttggggggaaaaaaaaaaaattaaaaaaagggggggaaaagggaaaaaacaaaaaaagggagggccggaaaaccccccaaccccggggggaaaaaaaaccgccccaaaaaaagggcaaaaggggaaaaaaaaaaaatttaaaaaaaaaaaaaaacccccaaaaaaaaaaaaaggtcttttttttttttaaaaaaaagggggccgaaaaaaaaaaaaaaaagggggggggaaggccccccaggggaaaacccaatttttaaagggggttaaaaaaaaaccgggcctaaaaaaaaggggaaaaaaaaaagggggtttcgggggggccaccaattttaaaccgggaaaaaaaaaaaagaaaaaccgtaattccgggaacccccataaaaaaaacccccaactaaaccggagcggggggg

SEQ ID NO: 14268 - DNA, 544 bp, Gossypium hirsutum
  Clone ID: LIB3829-031-Q6-N6-G5
gtattaagaaattcttattgacttattttgcagataatcacagtacttgttccaatttgtagcaaggaacggtaatggatgttaaaagtgcctctaagtacagtggataatgaattagctatcatgagattatcataattaatactacacgatcaacattccatcccgattcacatagcttcaggaaacttataagagaaaacccaaacttacaaaatagtaatatcagacattattcctctgttttactatcagttttcttcttgttgccgtatatcaatccattttcctggggatcagggattggttttcgtttctctatatagcgataaggatccgaagctgcaagagctgccctttcctgttgctgttttttgagatcttgagaaggtttcacccaaaggaaataagcgagagttccagcaacaacccaagaagctaaattggcacctcctctaagacctcccattgaattacctatgaatgatctcaaatttcccactcctctgctccaactgctcctccccatgcttgtccaaatttg

SEQ ID NO: 14269 - DNA, 549 bp, Gossypium hirsutum
  Clone ID: LIB3829-031-Q6-N6-G6
ggaaagaaacgtagattcattccaagttcttatttgaaccatgtcttagcaaacaacacaagcataataaggcaaccatagatgcaactttagatttaactttttttttacccatatattccaatcttttaacatactattttaagagttgtaactcaagatggagaaatattcagtgtcatcacagaagtttcctcagggaacagagagattaaagtctttcttaccacatgtgtacataccatcgcattcccctacaattccacaatcaagtattgccggggttgacttttgagccatccggagtgtacttctccatgagggggctcaattcagcatcaaactccttttcaagctcaacttcttcctgccaatgcctctctctcatgccaaccatcttctcttcgtgtgctttgatcagcttgtccctctctgccacaaaagcctgcatctcttcatcctggaactttatgaattttgcaatttcatccgccctgcgcctgtattcctctgtatttgaaggattggggttagactgcttgaccttct

SEQ ID NO: 14270 - DNA, 434 bp, Gossypium hirsutum
  Clone ID: LIB3829-031-Q6-N6-H1
agagaaattaaaaaaggattttattcttcacaagtattcaacttcaccattaaaataacacaattaagaactgggaaaggttaaggaacacaagtaccaacaactgttaattgcttcatgcacccactccagaagctctcaccaaaccaaacctgctatgccttcatgaaagaccaatgacctttccggtggcagtgtcgagatcgatttcataaaagcatggccttgttggtagccctggcattgtgctcattgtacccactaaaggataaatgaacccggctcctatgctggctcgcacatcccttatcggtaagataaatccacctggtgctcccttctcaccagcattgtgcgaaaatgagtactgagttttcgccatgcagattggtaaacctgaaaacccttggttgggggacatctcgatctggttc

SEQ ID NO: 14271 - DNA, 406 bp, Gossypium hirsutum
  unsure (1)..(406): unsure at all n locations; Clone ID: LIB3829-031-Q6-N6-H2
ctcccccccccccccccccccccccccccctcccccccccttccccccctttttctttccccccccccctttttttttcccgggcccccctccccctncccccnccccnnnnccnnnntccctnttccccccccccccccccccccccccccccccccccccccccccccttcccccnnccccccctccccccccccccccccccccccccttttctctcctcccccccctcccccccccccccccccccccccccccccccccccccccccccccttcccccccccctccccccccccccccctttctccccccccccccccctttccctccccccccccccccccccccccccccccccccccccccctcctcccccccccccccccccccccccccccccccc

SEQ ID NO: 14272 - DNA, 508 bp, Gossypium hirsutum
  Clone ID: LIB3829-031-Q6-N6-H3
ataataaataaaatttagcacattatagtttggtgatcaaagtacaacattagcagcagtgacatagaaagagtctgaaattaatgcaaatatatagtattgcatcatccattctcagtcatcaacccttggatggagaatgaatatatatatataagtccctacttataatccaaaccctatatataaaataacaagttccaagttcaagagagggtagagagagaaggtcctaaccatgggtgggacattagaagagaagaaccctaaggaacccaaatatctcctatggtttgcatgcaaaatgcttgcgagctccatatccattaatggagctcctttttcatgatgaaatgttagaaaaaagctaaatgcctattaaaatcaccaaagaagaaactatttaccatagttcaatcaaaaaggggggtaaatactcccaaagttttatccccccttaatggattttccaaagaaaacaaaactagggggaggttgtacttaaaaa

SEQ ID NO: 14273 - DNA, 528 bp, Gossypium hirsutum
  Clone ID: LIB3829-031-Q6-N6-H5
aaacaacttgtgttttagagttactttagtagcaaaggaacaacaagtacaatacaagacattatttaatgttccaagcgaataatcataaaattaacatagttttaacaccaaggttcaacaggtttagtttaataatccatgcaaccccaaacatactagatattgttcgaaattccaagaagcaaagcccaacaaaacagatgttcaaaatacaagcactcccttaacagtagaacataacacgcttgacattttccttgagggcaggcagaggtctgacggcagcactagcaccaggtcctcttgtgctacgcccaccagcagctgcagctccacctccacgccctgcagctgtggcacttgtcattgatccactgtctgatgtttctggttccatataaaaccgagctcggaatgcagcaagatgtgcgtagtacgcagggggaacaatagacactgatcgtgtgcaccttgcatatgtatagcaaagggtatttgtgagagattgtaatgcatcaactgtaa

SEQ ID NO: 14274 - DNA, 439 bp, Gossypium hirsutum
  Clone ID: LIB3829-031-Q6-N6-H6
ggaatcaatgatgccaattgttattccaattataaacttgcataccatagcattctacatataatcagaacaaacacaggcaacaaccctttttaatgactctctacagcttggagcctcttctttttataactataccagtcttctctttacagtattgagtatgcacggattacctccacgattggggctcgacacaatggacattttccgccaccccgaaccaactcgttcgcacattttgaacaagtgcacatgtgtccgcatctgtacaatagggaatcaatatgggtatcacaacaaacacaacaagtccctttccttacatgaccccatttcgatccatcctctgagggttctgcactcaaaactttttcaccagctgaacgattcaaagcagcagagacttcctgcctgacagaacgctgtaactccagct

SEQ ID NO: 14275 - DNA, 606 bp, Gossypium hirsutum
  unsure (1)..(606): unsure at all n locations; Clone ID: LIB3829-032-Q6-K6-A2
ccgtccggcaaaccacccactggnatgaaacgcagnacactgacccgttgcctattcctcctccattggatgaagacgacgaatcaatggattccaacaactcaaatgatggggaaccagttcctcatccaacatcggagatctccgaaccctgttacccagtagtatatcctgcttacttcccaccattctatccattttcatttccatattggatgggttacaacacagaaccaaccaagaccgacacgcatgaagtggtgaagccaacagcagtacattcaaagagcccgatcaacgtggatgagctggtgggcatgtcgaaactgagcttgggagaatctatcggtgataatggcccatcctcactttcattgaaacttgatggttcatccagacagtctgcattccatgccaatccgtcgtcacgtaattcaagtgggagtccaatccatgcagtttaggcgcccacctttatgttcaactactaccttagggttagctcagggtctgtgagcagtacaggttattgttaatagaagataatcatgtgcagtatgttctctttttttttttggtttagatatacatttgtagcattttgtc

SEQ ID NO: 14276 - DNA, 572 bp, Gossypium hirsutum
  unsure (1)..(572): unsure at all n locations; Clone ID: LIB3829-032-Q6-K6-A3
ggcaaactactacggccgctctttttctttgtcttcttctgtttcctattgtcttttccacgcctaatgacagattggttagaattggactcaaaagagaaagatgaccgaaacaatcggatggctgcnacaccttgaatccaaggagggaaaggcatctgaagcttttcttagaaagtatcgtcttcatgggaacttgggggaatcagaggacattgatattgtggcactaaagaactacatggatgctcagtactttggtgagattggtattggcactcctacacagaacttcactgtgatatttgacactgggagttctaatttgtgggttccttcatctaaatgttatttctcgatagcatgctatttccatccaaaatataaatcaagccgttcacgtacctacaaggctaatggtaaaccagcggatatccaatatggcactggggctatttcaggattctttagtgaggaccatgtaacagttggtgatcttgtagttaaacatcaggaatttattgaggcaacaaaggagtccagcttaacatttttgattgccaagtttgatg

SEQ ID NO: 14277 - DNA, 171 bp, Gossypium hirsutum
  unsure (1)..(171): unsure at all n locations; Clone ID: LIB3829-032-Q6-K6-A4
cggncgcgtgggcggncgcgtgggctcggctctcgcatcgatgaagacgtagcgaaatgcgatacttggtgtgaattgcagaatcccgtgaaccatcgagtctttgaacgcaagttgcgccccaagccattaggccgagggcacgtctgcctgggtgtcacgcatcgtcgc

SEQ ID NO: 14278 - DNA, 594 bp, Gossypium hirsutum
  unsure (1)..(594): unsure at all n locations; Clone ID: LIB3829-032-Q6-K6-A5
aaaaaggnaggttcctcgtctggacagctgatcgttgtgacccgtgaacctgatgggatcgctattgttaccatcaatcgacccaaatctctcaactccttgacccgacccatgatggtggacttggccaaggctttcaaggctcttgcgaaggacaactcggtgcgggtcatcatcttgtctggagctggacgggctttctgttcaggcgtggatttgacggctgcacaagatgttttcaagggtgacgttaaggacccggagacggatccggttgttcagatggagcaatgccccaaacccatcatcggagctatcaacggcgttgctattactgccggcttcgagatcgccctcgcttgtgacatgctggtcgctgctaagggagccactttcgttgatactcacgccagatttgggatatttccttcatggggtttatcccagaagcttgcacgcttcataggaccaaacaaggctcgcgaagtgtcgttggcagccatgcctttgtcagcagaggaagctgagaaattggggtttgtcaattatgttgttgaccaaaatgaagtgttgaataaagctcgacaacttgca

SEQ ID NO: 14279 - DNA, 573 bp, Gossypium hirsutum
  unsure (1)..(573): unsure at all n locations; Clone ID: LIB3829-032-Q6-K6-A6
ctcttgnccaccatcatcaccaccaccacnaccaccaccgccaccaccgtcttagcctctctctcctttcctccttaacttccgctctctctcttccctctccctatcttctccgtggaatcgtctccaaaacctcatactttcccttctctcaacaacaacagcaacacaaaaaggcctttgtttaaaggagctaaaagaagccgaaaccctggctcaaaagatcggaaaatccaataggcgccctggcgccccatctaaatctagggtttacgccgatgtcaacgttattcgtcctaaagaatattgggactacgagctcctcactgttcaatggggcgaacaagatgattacgaggtggtgaggaaagtcgggcgagggaaatacagtgaggttttcgagggggttcatattacggataacgagaaatgtgttatcaagattctcaaaccggtcaagaagaagaagattaagagggagattaaaatactgcagaatctttgcggagggccgaatattgtgaagttgctggatatagttagggatcagcagtcgaagactccaagtcttat

SEQ ID NO: 14280 - DNA, 471 bp, Gossypium hirsutum
  unsure (1)..(471): unsure at all n locations; Clone ID: LIB3829-032-Q6-K6-B1
gtgaggaagctacaagnatgtgagttagggaacatctacattcccgctgatttaaagagtctcggaagcatttggcatcgtttattccatatggtttgggccctagattttgtgtgggacagactttagccaccattgagatgaaaaccatcctggctatgattatccggcaatattctctagcggtgtcgcccacatacgttcatgcccccaagctactcatctccctggagcctcagtatggcgtacagttactcttaacaagaacaactttatgatgcttttcaagcccacttcatggatgcttagtaaaataagtgaattttctctctttatattattataactcaatatcccttctacctattgttgttgtccagaggatgatgaatcaacatatggattgaaattatgcctacgaatgtatccccagattactggtataataatgacttatttggttagcccttc

SEQ ID NO: 14281 - DNA, 572 bp, Gossypium hirsutum
  unsure (1)..(572): unsure at all n locations; Clone ID: LIB3829-032-Q6-K6-B4
ctcatcgcttcctcgnacgaactcgccattgatatgatgaacaagacgactatgttgtgatcaagcatgcagcccttttcacatccacaatcatgagcaagcttctagcccgccccaacgtgaagctgttcaacgctgtggcggcggaagacttaatagtgaaggaagggagagttggtggtgttgtgacaaactgggctctagtgtcaatgaaccatgacacacagtcctgcatggaccctaatgtgatggaggccaaggtggtggtgagctcttgtggtcatgatgggccatttggagccaccggggtgaagaggttgaaaagcattgggatgattgatagtgtgccagggatgaaggcactggatatgaatacagctgaggatgctatagtgaggctgactagggaaattgtgcctgggatgattgtcaccgggatggaagttgctgagattgatggatccccaagaatggggccaacatttggagcaatgatgatatcagggcaaaaggcagcccatcttgccctgaaatattaggattgcctaatgcaattgatggaacacatgtgg

SEQ ID NO: 14282 - DNA, 586 bp, Gossypium hirsutum
  Clone ID: LIB3829-032-Q6-K6-B5
caagacaaagcaaaaaaaaaaaaaaaaaaggaaaaaaaggctatgcaattcaatcccatcgcttctcaaactaagaaactcccttcatatgctcttccacccatggcaagtcttagatctcccaaggtttctatggtctccactcttccacctcgctccaaagggttgaagatctgaaacggcctttcatggctccaaagctggtacaccaggcttcccacaccatgccacctgagaagattgaaatctttaaatctttggatgattgggctagggataacattctgattcatcttaaacaagttgataaatgttggcaacccaaggattttcttcccgatccttcgtccgatggatttgaagatcaagttagagaacttagagaacgggcaaaggagattccggatgagtactttgtcgtgttggttggtgatatgatcacggaggaagcccttccaacttaccaaactatgcttaataccttggatggaactcgtgatgaaactggtgctagccctacttcttgggcaacttggaccagggcctggactgccgaagaaaacgacacactgatctacttaataag

SEQ ID NO: 14283 - DNA, 592 bp, Gossypium hirsutum
  unsure (1)..(592): unsure at all n locations; Clone ID: LIB3829-032-Q6-K6-C1
cccggtcgccccgcgtccgggcgcgngggcggacgcgtgggcggcgcgtgggcttgaacacgccccttcttattttatcattcataattttcatcaacgaagaaaaatgagagagtgtatttcgattcacattggccaggccggaattcaggtcggaaatgcttgttgggaactttactgtctcgagcatggcattcagcctgatggacaaatgcctagtgacaagactgttggtggaggagacgatgctttcaacacctttttcagcgaaaccggtgccggaaaacacgtccctcgagctatatttgttgatctggagcctactgttatcgatgaagtgaggactggaacataccgccaactgttccaccctgagcaactcatcagcggtaaagaagacgctgcaaacaattttgctcgtggccattatacaattggaaaagagattgttgacctctgcttggatcgtatccgaaagcttgctgataattgtactgggctccaagggttcttggttttcagtgctgttggaggtggtactggttcaggtcttgggtctcttctccttgagcgtctctctgttgactatgga

SEQ ID NO: 14284 - DNA, 580 bp, Gossypium hirsutum
  unsure (1)..(580): unsure at all n locations; Clone ID: LIB3829-032-Q6-K6-C2
cttcccataaacagnacanagaagtaaaacccaagtttgaaaaccatcaaaaatggttcaaaggctcacttaccgtactcgccatagctacgctaccaaatccaaccaacaccgtgtcgttaagacccctggtgggaaattggtctatcagacaactaagaaaagagcaagtgggcctaagtgtcctgtcactggcaagagaattcagggtattcctcacttgagacctgctgaatacaaaaggtctagattgccaaggaaccgccggactgtgaatcgtgcttatggtggtgttttgtcctgcagtgctgttagagagaggataattcgagccttcttggtggaagagcagaaaattgtgaagaaggttctgaagatccagaagtccaaggaaaagcaagcttcaaagagctaagaaattagatgtcgaatcatcatttcaattctgatatgtgatcagcaaggctttggaaagtgccaccaatgacttcagaagattagaggttctctttttctattggcaaatggacttcaatgtttacaatgttttgataattttggattacgttttgatcatcga

SEQ ID NO: 14285 - DNA, 548 bp, Gossypium hirsutum
  unsure (1)..(548): unsure at all n locations; Clone ID: LIB3829-032-Q6-K6-C3
gnaaattagttttatactcccgtttcctcttttttgtctctcgggcagctccgccgctggagaaccaagttcttcggtttccagcggcggagcaccacacgttgtgatcggagactaaaaaacttattgttttttttcttcttcatttttgtttttcttcgtttctgggtttcaaactagaaaagcctcgtaggggaaaatggaaaaaagaacttgaaaattttccctttttttcaataagggttctccgttccagatctacgaaataaaaaagggggaaaaaggaaaggaaaggaagctggaaggaataaacgcatggattcaccaaacagtcttagaaccgaggacttagttcggtgaaagcccttcatcggagctcaccaccatttgtttatgcatgcacgtgaaagtaaacggcagtggagcaaggccgagggtctacctttaacggcgtgttcaggggcttctcttttttcaagggctttttttttttgttttttcttgcaggttattccgctttttaatactcgtattattgttaatctccc

SEQ ID NO: 14286 - DNA, 586 bp, Gossypium hirsutum
  Clone ID: LIB3829-032-Q6-K6-C4
tttctcttataattgtaagtctcggctaagccttagttttctatgcacttagtgcacttgaggagttaggttctatatatagttggttctaccgcttgaatgatatatgatcggccttgccgcttgaataatatatgatcggccttgttgccttagtattatagtgcactaagaagttagaaaataaaaggttaaccgactccaaagagttggtataatattacttgtaggtcctaggtcttctatagtgagtgtgttgggctcatcgagttcccaacaacaaattttagaatgtttattcctatggatttagttttctccttatatatggttgacattagtttgcttttacagcaagttatggaaaggcgttgatatgctgaagtcagaagaacttgcaaaaggaatacaagattgtgtgatgaaaattgttaagaaaagagaagacaaatttgtgaatggagaagctgacagctttggcaatgattttttaggattacttgtaaatgcatatcatgattcggacgaaaataacaggctttcaatggaagatttggtagatgagtgcaaaacattctactttgcc

SEQ ID NO: 14287 - DNA, 555 bp, Gossypium hirsutum
  Clone ID: LIB3829-032-Q6-K6-C5
aaagggtctcctcaaaggctctgctactaaaaacccattttttgcaatcatctttccttccttctctctctctctctctctcaaacaaaaccagttctcttccaaagaatcagtctgggttatggacggcggtgcttcctataacccacgtacagtcgaagaagtctttcgagatttcaagggtcgtcgagctgccatgattaaagccctcaccactgatgtggaagagttctacaagcagtgcgatccagaaaaggagaatctttgcctttatggatatcccagtgagcagtgggaggtgaatttacctgctgaagaggtgcctccagagcttccggagcctgcactgggtattaactttgccagagatgggatgcaagaaaaggactggttgtctttggttgctgtacacagtgacgcgtggttacttgctgtggctttctattttggtgctaggtttggattcgataaagctgataggaaacgccttttcaatatgataaatgatcttccgacaatatttgaagttgtgacaggggcaactaagaaacagac

SEQ ID NO: 14288 - DNA, 585 bp, Gossypium hirsutum
  unsure (1)..(585): unsure at all n locations; Clone ID: LIB3829-032-Q6-K6-C6
gttngacatggcatctttgcaagttttgcatgcaacaaatctgaagcagtcgccattgcaagggtttcttccactctcatcccgttatgctgtggctgcgcccctngaaatcgactgttttgtcgaggacaaagaccataggccagaagaaccaaaagagatcttttacagtggttgcagcagttggcgatgtatcagctgatggtaccaactatctgattgctggtgcagccgttgttgctctggttggaactgctttccctatcttcttctctcgcaaggacacatgtcctgaatgtgacggggctggctttgttcgtaaagctggagcaacattgagggcaaatgctgcacgaaaggaccaggctcaaatcgtatgcgctcgttgtaatgggcttggaaaattgaaccaaattgacaaatgaatacctttgattccgtgattttaatccaaattcctggtgtaaagtccaaagaccctatcttttactgaactcagaaatttctctgcagttcacacaagtttaaattgttgaatgtcctcctccacgtgtaacttatatataaataacagaaacatctttg

SEQ ID NO: 14289 - DNA, 450 bp, Gossypium hirsutum
  Clone ID: LIB3829-032-Q6-K6-D1
gttttgtcacttcaaacctttctgattcagaaaacttgcttcatgctctacttcacctcttgctgagggtccagagtttgtggataatgagagaaggttgtggaactatctaattaagaatccagactggagaacgacttttccgatgaggcaaccacgagtgtttgagaggacaggtgacggctgctggaaaagagctggcttttcatcacaaggacaaggaacataatcaactccattaaagagcttacaagttatgcagtaagctttctgttcaatgttgtatgcatcattgggttaaatacaggccacattttccatgaacatgtggaaagatacccagattgctgggtttctctctctctctctctctttttttttttgctttgatgataaaccctgtattggtaaggtaagtagctaattggaagcaagagctaattgaactat

SEQ ID NO: 14290 - DNA, 618 bp, Gossypium hirsutum
  unsure (1)..(618): unsure at all n locations; Clone ID: LIB3829-032-Q6-K6-D2
gtcgaccccgcgtccggtacaatgtgatggtatgcttattccttatctgcctattccctaacatcattttaaccaaacaaacaacatattcctatttgttatctattctattcaatgaaaaacactgcataatacangaattctcctnntttattccatnntgccattgaaaagctattctgttcctcctctattccattaactaaacataatgttggtgtttctctttatttctttcaatatgcttgcaaatattgccatctatgcaggttgctagttcatgggcttctcagacaagttcaactgaaggcgatccagagtcgattgaatgcgtttcatttgcaccaaagttcccttgggctgtttctggtggcatggatcgaaaccttacaatttgggatctacaaaactcatcaccacgtttcatatgtaaccacgaggaaggagtgacatgcttagcttggcttggagcatctaaattcttggctacagggtgttgtgatgggagaatatgcatatggaattgtctatctggggaatgtgtcataaccttcaaagggcatgaacatgctatccagtctctctctgtatcttccaatctgggatttctcgtttctg

SEQ ID NO: 14291 - DNA, 569 bp, Gossypium hirsutum
  Clone ID: LIB3829-032-Q6-K6-D3
catacgaatatcgcgagggtttcaagaaatttgtggtggcgatgatggtgggttccatcgcagcggctcagatttcattagcatccaccgtgcctgcttttctatgggctcctggtttctctagcgttgaatcgaaggaatctgtaaattatcagatcaagtctccaaaggatctagctaactctgttctctctcaagggggatggtctgacttactgtgctccgagaggaaaaatgagcgccctgttgatctcgccgttgtttttgttggtagagagttgcactcttcagatgttgcagggaacaaacatgcagatccggctcttttgaacttgcttaaggactcttttaccaagtccaacttctcaatggcatttccatatgtagctacttctgaggaggaaacaatggagaatttgttggtttcaagttttaaggaagcctgtgcccacggtttgggagttgctaatgttgcaattttggaatcgtgctctatagagggtggagatttccagaaacttgcaaacttgcattcagtccatgatcatctagttaaaaggatggaaaag

SEQ ID NO: 14292 - DNA, 578 bp, Gossypium hirsutum
  unsure (1)..(578): unsure at all n locations; Clone ID: LIB3829-032-Q6-K6-D5
tagnactgtgagggacagtgcggtgagtgtcattttaaaaaagatatggatggtgttcttgttgatgagttgttggcaatcctcgcaatgctgtcaactcatcaaaggctatagaggaaatcggagagcttggaggtgttccttgcttgcttcacattatcagggagagcacctgtgaacgcaacaaggaaaattgcatcgcaatcctccacactgtatgtcttaatgatcggaccaagtggaaagcattgagggaagaagagagtacccatggaacaatatccaagcttgctcaagatggaacttctagagccaaaagaaaagcgaatggcattctggagagactaagaagggctgttaatattactcataccgcttgaagacattactcaatgtgtgcattatttgtaaattctgtttccgactctcggtgatcattgtggcttatcatcactctgcttttgtaaattcttgtgcctcatcagagtttttaatctcagttttacgagctagctgctgttaataaacactgtggaagcttatgtttataaagattttctcttcttgtttggtccaat

SEQ ID NO: 14293 - DNA, 574 bp, Gossypium hirsutum
  unsure (1)..(574): unsure at all n locations; Clone ID: LIB3829-032-Q6-K6-D6
ctgtcctccccgttcttgcctttaggtctctctcaaacctagttcccattcgtctctttcctccgtcgccagaggactagnaaagcccaccgccactctcaagggccgacggaagcggcctatatttaatatctccaactaacatctccgcgatccactcatgatgagcaccggcgaacttctcagcatcgaccctcaagagctccaatttccctttgaactgagaaagcagatctcctgttctctaaacttgtccaacaagacccacagttatgtagcttttaaggtcaaaacgacaaatccaaagaagtactgtgtaaggcccaacactggagttgttctgcctgcctctacgggcaacgttattgcagttacaatgcaagcacaaaaggaagcacctcccgatatgcaatgcaaggataaatttttacttcagagtgtggttgctagtcccggaaccgcagcaaaggatataactcctgagatgtttaataaggaatctgggaaccgtgttgaggagtgcaagttgagggttgtttatcttgcacctcctcagcctccttcccctgttcaa

SEQ ID NO: 14294 - DNA, 576 bp, Gossypium hirsutum
  Clone ID: LIB3829-032-Q6-K6-E1
caaattctctcaggcttttcatcgagcaggagctatgatacggctgttcaagtaaagaaaacagagagacttgctaaaaacgcaaatggcggatcacctatcaaaaagcaatctgcaggggagttgcgtttacacaaagacatttctgagctgaaccttcctaaatcatgttccatatcatttccaaatggaaaggatgacctgatgaatttcgaggtttcaattcgacctgatgaaggatattatttcggtggcacgtttttgttctccttccaagtttctcccatctatccgcatgaggcaccaaaagttaaatgcaagaccaaggtctaccatccaaatattgacttggaaggaaatgtttgcttaaacatcttgcgtgaagactggaaaccagtgctaaatataaacactgtaatctacggattataccatcttttcacggagccaaattatgaggatcccctcaatcatgatgctgctgcagtgttgagggataatccgaagatgtttgaatcaaatgtgaaaagggctatgtatggtgggtatgtggggcaaacctatttcccacggtgc

SEQ ID NO: 14295 - DNA, 577 bp, Gossypium hirsutum
  unsure (1)..(577): unsure at all n locations; Clone ID: LIB3829-032-Q6-K6-E4
cggncgcgtgggcggncgcgtgggtgcgttcaaaccttcgctgctgaccagttcgatgagaacaatcctgaagaaaggcagccaaaagctcatttttcaactggtggtaccttgggatcgttacaggagcctcagtcgccatcgttgtcgtcatttatctccaggataatgttagttgggcagcaggatttggggtgttatcagggtcattagcggtagcattggcggtgtttctaattgggatcaggaagtaccgaaagcaacggccgacagggagtccgttcacctctgtggctcaggtctttgtcgccgctgcaaagaagtggcgcgtgagtgaaacccacggtggcaggggaatttgctatgaagatgatagaagaggtgggagccacgtcaaaggtcaaaccatgggtcgcgacttggtccgtacaaaacagttcagatttctagataaagcaatgatcatcgacgataaagataccttgagcaaaactagggatccatggcggctttgctcattgaaccaagttgaagaagtgaagcttgttcttcgccttatacccatatggcttggttg

SEQ ID NO: 14296 - DNA, 608 bp, Gossypium hirsutum
  unsure (1)..(608): unsure at all n locations; Clone ID: LIB3829-032-Q6-K6-E5
ccgtccgcaaggtgtaagtatggggaattgggaaagcattgtgaatgagnaatggctggaaaagcctctggcagtttaacgcgatgctatgtgnnttctacatgtgagatggcagttatatggatgcaaaaccagcttaagcagaaccagacagaggaccatataattgactatgtcaatgagctctgtgatcgattgcctagtccaatgggagaatcaagtattgactgtaaaagtctatcttctatgcccagcgtctctttcacaattgctggaaagttatttgagctccgtcctgagcagtatgtcatgaaagtgggcgagggagatggggctcaatgcattagtggattcactgctctggatgtaccacctcctcgcggacctctctggatcctgggtgatgtatttatgggccagttccatacagtatttgactatgggaacatgcaaattggatttgctgaggctgcataagcgaaccttttctaaatcttttaacacccgagtgccatgctgttcaagtagtacacttctaaacatatgggattaagtatcaaagatgattgtatgtaaatacttgtgtaaaacatgatctgtgatttaat

SEQ ID NO: 14297 - DNA, 561 bp, Gossypium hirsutum
  unsure (1)..(561): unsure at all n locations; Clone ID: LIB3829-032-Q6-K6-E6
ctttctccaanaggctagnaggttgaagaacatttgaagaggctcaatgcccccaggcattggatgcttgacaagcttggtggtgcttttgcacccaagccatcgtctggtccccacaagtccagggaatgcttgccattgatccttattttgcgaaaccgattgaagtatgctctcacctatagagaagtcattgctattctcatgcagaggcatgttatggttgatgggaaggttaggacggataagacctatccagctggtttcatggatgttgtgtccattcctaaaacaaatgaggacttccgtctactttatgacaccaaagggcgatttcgtctccatgccatcagtggcgatgaaaccaagttcaagctttgcaaggttcgatctgtccagtttggccagaaaggtattccatacttgaatacatacgatggtcgtactatccgttaccctgatcctttgatcaaggctaatgacaccatcaagctagaccttgaaagcaacaaaattgttgatttcatcaagtttgatgttgggaatgttgtcatggtcact

SEQ ID NO: 14298 - DNA, 582 bp, Gossypium hirsutum
  unsure (1)..(582): unsure at all n locations; Clone ID: LIB3829-032-Q6-K6-F1
ctctagnatcttcccttgtccctgttaaaatctgtcactgtgatcattaatggccaccgctgaacctgaagttccagtcactgagcagcagcccgcggcagcagaggagccaaaccggcggaaaacctgtgaaggagaagagacccagagctccaaaggagaaaaagcctaagcaacccaaatccgcagcacatcctccttattttcagatgatcaaggaggcgcttttggctttgaaagagaagagtggatcaagtccgtacgctatagcgaaatacatggaagagaagcacaaggcggtgcttccagcgaatttcaggaaaatcttaggtcttcagcttaaaaactcagctgccagaggcaagctgataaagatcaaggcctcttacaagctctccgaagccggcaaaaaagagagagcccctgttacgaaagctaagatggagaagaaagctaagccagcttcgaagccgaagaaagctgaggcgacaaagaagccaacaaagagagtcggggccaagaagaaatcaactccagcaaagccgaaacagcctaaatctatcaagtcacctggcggttaaa

SEQ ID NO: 14299 - DNA, 591 bp, Gossypium hirsutum
  unsure (1)..(591): unsure at all n locations; Clone ID: LIB3829-032-Q6-K6-F2
ggcagnaacagcagtattgtattaatcgccagnaaaatccatgattcatgaccaaaacaccaaaacacccttctcttctaggattaatttcgtccatctggctttcaaatttcctacataaacaaaaatttaaatttcgtattttaccctacaaaatcgaagatccaatcattttctcgccctccaaacagacccccttaccctcccccttttggaaaatggaggaaaacggtaacagagccgaagccgttcgtcttctaggaattgccgagaagcttctccagaatcgtgatttcaacggttcaagagacttcgcaatcttagcccaagagaccgaaccgctgttggacgggtcggatcagatcctagccgtcgccgacgttatcctcgcaggcgagaagagaataaacaaccaccaagattggtactccatcttacaaatcgacggccgatcagaagacaacgatctcataaagaaacagtatcgtcgcctagctctcctccttcacccagacaaaaacaagttcccgttcgccgatcacgcgttccagcttgtggccgatgcgtgggctgttttatctaacagctcga

SEQ ID NO: 14300 - DNA, 560 bp, Gossypium hirsutum
  unsure (1)..(560): unsure at all n locations; Clone ID: LIB3829-032-Q6-K6-F3
cttngtaccgccccctttattttatttttcaaacaaatttcccttcaattttcgtataatttcctaggaaaagaatatgagagagtgcatttcagttcacatcggtcaggccggtattcaggtcggaaatgcttgctgggaactttactgtctcgagcatggcattcagcctgatggccaaatgccaagtgataagactgttggtggaggagacgatgctttcaacacctttttcagcgaaactggtgccgggaagcacgtccctcgcgccatctttgttgatctggagcctactgttatcgatgaagtgaggactggtacgtaccgccagttattccaccctgagcaactcatcagtggcaaagaagatgctgccaacaatttcgctcgtggccattatacaattggcaaagagattgttgatctctgcttggatcgtatccgaaagcttgctgataactgtactgggctccaaggcttcttggttttcaatgctgttggtggtggtactggttctggtcttggatctcttctcttggagcgtctctctgttgactatg

SEQ ID NO: 14301 - DNA, 372 bp, Gossypium hirsutum
  unsure (1)..(372): unsure at all n locations; Clone ID: LIB3829-032-Q6-K6-F4
ggnaagtanagtttcactatggcaccattaaaaaaggcttgggactggcccatcagatatccgtgcctttaccctcgactatcacttgcaggtttgagatgcggttgccacatcttgtgaagtgaataatagtgggggtaaggctaatgtgctgaattgttgggagtgaaatccttttaccgtttctttggctctgagaaattgggtttagtctggtgctgtatcttccatatttgagttttccaagtaatatccctacaatgttgatctggattattggtgttatgagttgcctttcatatacttaaaaaaaaaaaaaaaaaaaaaaaaaaaaaaaaaaaaaaaaaaaaaaaaaaaaatggtagaggtagt

SEQ ID NO: 14302 - DNA, 577 bp, Gossypium hirsutum
  Clone ID: LIB3829-032-Q6-K6-F5
cccttcttcttcctttctataaagaaacctacctaatccatggttttgataagcttaatgggtcttgatgatgatgcatgtaatacaggccttgttctggggttgggattctcatctgccctggaaactccatccaagaagccatcatgtcttaagtttgaacaaccagccacgacggtggcacctccaacaacttttgaaccgtcgttgaccctgggtctatttggtgatcagggttaccaagttaccaagaagtcggatgtcaataaaagtggttatcttcatcaccatgaggaacctggcgccggtgatttatatcgtcgtcaagcttctcctcatagtgctgtttcttcgttttctagtggtagagtcaagagagaaagagaggttagcagcgaggaattagaggtagagaagaattcgtctagagttagtgatgaagacgaagacggtgttaatgcaaggaagaaactcaggctcaccaaagaacaatctgctcttctcgaggaaagcttcaaacagcatagcactctcaatcctaagcaaaagcaagctttagcaaagcaattaaacctga

SEQ ID NO: 14303 - DNA, 590 bp, Gossypium hirsutum
  unsure (1)..(590): unsure at all n locations; Clone ID: LIB3829-032-Q6-K6-G1
cggncgcgtgggcggncgcgtgggttttggaccttcttgaactagatttgacttgaaatggctgctgtggttggtccagngaaatgaattagggaaagccatagatgttaatgaggctgcagatcatatctttggacttgtcttgatgaacgactggagtgctcgagatattcaagcatgggaatatgttcctcttggaccctttcttggaaagagttttggtactacaatatccccttggattgtgacacttgatgctcttgaaccttttgcatgtgatgctcctaagcaggatccccatccattgccatatttggcagagaaaatatccaaaaactatgatattgaattggaggttcaaattaaaccttctggacaaaatgattcatgcgtggttactagaagtaatttcaagaacctatattggacagtgactcaacaagtagcacaccacacaatcaatggttgcaacctgaggccaggcgatatccttggaactgggaccattagtgggcctgcatttgaatcatttggatgtttgctggaactaacatggaatggacaaaaaccattgccattaaatgggacaa

SEQ ID NO: 14304 - DNA, 591 bp, Gossypium hirsutum
  unsure (1)..(591): unsure at all n locations; Clone ID: LIB3829-032-Q6-K6-G2
gnaaaacagnatggnaagctgatattaaagatcttctgttngaaaatggaagccacaaggcgaaaccttgccatgtgatgtgctaaattgaatggttctttgctttcagttagaattgttattgtaggataagcggagcaaagccacagttttgtgcgagtaccatgatgcctcccaaacctctcattattggcgattggggtgctgcaaatgaagagcttctaatgtgccccagttgaagatgttctcattcaggcttctgcaaaatactctcacttaaaccagaggcagagagtgagctcccaagggttgcctgtgtatatgtttgagggcctgccatcctcatctaagcattgggtggctgtcgaaatgaaccagtcaagtcaatgatgctcttgactccatttcatagaccaaaaggtctttagtcttcgtttaccataaacaaacacacatgcagtggtgtcaaggactgacgtttcgttttggtaaattacataaaatacaccgctcctatgagtgacctgatcttgggttggtgtcttggcaattggcattaatgtttgataaacatatatgaggtagagctta

SEQ ID NO: 14305 - DNA, 575 bp, Gossypium hirsutum
  unsure (1)..(575): unsure at all n locations; Clone ID: LIB3829-032-Q6-K6-G3
cttttcaatcttttctttcgtttcaaatcttggnaaatcaaaattcctatggcaccaaggccgagaagaagcctgctgagaaaaaccagcggaagacaaaaaagccgagaagggcaccaaccganaaaaagcccagagccgagaagaagctccccaaggaagccggcgacaagaagaagaagcgaccaaagaagagcgtcgaaacctacaagatctacatctttaaggttctgaagcaagtgcaccctgatatcgggatttcgagcaaggccatggggattatgaacagtttcattaatgacattttcgagaagcttgctcaggaagcttcgaggctcgctcgttacaacaagaagcccacaattacatctcgggagattcaaacagctgtgaggctggttctgcccggggagttggctaagcatgctgtttctgaagggactaaggctgtcaccaagtttactagttcttaggttttggaaattatgatttggttgtaaagattagtagcttttaaggatgattaatcggtgggtcttctggtatttcttgagctcaaattgaagtcttattat

SEQ ID NO: 14306 - DNA, 382 bp, Gossypium hirsutum
  Clone ID: LIB3829-032-Q6-K6-G4
cccgggtcgcccacctcacttttgactaaattttgtagctcaaaggagtcttgcttatgccttgcgagcgttgcatgatgacattgtattattgcataagattctttgctaactagtctttttgcatgctaatttgagctagggagaatcttgagcaagtgattttgagcttattataaacattgggtctaaaaaataaaaccccacaatgaatgtgacaaatgaaggcactaacccacataaaacaagctactttcttgtctctcctaccccatcaagtgcacatattgtcaaaatacattcacatgtatatgttttgttgtgaaaaagatttagtgtttgtacttttggttacagttgttttttgtccggctactaggac

SEQ ID NO: 14307 - DNA, 576 bp, Gossypium hirsutum
  Clone ID: LIB3829-032-Q6-K6-G5
aagaatgggtgttgtaatcattgacggatcgacggtgagagccttcgtgactgacgaccaacagttcacgaagagcgtggatgagcgtttcgcagctcttgacctcaacaacgacggtgtcctctccaggtccgagcttcgcaaggccttcgagtctctgcgtctcctggagtcccacttcggtgtcgacgtcgccactccccccgacgagctcactcagctttacaactccattttcgagaggtttgattgcgatggcagcggcaccgttgacctccaggagttcagatctgagatgaagaagattctgcttgctattgctgatggattgggatcttgccctatccagatggttcttgaggatgatgaccaaagttttctgaagaaagctgctgatcttgaggctgctaagctcgatccaaaccatgctcaagcctcctgaatgatgctcccaggttgctgaacttgaatttatgcttttgtattttcttatcttttgcagctactttagcttgttggtatttggatccatccaagtatatatgaataaaagggttaacgctacgtttagccctc

SEQ ID NO: 14308 - DNA, 569 bp, Gossypium hirsutum
  unsure (1)..(569): unsure at all n locations; Clone ID: LIB3829-032-Q6-K6-G6
ctaaatctngaaaaagnagtacagnaactaaatttcaaaaatatgtggagtataagaactttccttcaaatcctcaatgctcatatacaaatgtgtttgattttggtatcggacaggagtactttcaagcaaaaaaataaaaagtcggagcaatataaggctagcatgtaggtaaaagaaacattttagcattatttaattggatttgagttgtctagatacaactagtttgccatccgagtttcagcacatcatatgttgaattcctctgacatccctaactatacttgtaaactcggatatgagtctcaaatacgggtatgtatccaacacgggtaagttttttaagggtctttggagagtttgtcaaacacaggtacttcaagaaaaatgaaaaaatcgaagcaaaattgcttatatttttcatcattggcttgataatgttgaattcatgcctcgtccatcattttgtagattcgggaaatgaagactcaagcggttgtgattgccgcgccatttgcgtttaccctaggcctcttaggctctatctttgccctcttcttagcaat

SEQ ID NO: 14309 - DNA, 540 bp, Gossypium hirsutum
  Clone ID: LIB3829-032-Q6-K6-H1
gtgcaaatattctgcacttaacttccacattgcttcttatttccttattactaatggtaagcttgctaagtaatagcatgaaactatcaccatctagtagttatggttctttacatcacttaaagattttgcgtttcttattgcaggagattttgaggcatggcttcattcatggaacgcgcactgttggaagcatgatgttacctccaggcgttatttgttcaccactggaatggtaaatccatgtggttttaaatttctttttcttctgcatgtaatcttcacttgatctgttccctcacctaaaccagcaaaaaggttgggtccaatgatgcatcccagtttatggggagttggtgagaatagtcggcatttgatgcgtgatgaaatatgcctagatgtaatggttcgtggaaaattttctcacaagtcatcgactaagatcacttgtatctctgcaggttcttcaacatgcaaaaccattgaaccagctaccactagttggacccttgatctctcctcccgttaatgcatattgct

SEQ ID NO: 14310 - DNA, 577 bp, Gossypium hirsutum
  unsure (1)..(577): unsure at all n locations; Clone ID: LIB3829-032-Q6-K6-H2
cggncgcgtgggcggccgcgtgggcggccgcgtgggcaaaacgccaaactattgcttcacctggtcgtggaatactggcaattgatgaatcgaatgcaacatgtggngaagagattatcttctattggcttagacaatactgaacccaaccgccaggcttacagacagcttctgctcacaactcctggcctcggagaatatatttccggtgccattcttttcgaggaaacactttaccagtcaactacagatgggaagaagtttgttgatgtcttgcacgaccagaaaatcgtacctggcatcaaagtagataagggtttggttcctctacctggatcaaacaatgaatcttggtgccaaggcttggatggattgtcatcaagatctgccgagtactacaaacaaggtgctcggtttgccaagtggagaacagtagttagcattccttgtggtccttctgctctggctgttaaggaagctgcatggggacttgcacgttatgctgccatttctcaggacaatggtcttgtgccaatagtggaacccgagattcttctggatggtgaccaccctattg

SEQ ID NO: 14311 - DNA, 580 bp, Gossypium hirsutum
  unsure (1)..(580): unsure at all n locations; Clone ID: LIB3829-032-Q6-K6-H3
taccccgccaccttcatgaggcaatggaatcttgtccaaaggctaacatnntggaaaccttaaggnnaactgctcaaagnaggaaaatctgtatctccatactgaggctggagatcaaggnaaaattgcccgtgttgattttaagtacgaaaggaaacaatcaagaaaagagcctgctgttgtttttctgcatagtactcataagtgcaaagagtggttacgcccattgcttgaggcttatgcttcacggggatatgtagccattggagtcgattcccgctatcatggtgaacgggccagcagtctaactacttatagagatgccctggtatcatcatgngaaaaatggggatacaatgccattcatatttgatacggtgtgggatttgataaaacttgcagattatttaactgggagagatgacatagatcctactaagattggaattactggcgaatcacttggaggaatgcatgcatggtttgctgcttttgctgacacccgctatgcagtggcagccccaataattggtgttcagggatttcgatgggcaatagataatgataagtggcaggctcg

SEQ ID NO: 14312 - DNA, 598 bp, Gossypium hirsutum
  unsure (1)..(598): unsure at all n locations; Clone ID: LIB3829-032-Q6-K6-H4
caccttccacaaatggacagaaggtttnatgtccgagaacaagcagcactatttgtttcaatggcangaaatgatgaaaaaagttccaatcaagtaccagagatttgtcacgtccgcacagttcatcaaatatgccagtgctcagattgacaaggcctaaagaacccgaattcgaaacagcacagagaatgcgtccggttgcggtgaagagcacagcagagcttgaggaagaaatgatggctaaaattccgaagttcaaagcaagaccattgaacaaaaagatttttgaagcttcaacactaccttcattaccaagaagtactccgaagacacaagagtttcaggaatttcactttgagacaatggctagagcaagtaagaatgcagagacatcttcagtagcttcaacagaagtgtctcgccagaatactcaatggaaacctcatctcacagaacctaaaaccccagtgcttcaaacatctctaagggcaagacctataacggtcaaaagttctattgaacttgagcaggaggaaagtgaaaaagctcctaaatttaaggcaaggccattgaataaaaagatatttgagagcaaagg

SEQ ID NO: 14313 - DNA, 577 bp, Gossypium hirsutum
  unsure (1)..(577): unsure at all n locations; Clone ID: LIB3829-032-Q6-K6-H5
cagnatcagnacgtacgagnanatgattttagagcattttggttagctagaaacgagaggattgtagattggttgctttatgaaagttcttcaattatatgtctccaggaattttgggttggaaacgaagaattggtgcatatgtttgaagagaggcttagtgctgcaggctataagaccttcaagcttgcaaggaccaacaaccgaggagatggtttattgactgctatacaccaggactacttcaaggttttaaattatagagaattgctcttcaatgactgtggagaccgagttgctcagttgttgcatgttaaatcagttgtccctttttcaataaatcagaataactgtgttgaacaagaaatccttattgtgaacacccacctattatttcctcatgattccagtttatccattgcaagactgcaccaggtttatcaaatactactatatctggaaacgtatcaacaagaaaacaaactcacccagatgcctgtcatactctgcggtgactggaatggaagcaagcgtgggcatgtctacaagttccttaggtcccagggatttgtatcat

SEQ ID NO: 14314 - DNA, 576 bp, Gossypium hirsutum
  Clone ID: LIB3829-032-Q6-K6-H6
gttagtctcagaatcattgtagggatgccggccctggcttgctgcgtagatgctgctgccgtagcgcctcctggttacgcggctttctttgctggggacagctcccttccctcggcggtccctttttccgcctccaccgccgacgccgctgattccaactcaacccattggtccccagcgcactcctccgctctctaccgcatcgacggatggggagccccctacttttccgtcaataacgccggcaatatcaccgttcgtccgtacggaacggacactctggcccaccaagaaatcgatttgctgaaaatcgttaagaaagtctcggatccgaaatctgtgggcgggctgggtttacagcttccccttattgttcgggtgcccgatgtgctgaaaaaccggctcgagtctcttcaatcggcttttgaatcagccatccaagcccaaggctacgagtctcattaccaaggcgtttatcccgtgaaatgtaaccaagataggttcgttgttgaagacatagttaaattcggggcgcccttccgcttcgggcttgaggccgggtcaaaacccgaactt

SEQ ID NO: 14315 - DNA, 571 bp, Gossypium hirsutum
  unsure (1)..(571): unsure at all n locations; Clone ID: LIB3829-032-Q6-N6-A2
ttttctttacagcgtaaaatataaagcaaanattacgaaaacagttaaaagattcaaataaatttctgacaaaatgctacaaatgtatatctaaaccaaaaaaaaaaagagaacatactgcacatgattattcttctattaacaataacctgtactgctcacagaccctgagctaaccctaaggtagtagttgaacataaaggtgggcgcctaaactgcatggattggactcccacttgaattacgtgacgacggattggcatggaatgcagactgtctggatgaaccatcaagtttcaatgaaagtgaggatgggccattatcaccgatagattctcccaagctcagtttcgacatgcccaccagctcatccacgttgatcgggctctttgaatgtactgctgttggcttcaccacttcatgcgtgtcggtcttggttggttctgtgttgtaacccatccaatatggaaatgaaaatggatagaatggtgggaagtaagcaggatatactactgggtaacagggttcgggagatctccgatgttggatgaggaactggttccccatcatt

SEQ ID NO: 14316 - DNA, 597 bp, Gossypium hirsutum
  Clone ID: LIB3829-032-Q6-N6-A3
cataaaaaatgtaaccttagctctcataaaagctaaaattcagttgcatcattaattataagtatagagtaagtaaaattctttcctaataaaagctcctaccacaagcaacaatatatttacatgcaaattatcattacatactaaatcccactctcttatttttataagagtaatacttagcactgcatattatacataccaaaggggtgtaactgttgaagtgattactttatgtagcctctgcaaatccaatttgcatgtttccatagtcgaaaaccgtatggaacttacccataaacacgtcgcccaagatccagagtggtccgcgaggaggcggtacatcgagagcaccgaatccgctaatgcattgagctagctctccgtcaccaacttttagaatgtactgctcaggggtaagctcaagtatctttccaccaattgtgaaggcgacactaggcatagcagataggctgttacaatcaacaactgattctcccattggactaggcaaccggtcacagagctcattgacgtaatcaagtatacgctcctgagtctggttctgtttaagttggctttgcacccatatgactg

SEQ ID NO: 14317 - DNA, 172 bp, Gossypium hirsutum
  Clone ID: LIB3829-032-Q6-N6-A4
gcgacgatgcgtgacacccaggcagacgtgccctcggcctaatggcttggggcgcaacttgcgttcaaagactcgatggttcacgggattctgcaattcacaccaagtatcgcatttcgctacgttcttcatcgatgcgagagccgagcccacgcgtccgcccacgcgtccg

SEQ ID NO: 14318 - DNA, 574 bp, Gossypium hirsutum
  unsure (1)..(574): unsure at all n locations; Clone ID: LIB3829-032-Q6-N6-A5
tttttnctttgaagaagaaagtaaattaatacattccaaacatggtctttatcatggttaaaaaccatataactcattatacagaactgatacttatgtattagtaagagtccagtaaccaacaaatttatttccccacattatgttttcattataaaacagtgactaaacaacaaatcagaagatgcatggaggagatcatattacaacttggaagatggtttcttggaactccgcctagctatgaattcttgcatcttcttaaactgctccggtgtcattccatcgtagtattcatgacccctctccttttctatggcaagaccctggcgaagatccaatttgtacccatcattgatcacagacttgtacctgagaaccaagtcttgactgttcttcataattgctcctgcaagttgtcgagctttattcaacacttcattttggtcaacaacataattgacaaaccccaatttctcagcttcctctgctgacaaaggcatggctgccaacgacacttcgcgagccttgtttggtcctatgaagcgtgcaagcttctgggataaaccccatg

SEQ ID NO: 14319 - DNA, 574 bp, Gossypium hirsutum
  Clone ID: LIB3829-032-Q6-N6-A6
gtctgaaataagaactaaattttccattgggggacaccaggaaatcaaataaaacatttttgaaagaattctcaacttcaaaagctaaagcaccacatacacataatcttcagtcagactacacaggcaggatccttacccagcccagcacaaagaagataaaatgccatgtcttgacagcatcacaaatttggcatgctagggacgagttctactgctttctgcattcctaactgggttgaaataaggatgagccattgcttcttttgcagttggcctttcctgatgatcatatcgaagcaacttatcaagaaagtcaatggcctcaggtagtgccaaatgttgattctcggcactaatgaactttgtccaaggttttcgactgtgcctgccaacaagggccgcaaggtgtggatccaattctatgcggtacttattcagataagcatttaattcatctgtcccaagaaccttggctatcttggccagttgatcataattatcatgcccataaaagaatggctccttccgaaatatcattccagcaaacatacaaccaaggctccacaagtct

SEQ ID NO: 14320 - DNA, 433 bp, Gossypium hirsutum
  Clone ID: LIB3829-032-Q6-N6-B1
gaagggctaaccaaataagtcattattataccagtaatctggggatacattcgtaggcataatttcaatccatatgttgattcatcatcctctggacaacaacaataggtagaagggatattgagttataataatataaagagagaaaattcacttattttactaagcatccatgaagtgggcttgaaaagcatcataaagttgttcttgttaagagtaactgtacgccatactgaggctccagggagatgagtagcttgggggcatgaacgtatgtgggcgacaccgctagagaatattgccggataatcatagccaggatgggtttcatctcaatggtggctaaagtctgtcccacaccaaatctagggcccaacccctatggaataaacgatgccaaatgcttccgagactctttaaatcagcggggaat

SEQ ID NO: 14321 - DNA, 269 bp, Gossypium hirsutum
  unsure (1)..(269): unsure at all n locations; Clone ID: LIB3829-032-Q6-N6-B3
ggggggnttctttttttttttttgggccgatttttttaaaaaaataaaaggggtgtttttttttttttttttttttttccctttttttttaaaaaattttttctcaatttttttttaaagagggttcgcctattggggggttttcttttaatggtccttttttttttccccttttgttttatggggccaaaacccttttttcggattttttttttttctgcttttcccctttccgttttttttcccaaaaaatcttttaccctttttta

SEQ ID NO: 14322 - DNA, 415 bp, Gossypium hirsutum
  Clone ID: LIB3829-032-Q6-N6-B6
aaattccaacccctatttcattcattcattatcaaccaaacagtttatatgatttcaatttcagacttctacatacatatactaattatatgaaaagcacgtattgatttttcatgatttactatgaaaaatactcatttgtaaaaaaactatacatgttagattttatctattatgcttcttcggataccctaattcttttaactctgcttttaaagcagcatgctcatgccacatcctctctagccgagcttcaaccattgtcgtctcttctttaaggggatgcatccgcttttccaaccaagccactggttcagctctggtttttccacctccggctccaccaccttttataatgctacccatgtactcaactgggtaattcacatgcaccttgtgggggctgtttaatagc

SEQ ID NO: 14323 - DNA, 547 bp, Gossypium hirsutum
  Clone ID: LIB3829-032-Q6-N6-C2
aaccttaatttttttgtctaaaatgatgatataacatgtctgtgtaaatgacaattaatgactcaatgatcaaaatacaaaaaagtaataacattagcgatcataccataatttttttttaaattcgatgatcaaaacgtaatccaaaattatcaaaacattgtaaacattgaagtccatttgccaatagaaaaagagaacctctaatcttctgaagtcattggtggcactttccaaagccttgctgatcacatatcagaattgaaatgatgattcgacatctaatttcttagctctttgaagcttgcttttccttggacttctggatcttcagaaccttcttcacaattttctgctcttccaccaagaaggctcgaattatcctctctctaacagcactgcaggacaaaacaccaccataagcacgattcacagtccggcggttccttggcaatctagaccttttgtattcagcaggtctcaagtgaggaataccctgaattctcttgccagtgacaggacacttaggcccacttgctcttttctt

SEQ ID NO: 14324 - DNA, 552 bp, Gossypium hirsutum
  unsure (1)..(552): unsure at all n locations; Clone ID: LIB3829-032-Q6-N6-C3
gggagattaacaataatacgagtattaaaaagcggaataacctgcaagaaaaaacaaaaaaaaaaagcccttngaaaaaagagaagcccctgaacacgccgttaaaggtagaccctcggccttgctccactgccgtttactttcacgtgcatgcataaacaaatggtggtgagctccgatgaagggctttcaccgaactaagtcctcggttctaagactgtttggtgaatccatgcgtttattccttccagcttcctttcctttcctttttccccctttttttatttcgtagatctggaacggagaacccttattgaaaaaaaggaaaattttcaagttcttttttccattttcccctacgaggcttttctagtttgaaacccagaaacgaagaaaaacaaaaatgaagaagaaaaaaaacaataagttttttagtctccgatcacaacgtgtggtggctccgccgctggaaaccgaagaaccttggattctccagcggcggagctgcccgagagacaaaaaagaggaaacgggagtataaaactaaatttc

SEQ ID NO: 14325 - DNA, 557 bp, Gossypium hirsutum
  Clone ID: LIB3829-032-Q6-N6-C4
aaggcataactagtaaaaatatatattgatcaacaatactggaaacatacacatatatatatttatggattgcatgttttaccatgtttttgcgttgagtagggtatagcataggaataggaaggggttactaatgttaaaagtgctttaacacctaaaggtgaatacataaacaaattgagttaaacctcaagtcccttagctattgtgtactttaagcattgttatgcagtgactcaagtattacttgaattccatgctgtggtcgaatggcgagaatagtcattggtgagtggacataggcaggggagagggtaatggtgtagcgttgtagaatcatggagagtgcaaccttagtttccgtgattgcaaaggacataccaacacaagatcgaggtcccaatccgaagggaaaaaatgcagccacattgtagttggtagctttggcaatcccttcttcaaatctctctggtttaaaaagatgtacatcatctccccactggtgagggtcatggtgaagtgcaatattttgaaccagaatatctatattagcaggc

SEQ ID NO: 14326 - DNA, 73 bp, Gossypium hirsutum
  Clone ID: LIB3829-032-Q6-N6-C5
ctctctctctctctctctctctctctctctctctctctctctctctctctctctctctctctctctctctctc

SEQ ID NO: 14327 - DNA, 60 bp, Gossypium hirsutum
  Clone ID: LIB3829-032-Q6-N6-C6
ctctctctctctctctctctctctctctctctctctctctctctctctctctctctctct

SEQ ID NO: 14328 - DNA, 405 bp, Gossypium hirsutum
  Clone ID: LIB3829-032-Q6-N6-D2
cgtaaaaattaaattttctttaatctgatgcaaaagacgcactcataaaagcttacaattaggagatattcttttaaatgttcactgttgcccgcaacttataaagatttgaaaagaaaaaaagaatacaaagtatttcagtatacatacttgtaagcaaattcctcaccgtaaaaaaaaagaaatcactaattaatcaagaagtgaggatcttggaggcttacttttatcaatggaagttcctgatttcgaatacacgtgcagtgctgtccatggaaacagaaacgagaaattccagattggaagatacagagagagactggatagcatgttcatgccctttgaaggttatgacacattccccagatagacaattccatatgcatattctcccatcacaacacc

SEQ ID NO: 14329 - DNA, 627 bp, Gossypium hirsutum
  unsure (1)..(627): unsure at all n locations; Clone ID: LIB3829-032-Q6-N6-D3
tttttttaaaatttggatggaatccttaacatagatgaataaacaaacatatgaaactgagttcttaatcatattgcagaaggaaactacttagctatagatgccaagcttgtggtgcttgtttcacgtcatggatgatcttgtgcagtttcaaagaaccaatttgtagataccataaggacagaagccttattacaacctaaagatgctaggttgtacccnaaagacagatcaattttcttggggtgcctcgaatcttgttggagtgtctatgcccatcatgcngcaaaggcctggtgcctgggtttggagcgcccccgtttccactaaaactccctctcggcgggatgattttagctgggcaaccctctcgccgactttggggaattgggtgagcccttcttttgggggttcctctgcgcggagaaccttttcgtcccttcttttaccggggataggggggtggggcttgaggggggggggggggcgtgtggggggggggtttttgtggtccccgactgcgtcggcgtcgctcgctggcgtgggggcggggatgtggagccttttggggcgtgggtggggccggggtctttggtgggggctgggggggcgggccgtggggggtgg

SEQ ID NO: 14330 - DNA, 390 bp, Gossypium hirsutum
  Clone ID: LIB3829-032-Q6-N6-D6
catattggacatggttttctagcatacaaacagaccggtagtgaagtgatacattcaataagagctacaacttaatcaatgggtcaaatatttgtttcttcaaagtctcctacatttcatttttccggcggaaaagaaaatggtaattttcaccttcatgttcttttcaagaggtatcccaaaatgacgccaattaagccaacaagtattacatacatgagtggaataccagtgtgaccttttctggctttgcgtcttaagagttccagtttttgctgaaggcttttattttggtgaatgggagggtttttttcctcggctagcttggaaatgcgagaccttgcatccgatgaatttggttgagggtgatgctggttgacatgagccctt

SEQ ID NO: 14331 - DNA, 51 bp, Gossypium hirsutum
  Clone ID: LIB3829-032-Q6-N6-E1
ctctctctctctctctctctctctctctctctctctctctctctctctctc

SEQ ID NO: 14332 - DNA, 540 bp, Gossypium hirsutum
  unsure (1)..(540): unsure at all n locations; Clone ID: LIB3829-032-Q6-N6-E4
aatataataatataatataatataattactaagttgtaacacatgcatttttttacatcgaaatagctccaaatttcatacttttacgtccaaatagcctcccattcccgactctttcccctcaccaactctttcatcattattttcaacttttttatacacaaatctcctagaaatccaaatataagcacacaaattaaaagcactcaaccctgccaatacccaataaaagtaattaagttttgcacggtttagattatctcccaaccattcattcccatgccttgaactaatgacttgaaccactgagattatagctgtgtttataaagctcccaactcccactacacttatatatgcagctgccccaatgcttctcatttcttccggcatttgatcgtagaacaattcttgtaatccgacgattgtaaaaacgtctcctagtccggtaagcacatattgaggaagtaaccaccatacgctcattgngactacggctttcggggcatccattaggccatgtttggtggcagtgttgac

SEQ ID NO: 14333 - DNA, 555 bp, Gossypium hirsutum
  Clone ID: LIB3829-032-Q6-N6-E5
gccataatacaatacaatccggattaaatcacagatcatgttttacacaagtatttacatacaatcatctttgatacttaatcccatatgtttagaagtgtactacttgaacagcatggcactcgggtgttaaaagatttagaaaaggttcgcttatgcagcctcagcaaatccaatttgcatgttcccatagtcaaatactgtatggaactggcccataaatacatcacccaggatccagagaggtccgcgaggaggtggtacatccagagcagtgaatccactaatgcattgagccccatctccctcgcccactttcatgacatactgctcaggacggagctcaaataactttccagcaattgtgaaagagacgctgggcatagaagatagacttttacagtcaatacttgattctcccattggactaggcaatcgatcacagagctcattgacatagtcaattatatggtcctctgtctggttctgcttaagctggttttgcatccatataactgccatctcacatgtagaacacatagcatcgcgtaaact

SEQ ID NO: 14334 - DNA, 573 bp, Gossypium hirsutum
  unsure (1)..(573): unsure at all n locations; Clone ID: LIB3829-032-Q6-N6-E6
gggagaaaatacattaaaaagcttcatagccgtttagaactcaaaataatatcaagaaatacgtgagattgatacaatcaggtaaacacatatgtatgctatatatatataaataaaagcagggtgcaaagcaatctcgctgctaaaaaaaaaaaaaggaagaacacattaaaaagcctcctaaatgcttttttctttagaactcaaataaaacctgcaaatgccaggaaattaaggaatatatattaccacacaaactctagttttgatcactgatagtacattagttgctgggcagccgccacgttctggaatccaccgtcatatatggcctggcttgctccagcagcaccaactcccattgccgcttgtttgagagggtgttgtccttgaggatgcattagtgcgtgaacaccacccattttgttcatggctagttgtcgctcataagctaaaaggtcagtggcagaaagcccggctaaaggtgtggcggcnggtgggggaagggggtttgaacttgtcccaggtgctgtgggcttcctcaatgatggataacttgatacccttaccctt

SEQ ID NO: 14335 - DNA, 89 bp, Gossypium hirsutum
  Clone ID: LIB3829-032-Q6-N6-F1
tctctctctctctctctctctctctctctctctctctctctctctctctctctctctctctctctctctctctctctctctctctctct

SEQ ID NO: 14336 - DNA, 480 bp, Gossypium hirsutum
  Clone ID: LIB3829-032-Q6-N6-F2
ggtgaaagaacttgctgacttgacattgctgaatatatcataatgttacaatgatagcctatgtgctagtcagtacatagaaaacaatctacaaacaaaataattaacaactacaacaatacctacaaatttaacccccaaccgttgcagtgtttcagcttcggccttattcttctttctcggttcatcgaaatcctctggtaccctctgttacaacctcgaaagttcccgcattacgatcaggttcattctaaaccaaaaagctacaaaaaagtaccgaatttcattaccgatcaaacctcacagaggattcttcctcggcctccctcttttccttgagcccgatttcgacacattccgacctgaaaccactgccacgttattcatattttctaccaccttcgttgcggtggtcgaaggaataaatgaaggcggcgttggtactggtgctgccgctgacactggtgccggcatgggggc

SEQ ID NO: 14337 - DNA, 322 bp, Gossypium hirsutum
  Clone ID: LIB3829-032-Q6-N6-F3
accgtgcactttattcatagaaaataccaaaaactagtacattatccgaggtattcaaccctgaaaacacacatccaaaatcaacaagaaaatacatcacagtagcaaacggataacggtacatccctcaatactcctcctcatccccttcgtctccttcaccagactcagcgccaacttcttcataatctttttccagggcagcgagatcttcacgtgcctcgggaaactctcctttctccatgcccttcccaacataccagtgcacaaatgcacgcttgggcttcctgggatccaatttatgatccatggcggaaaacac

SEQ ID NO: 14338 - DNA, 99 bp, Gossypium hirsutum
  Clone ID: LIB3829-032-Q6-N6-F4
ctctctctctctctctctctctctctctctctctctctctctctctctctctctctctctctctctctctctctctctctctctctctctctctctctc

SEQ ID NO: 14339 - DNA, 506 bp, Gossypium hirsutum
  Clone ID: LIB3829-032-Q6-N6-F5
gatcagtaattatactattgtttttttctacaaattaattaattaccttcattttaattcactacaagccctttaaccaaaaaatgggttgtggggagtctttccttttctttttctatactaaggtctaacgaacttaatcaacacgctgcagaaggattggagtagggattatagaaatgaggctttgaagccactgagaatgggctctttgaattgccatcggcaacgccgccaattctttcgcaagatgggcacatggtgagagtggccgccggcatgtgcatgtaaaaaggttgagccgccagtttcagtgccttgagttcttgtagttccttttgcaggctcctgttctcatctggcagtggctcacaacacttcttcaagaactcacaatccacctcagtttgcttaaactttgtccttggtctcctggtctggaaccatacttcaacttgtcttgggggcagggttaaatggtttgctaaagcttgcttttgcttaag

SEQ ID NO: 14340 - DNA, 221 bp, Gossypium hirsutum
  unsure (1)..(221): unsure at all n locations; Clone ID: LIB3829-032-Q6-N6-F6
aatgagaaaggaactaatcattaaactaaacgttcctgtggatgcgccaaaacctaacaacataattctgcagcatcccactagatgaatgcttggatcttcatttttcanccacacatcctaacggataaaaggcttcaagattctgtccggccatcctgtgattgtttacctacatggcttaagggggactttttttatgataccccctatacttgccc

SEQ ID NO: 14341 - DNA, 476 bp, Gossypium hirsutum
  Clone ID: LIB3829-032-Q6-N6-G1
gctagctagtaaatattattacttaatgggcaaacccaagttccagcataccatcaagtactacaactatattaacatcgtaggagagatcaatcaacacatatacaacaaacacaccatttcatcagctctctgaattcccagtaagatctcttttaaatcaacgacgacttgagtgagtggcacgtgatcttcttttatctccaaagtaaaaaagtttcctcaatcgcgtggtgggacaatcttaccagcacaggttccaaaaccaacgttgtaaccatctcccttgcagcatccagagaagattacttcatctccatcttctaagaattttcgagttgtcccatttaatggcaatggtttttgtccattccatgttagttccagcagacatccgaatgattcaaatgcaggcccactaatggtcccaggtgcaagggtatcgcctggcctgggggtgcaaccattgattgggg

SEQ ID NO: 14342 - DNA, 528 bp, Gossypium hirsutum
  unsure (1)..(528): unsure at all n locations; Clone ID: LIB3829-032-Q6-N6-G4
catacactgtaactaaaaaccaatccaaataaaatatggtaaatattcatgtgtgtccacatgcttgacctgggcacaatttactgtgctcacacaaagcataaaaacaatgcaaggatgaaaatgcttagtactagattgcccttcttcttctttaaagagcaccaagtaatgctgcaaggcaaaagggtatttaaaatttaaggtttctccatctcttgtattatgtgcagactgagaaatggaaagaaccttcacacaggatagctaaggatgaggagattggatttatcttcaaaaacaaaaggcctttttgtgtgtttaaaaagagataaattggaaaagttgccaaaagaaatattcctatggatgttgtaaagtagggttgctttacttcccacacaaggcaacatttctttttgatggtctgaaactcaatgcagttaggctgtaaatgcagagattgnggtgtctggatttgatagctatctgatcagtagtgcttctgtgaccaggaatgttgcatga

SEQ ID NO: 14343 - DNA, 588 bp, Gossypium hirsutum
  unsure (1)..(588): unsure at all n locations; Clone ID: LIB3829-032-Q6-N6-G5
cgcctaaagctcgagggctaaacgtagcgttaacccttttattcatatatacttggatggatccaaataccaacaagctaaagtagctgcaaaagataagaaaatacaaaagcataaattcaagttcagcaacctgggagcatcattcaggaggcttgagcatggtttggatcgagcttagcagcctcaagatcagcagctttcttcagaaaactttggtcatcatcctcaagaaccatctggatagggcaagatcccaatccatcagcaatagcaagcagaatcttcttcatctcagatctgaactcctggaggtcaacggtgccgctgccatcgcaatcaaacctctcgaaaatggagttgtaaagctgagtgagctcgtcggggggagtggcgacgtcgacaccgaagtgggactccaggagacgcagagactcgaaggccttgcgaagctcggacctggagaggacaccgtncgttgnttgaggtcaagagctgcgaaacgctcatccacgctcttcgtgaactgttgggtcgtcagtcacgaaggctctcaccgtcgatccgtcaatgattacaacacccatg

SEQ ID NO: 14344 - DNA, 578 bp, Gossypium hirsutum
  unsure (1)..(578): unsure at all n locations; Clone ID: LIB3829-032-Q6-N6-G6
agactgaatttaattaattcgtatttaaattttaaaagtgatactcggatttaatacgacactcgttgcatacaagctcaacctaatgctatccgatatttagcaacaaacattatatctacatttaaggcctcaattactaggtaataagcataaaaatgcaggagcaccagtcactaaatcacactgggttcgaatttccggcaacctgaactcgccaaccgaaacaccggatatacaatgaattgagtgccatagctgtcccgaaacttatcattcccgataacagtatagagaaaacagccttcatatggaccacggtatagaatacgtgcacgattactgcaacgagtgcgaactcaaaagctgcatacgtccatatatactccttgattgctaagaagagggcaaagatagagcctaagaggcctagggtaaacgcaaatggcgcggcaatcacaaccgcttgagtcttcatttcccgaatctacaaaatgatggacgaggcatgaattcaacattatcaagccaatgatgaaanaaataagcaattttgcttcgattttttcatttttctt

SEQ ID NO: 14345 - DNA, 494 bp, Gossypium hirsutum
  Clone ID: LIB3829-032-Q6-N6-H1
tcgcctagaggagacaatgcgtgcaaaacagatgctggcaaccatgtcccatgagataagatctcctctatctggggttgttagcatggcagagatcttggccacaacgaaacttgaccgagagcaaagacaattgttagatgttatgatatcttcaggagatttggtccttcaacttataaatgacatccttgatctttccaaggttgaatcaggtgtcatgatgttggaggctacaaaattccgaccgagagaggttgtaaagcatgttctccagacagctgcggcatcattgcggaagattcttacgttggaaggaaatgtagcagatgatgttcctattgaggtcataggagatgtgctaagaattcgacaaattctcaccaacttgatcagcaatgctatcaaggttacacatgaaggaaaggtgggaggtaaactttatgtagttccagagccgccttttgcgaaagaaggatctcagaatgggggct

SEQ ID NO: 14346 - DNA, 368 bp, Gossypium hirsutum
  Clone ID: LIB3829-032-Q6-N6-H3
aaaagaagggaattattttcttattattaagaattataagtacattaagagatttgatctctgagttcatcaaatcattcatgatgaagcatacatattaggaaatacattacatctacaaacaataacaacacagacagaggcccttacaattattatttgaggaactggtcaaaccaatcactcgcttctttcaccattaatggtgtcatttgatgccctattccaggttcagccacaagcttaaagttgtctgaatgggcctctccataagcctcgtatgcccttgtcttgggaatttctaagccttcaagagggcaacggggatcttcagctccctttacaattaacaaagggcgaggtgcaat

SEQ ID NO: 14347 - DNA, 472 bp, Gossypium hirsutum
  Clone ID: LIB3829-032-Q6-N6-H4
ggagtctactttcattgttcttcactactgaaattttaagtacatatgagttcaaaaagtgtacatagttacacaaatgaatctgcaaactgtcatagttaatggatcatggagttgatttcacaaggggttcaaagttcttgaattgatttcacaaggggttcaaaagttcttgaacaatcccctccaccgtgacgccgcctgccagatgacttggtttccctaaaccaaaatcacctcataagagtggcaggactcgaagttggtgtggcaaatgaactgatccttttcttcctttctattctttggagaactcgtagatgtggcggtttcggttttgttgtttccttggaagacttttgtgggcagaaaggatgatcaaacttgggaagaggcctagcatggggaaccattgtccttctaagatgcttcaatgctttctctttctcaatcattctagcaggctcacttt

SEQ ID NO: 14348 - DNA, 501 bp, Gossypium hirsutum
  Clone ID: LIB3829-032-Q6-N6-H5
aaagtcaaaaatgttccatttacttcatatatcctggaaatttgaggtgacaattatgagcttagcttagcttagcctagcctcgcctcagactcaaatatccaaagtttttgagacccttcccccccattttgatttcattcattgattcatacaactgtcagctacaacccgacccagcctgattaaaatttatgccaggcctattcgtgctttgatttttttcatcaaatagcttagcctcatctgcttgaacactgcaaacttgttgtataaacaaaaacaaaagctgatttctcttttctgctatcaacaaccagtctacgggctccgacgtggacaccgcaatctcaccggtgagaacacagcggttagccgggcatgatcagaaagagagtagttttccggccatatccccttctctacttcacggggggaaaagagctgcattctttactgtaaaaccgacaggctcttcctcattaccttcatttgagtcat

SEQ ID NO: 14349 - DNA, 437 bp, Gossypium hirsutum
  Clone ID: LIB3829-032-Q6-N6-H6
agaaataaaactaataaagtcggcttaaaagaacatggagagggcataaaatcccggatttacagaaaaggatggattcggttctcatcccttctacccgacaaggtgcaaaacaccttgtatgcatgctaacaatcactgcttacaagcgatggaaattaacagtaaaagaagaacattaaaaaggggacaaaattaaaaataactagacattcaaggactggcaaaaccatgcaataaagcaaatagtagaaaactgcctcaggcgtagcaataggaccactgctcgtcctcactagccccagaatcgacagcagcattgtaatcttcctcattgcaatagtagaagccattgttattcatggcagtcaacgaacaaagagatgccgctacaagataaggcatgttgtggaaagaacgagcaatggtgctaacta

SEQ ID NO: 14350 - DNA, 358 bp, Gossypium hirsutum
  Clone ID: LIB3829-033-Q1-K6-A1
gtttgtgtccacagtggagaggctgcgcgtgttgaagagctcggaactgtctgcccttagccttggaagcagtaaacgagggaagtaccggcttgactctgtctccaccaaagtttgaagatgaggcattgaaatttgaattatgttcatgttttgacattttgttccctgttttgcctttaaacctgacgcacttactgtatatattagtaggtcggtatgtaatttttgacttcgttttctttctttccctacatgaatgccatttgctattatcctttgctgcttttttacttggtattaacatcaagcacccatcatcgcctttaaaaatgatgggttactatggagttgatat

SEQ ID NO: 14351 - DNA, 528 bp, Gossypium hirsutum
  Clone ID: LIB3829-033-Q1-K6-A10
agaaaatcaaaatcccctcgtccattgatcttttgatcttctagagacttctcttcctcgttgtgtgtctctgggtttgccctcgtaatggcgtctgctttagaaaccaaagccaaagaagcatacttcgatgaccacttcgaactcgccctcgatctctactcgcaagccatcggaatcaaccctaaaaaggccgagctctacgctgaccgtgctcaagccaacatcaaactcaacaatctccctgacgctgtggcagatgctaacaaagcaattgagttggatccgtccatgtctaaatcctacttgcgtaaagctactgcgtgtatgaagcttgaggagtatcaaactgctaaggctgcgttggagactggggctgctttggcaccagaagactcgagattttccaagttgattaaagaatgtgaagagcgcattgcagaggaaaatggtgagttaccaaaggagacgttggaagaggtgccaacaaatgttgtacctgcgaaagacatctcttctgtccaggat

SEQ ID NO: 14352 - DNA, 528 bp, Gossypium hirsutum
  Clone ID: LIB3829-033-Q1-K6-A11
ctaaaatgtaaagtttactgattttagttgtagtttaaccttaatattttgtaacaattgagatatttatcttttgggtaaactatcaaaataattatttttgtttgctttaaattacattctagtcacttatgtttgaaatgttacgttttagtcacttgtattatcatgctgtaacattttagtcactaagctgttaattatcgttaacgctaatgtggcacattaaattatcatttcaaataaaaattttaggttaaattattacccttatattttatcattttgagctttttcatttggttcaggatttgaatctggtaacggttccaatcccataagcctcgcaattatgcttggtggctaccattgtttattgttgtcatcctcctcatcttcgcgttggtttgcaaataatatggaggcattcgcatggatctcgtggggcttaaggcttcttttggcatcaaagacaactctgctatccagagagagcatcagaacttccttgaaaaatttccatggcga

SEQ ID NO: 14353 - DNA, 522 bp, Gossypium hirsutum
  Clone ID: LIB3829-033-Q1-K6-A12
aaaaactactcctaaagcaaaggccaagacaaaaactacttcgaaggctaagagtaagccggcgcctaagccaaagcctacttctaaggcgaaggctgctccagccaagactaaggcagtggcttctgtgaagccgaagactactgcagctacaaagtcaaaagctgcagccaagcctaaggacaagccggttaaggcttcgaggacttcaactaggacgtctcccggaaagagggctgctgctcccaagcctgctgcgaagaaggctcctgcggctaaaaaagctcctgcgaagagtgtaaagccgaagagtgtcaagtcaccggcgaagaaagccacgtcgaggaggggaaagaaatgagagaagagagggtggtcaacataggggtagttttgtaaattcgagtgaagcttagtggctgtatttgggtccatacccaggaaaatatgacatcggatcttatctgttcttgaacttttcttcgaggggttgttttttttttgttgttgttgattgacgct

SEQ ID NO: 14354 - DNA, 526 bp, Gossypium hirsutum
  Clone ID: LIB3829-033-Q1-K6-A2
cgactccgtcggtttaccaagtgttggtgctgccgctgaaccgcctcctaaaaggaatcgtggaaggccgcccggttctgggaaaagacagatcgatgcattaggtggagtttcaggggtgggatttactcctcatgtgatcaccgtgaacaccggtgaggatatagcatcaaagattactgctttttcacagcaagggccacgcacgatttgtattctctctgcaaatggtgctgtctgtaatgttacactccgccagtctgtattatctggtagtatggtgaaatttgagggccgatatgaaattatttctttatcaggttcgttcttggtttctgaaaacagtggtagttgcagcaggactggtggattaaatgtttccttggctgggtctgatggtcgagtggtaggtggtggagttgtaggcgcactacaggcagcatcaccagttcaggtcattgttggcagctttattgcggatgggagaaaacagaacttagatgttttcaaaacggtacctctcatg

SEQ ID NO: 14355 - DNA, 517 bp, Gossypium hirsutum
  unsure (1)..(517): unsure at all n locations; Clone ID: LIB3829-033-Q1-K6-A3
gcgcagcttaccattttcagagcagaggaatataatgccacagtggaatttctctgggctccacttctggttgaatctaattctgatgatccagtgaatcacagattgtctgaacggattatccgtccggattcagtacttaagcattcgtcacagtgggagcatgcagatatactaattttcaactcatatttgtggtggagacaaggcccagtaaagcttttatggagttctgaagaaaatggaaactgtgaggaactcgatgggctaggagccatggagttggccatgggggcttgggcagactgggtagcatcgaaagtcattccccagaagaaacgtgtcttttttgttacaacgtcaccaacacatttctggagtcaagagtgggaacctggaagtgaaggaaattgctataaccaaatgaggcctatcactttggagggctactggggaagtggttcggacttgcctactatgcgcatggtggataaagtgctntctggtttgggttcga

SEQ ID NO: 14356 - DNA, 186 bp, Gossypium hirsutum
  Clone ID: LIB3829-033-Q1-K6-A4
gttaaatgaaaactttgttgttctaactttcatatggatccgatatttacacctatgtgtcggacataaatatgaattcaatgctcgcatccacattgaggatgaaaatcgtgtatcacaaaatgcttaggaaatttgaaggcatccaaggctagggatgaatggtaaagaaaagaattttttttt

SEQ ID NO: 14357 - DNA, 525 bp, Gossypium hirsutum
  Clone ID: LIB3829-033-Q1-K6-A5
attgaaacaacaaaagaatttgtggggaagttagatcttaagcctggccaaaaggtcctagatgttggctgtggcattggtggaggtgacatttatatggctgaggaatttgatgttcatgttgtgggcaacgacctctctgtaaacatgatatcctttgctcttgaacgagctactggactgaaatgctcagtggaatttgaagttgctgattgcaccaagaaggtttatccggacaacagttttgatgttatctacagccgtgacactattctacacattcatgacaaacctgcactgtttagatctttctacaaatggttgaagccaggaggcaaactcctcataagtgattactgcaaaagttccaagactccatccagggagtttgctgagtatatcaagcagagaggctatgatcttcatgatgtaaaatcatatggacagatgcttgaggatgctggttttgatgtgattcttgcagaggatcgaaccgatcagttcttacaagttctgcggcgtgaa

SEQ ID NO: 14358 - DNA, 525 bp, Gossypium hirsutum
  unsure (1)..(525): unsure at all n locations; Clone ID: LIB3829-033-Q1-K6-A6
ctcattttcatgtctaagcccatagagcatgattacataggtttatcagagcagcagctcccttcaatggagaaaagctctgataaaaaggantggtttacactttgaaagatactgagttgagactcggtttacccgggtccgagtcaccggagagggaggatcatgaccaaaacgtgctttcactgaagagttttgtgtcaggggcaaaaagaggtttttctgacgcactcgatggtggcggtaattgggttttctccggcggcagtggtggaggaactgaagggttgttttctcctagacgtggcggtaaaaataatggaggaaaagatctttctgggtcggattcgggttcggttttgaaagatggagcagctcggaagccatcggtggttcaagagaagaagcctcaggtagctgctaccagtagccatggaaatgggaatattgctccagcttcaaaggcacaggtagttggatggccaccaattcggtctttccgaaagaatacgatggcttctcacc

SEQ ID NO: 14359 - DNA, 529 bp, Gossypium hirsutum
  Clone ID: LIB3829-033-Q1-K6-A7
gaaaagttcaacatgtggaagataaggtcaaggatttgcttattagaatacaaaagggagaggcactcggcaaagatgacattaattcacttaaagctaggaagcttattgttgcacagacatggaaaggttattcagtgaaaaaagggccgaactatgcccctacaagaaagaaagttgctactgatctgactcgagagaatctacagaggggtgactggaaggagctagaattcaaagagtataacttcaatgctaaaggaccacctgctgaagctggccatcttcatccattactcaaggtgaaacaacaattgaagaacatatttcttcagctgggttttgaggagatgccaacaaacaattttgtcgaaagcagcttctggaactttgatgcattgttccagccacaacaacaccctgcacgtgattctcatgatacattctttctggaagttccatcaactacaagggaactgcctgaagaatatgttaagttggtgaagcgtgttcatgaatctggtggtta

SEQ ID NO: 14360 - DNA, 529 bp, Gossypium hirsutum
  Clone ID: LIB3829-033-Q1-K6-A8
cggacgcgtgggttctgccctatggatgatccattcaaagcctttttaccaaagtacaagaacttgacagcttctaagaaagcatctttcctccaattctttggtgtgcctgtgtaccaatctttgtccatgttgaagtccaacaatggactcatgaacacattagctaccgacggagccagcaagttcgatttcactgtgcaaaacgagggtgaagaggtgacactaaagaccagggttaacactgtcaaaataaccgggactctgatcgacgagcagccggtagcaatttatacaattgataaagtgttgatgcctaaagaattgttcaaggcagctcttagtccagccccagcccctgccccagaggaggcagcagatgcaccaaagggatctaaatccaaaaccaagtccaagtctaagactaagtctaaggcagcaccaacaccggattcagactcaccagctgagtcaccagatgatgacccagctgatcaggtagctgatgatgataatgctgctatgtgtt

SEQ ID NO: 14361 - DNA, 518 bp, Gossypium hirsutum
  Clone ID: LIB3829-033-Q1-K6-A9
gcaacatggtagtagaaacttagttaggaatgatgaaagagaacgaagtgccagttatggcagatatatgggtgaagaaaggcatcgcaacatggagacacgtggtagagagaggagcagggaaagggagatggattgggaattaagaggggagaaggaccgcgacagaagcagagaaagggagatgggagttgaatggagcagggacagggagatttatggtgagaggagaagggagagggagcgagcaaggagtagagatagagacatgagtggtgaaaggagaagggagaaggagcgagagaggagtagggagagagaaatggagagggaaaggagaagggagaaggagcgagggaagagccgggacagggatctagatggtgaaaggagaagggagaaggtgcatgataggatctgggatacagaagcagatagagataggaagagggagaaggaaagagattggagcagggatcatagcagtgcttatgatagagatagagataggagaaggg

SEQ ID NO: 14362 - DNA, 532 bp, Gossypium hirsutum
  Clone ID: LIB3829-033-Q1-K6-B10
cggacgcgtgggcggacgcgtgggcggacgcgtggggtttatccatgctcctccacagatttgctagggaatgggatgtatattactttggcatcttagaactgtgggtgttgcaatttgtttatcgcatgatactgcacaggtttcctttggagtggggatatatgttactttggcatctttgtaggttagctgttgcacgccatcactttcttcattaaatattgcttaacattatagccgcatgtattcaggtaagcttgtttattagttaatgtctttaaaaatattttaggatgttcacgatataggtccgcatcaaatacatgtacctttaaaaataataatggaatactggcgttgattgagggttctgccattttgggataacggtgataggaaaccagcaacaactgagaagtaaatgtctctgcgaaatacttttttaacttaaaagatacaggttaaagtttacataaaatggtattaattgtctaatacttcatctgttactgggaaattgaggcgaact

SEQ ID NO: 14363 - DNA, 524 bp, Gossypium hirsutum
  Clone ID: LIB3829-033-Q1-K6-B12
cggacgcgtgggttctcttcctcatcttctcccaagctagggttactcttcttcttccttctctctctgggtttttacattcctctttcttgggtttttagggttcctgaaactcttgcagtcgtttgatttttttgttggtatctttttcctttggatatggatctgtgatttttcattaaaagcaaagttctcaaatggatactcgtaaaagaggaagacgcgaagctgggttcaatgctaatggcggcatcaagaaatctaagccagaaatggaatctttatcaactggtgtaggaagcaaatcgaagccttgcaccaaatttttcagtactgctggttgtcaatttggtgagagctgccatttcctgcactatgttcctggaggttacaatgcggtggcccagatgatgaaccttgcaccagctgttccaccggcttctagaaatgtgacagcaacagctgcagtcccgcatggatctggctcccaagtcaaaactcgcttatgcaacaaatttagtggt

SEQ ID NO: 14364 - DNA, 517 bp, Gossypium hirsutum
  Clone ID: LIB3829-033-Q1-K6-B3
tggttatgttgctggtgtcttctgtgctattgtttcgcatcctgctgacaaccttgtctccttccttaacaatgccaaaggagcaactgttggggatgctgtgaagaagcttggattatggggtctgtttacccgtggtcttcccctccgtattgtgatgattggaactctaactggagctcagtggggtatctatgatgctttcaaagtgtttgtggggctgccaactactggtggtgttgctcctgtgcctgctgctgtggagcttgccaaggtatagaatgttggaaaacctgttgtcatgggggacaagtaaacataggattgctggaatggtttgtcaagctggtggaaggatattcttttttgcgttgagaacatttttatcaagtcgctctgttttggaaaaaactgttggttttaggagaggatggttttgatctcatcctccaaattacggagactaattatttttgtaatagttagatcataaatgaaatttcatttgaagatcaaa

SEQ ID NO: 14365 - DNA, 526 bp, Gossypium hirsutum
  Clone ID: LIB3829-033-Q1-K6-B5
aaaaccccgaaaatggtggagacgttgccggtggggcggtttcagtttaagagattggttgcggcgtttctttcttcatatcgaactctctttattctcttatggatcgttgcttttggttcggtttttatatggcagcggaaaattattggggcggggatttcggtttcggtaaaaaccgggttgagtcggcctatgccaaagatgcggccttttgcgtttaatttgactgatttcggcggtgttggggatggtaagacgttgaatacggcggcgtttgaaagggctatattggcgatctcaaagcttgggaagagaggcggtggtgggcaactcaatgtgccgcctgggaagtggcttacggcgccctttaatctcactagtcatatgactctgttcttggctgaggatgctgagattcttggaatccaggatgagaagcaatggccattaatgcctccgttgccttcatatgggtatggaagagagcatcatggacctcggtatggaagtttaatccatggtc

SEQ ID NO: 14366 - DNA, 519 bp, Gossypium hirsutum
  Clone ID: LIB3829-033-Q1-K6-B6
tacaaagagtattctgagaggggaactatcattgatcagcttgcttactgcattaacagttacagggaggccgccatgtcaaacgataccaaatttgatcacattgaacttgccgaaaagcagaaggttttgaatgagtgtgttgaagctgaggcctggctcagagagaaaaaacagcagcaggatcaacttcccaagtatgccacacctgttctcttgtcagctgatgtgaggaagaaggctgaagcacttgacaggttttgcaggccaataatgatgaaacctaaaccggctaaaccagccacgcctgaagcaccggcaaccccaccacatcctggaagtgaggctcaaccacagggtgcaaacagcccgaaagcaagccctaaccgcaatggtgaccccagtgaaaatgtgccggcaggaagtggtgaggcacctccagcatccgtagaaccaatggaaactgacaaagcggagactacgagtgccgcataaaagattagcagggtgagtcatttt

SEQ ID NO: 14367 - DNA, 478 bp, Gossypium hirsutum
  Clone ID: LIB3829-033-Q1-K6-B7
gcaaaaatttggcaagggtgattggcggagtatatcaagaaacgtggtggtgacacggacaccgactcaagtggctagccatgctcaaaagtattttctccggcagagtgcagtgaaaaaggagagaaaacggtcgagtatccatgacattaccacagtcgatagcaaaacgatggatgtgcccgtcgaacaaaaccggggttctgaaccacatggtatggttcaacaggcacctcaactgcaacagatgccgcatacaggccattttgtgggaaaatacggctatccaatgtagagatgagatcagagctccaaaactctgtatataagccaattttatttttagagtatcaaaacttagacgtaatttaatttgtcaaacctgatgttcattttaaagctatgacattctgatgtaaaaccatgtatagaaaactaattcctttgaatttaatttgggatacatgaattttgattt

SEQ ID NO: 14368 - DNA, 551 bp, Gossypium hirsutum
  Clone ID: LIB3829-033-Q1-K6-B8
gtgaatgctgtattgggaactaatgggggtacataattcatgaagcatataagattattgaatatgctaaataaatataatcaaattatgaaactatgctcttataggaactgaatattatcagtacattattggtggaagatacacatatgaaagtaattgttggctctacgtaagacacagaatatctatatggtagaaccatggatgagaatacattcgaggaaagatatatatatgctttacattgtcaaggacttatgaatgttgctacgctatgaaaagcctatttaaacgttactagaaagatttcatcaaacataggttaaaagaggtggatctgtctaagtacattaaagactgcgatctgtatataagaaagcatcacagcttgatgaaaacacacttacatgaacatgcttgagaggaccacctcagaaaccatatggatgaatcaagttaccatatggactaaaactagcccgtcgtatatttacaagattgatgtacatacattgaaaaggactagaatgcataagtgtagcttataa

SEQ ID NO: 14369 - DNA, 523 bp, Gossypium hirsutum
  Clone ID: LIB3829-033-Q1-K6-B9
cggacgcgtgggcggctttggccaatacaagcttgttttcttgggagatcaatctgtcgggaaaaccagtatcatcactcgctttatgtacgataaattcgataatacttaccaggctaccattggtattgactttctatcgaaaaccatgtacctcgaagatcggacagttcggttgcagctctgggatactgctggacaggaaagattcaggagtcttattccaagttacattagggattcctccgtggcagtcatcgtctatgatgttgccagtaggcagtccttccaaaatactacaaaatggattgaagaggtacgaaccgagcgcggtagtgatgttattattgtgcttgttgggaacaaaaccgatcttgtggacaaaaggcaagtctcagttgaggaagccgaagccaaggctcgtgacctcaacgtaatgtttattgaaactagtgccaaggctggcttcaatatcaaggctctttttcggaagatcgcagccgctttacctggaatggaaaca

SEQ ID NO: 14370 - DNA, 518 bp, Gossypium hirsutum
  Clone ID: LIB3829-033-Q1-K6-C1
cccacgcgtccggccaatggtcgagccgaggagatcatgggtcaggctattagggaacttgggtggaaacgatcggatatcgtggtttctaccaagatcttttggggtggtcctgggccaaatgataagggtttgtctagaaaacatattgtggaaggaaccaaggcgtccttgaagaggcttgatatggattatgttgatgtgctctattgtcataggccagacacacagactccaattgaggagactgtgagggcaatgaattatgtgattgataagggttgggcattttattgggggacaagtgagtggtctgcacaacagattacggaagcatggggagtagctgagaggttggacctggtaggcccaattgtggagcagccggagtataatctattgactaggcacaaggttgaatccgagtaccttcctctgtataccaactatggtctaggtcttacaacatggagtccgcttgcttctggagtgcttactggaaaatacaacaaaggaaa

SEQ ID NO: 14371 - DNA, 522 bp, Gossypium hirsutum
  Clone ID: LIB3829-033-Q1-K6-C10
cggacgcgtgggaaacaatcgtatgacccttttgattcaaaaaaaaaaaaaaatccatttcctcgaacgacactttgaccctggtctacctcgtctccgttctttgccgatcggacctttcgaccggtctgtgttaaagacagatcgagattttattgatggggacttcatctggttctaatattaaccaccagcatatgtgcgaagatgctacccccacgccaacaacaacaacaacaacaacaaccagggagcttgcaaacttcgttgtccttaatctccttagatcctcacacatcgtctaatgcccaagagcccagatttaactcggataacattcatgagtctccaactgagagtgctagctcacgagagacttggcctactgctgatgctatcacaacaaagaaaatggtaaatgggaaaactgaaaatgattgcactgagcagtctgtcattcgtcgtgtctctaatgctgaaaagataactcttcgagacattgctagagaaagagttgatgtt

SEQ ID NO: 14372 - DNA, 529 bp, Gossypium hirsutum
  Clone ID: LIB3829-033-Q1-K6-C11
gagaaacgcagcgccacatctccgcctactttgttgggtccccttatacaatagtggatcatacgtatgatgcagttgtggttggtgctggtggtgcggggctgagagcagccattggtctttcagagcatggatttaatactgcttgcataactaagcttttcccaactcgttcacatactgttgcggctcagggtggcataaatgctgctttgggaaatatgactgaagatgactggcgatggcacatgtatgacacagttaaaggaagtgattggttaggtgatcaggatgcaattcaatatatgtgcagggaggcaccaaaagccgtgattgaactcgagaattatgggctgcctttttctcgaacagaagatgggaaaatatatcagagagcatttggtggtcaaagccttgactttggaaaaggtggacaggcttatcgttgtgcatgtgctgctgatcgaacagggcatgctctactgcacactctctatggccaagctatgaaacataatacccaattctt

SEQ ID NO: 14373 - DNA, 525 bp, Gossypium hirsutum
  Clone ID: LIB3829-033-Q1-K6-C12
cggaatttaaccgatgaggcactagggttggttgtagatagttgctcgtcactgaagctgctaaaactcttcggatgtacacagatcaccgacgtgtttctaaaagggcattcgaatccccaggtccagatcattggactgaagatggcaacattattggaatttctcaacgtgtttgaaccccgagaagctccattgcggtattcaccggtcgataatctccactaattagttccagcttgaataacctcagtttgctagcttcagcttcattcattgacatatatacaaaagcaatactgattcattcaaagccttatcagaacataccctacaaaaataattaccatacaccagaccaagctaatctctgtagagatacatacttctcacttctttttggtgtcctattacattcacaatcatccaaaacctgtataatgctcaatgaaatgttttggatagttcacatgatatgaatcaaattgaagagagagaaattttctccattgttgagactatttc

SEQ ID NO: 14374 - DNA, 527 bp, Gossypium hirsutum
  Clone ID: LIB3829-033-Q1-K6-C2
ggaccttggtgggcaagaccgactacggacatcgtgggcaacatactatcgtggaactcatgctgttatcgtggtgatagacagtgtggatagggcgagaatcaccattatgaaagaggagctcttcaggttgctcgcacacgaggacctacaacattctgttatactcgtctttgcaaataaacaagacctaaaggatgcaatgaccccagctgagatcaccgatgccctttcgcttcacagcataaaaaatcacgattggcacatccaagcctgctccgcacttaccggagatggactgtacgatggtcttgggtggatcgcccagcacgttaccggaaaagcaccaagctgaaaaggatctgttcaatgagagaacgacccattcattctccatatatatactatggattctgctgattgatcaccgaaaaaaacagagtgaacttttgtgtaccatcttctgtatgaactttttctatattgtttttaaacatttcaatttgcctctcaagaaattgacattt

SEQ ID NO: 14375 - DNA, 523 bp, Gossypium hirsutum
  Clone ID: LIB3829-033-Q1-K6-C3
ctgatcaagtaaagccgtcagctgagttcgaggacaatgaaggaggcaatatcaatggtggcatggtggagcacaggaatggaggatgggatggtgggcgaggctatggaggaagaggtcgaggtcgtggtcgtggtaggggacgtggtttccgagggcatggaagagggtatggtggtggaaatatgcaacgggactcgggatattacaatggtaatggtccatcaggaccattgcctgcccagggtcgtggtcgtggacgaggtcgaggaaggggacgtggaggcggtcgtggtcagggtttcacacccgatggtccattccagaaaggtgcttgaaacaactagagcattaatccttagattcttctgcagaactttggctttagtaaacaaaaaatcatgtcctttttcgacattaattaaggctttgttttttacttggagaatttgtgttgtaagggacctttaatatattggtttttcattctaggccacaatttttgtaggaaagttggtaggga

SEQ ID NO: 14376 - DNA, 519 bp, Gossypium hirsutum
  Clone ID: LIB3829-033-Q1-K6-C4
ggaagacgctgccaacaacttcgctcgtggccactacactattggcaaagagatcgttgacttgtgcttggaccgtatcaggaagcttgctgataactgtaccggccttcaaggtttccttgttttcaacgctgttggtggaggcactggatctggtcttggctccctccttttggagcgtttgtctgttgattatggcaagaaatccaagttgggtttcactgtcttcccatcaccccaggtctccacatctgttgttgagccctacaacagtgtcctctcaactcactcccttttggagcacactgatgtggctgttcttcttgacaatgaggctatctatgacatttgcaggcgctctcttgacattgagcgacccacttacaccaatcttaaccgtcttgtctcccaggtgatctcctctttgactgcttcacttaggttcgatggtgccttgaacgtggatgtaacagaattccagaccaacttggtcccttacccaagaatacacttcatgct

SEQ ID NO: 14377 - DNA, 528 bp, Gossypium hirsutum
  Clone ID: LIB3829-033-Q1-K6-C5
ggcatgcccatgtgttagtggtcacataccctgcacaaggccacatcaaccctctcatccagtttgctaaacgcttaacctccaaaggagtgaaaaccaccgtagcgaccaccctttacaccgtcaagtccatcaatgtaagcagtacgatagctatcgagccgatctccgatggttttgatgaaggagggttcaaccaagctccaactctacaagcttacttggaatccttcaaagctgctgggtctaaaacattgacagagctgattatgaagcttaacaactcggggacaccagtctgttgcgttgcgtacgatttgatgctgccttgggctcttgatgtagctaaagatttcggtatttctgcagctatgatgttgacgaactcggcttcggtgtgctccttgtattggcatatcaatcaaggtggcttgaatttgcttgtgaaacaggaaaccttagcagccccgccaatgcctgggttgccttccctcgacgtatctgatttgccaagttttcttgctcagc

SEQ ID NO: 14378 - DNA, 524 bp, Gossypium hirsutum
  Clone ID: LIB3829-033-Q1-K6-C6
cccacgcgtccgcttttttagttccgacaaaagaaaacgaaaaaaaagaagaagaaatacaatcgttttctttttgaagtcgggttttagtttttggggtgaaaaaaatgttgggagtatttagcagtgcgatagtgtctccgccggacgagctggtggcggccggttgccgaactccatcacctaagataacggcggacgctctggtgaaacggttccttgagacgaactcctccggcgtgtccatgcacatcggagaccatgtccaattcgcttattctcaccataaagagtctcctttacagcccagatcatttgctgtgaaagacgaaatcttctgcttgtttgagggagcccttgataacttggggagtttaaagcagcaatatggtctggcaaagtcagcaaatgaagtgatattggtcattgaagcttacaaggcccttcgtgaccgagcaccttatcctccaaaccatgtggttggccatctaattgggagctttgctttcattgtctttgataaa

SEQ ID NO: 14379 - DNA, 520 bp, Gossypium hirsutum
  Clone ID: LIB3829-033-Q1-K6-C7
caatgatgttactttgggacagcttcctgtaactgataagcttgtgtattggtttttgactcgagtcttaacatctcaagatttgagtgatgcaaagaaggatccagcctacataacaaaagcatcactagaagcaataaagggtttccctgaagaaatagtggagctggtaaagaacacagagcccaatacgttgtacctgactgaacttcggtatcgggcgccatgggacctggtgcgcaccaagttcagaaaaggcacggtggttgtggcaggagatgcaatgcatgcgatgtgccctttcatctcacaaggtggaggggcgtcgctaggggacgcagtggtgttggcaagatgcttgtctgagaaacttaagcaagcagcggaaggtggaggaaagaggttggttgaggaagccctagatgagtatgtgcgggagcgtaggatgagggttttctggctttctttgcagacatatttcattggacttgtacaagacaatacgtctaaggtgaagaaa

SEQ ID NO: 14380 - DNA, 530 bp, Gossypium hirsutum
  Clone ID: LIB3829-033-Q1-K6-C8
gagcagtatctgagcaatgggaggttcaagaatgctgatcaccaagcagtggtgaactcagactgcagcagattgtcaatagccacgttccaaaatccagcacccgatgccacagtgtatccattgaagatcagagagggagataaaccaatccttgaggagcccatcacatttgctgagatgtataggaggaagatgagcaaggatcttgagcttgccaggctgaagaagctggccaaagagcagcaacagttgaaggagaaagaggctgagaatgagaagcccaagcttgaagccaagccattggaggaaatccttgcctaaaacttttaccctactgctggttattgtgttagcactgtttcgtcttccactatgttgtgttaattttatttcatttctacttttttttttgtggtgatacccgtttctatttattttctagcgagtaatgtatgtcatgtttcccacatttgatgcttgtggtctattatatactcgggtatcagtaatagatgaaaataaaattt

SEQ ID NO: 14381 - DNA, 526 bp, Gossypium hirsutum
  Clone ID: LIB3829-033-Q1-K6-C9
cgtgctgagttgattggacgaatatcccttttctgttggatgggatcatcaatatgtaccacattggttgagcttggggagcttggaaggctatctgcatcaatgaaaaagttggaaaagagacttaaggatagtgacaagtacaagaatgaggagtatcgtgcgaagctccaaaattcaaatgagaggactttggcccttgttaaagcgggaatggatatagtagtagcagttgggcttcttcaattggcaccgaagaaagtcacccctcgagtaacgggagcctttggatttgtttcatctctcatctcctgttatcagttacttccgtcaccgcccaagtctaagacaccttgaagttggaagcctgtttttcccgacaagcttgagtatctctatcgtttaaataattttattgaacttgtgctttaagttcataatggtgtaagctttgaagaatttgtaaacctggggcgacctgacccgattctcttcctctgtagcaccatctgtttcaaccaaataa

SEQ ID NO: 14382 - DNA, 529 bp, Gossypium hirsutum
  Clone ID: LIB3829-033-Q1-K6-D1
agatctgtctttgtgaaccatggggaccccagaaacttctcgagagccatgccctgatcggatcctcgatgatcttggtggtgctttcggtatgggtgctgtcggaggttcctgtcttccatttcttgaaagccactaacaactcccctagcggttctaggttgatcggaggaactcaagcagtgcggatgaatgcccctcgtgttggtggtagttttgctgtttggggtggcctgttttcaaccttcgattgcaccatggtatatgttcgacagaaagaagatctgtggaactcgattatagccagtgctgccactggagggttcctttctatgcgtcaaggactcggtgctgcttcaagatcggcattggttggtggggtattgcttgctttaatagaaggtgctgggatcatgttgaataaatttctgagtcaaccacagatgccaattatgatcgaagaaccagcaccgaatgtggccggtatgcctggatttccaatggggcaattgccgaaccaagcccctgc

SEQ ID NO: 14383 - DNA, 522 bp, Gossypium hirsutum
  Clone ID: LIB3829-033-Q1-K6-D10
ggattactggttcgaggacaatgctcttaagtgaagttggtctcgacttgtcaagatggagagaacttctgaagcagaaaggacaagttgctgatttagaaaaatttactcaacacgtgcatggaaaccattttattccaaatactgttttggtagattgtacggcggactctaatgttgcaagctgttaccatgactggttgcgtaaagggattcatgtgatcactccaaacaaaaaggccaattcaggaccacttgataagtacctaaagttgagagctcttcaacggcaatcctacacacattacttctatgaagcaactgtaggagcaggtcttccaattattagcactttacgaggcctccttgaaaccggggacagaatattgcgcattgagggcatttttagtggcactttgagctatattttcaacaacttcaccggtaataaaaccttcagtgaggtggtggcagaggcaaaagcagcaggttttactgaaccagatcctagggatgatctgt

SEQ ID NO: 14384 - DNA, 527 bp, Gossypium hirsutum
  Clone ID: LIB3829-033-Q1-K6-D11
gcacaatccctccaagtcttaaatatttgaaccttctgcaagtattagacctgagtcacaacaaactcaccggctcagtcccttatttcctctttaaccacccatctcttcaacaactcactctcgcattcaactcctttgattctttacaagctccctctaatctaggcacccaaagtgagcttattgctgttgacttgagcaataacgagctacaaggctggttacctcctttcttgccattaatgccaaacctgtcagctttatccatggaaaacaacaagttttcgggtatgatccctatccaatacgcattgagagccgctctgcctgcctccggaattgccccgtttgcaagactgttgcttggggggaactacttgttcggaccaattccagggccattgctggtactcaaaccagacactgcaaatgtcagccttgctgacaactgcttgatcaggtgcccatcgcgtttctttttctgccaaggtgctgaccagaaatctttaatggaatgcaagagt

SEQ ID NO: 14385 - DNA, 528 bp, Gossypium hirsutum
  Clone ID: LIB3829-033-Q1-K6-D12
aaattctaggtcattcttcttcttattcttcttcgtcttcgtcatcttctggaatggcccactttgggggtccatctgagaatccacggcggttatcaccgtcaccagcaccgcctggtggtggagtgaagcaaggtggagggtggggtttggttgaagctcctggtgagaacgataccgatgagtacgactgtgaaagtgaggagggtattgaagcactggtggatgaggcactaccaaagccagctccacctcgtagttcctcaaaaagaagcagagctgcggaggttcacaatttgtctgaaaagaggaggagaagtaggattaatgagaaaatgaaagcattgcaaaaccttattccaaattctaacaagactgataaggcttcgatgcttgatgaagctatcgagtacttaaagcagcttcagcttcaagttcagatgctatcaatgagaaatggattaagcttgcatccaatgtgcttgcctggagttttgcaaccactacagttttcccaaacaagaatga

SEQ ID NO: 14386 - DNA, 524 bp, Gossypium hirsutum
  Clone ID: LIB3829-033-Q1-K6-D3
cccaacatgggtgcaagtggtgctggggctggcactcttgattttttacggaacagtccacagtttcaagctttgcgagcaatggtgcaagccaatccacaaatattgcagcctatgcttcaagagttggggaaacaaaatcccaatttaatgagacttattcaagagcatcagggtgactttcttcgcttgatcaatgaacctgctgaaggtggagagggaaacattttggggcaattagctgaggcgatgccacaagctgtgcaagtcacacctgaggaacgtgaagccatagaacggcttgaagcaatggggtttgaccgtgcaactgtgctccaagtgttctttgcgtgcaacaagaatgaggaacttgcagccaactaccttttagatcatatgcatgattttcaggattgagttcgtaaaagaaatggcttggggaagtacaatatcattttctctttcgttctttgggtccattgtcattcatgttccccctcccctccccccaaaactccaccgac

SEQ ID NO: 14387 - DNA, 530 bp, Gossypium hirsutum
  Clone ID: LIB3829-033-Q1-K6-D4
gttaacaaacaaagttcttttcatgcacctgaaatatacaagggaaagctatttccatcttcatccagtgaacatgattcccgtgcgagggatcttggaagcacagatttattcggtcattctattggttctgttcaacttggttttgctccacctctagcagctcaaccagtattcaggactagtcaagaattagattcctcctgtaaaagtagctgcagacttttcggtttctccttgactgagggaagacatgatgctagcaaggaagaagacgtggtacaagcaacctcatcattggcgcctggagcgattttaccttgtgttagggaagagtttcacccaaagccttcgtcggtgacggacacagttggaagcaattatactgaagtaagcaatctctatgctgtcagagatatggttttagatattgcattgtagactagtcgtgaaaggcagatccacaaatgagttccatagacagggaaatagagcgttttacaatcaagttgaaaacctggaagcattag

SEQ ID NO: 14388 - DNA, 530 bp, Gossypium hirsutum
  Clone ID: LIB3829-033-Q1-K6-D5
ggcccttgaagaggcaaagaatgagagactttggtttaagacaaatctaaagctttgcaagatctggtttgatatgggcgagtatgggcgaatgagcaagattttgaaggaacttcacaaatcgtgtcaaagggaagatggtacagatgatcagaaaaagggaagtcagcttctggaggtatatgcaattgaaattcaaatgtatacggagacaaagaacaacaaaaagctcaagcaattataccagaaagcacttgctatcaagtctgctataccacatccacggatcatgggaataatccgtgaatgtggtggcaagatgcatatggctgagcgtcaatgggctgaggcagccacagatttctttgaggctttcaagaactatgatgaagctgggaatcagagacgcattcaatgtcttaaataccttgttctggctaatatgcttatggaatccgaagttaatccttttgatggccaggaagcaaagccgtacaaaaatgaccctgagattttggcaatgacaaatc
